United States Patent Application Publication US 2024/0398993 A1 - sequence listing, part 10

SEQ ID NO: 30398 - protein, 484 aa, Homo sapiens
MPSYTVTVATGSQWFAGTDDYIYLSLVGSAGCSEKHLLDKPFYNDFERGAVDSYDVTVDEELGEIQLVRIEKRKYWLNDDWYLKYITLKTPHGDYIEFPCYRWITGDVEVVLRDGRAKLARDDQIHILKQHRRKELETRQKQYRWMEWNPGFPLSIDAKCHKDLPRDIQFDSEKGVDFVLNYSKAMENLFINRFMHMFQSSWNDFADFEKIFVKISNTISERVMNHWQEDLMFGYQFLNGCNPVLIRRCTELPEKLPVTTEMVECSLERQLSLEQEVQQGNIFIVDFELLDGIDANKTDPCTLQFLAAPICLLYKNLANKIVPIAIQLNQIPGDENPIFLPSDAKYDWLLAKIWVRSSDFHVHQTITHLLRTHLVSEVFGIAMYRQLPAVHPIFKLLVAHVRFTIAINTKAREQLICECGLFDKANATGGGGHVQMVQRAMKDLTYASLCFPEAIKARGMESKEDIPYYFYRDDGLLVWEAIRT

SEQ ID NO: 30399 - protein, 299 aa, Homo sapiens
MAPWSHPSAQLQPVGGDAVSPALMVLLCLGLSLGPRTHVQAGNLSKATLWAEPGSVISRGNSVTIRCQGTLEAQEYRLVKEGSPEPWDTQNPLEPKNKARFSIPSMTEHHAGRYRCYYYSPAGWSEPSDPLELVVTGFYNKPTLSALPSPVVTSGENVTLQCGSRLRFDRFILTEEGDHKLSWTLDSQLTPSGQFQALFPVGPVTPSHRWMLRCYGSRRHILQVWSEPSDLLEIPVSGAADNLSPSQNKSDSGTASHLQDYAVENLIRMGMAGLILVVLGILIFQDWHSQRSPQAAAGR

SEQ ID NO: 30400 - protein, 287 aa, Homo sapiens
MAPWSHPSAQLQPVGGDAVSPALMVLLCLGNLSKATLWAEPGSVISRGNSVTIRCQGTLEAQEYRLVKEGSPEPWDTQNPLEPKNKARFSIPSMTEHHAGRYRCYYYSPAGWSEPSDPLELVVTGFYNKPTLSALPSPVVTSGENVTLQCGSRLRFDRFILTEEGDHKLSWTLDSQLTPSGQFQALFPVGPVTPSHRWMLRCYGSRRHILQVWSEPSDLLEIPVSGAADNLSPSQNKSDSGTASHLQDYAVENLIRMGMAGLILVVLGILIFQDWHSQRSPQAAAGR

SEQ ID NO: 30401 - protein, 265 aa, Homo sapiens
MAPWSHPSAQLQPVGGDAVSPALMVLLCLGLSLGPRTHVQAGNLSKATLWAEPGSVISRGNSVTIRCQGTLEAQEYRLVKEGSPEPWDTQNPLEPKNKARFSIPSMTEHHAGRYRCYYYSPAGWSEPSDPLELVVTGFYNKPTLSALPSPVVTSGENVTLQCGSRLRFDRFILTEEGDHKLSWTLDSQLTPSGQFQALFPVGPVTPSHRWMLRCYGSRRHILQVWSEPSDLLEIPVSGEEATVFSSTIQGSQTGCGELYRQGSPC

SEQ ID NO: 30402 - protein, 253 aa, Homo sapiens
MAPWSHPSAQLQPVGGDAVSPALMVLLCLGNLSKATLWAEPGSVISRGNSVTIRCQGTLEAQEYRLVKEGSPEPWDTQNPLEPKNKARFSIPSMTEHHAGRYRCYYYSPAGWSEPSDPLELVVTGFYNKPTLSALPSPVVTSGENVTLQCGSRLRFDRFILTEEGDHKLSWTLDSQLTPSGQFQALFPVGPVTPSHRWMLRCYGSRRHILQVWSEPSDLLEIPVSGEEATVFSSTIQGSQTGCGELYRQGSPC

SEQ ID NO: 30403 - protein, 325 aa, Homo sapiens
MAAMRKALPRRLVGLASLRAVSTSSMGTLPKRVKIVEVGPRDGLQNEKNIVSTPVKIKLIDMLSEAGLSVIETTSFVSPKWVPQMGDHTEVLKGIQKFPGINYPVLTPNLKGFEAAVAAGAKEVVIFGAASELFTKKNINCSIEESFQRFDAILKAAQSANISVRGYVSCALGCPYEGKISPAKVAEVTKKFYSMGCYEISLGDTIGVGTPGIMKDMLSAVMQEVPLAALAVHCHDTYGQALANTLMALQMGVSVVDSSVAGLGGCPYAQGASGNLATEDLVYMLEGLGIHTGVNLQKLLEAGNFICQALNRKTSSKVAQATCKL

SEQ ID NO: 30404 - protein, 254 aa, Homo sapiens
MAAMRKALPRRLVGLASLRAVSTSSMGTLPKRVKIVEVGPRDGLQNEKNIVSTPVKIKLIDMLSEAGLSVIETTSFVSPKWVPQMGDHTEVLKGIQKFPGINYPVLTPNLKGFEAAVTKKFYSMGCYEISLGDTIGVGTPGIMKDMLSAVMQEVPLAALAVHCHDTYGQALANTLMALQMGVSVVDSSVAGLGGCPYAQGASGNLATEDLVYMLEGLGIHTGVNLQKLLEAGNFICQALNRKTSSKVAQATCKL

SEQ ID NO: 30405 - protein, 191 aa, Homo sapiens
MAAMRKALPRRLVGLASLRAVSTSSMGTLPKRVKIVEVGPRDGLQNEKNIVSTPVKIKLIDMLSEAGLSVIETTSFVSPKWVPQMGDHTEVLKGIQKFPGINYPVLTPNLKGFEAAMGVSVVDSSVAGLGGCPYAQGASGNLATEDLVYMLEGLGIHTGVNLQKLLEAGNFICQALNRKTSSKVAQATCKL

SEQ ID NO: 30406 - protein, 406 aa, Homo sapiens
MVHCAGCKRPILDRFLLNVLDRAWHVKCVQCCECKCNLTEKCFSREGKLYCKNDFFRCFGTKCAGCAQGISPSDLVRRARSKVFHLNCFTCMMCNKQLSTGEELYIIDENKFVCKEDYLSNSSVAKENSLHSATTGSDPSLSPDSQDPSQDDAKDSESANVSDKEAGSNENDDQNLGAKRRGPRTTIKAKQLETLKAAFAATPKPTRHIREQLAQETGLNMRVIQVWFQNRRSKERRMKQLSALGARRHAFFRSPRRMRPLVDRLEPGELIPNGPFSFYGDYQSEYYGPGGNYDFFPQGPPSSQAQTPVDLPFVPSSGPSGTPLGGLEHPLPGHHPSSEAQRFTDILAHPPGDSPSPEPSLPGPLHSMSAEVFGPSPPFSSLSVNGGASYGNHLSHPPEMNEAAVW

SEQ ID NO: 30407 - protein, 161 aa, Homo sapiens
MKAVSPVRPSGRKAPSGCGGGELALRCLAEHGHSLGGSAAAAAAAAAARCKAAEAAADEPALCLQCDMNDCYSRLRRLVPTIPPNKKVSKVEILQHVIDYILDLQLALETHPALLRQPPPPAPPHHPAGTCPAAPPRTPLTALNTDPAGAVNKQGDSILCR

SEQ ID NO: 30408 - protein, 448 aa, Homo sapiens
MIPTFTALLCLGLSLGPRTHMQAGPLPKPTLWAEPGSVISWGNSVTIWCQGTLEAREYRLDKEESPAPWDRQNPLEPKNKARFSIPSMTEDYAGRYRCYYRSPVGWSQPSDPLELVMTGAYSKPTLSALPSPLVTSGKSVTLLCQSRSPMDTFLLIKERAAHPLLHLRSEHGAQQHQAEFPMSPVTSVHGGTYRCFSSHGFSHYLLSHPSDPLELIVSGSLEDPRPSPTRSVSTAAGPEDQPLMPTGSVPHSGLRRHWEVLIGVLVVSILLLSLLLFLLLQHWRQGKHRTLAQRQADFQRPPGAAEPEPKDGGLQRRSSPAADVQGENFCAAVKNTQPEDGVEMDTRQSPHDEDPQAVTYAKVKHSRPRREMASPPSPLSGEFLDTKDRQAEEDRQMDTEAAASEAPQDVTYAQLHSFTLRQKATEPPPSQEGASPAEPSVYATLAIH

SEQ ID NO: 30409 - protein, 447 aa, Homo sapiens
MIPTFTALLCLGLSLGPRTHMQAGPLPKPTLWAEPGSVISWGNSVTIWCQGTLEAREYRLDKEESPAPWDRQNPLEPKNKARFSIPSMTEDYAGRYRCYYRSPVGWSQPSDPLELVMTGAYSKPTLSALPSPLVTSGKSVTLLCQSRSPMDTFLLIKERAAHPLLHLRSEHGAQQHQAEFPMSPVTSVHGGTYRCFSSHGFSHYLLSHPSDPLELIVSGSLEDPRPSPTRSVSTAAGPEDQPLMPTGSVPHSGLRRHWEVLIGVLVVSILLLSLLLFLLLQHWRQGKHRTLAQRQADFQRPPGAAEPEPKDGGLQRRSSPAADVQGENFCAAVKNTQPEDGVEMDTRSPHDEDPQAVTYAKVKHSRPRREMASPPSPLSGEFLDTKDRQAEEDRQMDTEAAASEAPQDVTYAQLHSFTLRQKATEPPPSQEGASPAEPSVYATLAIH

SEQ ID NO: 30410 - protein, 449 aa, Homo sapiens
MIPTFTALLCLGLSLGPRTHMQAGPLPKPTLWAEPGSVISWGNSVTIWCQGTLEAREYRLDKEESPAPWDRQNPLEPKNKARFSIPSMTEDYAGRYRCYYRSPVGWSQPSDPLELVMTGAYSKPTLSALPSPLVTSGKSVTLLCQSRSPMDTFLLIKERAAHPLLHLRSEHGAQQHQAEFPMSPVTSVHGGTYRCFSSHGFSHYLLSHPSDPLELIVSGSLEDPRPSPTRSVSTAAGPEDQPLMPTGSVPHSGLRRHWEVLIGVLVVSILLLSLLLFLLLQHWRQGKHRTLAQRQADFQRPPGAAEPEPKDGGLQRRSSPAADVQGENFSGAAVKNTQPEDGVEMDTRQSPHDEDPQAVTYAKVKHSRPRREMASPPSPLSGEFLDTKDRQAEEDRQMDTEAAASEAPQDVTYAQLHSFTLRQKATEPPPSQEGASPAEPSVYATLAIH

SEQ ID NO: 30411 - protein, 590 aa, Homo sapiens
MTLTLSVLICLGLSVGPRTCVQAGTLPKPTLWAEPASVIARGKPVTLWCQGPLETEEYRLDKEGLPWARKRQNPLEPGAKAKFHIPSTVYDSAGRYRCYYETPAGWSEPSDPLELVATGFYAEPTLLALPSPVVASGGNVTLQCDTLDGLLTFVLVEEEQKLPRTLYSQKLPKGPSQALFPVGPVTPSCRWRFRCYYYYRKNPQVWSNPSDLLEILVPGVSRKPSLLIPQGSVVARGGSLTLQCRSDVGYDIFVLYKEGEHDLVQGSGQQPQAGLSQANFTLGPVSRSHGGQYRCYGAHNLSPRWSAPSDPLDILIAGLIPDIPALSVQPGPKVASGENVTLLCQSWHQIDTFFLTKEGAAHPPLCLKSKYQSYRHQAEFSMSPVTSAQGGTYRCYSAIRSYPYLLSSPSYPQELVVSGPSGDPSLSPTGSTPTPGPEDQPLTPTGLDPQSGLGRHLGVVTGVSVAFVLLLFLLLFLLLRHRHQSKHRTSAHFYRPAGAAGPEPKDQGLQKRASPVADIQEEILNAAVKDTQPKDGVEMDARAAASEAPQDVTYAQLHSLTLRREATEPPPSQEREPPAEPSIYAPLAIH

SEQ ID NO: 30412 - protein, 491 aa, Homo sapiens
MTLTLSVLICLGLSVGPRTCVQAGTLPKPTLWAEPASVIARGKPVTLWCQGPLETEEYRLDKEGLPWARKRQNPLEPGAKAKFHIPSTVYDSAGRYRCYYETPAGWSEPSDPLELVATGVSRKPSLLIPQGSVVARGGSLTLQCRSDVGYDIFVLYKEGEHDLVQGSGQQPQAGLSQANFTLGPVSRSHGGQYRCYGAHNLSPRWSAPSDPLDILIAGLIPDIPALSVQPGPKVASGENVTLLCQSWHQIDTFFLTKEGAAHPPLCLKSKYQSYRHQAEFSMSPVTSAQGGTYRCYSAIRSYPYLLSSPSYPQELVVSGPSGDPSLSPTGSTPTPAGPEDQPLTPTGLDPQSGLGRHLGVVTGVSVAFVLLLFLLLFLLLRHRHQSKHRTSAHFYRPAGAAGPEPKDQGLQKRASPVADIQEEILNAAVKDTQPKDGVEMDARAAASEAPQDVTYAQLHSLTLRREATEPPPSQEREPPAEPSIYAPLAIH

SEQ ID NO: 30413 - protein, 591 aa, Homo sapiens
MTLTLSVLICLGLSVGPRTCVQAGTLPKPTLWAEPASVIARGKPVTLWCQGPLETEEYRLDKEGLPWARKRQNPLEPGAKAKFHIPSTVYDSAGRYRCYYETPAGWSEPSDPLELVATGFYAEPTLLALPSPVVASGGNVTLQCDTLDGLLTFVLVEEEQKLPRTLYSQKLPKGPSQALFPVGPVTPSCRWRFRCYYYYRKNPQVWSNPSDLLEILVPGVSRKPSLLIPQGSVVARGGSLTLQCRSDVGYDIFVLYKEGEHDLVQGSGQQPQAGLSQANFTLGPVSRSHGGQYRCYGAHNLSPRWSAPSDPLDILIAGLIPDIPALSVQPGPKVASGENVTLLCQSWHQIDTFFLTKEGAAHPPLCLKSKYQSYRHQAEFSMSPVTSAQGGTYRCYSAIRSYPYLLSSPSYPQELVVSGPSGDPSLSPTGSTPTPAGPEDQPLTPTGLDPQSGLGRHLGVVTGVSVAFVLLLFLLLFLLLRHRHQSKHRTSAHFYRPAGAAGPEPKDQGLQKRASPVADIQEEILNAAVKDTQPKDGVEMDARAAASEAPQDVTYAQLHSLTLRREATEPPPSQEREPPAEPSIYAPLAIH

SEQ ID NO: 30414 - protein, 406 aa, Homo sapiens
MLFHSLSGPEVHGVIDEMDRRAKSEAPAISSAIDRGDTETTMPSISSDRAALCAGCGGKISDRYYLLAVDKQWHMRCLKCCECKLNLESELTCFSKDGSIYCKEDYYRRFSVQRCARCHLGISASEMVMRARDLVYHLNCFTCTTCNKMLTTGDHFGMKDSLVYCRLHFEALLQGEYPAHFNHADVAAAAAAAAAAKSAGLGAAGANPLGLPYYNGVGTVQKGRPRKRKSPGPGADLAAYNAALSCNENDAEHLDRDQPYPSSQKTKRMRTSFKHHQLRTMKSYFAINHNPDAKDLKQLAQKTGLTKRVLQVWFQNARAKFRRNLLRQENTGVDKSTDAALQTGTPSGPASELSNASLSPSSTPTTLTDLTSPTLPTVTSVLTSVPGNLEGHEPHSPSQTTLTNLF

SEQ ID NO: 30415 - protein, 110 aa, Homo sapiens
MAPRGCIVAVFAIFCISRLLCSHGAPVAPMTPYLMLCQPHKRCGDKFYDPLQHCCYDDAVVPLARTQTCGNCTFRVCFEQCCPWTFMVKLINQNCDSARTSDDRLCRSVS

SEQ ID NO: 30416 - protein, 599 aa, Homo sapiens
MLCLGWIFLWLVAGERIKGFNISGCSTKKLLWTYSTRSEEEFVLFCDLPEPQKSHFCHRNRLSPKQVPEHLPFMGSNDLSDVQWYQQPSNGDPLEDIRKSYPHIIQDKCTLHFLTPGVNNSGSYICRPKMIKSPYDVACCVKMILEVKPQTNASCEYSASHKQDLLLGSTGSISCPSLSCQSDAQSPAVTWYKNGKLLSVERSNRIVVDEVYDYHQGTYVCDYTQSDTVSSWTVRAVVQVRTIVGDTKLKPDILDPVEDTLEVELGKPLTISCKARFGFERVFNPVIKWYIKDSDLEWEVSVPEAKSIKSTLKDEIIERNIILEKVTQRDLRRKFVCFVQNSIGNTTQSVQLKEKRGVVLLYILLGTIGTLVAVLAASALLYRHWIEIVLLYRTYQSKDQTLGDKKDFDAFVSYAKWSSFPSEATSSLSEEHLALSLFPDVLENKYGYSLCLLERDVAPGGVYAEDIVSIIKRSRRGIFILSPNYVNGPSIFELQAAVNLALDDQTLKLILIKFCYFQEPESLPHLVKKALRVLPTVTWRGLKSVPPNSRFWAKMRYHMPVKNSQGFTWNQLRITSRIFQWKGLSRTETTGRSSQPKEW

SEQ ID NO: 30417 - protein, 457 aa, Homo sapiens
MILEVKPQTNASCEYSASHKQDLLLGSTGSISCPSLSCQSDAQSPAVTWYKNGKLLSVERSNRIVVDEVYDYHQGTYVCDYTQSDTVSSWTVRAVVQVRTIVGDTKLKPDILDPVEDTLEVELGKPLTISCKARFGFERVFNPVIKWYIKDSDLEWEVSVPEAKSIKSTLKDEIIERNIILEKVTQRDLRRKFVCFVQNSIGNTTQSVQLKEKRGVVLLYILLGTIGTLVAVLAASALLYRHWIEIVLLYRTYQSKDQTLGDKKDFDAFVSYAKWSSFPSEATSSLSEEHLALSLFPDVLENKYGYSLCLLERDVAPGGVYAEDIVSIIKRSRRGIFILSPNYVNGPSIFELQAAVNLALDDQTLKLILIKFCYFQEPESLPHLVKKALRVLPTVTWRGLKSVPPNSRFWAKMRYHMPVKNSQGFTWNQLRITSRIFQWKGLSRTETTGRSSQPKEW

SEQ ID NO: 30418 - protein, 149 aa, Homo sapiens
MLCLGWIFLWLVAGERIKGFNISGCSTKKLLWTYSTRSEEEFVLFCDLPEPQKSHFCHRNRLSPKQVPEHLPFMGSNDLSDVQWYQQPSNGDPLEDIRKSYPHIIQDKCTLHFLTPGVNNSGSYICRPKMIKYDPNTFLSENISKSSII

SEQ ID NO: 30419 - protein, 126 aa, Homo sapiens
MLCLGWIFLWLVAGERIKGFNISGCSTKKLLWTYSTRSEEEFVLFCDLPEPQKSHFCHRNRLSPKQVPEHLPFMGSNDLSDVQWYQQPSNGDPLEDIRKSYPHIIQDKCTLHFLTPGLGHIFVDPR

SEQ ID NO: 30420 - protein, 176 aa, Homo sapiens
MKASSLAFSLLSAAFYLLWTPSTGLKTLNLGSCVIATNLQEIRNGFSEIRGSVQAKDGNIDIRILRRTESLQDTKPANRCCLLRHLLRLYLDRVFKNYQTPDHYTLRKISSLANSFLTIKKDLRLCHAHMTCHCGEEAMKKYSQILSHFEKLEPQAAVVKALGELDILLQWMEETE

SEQ ID NO: 30421 - protein, 151 aa, Homo sapiens
MKASSLAFSLLSAAFYLLWTPSTGLKTLNLGSCVIATNLQEIRNGFSEIRGSVQAKDGNIDIRILRRTESLQDTKPANRCCLLRHLLRLYLDRVFKNYQTPDHYTLRKISSLANSFLTIKKDLRLCLEPQAAVVKALGELDILLQWMEETE

SEQ ID NO: 30422 - protein, 468 aa, Homo sapiens
MLAVGCALLAALLAAPGAALAPRRCPAQEVARGVLTSLPGDSVTLTCPGVEPEDNATVHWVLRKPAAGSHPSRWAGMGRRLLLRSVQLHDSGNYSCYRAGRPAGTVHLLVDVPPEEPQLSCFRKSPLSNVVCEWGPRSTPSLTTKAVLLVRKFQNSPAEDFQEPCQYSQESQKFSCQLAVPEGDSSFYIVSMCVASSVGSKFSKTQTFQGCGILQPDPPANITVTAVARNPRWLSVTWQDPHSWNSSFYRLRFELRYRAERSKTFTTWMVKDLQHHCVIHDAWSGLRHVVQLRAQEEFGQGEWSEWSPEAMGTPWTESRSPPAENEVSTPMQALTTNKDDDNILFRDSANATSLPVQDSSSVPLPTFLVAGGSLAFGTLLCIAIVLRFKKTWKLRALKEGKTSMHPPYSLGQLVPERPRPTPVLVPLISPPVSPSSLGSDNTSSHNRPDARDPRSPYDISNTDYFFPR

SEQ ID NO: 30423 - protein, 365 aa, Homo sapiens [sequence omitted]

SEQ ID NO: 30424 - protein, 606 aa, Homo sapiens
MLHTAISCWQPFLGLAVVLIFMGSTIGCPARCECSAQNKSVSCHRRRLIAIPEGIPIETKILDLSKNRLKSVNPEEFISYPLLEEIDLSDNIIANVEPGAFNNLFNLRSLRLKGNRLKLVPLGVFTGLSNLTKLDISENKIVILLDYMFQDLHNLKSLEVGDNDLVYISHRAFSGLLSLEQLTLEKCNLTAVPTEALSHLRSLISLHLKHLNINNMPVYAFKRLFHLKHLEIDYWPLLDMMPANSLYGLNLTSLSVTNTNLSTVPFLAFKHLVYLTHLNLSYNPISTIEAGMFSDLIRLQELHIVGAQLRTIEPHSFQGLRFLRVLNVSQNLLETLEENVFSSPRALEVLSINNNPLACDCRLLWILQRQPTLQFGGQQPMCAGPDTIRERSFKDFHSTALSFYFTCKKPKIREKKLQHLLVDEGQTVQLECSADGDPQPVISWVTPRRRFITTKSNGRATVLGDGTLEIRFAQDQDSGMYVCIASNAAGNDTFTASLTVKGFASDRFLYANRTPMYMTDSNDTISNGTNANTFSLDLKTILVSTAMGCFTFLGVVLFCFLLLFVWSRGKGKHKNSIDLEYVPRKNNGAVVEGEVAGPRRFNMKMI

SEQ ID NO: 30425 - protein, 1683 aa, Homo sapiens
MKKIRICHIFTFYSWMSYDVLFQRTELGALEIWRQLICAHVCICVGWLYLRDRVCSKKDIILRTEQNSGRTILIKAVTEKNFETKDFRASLENGVLLCDLINKLKPGVIKKINRLSTPIAGLDNINVFLKACEQIGLKEAQLFHPGDLQDLSNRVTVKQEETDRRVKNVLITLYWLGRKAQSNPYYNGPHLNLKAFENLLGQALTKALEDSSFLKRSGRDSGYGDIWCPERGEFLAPPRHHKREDSFESLDSLGSRSLTSCSSDITLRGGREGFESDTDSEFTFKMQDYNKDDMSYRRISAVEPKTALPFNRFLPNKSRQPSYVPAPLRKKKPDKHEDNRRSWASPVYTEADGTFSSNQRRIWGTNVENWPTVQGTSKSSCYLEEEKAKTRSIPNIVKDDLYVRKLSPVMPNPGNAFDQFLPKCWTPEDVNWKRIKRETYKPWYKEFQGFSQFLLLQALQTYSDDILSSETHTKIDPTSGPRLITRRKNLSYAPGYRRDDLEMAALDPDLENDDFFVRKTGVFHANPYVLRAFEDFRKFSEQDDSVERDIILQCREGELVLPDLEKDDMIVRRIPAQKKEVPLSGAPDRYHPVPFPEPWTLPPEIQAKFLCVFERTCPSKEKSNSCRILVPSYRQKKDDMLTRKIQSWKLGTTVPPISFTPGPCSEADLKRWEAIREASRLRHKKRLMVERLFQKIYGENGSKSMSDVSAEDVQNLRQLRYEEMQKIKSQLKEQDQKWQDDLAKWKDRRKSYTSDLQKKKEEREEIEKQALEKSKRSSKTFKEMLQDRESQNQKSTVPSRRRMYSFDDVLEEGKRPPTMTVSEASYQSERVEEKGATYPSEIPKEDSTTFAKREDRVTTEIQLPSQSPVEEQSPASLSSLRSRSTQMESTRVSASLPRSYRKTDTVRLTSVVTPRPFGSQTRGISSLPRSYTMDDAWKYNGDVEDIKRTPNNVVSTPAPSPDASQLASSLSSQKEVAATEEDVTRLPSPTSPFSSLSQDQAATSKATLSSTSGLDLMSESGEGEISPQREVSRSQDQFSDMRISINQTPGKSLDFGFTIKWDIPGIFVASVEAGSPAEFSQLQVDDEIIAINNTKFSYNDSKEWEEAMAKAQETGHLVMDVRRYGKAGSPETKWIDATSGIYNSEKSSNLSVTTDFSESLQSSNIESKEINGIHDESNAFESKASESISLKNLKRRSQFFEQGSSDSVVPDLPVPTISAPSRWVWDQEEERKRQERWQKEQDRLLQEKYQREQEKLREEWQRAKQEAERENSKYLDEELMVLSSNSMSLTTREPSLATWEATWSEGSKSSDREGTRAGEEERRQPQEEVVHEDQGKKPQDQLVIERERKWEQQLQEEQEQKRLQAEAEEQKRPAEEQKRQAEIERETSVRIYQYRRPVDSYDIPKTEEASSGFLPGDRNKSRSTTELDDYSTNKNGNNKYLDQIGNMTSSQRRSKKEQVPSGAELERQQILQEMRKRTPLHNDNSWIRQRSASVNKEPVSLPGIMRRGESLDNLDSPRSNSWRQPPWLNQPTGFYASSSVQDFSRPPPQLVSTSNRAYMRNPSSSVPPPSAGSVKTSTTGVATTQSPTPRSHSPSASQSGSQLRNRSVSGKRICSYCNNILGKGAAMIIESLGLCYHLHCFKCVACECDLGGSSSGAEVRIRNHQLYCNDCYLRFKSGRPTAM

SEQ ID NO: 30426 - protein, 1670 aa, Homo sapiens
MKKIRICHIFTFYSWMSYDVLFQRTELGALEIWRQLICAHVCICVGWLYLRDRVCSKKDIILRTEQNSGRTILIKAVTEKNFETKDFRASLENGVLLCDLINKLKPGVIKKINRLSTPIAGLDNINVFLKACEQIGLKEAQLFHPGDLQDLSNRVTVKQEETDRRVKNVLITLYWLGRKAQSNPYYNGPHLNLKAFENLLGQALTKALEDSSFLKRSGRDSGYGDIWCPERGEFLAPPRHHKREDSFESLDSLGSRSLTSCSSDITLRGGREGFESDTDSEFTFKMQDYNKDDMSYRRISAVEPKTALPFNRFLPNKSRQPSYVPAPLRKKKPDKHEDNRRSWASPVYTEADGTFSSNQRRIWGTNVENWPTVQGTSKSSCYLEEEKAKTRSIPNIVKDDLYVRKLSPVMPNPGNAFDQFLPKCWTPEDVNWKRIKRETYKPWYKEFQGFSQFLLLQALQTYSDDILSSETHTKIDPTSGPRLITRRKNLSYAPGYRRDDLEMAALDPDLENDDFFVRKTGVFHANPYVLRAFEDFRKFSEQDDSVERDIILQCREGELVLPDLEKDDMIVRRIPAQKKEVPLSGAPDRYHPVPFPEPWTLPPEIQAKFLCVFERTCPSKEKSNSCRILVPSYRQKKDDMLTRKIQSWKLGTTVPPISFTPGPCSEADLKRWEAIREASRLRHKKRLMVERLFQKIYGENGSKSMSDVSAEDVQNLRQLRYEEMQKIKSQLKEQDQKWQDDLAKWKDRRKSYTSDLQKKKEEREEIEKQALEKSKRSSKTFKEMLQDRESQNQKSTVPSRRRMYSFDDVLEEGKRPPTMTVSEASYQSERVEEKGATYPSEIPKEDSTTFAKREDRVTTEIQLPSQSPVEEQSPASLSSLRSRSTQMESTRVSASLPRSYRKTDTVRLTSVVTPRPFGSQTRGISSLPRSYTMDDAWKYNGDVEDIKRTPNNVVSTPAPSPDASQLASSLSSQKEVAATEEDVTRLPSPTSPFSSLSQDQAATSKATLSSTSGLDLMSESGEGEISPQREVSRSQDQFSDMRISINQTPGKSLDFGFTIKWDIPGIFVASVEAGSPAEFSQLQVDDEIIAINNTKFSYNDSKEWEEAMAKAQETGHLVMDVRRYGKAGSPETKWIDATSGIYNSEKSSNLSVTTDFSESLQSSNIESKEINGIHDESNAFESKASESISLKNLKRRSQFFEQGSSDSVVPDLPVPTISAPSRWVWDQEEERKRQERWQKEQDRLLQEKYQREQEKLREEWQRAKQEAERENSKYLDEELMVLSSNSMSLTTREPSLATWEATWSEGSKSSDREGTRAGEEERRQPQEEVVHEDQGKKPQDQLVIERERKWEQQLQEEQEQKRLQAEAEEQKRPAEEQKRQAEIERETSVRIYQYRRPVDSYDIPKTEEASSGFLPGDRNKSRSTTELDDYSTNKNGNNKYLDQIGNMTSSQRRSKKEQVPSGAELERQQILQEMRKRTPLHNDNSWIRQRSASVNKEPVSLPGIMRRGESLDNLDSPRSNSWRQPPWLNQPTGFYASSSVQDFSRPPPQLVSTSNRAYMRNPSSSVPPPSAGSVKTSTTGVATTQSPTPRSHSPSASQSGSQLRNSVLPVSVTSEALPQELKSGSETTNCTATTAISDSNLDGQPPCDVSLHTKALLQIEEEVVAAHVDL

SEQ ID NO: 30427 - protein, 1349 aa, Homo sapiens
MKKIRICHIFTFYSWMSYDVLFQRTELGALEIWRQLICAHVCICVGWLYLRDRVCSKKDIILRTEQNSGRTILIKAVTEKNFETKDFRASLENGVLLCDLINKLKPGVIKKINRLSTPIAGLDNINVFLKACEQIGLKEAQLFHPGDLQDLSNRVTVKQEETDRRVKNVLITLYWLGRKAQSNPYYNGPHLNLKAFENLLGQALTKALEDSSFLKRSGRDSGYGDIWCPERGEFLAPPRHHKREDSFESLDSLGSRSLTSCSSDITLRGGREGFESDTDSEFTFKMQDYNKDDMSYRRISAVEPKTALPFNRFLPNKSRQPSYVPAPLRKKKPDKHEDNRRSWASPVYTEADGTFSRLFQKIYGENGSKSMSDVSAEDVQNLRQLRYEEMQKIKSQLKEQDQKWQDDLAKWKDRRKSYTSDLQKKKEEREEIEKQALEKSKRSSKTFKEMLQDRESQNQKSTVPSRRRMYSFDDVLEEGKRPPTMTVSEASYQSERVEEKGATYPSEIPKEDSTTFAKREDRVTTEIQLPSQSPVEEQSPASLSSLRSRSTQMESTRVSASLPRSYRKTDTVRLTSVVTPRPFGSQTRGISSLPRSYTMDDAWKYNGDVEDIKRTPNNVVSTPAPSPDASQLASSLSSQKEVAATEEDVTRLPSPTSPFSSLSQDQAATSKATLSSTSGLDLMSESGEGEISPQREVSRSQDQFSDMRISINQTPGKSLDFGFTIKWDIPGIFVASVEAGSPAEFSQLQVDDEIIAINNTKFSYNDSKEWEEAMAKAQETGHLVMDVRRYGKAGSPETKWIDATSGIYNSEKSSNLSVTTDFSESLQSSNIESKEINGIHDESNAFESKASESISLKNLKRRSQFFEQGSSDSVVPDLPVPTISAPSRWVWDQEEERKRQERWQKEQDRLLQEKYQREQEKLREEWQRAKQEAERENSKYLDEELMVLSSNSMSLTTREPSLATWEATWSEGSKSSDREGTRAGEEERRQPQEEVVHEDQGKKPQDQLVIERERKWEQQLQEEQEQKRLQAEAEEQKRPAEEQKRQAEIERETSVRIYQYRRPVDSYDIPKTEEASSGFLPGDRNKSRSTTELDDYSTNKNGNNKYLDQIGNMTSSQRRSKKEQVPSGAELERQQILQEMRKRTPLHNDNSWIRQRSASVNKEPVSLPGIMRRGESLDNLDSPRSNSWRQPPWLNQPTGFYASSSVQDFSRPPPQLVSTSNRAYMRNPSSSVPPPSAGSVKTSTTGVATTQSPTPRSHSPSASQSGSQLRNRSVSGKRICSYCNNILGKGAAMIIESLGLCYHLHCFKCVACECDLGGSSSGAEVRIRNHQLYCNDCYLRFKSGRPTAM

SEQ ID NO: 30428 - protein, 1614 aa, Homo sapiens
MKKIRICHIFTFYSWMSYDVLFQRTELGALEIWRQLICAHVCICVGWLYLRDRVCSKKDIILRTEQNSGRTILIKAVTEKNFETKDFRASLENGVLLCDLINKLKPGVIKKINRLSTPIAGLDNINVFLKACEQIGLKEAQLFHPGDLQDLSNRVTVKQEETDRRVKNVLITLYWLGRKAQSNPYYNGPHLNLKAFENLLGQALTKALEDSSFLKRSGRDSGYGDIWCPERGEFLAPPRHHKREDSFESLDSLGSRSLTSCSSDITLRGGREGFESDTDSEFTFKMQDYNKDDMSYRRISAVEPKTALPFNRFLPNKSRQPSYVPAPLRKKKPDKHEDNRRSWASPVYTEADGTFSSNQRRIWGTNVENWPTVQGTSKSSCYLEEEKAKTRSIPNIVKDDLYVRKLSPVMPNPGNAFDQFLPKCWTPEDVNWKRIKRETYKPWYKEFQGFSQFLLLQALQTYSDDILSSETHTKIDPTSGPRLITRRKNLSYAPGYRRDDLEMAALDPDLENDDFFVRKTGVFHANPYVLRAFEDFRKFSEQDDSVERDIILQCREGELVLPDLEKDDMIVRRIPAQKKEVPLSGAPDRYHPVPFPEPWTLPPEIQAKFLCVFERTCPSKEKSNSCRILVPSYRQKKDDMLTRKIQSWKLGTTVPPISFTPGPCSEADLKRWEAIREASRLRHKKRLMVERLFQKIYGENGSKSMSDVSAEDVQNLRQLRYEEMQKIKSQLKEQDQKWQDDLAKWKDRRKSYTSDLQKKKEEREEIEKQALEKSKRSSKTFKEMLQDRESQNQKSTVPSRRRMYSFDDVLEEGKRPPTMTVSEASYQSERVEEKGATYPSEIPKEDSTTFAKREDRVTTEIQLPSQSPVEEQSPASLSSLRSRSTQMESTRVSASLPRSYRKTDTVRLTSVVTPRPFGSQTRGISSLPRSYTMDDAWKYNGDVEDIKRTPNNVVSTPAPSPDASQLASSLSSQKEVAATEEDVTRLPSPTSPFSSLSQDQAATSKATLSSTSGLDLMSESGEGEISPQREVSRSQDQFSDMRISINQTPGKSLDFGFTIKWDIPGIFVASVEAGSPAEFSQLQVDDEIIAINNTKFSYNDSKEWEEAMAKAQETGHLVMDVRRYGKAGSPETKWIDATSGIYNSEKSSNLSVTTDFSESLQSSNIESKEINGIHDESNAFESKASESISLKNLKRRSQFFEQGSSDSVVPDLPVPTISAPSRWVWDQEEERKRQERWQKEQDRLLQEKYQREQEKLREEWQRAKQEAERENSKYLDEELMVLSSNSMSLTTREPSLATWEATWSEGSKSSDREGTRAGEEERRQPQEEVVHEDQGKKPQDQLVIERERKWEQQLQEEQEQKRLQAEAEEQKRPAEEQKRQAEIERETSVRIYQYRRPVDSYDIPKTEEASSGFLPGDRNKSRSTTELDDYSTNKNGNNKYLDQIGNMTSSQRRSKKEQVPSGAELERQQILQEMRKRTPLHNDNSWIRQRSASVNKEPVSLPGIMRRGESLDNLDSPRSNSWRQPPWLNQPTGFYASSSVQDFSRPPPQLVSTSNRAYMRNPSSSVPPPSAGSVKTSTTGVATTQSPTPRSHSPSASQSGSQLRNSWTANRHVM

SEQ ID NO: 30429 - protein, 1385 aa, Homo sapiens
MQDYNKDDMSYRRISAVEPKTALPFNRFLPNKSRQPSYVPAPLRKKKPDKHEDNRRSWASPVYTEADGTFSSNQRRIWGTNVENWPTVQGTSKSSCYLEEEKAKTRSIPNIVKDDLYVRKLSPVMPNPGNAFDQFLPKCWTPEDVNWKRIKRETYKPWYKEFQGFSQFLLLQALQTYSDDILSSETHTKIDPTSGPRLITRRKNLSYAPGYRRDDLEMAALDPDLENDDFFVRKTGVFHANPYVLRAFEDFRKFSEQDDSVERDIILQCREGELVLPDLEKDDMIVRRIPAQKKEVPLSGAPDRYHPVPFPEPWTLPPEIQAKFLCVFERTCPSKEKSNSCRILVPSYRQKKDDMLTRKIQSWKLGTTVPPISFTPGPCSEADLKRWEAIREASRLRHKKRLMVERLFQKIYGENGSKSMSDVSAEDVQNLRQLRYEEMQKIKSQLKEQDQKWQDDLAKWKDRRKSYTSDLQKKKEEREEIEKQALEKSKRSSKTFKEMLQDRESQNQKSTVPSRRRMYSFDDVLEEGKRPPTMTVSEASYQSERVEEKGATYPSEIPKEDSTTFAKREDRVTTEIQLPSQSPVEEQSPASLSSLRSRSTQMESTRVSASLPRSYRKTDTVRLTSVVTPRPFGSQTRGISSLPRSYTMDDAWKYNGDVEDIKRTPNNVVSTPAPSPDASQLASSLSSQKEVAATEEDVTRLPSPTSPFSSLSQDQAATSKATLSSTSGLDLMSESGEGEISPQREVSRSQDQFSDMRISINQTPGKSLDFGFTIKWDIPGIFVASVEAGSPAEFSQLQVDDEIIAINNTKFSYNDSKEWEEAMAKAQETGHLVMDVRRYGKAGSPETKWIDATSGIYNSEKSSNLSVTTDFSESLQSSNIESKEINGIHDESNAFESKASESISLKNLKRRSQFFEQGSSDSVVPDLPVPTISAPSRWVWDQEEERKRQERWQKEQDRLLQEKYQREQEKLREEWQRAKQEAERENSKYLDEELMVLSSNSMSLTTREPSLATWEATWSEGSKSSDREGTRAGEEERRQPQEEVVHEDQGKKPQDQLVIERERKWEQQLQEEQEQKRLQAEAEEQKRPAEEQKRQAEIERETSVRIYQYRRPVDSYDIPKTEEASSGFLPGDRNKSRSTTELDDYSTNKNGNNKYLDQIGNMTSSQRRSKKEQVPSGAELERQQILQEMRKRTPLHNDNSWIRQRSASVNKEPVSLPGIMRRGESLDNLDSPRSNSWRQPPWLNQPTGFYASSSVQDFSRPPPQLVSTSNRAYMRNPSSSVPPPSAGSVKTSTTGVATTQSPTPRSHSPSASQSGSQLRNSVLPVSVTSEALPQELKSGSETTNCTATTAISDSNLDGQPPCDVSLHTKALLQIEEEVVAAHVDL

SEQ ID NO: 30430 - protein, 610 aa, Homo sapiens
MQYSHHCEHLLERLNKQREAGFLCDCTIVIGEFQFKAHRNVLASFSEYFGAIYRSTSENNVFLDQSQVKADGFQKLLEFIYTGTLNLDSWNVKEIHQAADYLKVEEVVTKCKIKMEDFAFIANPSSTEISSITGNIELNQQTCLLTLRDYNNREKSEVSTDLIQANPKQGALAKKSSQTKKKKKAFNSPKTGQNKTVQYPSDILENASVELFLDANKLPTPVVEQVAQINDNSELELTSVVENTFPAQDIVHTVTVKRKRGKSQPNCALKEHSMSNIASVKSPYEAENSGEELDQRYSKAKPMCNTCGKVFSEASSLRRHMRIHKGVKPYVCHLCGKAFTQCNQLKTHVRTHTGEKPYKCELCDKGFAQKCQLVFHSRMHHGEEKPYKCDVCNLQFATSSNLKIHARKHSGEKPYVCDRCGQRFAQASTLTYHVRRHTGEKPYVCDTCGKAFAVSSSLITHSRKHTGEKPYICGICGKSFISSGELNKHFRSHTGERPFICELCGNSYTDIKNLKKHKTKVHSGADKTLDSSAEDHTLSEQDSIQKSPLSETMDVKPSDMTLPLALPLGTEDHHMLLPVTDTQSPTSDTLLRSTVNGYSEPQLIFLQQLY

SEQ ID NO: 30431 - protein, 581 aa, Homo sapiens
MQYSHHCEHLLERLNKQREAGFLCDCTIVIGEFQFKAHRNVLASFSEYFGAIYRSTSENNVFLDQSQVKADGFQKLLEFIYTGTLNLDSWNVKEIHQAADYLKVEEVVTKCKIKMEDFAFIANPSSTEISSITGNIELNQQTCLLTLRDYNNREKSEVSTDLIQANPKQGALAKKSSQTKKKKKAFNSPKTGQNKTVQYPSDILENASVELFLDANKLPTPVVEQVAQINDNSELELTSVVENTFPAQDIVHTVTVKRKRGKSQPNCALKEHSMSNIASVKSPYEAENSGEELDQRYSKAKPMCNTCGKVFSEASSLRRHMRIHKGVKPYVCHLCGKAFTQCNQLKTHVRTHTGEKPYKCELCDKGFAQKCQLVFHSRMHHGEEKPYKCDVCNLQFATSSNLKIHARKHSGEKPYVCDRCGQRFAQASTLTYHVRRHTGEKPYVCDTCGKAFAVSSSLITHSRKHTGEKPYICGICGKSFISSGELNKHFRSHTGADKTLDSSAEDHTLSEQDSIQKSPLSETMDVKPSDMTLPLALPLGTEDHHMLLPVTDTQSPTSDTLLRSTVNGYSEPQLIFLQQLY

SEQ ID NO: 30432 - protein, 500 aa, Homo sapiens
MQYSHHCEHLLERLNKQREAGFLCDCTIVIGEFQFKAHRNVLASFSEYFGAIYRSTSENNVFLDQSQVKADGFQKLLEFIYTGTLNLDSWNVKEIHQAADYLKVEEVVTKCKIKMEDFAFIANPSSTEISSITGNIELNQQTCLLTLRDYNNREKSEVSTDLIQANPKQGALAKKSSQTKKKKKAFNSPKTGQNKTVQYPSDILENASVELFLDANKLPTPVVEQVAQINDNSELELTSVVENTFPAQDIVHTVTVKRKRGKSQPNCALKEHSMSNIASVKSPYEAENSGEELDQRYSKAKPMCNTCGKVFSEASSLRRHMRIHKGVKPYVCHLCGKAFTQCNQLKTHVRTHTGEKPYKCELCDKGFAQKCQLVFHSRMHHGEEKPYKCDVCNLQFATSSNLKIHARKHSGEKPYVCDRCGQRFAQASTLTYHVRRHTGEKPYVCDTCGKAFAVSSSLITHSRKHTGEKPYICGICGKSFISSGELNKHFRSHTVVWSMN

SEQ ID NO: 30433 - protein, 91 aa, Homo sapiens
MQYSHHCEHLLERLNKQREAGFLCDCTIVIGEFQFKAHRNVLASFSEYFGAIYRSTSENNVFLDQSQVKADGFQKLLEFIYTGTLNLDRDI

SEQ ID NO: 30434 - protein, 133 aa, Homo sapiens
MNYMPGTASLIEDIDKKHLVLLRDGRTLIGFLRSIDQFANLVLHQTVERIHVGKKYGDIPRGIFVVRGENVVLLGEIDLEKESDTPLQQVSIEEILEEQRVEQQTKLEAEKLKVQALKDRGLSIPRADTLDEY

SEQ ID NO: 30435 - protein, 592 aa, Homo sapiens
MTCWLCVLSLPLLLLPAAPPPAGGCPARCECTVQTRAVACTRRRLTAVPDGIPAETRLLELSRNRIRCLNPGDLAALPALEELDLSENAIAHVEPGAFANLPRLRVLRLRGNQLKLIPPGVFTRLDNLTLLDLSENKLVILLDYTFQDLHSLRRLEVGDNDLVFVSRRAFAGLLALEELTLERCNLTALSGESLGHLRSLGALRLRHLAIASLEDQNFRRLPGLLHLEIDNWPLLEEVAAGSLRGLNLTSLSVTHTNITAVPAAALRHQAHLTCLNLSHNPISTVPRGSFRDLVRLRELHLAGALLAVVEPQAFLGLRQIRLLNLSNNLLSTLEESTFHSVNTLETLRVDGNPLACDCRLLWIVQRRKTLNFDGRLPACATPAEVRGDALRNLPDSVLFEYFVCRKPKIRERRLQRVTATAGEDVRFLCRAEGEPAPTVAWVTPQHRPVTATSAGRARVLPGGTLEIQDARPQDSGTYTCVASNAGGNDTYFATLTVRPEPAANRTPGEAHNETLAALRAPLDLTTILVSTAMGCITFLGVVLFCFVLLFVWSRGRGQHKNNFSVEYSFRKVDGPAAAAGQGGARKFNMKMI

SEQ ID NO: 30436 - protein, 788 aa, Homo sapiens
MLLLLLLLLLLPPLVLRVAASRCLHDETQKSVSLLRPPFSQLPSKSRSSSLTLPSSRDPQPLRIQSCYLGDHISDGAWDPEGEGMRGGSRALAAVREATQRIQAVLAVQGPLLLSRDPAQYCHAVWGDPDSPNYHRCSLLNPGYKGESCLGAKIPDTHLRGYALWPEQGPPQLVQPDGPGVQNTDFLLYVRVAHTSKCHQETVSLCCPGWSTAAQSQLTAALTSWAQRRGFVMLPRLCLKLLGSSNLPTLASQSIRITGPSVIAYAACCQLDSEDRPLAGTIVYCAQHLTSPSLSHSDIVMATLHELLHALGFSGQLFKKWRDCPSGFSVRENCSTRQLVTRQDEWGQLLLTTPAVSLSLAKHLGVSGASLGVPLEEEEGLLSSHWEARLLQGSLMTATFDGAQRTRLDPITLAAFKDSGWYQVNHSAAEELLWGQGSGPEFGLVTTCGTGSSDFFCTGSGLGCHYLHLDKGSCSSDPMLEGCRMYKPLANGSECWKKENGFPAGVDNPHGEIYHPQSRCFFANLTSQLLPGDKPRHPSLTPHLKEAELMGRCYLHQCTGRGAYKVQVEGSPWVPCLPGKVIQIPGYYGLLFCPRGRLCQTNEDINAVTSPPVSLSTPDPLFQLSLELAGPPGHSLGKEQQEGLAEAVLEALASKGGTGRCYFHGPSITTSLVFTVHMWKSPGCQGPSVATLHKALTLTLQKKPLEVYHGGANFTTQPSKLLVTSDHNPSMTHLRLSMGLCLMLLILVGVMGTTAYQKRATLPVRPSASYHSPELHSTRVPVRGIREV

SEQ ID NO: 30437 - protein, 573 aa, Homo sapiens
MARAVGPERRLLAVYTGGTIGMRSELGVLVPGTGLAAILRTLPMFHDEEHARARGLSEDTLVLPPASRNQRILYTVLECQPLFDSSDMTIAEWVCLAQTIKRHYEQYHGFVVIHGTDTMAFAASMLSFMLENLQKTVILTGAQVPIHALWSDGRENLLGALLMAGQYVIPEVCLFFQNQLFRGNRATKVDARRFAAFCSPNLLPLATVGADITINRELVRKVDGKAGLVVHSSMEQDVGLLRLYPGIPAALVRAFLQPPLKGVVMETFGSGNGPTKPDLLQELRVATERGLVIVNCTHCLQGAVTTDYAAGMAMAGAGVISGFDMTSEAALAKLSYVLGQPGLSLDVRKELLTKDLRGEMTPPSVEERRPSLQGNTLGGGVSWLLSLSGSQEADALRNALVPSLACAAAHAGDVEALQALVELGSDLGLVDFNGQTPLHAAARGGHTEAVTMLLQRGVDVNTRDTDGFSPLLLAVRGRHPGVIGLLREAGASLSTQELEEAGTELCRLAYRADLEGLQVWWQAGADLGQPGYDGHSALHVAEAAGNLAVVAFLQSLEGAVGAQAPCPEVLPGV

SEQ ID NO: 30438 - protein, 579 aa, Homo sapiens
MARAVGPERRLLAVYTGGTIGMRSELGVLVPGTGLAAILRTLPMFHDEEHARARGLSEDTLVLPPASRNQRILYTVLECQPLFDSSDMTIAEWVCLAQTIKRHYEQYHGFVVIHGTDTMAFAASMLSFMLENLQKTVILTGAQVPIHALWSDGRENLLGALLMAGQYVIPEVCLFFQNQLFRGNRATKVDARRFAAFCSPNLLPLATVGADITINRELVRKVDGKAGLVVHSSMEQDVGLLRLYPGIPAALVRAFLQPPLKGVVMETFGSGNGPTKPDLLQELRVATERGLVIVNCTHCLQGAVTTDYAAGMAMAGAGVISGFDMTSEAALAKLSYVLGQPGLSLDVRKELLTKDLRGEMTPPSVEERRPSLQGNTLGGGVSWLLSLSGSQEADALRNALVPSLACAAAHAGDVEALQALVELGSDLGLVDFNGQTPLHAAARGGHTEAVTMLLQRGVDVNTRDTDGFSPLLLAVRGRHPGVIGLLREAGASLSTQELEEAGTELCRLAYRADLEGLQVWWQAGADLGQPGYDGHSALHVAEAAGNLAVVAFLQSLEGAVGAQAPCPEPSCFQEVLPGV

SEQ ID NO: 30439 - protein, 205 aa, Homo sapiens
MSVDPMTYEAQFFGFTPQTCMLRIYIAFQDYLFEVMQAVEQVILKKLDGIPDCDISPVQIRKCTEKFLCFMKGHFDNLFSKMEQLFLQLILRIPSNILLPEDKCKETPYSEEDFQHLQKEIEQLQEKYKTELCTKQALLAELEEQKIVQAKLKQTLTFFDELHNVGRDHGTSDFRESLVSLVQNSRKLQNIRDNVEKESKRLKIS

SEQ ID NO: 30440 - protein, 185 aa, Homo sapiens
MGPERHLSGAPARMATVVLGGDTMGPERIFPNQTEELGHQGPSEGTGDWSSEEPEEEQEETGSGPAGYSYQPLNQDPEQEEVELAPVGDGDVVADIQDRIQALGLHLPDPPLESEDEDEEGATALNNHSSIPMDPEHVELVKRTMAGVSLPAPGVPAWAREISDAQWEDVVQKALQARQASPAWK

SEQ ID NO: 30441 - protein, 1551 aa, Homo sapiens
MERRLRALEQLARGEAGGCPGLDGLLDLLLALHHELSSGPLRRERSVAQFLSWASPFVSKVKELRLQRDDFEILKVIGRGAFGEVTVVRQRDTGQIFAMKMLHKWEMLKRAETACFREERDVLVKGDSRWVTTLHYAFQDEEYLYLVMDYYAGGDLLTLLSRFEDRLPPELAQFYLAEMVLAIHSLHQLGYVHRDVKPDNVLLDVNGHIRLADFGSCLRLNTNGMVDSSVAVGTPDYISPEILQAMEEGKGHYGPQCDWWSLGVCAYELLFGETPFYAESLVETYGKIMNHEDHLQFPPDVPDVPASAQDLIRQLLCRQEERLGRGGLDDFRNHPFFEGVDWERLASSTAPYIPELRGPMDTSNFDVDDDTLNHPGTLPPPSHGAFSGHHLPFVGFTYTSGSHSPESSSEAWAALERKLQCLEQEKVELSRKHQEALHAPTDHRELEQLRKEVQTLRDRLPEMLRDKASLSQTDGPPAGSPGQDSDLRQELDRLHRELAEGRAGLQAQEQELCRAQGQQEELLQRLQEAQEREAATASQTRALSSQLEEARAAQRELEAQVSSLSRQVTQLQGQWEQRLEESSQAKTIHTASETNGMGPPEGGPQEAQLRKEVAALREQLEQAHSHRPSGKEEALCQLQEENRRLSREQERLEAELAQEQESKQRLEGERRETESNWEAQLADILSWVNDEKVSRGYLQALATKMAEELESLRNVGTQTLPARPLDHQWKARRLQKMEASARLELQSALEAEIRAKQGLQERLTQVQEAQLQAERRLQEAEKQSQALQQELAMLREELRARGPVDTKPSNSLIPFLSFRSSEKDSAKDPGISGEATRHGGEPDLRPEGRRSLRMGAVFPRAPTANTASTEGLPAKPGSHTLRPRSFPSPTKCLRCTSLMLGLGRQGLGCDACGYFCHTTCAPQAPPCPVPPDLLRTALGVHPETGTGTAYEGFLSVPRPSGVRRGWQRVFAALSDSRLLLFDAPDLRLSPPSGALLQVLDLRDPQFSATPVLASDVIHAQSRDLPRIFRVTTSQLAVPPTTCTVLLLAESEGERERWLQVLGELQRLLLDARPRPRPVYTLKEAYDNGLPLLPHTLCAAILDQDRLALGTEEGLFVIHLRSNDIFQVGECRRVQQLTLSPSAGLLVVLCGRGPSVRLFALAELENIEVAGAKIPESRGCQVLAAGSILQARTPVLCVAVKRQVLCYQLGPGPGPWQRRIRELQAPATVQSLGLLGDRLCVGAAGGFALYPLLNEAAPLALGAGLVPEELPPSRGGLGEALGAVELSLSEFLLLFTTAGIYVDGAGRKSRGHELLWPAAPMGWGYAAPYLTVFSENSIDVFDVRRAEWVQTVPLKKVRPLNPEGSLFLYGTEKVRLTYLRNQLAEKDEFDIPDLTDNSRRQLFRTKSKRRFFFRVSEEQQKQQRREMLKDPFVRSKLISPPTNFNHLVHVGPANGRPGARDKSPAPEEKGRVARGSGPQRPHSFSEALRRPASMGSEGLGGDADPMKRKPWTSLSSESVSCPQGSLSPATSLMQVSERPRSLPLSPELESSP

SEQ ID NO: 30442 - protein, 521 aa, Homo sapiens
MGRKKIQIQRITDERNRQVTFTKRKFGLMKKAYELSVLCDCEIALIIFNHSNKLFQYASTDMDKVLLKYTEYNEPHESRTNADIIETLRKKGFNGCDSPEPDGEDSLEQSPLLEDKYRRASEELDGLFRRYGSTVPAPNFAMPVTVPVSNQSSLQFSNPSGSLVTPSLVTSSLTDPRLLSPQQPALQRNSVSPGLPQRPASAGAMLGGDLNSANGACPSPVGNGYVSARASPGLLPVANGNSLNKVIPAKSPPPPTHSTQLGAPSRKPDLRVITSQAGKGLMHHLTEDHLDLNNAQRLGVSQSTHSLTTPVVSVATPSLLSQGLPFSSMPTAYNTDYQLTSAELSSLPAFSSPGGLSLGNVTAWQQPQQPQQPQQPQPPQQQPPQPQQPQPQQPQQPQQPPQQQSHLVPVSLSNLIPGSPLPHVGAALTVTTHPHISIKSEPVSPSRERSPAPPPPAVFPAARPEPGDGLSSPAGGSYETGDRDDGRGDFGPTLGLLRPAPEPEAEGSAVKRMRLDTWTLK

SEQ ID NO: 30443 - protein, 520 aa, Homo sapiens
MGRKKIQIQRITDERNRQVTFTKRKFGLMKKAYELSVLCDCEIALIIFNHSNKLFQYASTDMDKVLLKYTEYNEPHESRTNADIIEALHKKHRECESPEVDEVFALTPQTEEKYKKIDEEFDKMMQSYRLASTVPAPNFAMPVTVPVSNQSSLQFSNPSGSLVTPSLVTSSLTDPRLLSPQQPALQRNSVSPGLPQRPASAGAMLGGDLNSANGACPSPVGNGYVSARASPGLLPVANGNSLNKVIPAKSPPPPTHSTQLGAPSRKPDLRVITSQAGKGLMHHLTEDHLDLNNAQRLGVSQSTHSLTTPVVSVATPSLLSQGLPFSSMPTAYNTDYQLTSAELSSLPAFSSPGGLSLGNVTAWQQPQQPQQPQQPQPPQQQPPQPQQPQPQQPQQPQQPPQQQSHLVPVSLSNLIPGSPLPHVGAALTVTTHPHISIKSEPVSPSRERSPAPPPPAVFPAARPEPGDGLSSPAGGSYETGDRDDGRGDFGPTLGLLRPAPEPEAEGSAVKRMRLDTWTLK

SEQ ID NO: 30444 - protein, 475 aa, Homo sapiens
MGRKKIQIQRITDERNRQVTFTKRKFGLMKKAYELSVLCDCEIALIIFNHSNKLFQYASTDMDKVLLKYTEYNEPHESRTNADIIESTVPAPNFAMPVTVPVSNQSSLQFSNPSGSLVTPSLVTSSLTDPRLLSPQQPALQRNSVSPGLPQRPASAGAMLGGDLNSANGACPSPVGNGYVSARASPGLLPVANGNSLNKVIPAKSPPPPTHSTQLGAPSRKPDLRVITSQAGKGLMHHLTEDHLDLNNAQRLGVSQSTHSLTTPVVSVATPSLLSQGLPFSSMPTAYNTDYQLTSAELSSLPAFSSPGGLSLGNVTAWQQPQQPQQPQQPQPPQQQPPQPQQPQPQQPQQPQQPPQQQSHLVPVSLSNLIPGSPLPHVGAALTVTTHPHISIKSEPVSPSRERSPAPPPPAVFPAARPEPGDGLSSPAGGSYETGDRDDGRGDFGPTLGLLRPAPEPEAEGSAVKRMRLDTWTLK

SEQ ID NO: 30445 - protein, 514 aa, Homo sapiens
MGRKKIQIQRITDERNRQVTFTKRKFGLMKKAYELSVLCDCEIALIIFNHSNKLFQYASTDMDKVLLKYTEYNEPHESRTNADIIETLRKKGFNGCDSPEPDGEDSLEQSPLLEDKYRRASEELDGLFRRYGSTVPAPNFAMPVTVPVSNQSSLQFSNPSGSLVTPSLVTSSLTDPRLLSPQQPALQRNSVSPGLPQRPASAGAMLGGDLNSANGACPSPVGNGYVSARASPGLLPVANGNSLNKVIPAKSPPPPTHSTQLGAPSRKPDLRVITSQAGKGLMHHLNNAQRLGVSQSTHSLTTPVVSVATPSLLSQGLPFSSMPTAYNTDYQLTSAELSSLPAFSSPGGLSLGNVTAWQQPQQPQQPQQPQPPQQQPPQPQQPQPQQPQQPQQPPQQQSHLVPVSLSNLIPGSPLPHVGAALTVTTHPHISIKSEPVSPSRERSPAPPPPAVFPAARPEPGDGLSSPAGGSYETGDRDDGRGDFGPTLGLLRPAPEPEAEGSAVKRMRLDTWTLK

SEQ ID NO: 30446 - protein, 513 aa, Homo sapiens
MGRKKIQIQRITDERNRQVTFTKRKFGLMKKAYELSVLCDCEIALIIFNHSNKLFQYASTDMDKVLLKYTEYNEPHESRTNADIIEALHKKHRECESPEVDEVFALTPQTEEKYKKIDEEFDKMMQSYRLASTVPAPNFAMPVTVPVSNQSSLQFSNPSGSLVTPSLVTSSLTDPRLLSPQQPALQRNSVSPGLPQRPASAGAMLGGDLNSANGACPSPVGNGYVSARASPGLLPVANGNSLNKVIPAKSPPPPTHSTQLGAPSRKPDLRVITSQAGKGLMHHLNNAQRLGVSQSTHSLTTPVVSVATPSLLSQGLPFSSMPTAYNTDYQLTSAELSSLPAFSSPGGLSLGNVTAWQQPQQPQQPQQPQPPQQQPPQPQQPQPQQPQQPQQPPQQQSHLVPVSLSNLIPGSPLPHVGAALTVTTHPHISIKSEPVSPSRERSPAPPPPAVFPAARPEPGDGLSSPAGGSYETGDRDDGRGDFGPTLGLLRPAPEPEAEGSAVKRMRLDTWTLK

SEQ ID NO: 30447 - protein, 468 aa, Homo sapiens
MGRKKIQIQRITDERNRQVTFTKRKFGLMKKAYELSVLCDCEIALIIFNHSNKLFQYASTDMDKVLLKYTEYNEPHESRTNADIIESTVPAPNFAMPVTVPVSNQSSLQFSNPSGSLVTPSLVTSSLTDPRLLSPQQPALQRNSVSPGLPQRPASAGAMLGGDLNSANGACPSPVGNGYVSARASPGLLPVANGNSLNKVIPAKSPPPPTHSTQLGAPSRKPDLRVITSQAGKGLMHHLNNAQRLGVSQSTHSLTTPVVSVATPSLLSQGLPFSSMPTAYNTDYQLTSAELSSLPAFSSPGGLSLGNVTAWQQPQQPQQPQQPQPPQQQPPQPQQPQPQQPQQPQQPPQQQSHLVPVSLSNLIPGSPLPHVGAALTVTTHPHISIKSEPVSPSRERSPAPPPPAVFPAARPEPGDGLSSPAGGSYETGDRDDGRGDFGPTLGLLRPAPEPEAEGSAVKRMRLDTWTLK

SEQ ID NO: 30448 - protein, 1025 aa, Homo sapiens
MSAAKENPCRKFQANIFNKSKCQNCFKPRESHLLNDEDLTQAKPIYGGWLLLAPDGTDFDNPVHRSRKWQRRFFILYEHGLLRYALDEMPTTLPQGTINMNQCTDVVDGEGRTGQKFSLCILTPEKEHFIRAETKEIVSGWLEMLMVYPRTNKQNQKKKRKVEPPTPQEPGPAKVAVTSSSSSSSSSSSIPSAEKVPTTKSTLWQEEMRTKDQPDGSSLSPAQSPSQSQPPAASSLREPGLESKEEESAMSSDRMDCGRKVRVESGYFSLEKTKQDLKAEEQQLPPPLSPPSPSTPNHRRSQVIEKFEALDIEKAEHMETNAVGPSPSSDTRQGRSEKRAFPRKRDFTNEAPPAPLPDASASPLSPHRRAKSLDRRSTEPSVTPDLLNFKKGWLTKQYEDGQWKKHWFVLADQSLRYYRDSVAEEAADLDGEIDLSACYDVTEYPVQRNYGFQIHTKEGEFTLSAMTSGIRRNWIQTIMKHVHPTTAPDVTSSLPEEKNKSSCSFETCPRPTEKQEAELGEPDPEQKRSRARERRREGRSKTFDWAEFRPIQQALAQERVGGVGPADTHEPLRPEAEPGELERERARRREERRKRFGMLDATDGPGTEDAALRMEVDRSPGLPMSDLKTHNVHVEIEQRWHQVETTPLREEKQVPIAPVHLSSEDGGDRLSTHELTSLLEKELEQSQKEASDLLEQNRLLQDQLRVALGREQSAREGYVLQATCERGFAAMEETHQKKIEDLQRQHQRELEKLREEKDRLLAEETAATISAIEAMKNAHREEMERELEKSQRSQISSVNSDVEALRRQYLEELQSVQRELEVLSEQYSQKCLENAHLAQALEAERQALRQCQRENQELNAHNQELNNRLAAEITRLRTLLTGDGGGEATGSPLAQGKDAYELEVLLRVKESEIQYLKQEISSLKDELQTALRDKKYASDKYKDIYTELSIAKAKADCDISRLKEQLKAATEALGEKSPDSATVSGYDIMKSKSNPDFLKKDRSCVTRQLRNIRSKSVIEQVSWDT

SEQ ID NO: 30449 - protein, 1038 aa, Homo sapiens
MSAAKENPCRKFQANIFNKSKCQNCFKPRESHLLNDEDLTQAKPIYGGWLLLAPDGTDFDNPVHRSRKWQRRFFILYEHGLLRYALDEMPTTLPQGTINMNQCTDVVDGEGRTGQKFSLCILTPEKEHFIRAETKEIVSGWLEMLMVYPRTNKQNQKKKRKVEPPTPQEPGPAKVAVTSSSSSSSSSSSIPSAEKVPTTKSTLWQEEMRTKDQPDGSSLSPAQSPSQSQPPAASSLREPGLESKEEESAMSSDRMDCGRKVRVESGYFSLEKTKQDLKAEEQQLPPPLSPPSPSTPNHRRSQVIEKFEALDIEKAEHMETNAVGPSPSSDTRQGRSEKRAFPRKRDFTNEAPPAPLPDASASPLSPHRRAKSLDRRSTEPSVTPDLLNFKKGWLTKQYEDGQWKKHWFVLADQSLRYYRDSVAEEAADLDGEIDLSACYDVTEYPVQRNYGFQIHTKEGEFTLSAMTSGIRRNWIQTIMKHVHPTTAPDVTSSLPEEKNKSSCSFETCPRPTEKQEAELGEPDPEQKRSRARERRREGRSKTFDWAEFRPIQQALAQERVGGVGPADTHEPLRPEAEPGELERERARRREERRKRFGMLDATDGPGTEDAALRMEVDRSPGLPMSDLKTHNVHVEIEQRWHQVETTPLREEKQVPIAPVHLSSEDGGDRLSTHELTSLLEKELEQSQKEASDLLEQNRLLQDQLRVALGREQSAREGYVLQATCERGFAAMEETHQKKIEDLQRQHQRELEKLREEKDRLLAEETAATISAIEAMKNAHREEMERELEKSQRSQISSVNSDVEALRRQYLEELQSVQRELEVLSEQYSQKCLENAHLAQALEAERQALRQCQRENQELNAHNQELNNRLAAEITRLRTLLTGDGGGEATGSPLAQGKDAYELEVLLRVKESEIQYLKQEISSLKDELQTALRDKKYASDKYKDIYTELSIAKAKADCDISRLKEQLKAATEALGEKSPDSATVSGYDIMKSKSNPDFLKKDRSCVTRQLRNIRSKSLKEGLTVQERLKLFESRDLKKD

SEQ ID NO: 30450 - protein, 1000 aa, Homo sapiens
MSAAKENPCRKFQANIFNKSKCQNCFKPRESHLLNDEDLTQAKPIYGGWLLLAPDGTDFDNPVHRSRKWQRRFFILYEHGLLRYALDEMPTTLPQGTINMNQCTDVVDGEGRTGQKFSLCILTPEKEHFIRAETKEIVSGWLEMLMVYPRTNKQNQKKKRKVEPPTPQEPGPAKVAVTSSSSSSSSSSSIPSAEKVPTTKSTLWQEEMRTKDQPDGSSLSPAQSPSQSQPPAASSLREPGLESKEEESAMSSDRMDCGRKVRVESGYFSLEKTKQDLKAEEQQLPPPLSPPSPSTPNHRRSQVIEKFEALDIEKAEHMETNAVGPSPSSDTRQGRSEKRAFPRKRPDLLNFKKGWLTKQYEDGQWKKHWFVLADQSLRYYRDSVAEEAADLDGEIDLSACYDVTEYPVQRNYGFQIHTKEGEFTLSAMTSGIRRNWIQTIMKHVHPTTAPDVTSSLPEEKNKSSCSFETCPRPTEKQEAELGEPDPEQKRSRARERRREGRSKTFDWAEFRPIQQALAQERVGGVGPADTHEPLRPEAEPGELERERARRREERRKRFGMLDATDGPGTEDAALRMEVDRSPGLPMSDLKTHNVHVEIEQRWHQVETTPLREEKQVPIAPVHLSSEDGGDRLSTHELTSLLEKELEQSQKEASDLLEQNRLLQDQLRVALGREQSAREGYVLQATCERGFAAMEETHQKKIEDLQRQHQRELEKLREEKDRLLAEETAATISAIEAMKNAHREEMERELEKSQRSQISSVNSDVEALRRQYLEELQSVQRELEVLSEQYSQKCLENAHLAQALEAERQALRQCQRENQELNAHNQELNNRLAAEITRLRTLLTGDGGGEATGSPLAQGKDAYELEVLLRVKESEIQYLKQEISSLKDELQTALRDKKYASDKYKDIYTELSIAKAKADCDISRLKEQLKAATEALGEKSPDSATVSGYDIMKSKSNPDFLKKDRSCVTRQLRNIRSKSLKEGLTVQERLKLFESRDLKKD

SEQ ID NO: 30451 - protein, 216 aa, Homo sapiens
MSFLFSSRSSKTFKPKKNIPEGSHQYELLKHAEATLGSGNLRQAVMLPEGEDLNEWIAVNTVDFFNQINMLYGTITEFCTEASCPVMSAGPRYEYHWADGTNIKKPIKCSAPKYIDYLMTWVQDQLDDETLFPSKIGVPFPKNFMSVAKTILKRLFRVYAHIYHQHFDSVMQLQEEAHLNTSFKHFIFFVQEFNLIDRRELAPLQELIEKLGSKDR

SEQ ID NO: 30452 - protein, 148 aa, Homo sapiens
MSFLFSSRSSKTFKPKKNIPEGSHQYELLKHAEATLGSGNLRQAVMLPEGEDLNEWIAVNTVDFFNQINMLYGTITEFCTEASCPVMSAGPRYEYHWADGTNIKKPIKCSAPKYIDYLMTWVQDQLDDETLFPSKIGELTLSKYSFFF

SEQ ID NO: 30453 - protein, 419 aa, Homo sapiens
MKNYKAIGKIGEGTFSEVMKMQSLRDGNYYACKQMKQRFESIEQVNNLREIQALRRLNPHPNILMLHEVVFDRKSGSLALICELMDMNIYELIRGRRYPLSEKKIMHYMYQLCKSLDHIHRNGIFHRDVKPENILIKQDVLKLGDFGSCRSVYSKQPYTEYISTRWYRAPECLLTDGFYTYKMDLWSAGCVFYEIASLQPLFPGVNELDQISKIHDVIGTPAQKILTKFKQSRAMNFDFPFKKGSGIPLLTTNLSPQCLSLLHAMVAYDPDERIAAHQALQHPYFQEQRKTEKRALGSHRKAGFPEHPVAPEPLSNSCQISKEGRKQKQSLKQEEDRPKRRGPAYVMELPKLKLSGVVRLSSYSSPTLQSVLGSGTNGRVPVLRPLKCIPASKKTDPQKDLKPAPQQCRLPTIVRKGGR

SEQ ID NO: 30454 - protein, 231 aa, Homo sapiens
MKNYKAIGKIGEGTFSEVMKMQSLRDGNYYACKQMKQRFESIEQVNNLREIQALRRLNPHPNILMLHEVVFDRKSGSLALICELMDMNIYELIRGRRYPLSEKKIMHYMYQLCKSLDHIHRNGIFHRDVKPENILIKQDVLKLGDFGSCRSVYSKQPYTEYISTRWYRAPECLLTDGFYTYKMDLWSAGCVFYEIASLQPLFPGVNELDQISKIHDVIGTPAQKILTKFKQ

SEQ ID NO: 30455 - protein, 73 aa, Homo sapiens
MELPKLKLSGVVRLSSYSSPTLQSVLGSGTNGRVPVLRPLKCIPASKKTDPQKDLKPAPQQCRLPTIVRKGGR

SEQ ID NO: 30456 - protein, 95 aa, Homo sapiens
MNFDFPFKKGSGIPLLTTNLSPQCLSLLHAMVAYDPDERIAAHQALQHPYFQEQRTQNGSEDEASAVLLPIQTRSSLNPLLSTCMLPGRSVTLLV

SEQ ID NO: 30457 - protein, 389 aa, Homo sapiens
MKNYKAIGKIGEGTFSEVMKMQSLRDGNYYACKQMKQRFESDRKSGSLALICELMDMNIYELIRGRRYPLSEKKIMHYMYQLCKSLDHIHRNGIFHRDVKPENILIKQDVLKLGDFGSCRSVYSKQPYTEYISTRWYRAPECLLTDGFYTYKMDLWSAGCVFYEIASLQPLFPGVNELDQISKIHDVIGTPAQKILTKFKQSRAMNFDFPFKKGSGIPLLTTNLSPQCLSLLHAMVAYDPDERIAAHQALQHPYFQEQRKTEKRALGSHRKAGFPEHPVAPEPLSNSCQISKEGRKQKQSLKQEEDRPKRRGPAYVMELPKLKLSGVVRLSSYSSPTLQSVLGSGTNGRVPVLRPLKCIPASKKTDPQKDLKPAPQQCRLPTIVRKGGR

SEQ ID NO: 30458 - protein, 418 aa, Homo sapiens
MKNYKAIGKIGEGTFSEVMKMQSLRDGNYYACKQMKQRFESIEQVNNLREIQALRRLNPHPNILMLHEVVFDRKSGSLALICELMDMNIYELIRGRRYPLSEKKIMHYMYQLCKSLDHIHRNGIFHRDVKPENILIKDVLKLGDFGSCRSVYSKQPYTEYISTRWYRAPECLLTDGFYTYKMDLWSAGCVFYEIASLQPLFPGVNELDQISKIHDVIGTPAQKILTKFKQSRAMNFDFPFKKGSGIPLLTTNLSPQCLSLLHAMVAYDPDERIAAHQALQHPYFQEQRKTEKRALGSHRKAGFPEHPVAPEPLSNSCQISKEGRKQKQSLKQEEDRPKRRGPAYVMELPKLKLSGVVRLSSYSSPTLQSVLGSGTNGRVPVLRPLKCIPASKKTDPQKDLKPAPQQCRLPTIVRKGGR

SEQ ID NO: 30459 - protein, 1492 aa, Homo sapiens
MERLLAQLCGSSAAWPLPLWEGDTTGHCFTQLVLSALPHALLAVLSACYLGTPRSPDYILPCSPGWRLRLAASFLLSVFPLLDLLPVALPPGAGPGPIGLEVLAGCVAAVAWISHSLALWVLAHSPHGHSRGPLALALVALLPAPALVLTVLWHCQRGTLLPPLLPGPMARLCLLILQLAALLAYALGWAAPGGPREPWAQEPLLPEDQEPEVAEDGESWLSRFSYAWLAPLLARGACGELRQPQDICRLPHRLQPTYLARVFQAHWQEGARLWRALYGAFGRCYLALGLLKLVGTMLGFSGPLLLSLLVGFLEEGQEPLSHGLLYALGLAGGAVLGAVLQNQYGYEVYKVTLQARGAVLNILYCKALQLGPSRPPTGEALNLLGTDSERLLNFAGSFHEAWGLPLQLAITLYLLYQQVGVAFVGGLILALLLVPVNKVIATRIMASNQEMLQHKDARVKLVTELLSGIRVIKFCGWEQALGARVEACRARELGRLRVIKYLDAACVYLWAALPVVISIVIFITYVLMGHQLTATKVFTALALVRMLILPLNNFPWVINGLLEAKVSLDRIQLFLDLPNHNPQAYYSPDPPAEPSTVLELHGALFSWDPVGTSLETFISHLEVKKGMLVGIVGKVGCGKSSLLAAIAGELHRLRGHVAVRGLSKGFGLATQEPWIQFATIRDNILFGKTFDAQLYKEVLEACALNDDLSILPAGDQTEVGEKGVTLSGGQRARIALARAVYQEKELYLLDDPLAAVDADVANHLLHRCILGMLSYTTRLLCTHRTEYLERADAVLLMEAGRLIRAGPPSEILPLVQAVPKAWAENGQESDSATAQSVQNPEKTKEGLEEEQSTSGRLLQEESKKEGAVALHVYQAYWKAVGQGLALAILFSLLLMQATRNAADWWLSHWISQLKAENSSQEAQPSTSPASMGLFSPQLLLFSPGNLYIPVFPLPKAAPNGSSDIRFYLTVYATIAGVNSLCTLLRAVLFAAGTLQAAATLHRRLLHRVLMAPVTFFNATPTGRILNRFSSDVACADDSLPFILNILLANAAGLLGLLAVLGSGLPWLLLLLPPLSIMYYHVQRHYRASSRELRRLGSLTLSPLYSHLADTLAGLSVLRATGATYRFEEENLRLLELNQRCQFATSATMQWLDIRLQLMGAAVVSAIAGIALVQHQQGLANPGLVGLSLSYALSLTGLLSGLVSSFTQTEAMLVSVERLEEYTCDLPQEPQGQPLQLGTGWLTQGGVEFQDVVLAYRPGLPNALDGVTFCVQPGEKLGIVGRTGSGKSSLLLVLFRLLEPSSGRVLLDGVDTSQLELAQLRSQLAIIPQEPFLFSGTVRENLDPQGLHKDRALWQALKQCHLSEVITSMGGLDGELGEGGRSLSLGQRQLLCLARALLTDAKILCIDEATASVDQKTDQLLQQTICKRFANKTVLTIAHRLNTILNSDRVLVLQAGRVVELDSPATLRNQPHSLFQQLLQSSQQGVPASLGGP

SEQ ID NO: 30460 - protein, 1464 aa, Homo sapiens
MCLLVFPLVPRSPDYILPCSPGWRLRLAASFLLSVFPLLDLLPVALPPGAGPGPIGLEVLAGCVAAVAWISHSLALWVLAHSPHGHSRGPLALALVALLPAPALVLTVLWHCQRGTLLPPLLPGPMARLCLLILQLAALLAYALGWAAPGGPREPWAQEPLLPEDQEPEVAEDGESWLSRFSYAWLAPLLARGACGELRQPQDICRLPHRLQPTYLARVFQAHWQEGARLWRALYGAFGRCYLALGLLKLVGTMLGFSGPLLLSLLVGFLEEGQEPLSHGLLYALGLAGGAVLGAVLQNQYGYEVYKVTLQARGAVLNILYCKALQLGPSRPPTGEALNLLGTDSERLLNFAGSFHEAWGLPLQLAITLYLLYQQVGVAFVGGLILALLLVPVNKVIATRIMASNQEMLQHKDARVKLVTELLSGIRVIKFCGWEQALGARVEACRARELGRLRVIKYLDAACVYLWAALPVVISIVIFITYVLMGHQLTATKVFTALALVRMLILPLNNFPWVINGLLEAKVSLDRIQLFLDLPNHNPQAYYSPDCGRLGAQIKWLLCSDPPAEPSTVLELHGALFSWDPVGTSLETFISHLEVKKGMLVGIVGKVGCGKSSLLAAIAGELHRLRGHVAVRGLSKGFGLATQEPWIQFATIRDNILFGKTFDAQLYKEVLEACALNDDLSILPAGDQTEVGEKGVTLSGGQRARIALARAVYQEKELYLLDDPLAAVDADVANHLLHRCILGMLSYTTRLLCTHRTEYLERADAVLLMEAGRLIRAGPPSEILPLVQAVPKAWAENGQESDSATAQSVQNPEKTKEGLEEEQSTSGRLLQEESKKEGAVALHVYQAYWKAVGQGLALAILFSLLLMQATRNAADWWLSHWISQLKAENSSQEAQPSTSPASMGLFSPQLLLFSPGNLYIPVFPLPKAAPNGSSDIRFYLTVYATIAGVNSLCTLLRAVLFAAGTLQAAATLHRRLLHRVLMAPVTFFNATPTGRILNRFSSDVACADDSLPFILNILLANAAGLLGLLAVLGSGLPWLLLLLPPLSIMYYHVQRHYRASSRELRRLGSLTLSPLYSHLADTLAGLSVLRATGATYRFEEENLRLLELNQRCQFATSATMQWLDIRLQLMGAAVVSAIAGIALVQHQQGLANPGLVGLSLSYALSLTGLLSGLVSSFTQTEAMLVSVERLEEYTCDLPQEPQGQPLQLGTGWLTQGGVEFQDVVLAYRPGLPNALDGVTFCVQPGEKLGIVGRTGSGKSSLLLVLFRLLEPSSGRVLLDGVDTSQLELAQLRSQLAIIPQEPFLFSGTVRENLDPQGLHKDRALWQALKQCHLSEVITSMGGLDGELGEGGRSLSLGQRQLLCLARALLTDAKILCIDEATASVDQKTDQLLQQTICKRFANKTVLTIAHRLNTILNSDRVLVLQAGRVVELDSPATLRNQPHSLFQQLLQSSQQGVPASLGGP

SEQ ID NO: 30461 - protein, 296 aa, Homo sapiens
MANVLCNRARLVSYLPGFCSLVKRVVNPKAFSTAGSSGSDESHVAAAPPDICSRTVWPDETMGPFGPQDQRFQLPGNIGFDCHLNGTASQKKSLVHKTLPDVLAEPLSSERHEFVMAQYVNEFQGNDAPVEQEINSAETYFESARVECAIQTCPELLRKDFESLFPEVANGKLMILTVTQKTKNDMTVWSEEVEIEREVLLEKFINGAKEICYALRAEGYWADFIDPSSGLAFFGPYTNNTLFETDERYRHLGFSVDDLGCCKVIRHSLWGTHVVVGSIFTNATPDSHIMKKLSGN

SEQ ID NO: 30462 - protein, 310 aa, Homo sapiens
MAGNNFTEVTVFILSGFANHPELQVSLFLMFLFIYLFTVLGNLGLITLIRMDSQLHTPMYFFLSNLAFIDIFYSSTVTPKALVNFQSNRRSISFVGCFVQMYFFVGLVCCECFLLGSMAYNRYIAICNPLLYSVVMSQKVSNWLGVMPYVIGFTSSLISVWVISSLAFCDSSINHFFCDTTALLALSCVDTFGTEMVSFVLAGFTLLSSLLIITVTYIIIISAILRIQSAAGRQKAFSTCASHLMAVTIFYGSLIFTYLQPDNTSSLTQAQVASVFYTIVIPMLNPLIYSLRNKDVKNALLRVIHRKLFP

SEQ ID NO: 30463 - protein, 304 aa, Homo sapiens
MVFLSSVETDQRKMSAGNHSSVTEFILAGLSEQPELQLRLFLLFLGIYVVTVVGNLSMITLIGLSSHLHTPMYYFLSGLSFIDLCHSTIITPKMLVNFVTEKNIISYPECMTQLYFFLIFAIAECHMLAVTAYDRYVAICSPLLYNVIMSYHHCFWLTVGVYVLGILGSTIHTGFMLRLFLCKTNVINHYFCDLFPLLGLSCSSTYINELLVLVLSAFNILTPALTILASYIFIIASILRIRSTEGRSKAFSTCSSHILAVAVFFGSAAFMYLQPSSVSSMDQRKVSSVFYTTIVPMLNPQSIA

SEQ ID NO: 30464 - protein, 439 aa, Homo sapiens
MFSKLAHLQRFAVLSRGVHSSVASATSVATKKTVQGPPTSDDIFEREYKYGAHNYHPLPVALERGKGIYLWDVEGRKYFDFLSSYSAVNQGHCHPKIVNALKSQVDKLTLTSRAFYNNVLGEYEEYITKLFNYHKVLPMNTGVEAGETACKLARKWGYTVKGIQKYKAKIVFAAGNFWGRTLSAISSSTDPTSYDGFGPFMPGFDIIPYNDLPALERALQDPNVAAFMVEPIQGEAGVVVPDPGYLMGVRELCTRHQVLFIADEIQTGLARTGRWLAVDYENVRPDIVLLGKALSGGLYPVSAVLCDDDIMLTIKPGEHGSTYGGNPLGCRVAIAALEVLEEENLAENADKLGIILRNELMKLPSDVVTAVRGKGLLNAIVIKETKDWDAWKVCLRLRDNGLLAKPTHGDIIRFAPPLVIKEDELRESIEIINKTILSF

SEQ ID NO: 30465 - protein, 301 aa, Homo sapiens
MNTGVEAGETACKLARKWGYTVKGIQKYKAKIVFAAGNFWGRTLSAISSSTDPTSYDGFGPFMPGFDIIPYNDLPALERALQDPNVAAFMVEPIQGEAGVVVPDPGYLMGVRELCTRHQVLFIADEIQTGLARTGRWLAVDYENVRPDIVLLGKALSGGLYPVSAVLCDDDIMLTIKPGEHGSTYGGNPLGCRVAIAALEVLEEENLAENADKLGIILRNELMKLPSDVVTAVRGKGLLNAIVIKETKDWDAWKVCLRLRDNGLLAKPTHGDIIRFAPPLVIKEDELRESIEIINKTILSF

SEQ ID NO: 30466 - protein, 315 aa, Homo sapiens
MASGNLTWVTEFILVGVSDDPELQIPLFLVFLVLYLLTVAGNLGIITLTSVDPQLQTPMYFFLRHLAIINLCNSTVVAPKMLVNFLVTKKTISYYGCAAQLGGFLVFIVAEIFTLAAMAYDRYVAIWSPLLYAVVVSPKVCRLLVSLTYLQSLITALTVSSCVFSVSYCSSNIINHFYCDDVPLLALSCSDTYIPETAVFIFSGTNLLFSMIVVLISYFNIVITILRIRSSEGRQKAFSTCASHMIAVVVFYGTLLFMYLQPRSNHSLDTDKMASVFYTLVIPVLNPLIYSLRNKNVKDALKRFLDNPCRSLKLM

SEQ ID NO: 30467 - protein, 323 aa, Homo sapiens
MMGQNQTSISDFLLLGLPIQPEQQNLCYALFLAMYLTTLLGNLLIIVLIRLDSHLHTPVYLFLSNLSFSDLCFSSVTMPKLLQNMQNQDPSIPYADCLTQMYFFLYFSDLESFLLVAMAYDRYVAICFPMHYTAICFLLHYTAIMSPMLCLSVVALSWVLTTFHAMLHTLLMARLCFCADNVIPHFFCDMSALLKLACSDTRVNEWVIFIMGGLILVIPFLLILGSYARIVSSILKVPSSKGICKAFSTCGSHLSVVSLFYGTVIGLYLCPSANSSTLKDTVMAMMYTVVTPMLTPFIYSLRNRDMKGALERVICKRKNPFLL

SEQ ID NO: 30468 - protein, 313 aa, Homo sapiens
MGNWSTVTEITLIAFPALLEIRISLFVVLVVTYTLTATGNITIISLIWIDHRLQTPMYFFLSNLSFLDILYTTVITPKLLACLLGEEKTISFAGCMIQTYFYFFLGTVEFILLAVMSFDRYMAICDPLHYTVIMNSRACLLLVLGCWVGAFLSVLFPTIVVTRLPYCRKEINHFFCDIAPLLQVACINTHLIEKINFLLSALVILSSLAFTTGSYVYIISTILRIPSTQGRQKAFSTCASHITVVSIAHGSNIFVYVRPNQNSSLDYDKVAAVLITVVTPLLNPFIYSLRNEKVQEVLRETVNRIMTLIQRKT

SEQ ID NO: 30469 - protein, 389 aa, Homo sapiens
MSVRTLPLLFLNLGGEMLYILDQRLRAQNIPGDKARKDEWTEVDRKRVLNDIISTMFNRKFMEELFKPQELYSKKALRTVYERLAHASIMKLNQASMDKLYDLMTMAFKYQVLLCPRPKDVLLVTFNHLDTIKGFIRDSPTILQQVDETLRQLTEIYGGLSAGEFQLIRQTLLIFFQDLHIRVSMFLKDKVQNNNGRFVLPVSGPVPWGTEVPGLIRMFNNKGEEVKRIEFKHGGNYVPAPKEGSFELYGDRVLKLGTNMYSVNQPVETHVSGSSKNLASWTQESIAPNPLAKEELNFLARLMGGMEIKKPSGPEPGFRLNLFTTDEEEEQAALTRPEELSYEVINIQATQDQQRSEELARIMGEFEITEQPRLSTSKGDDLLAMMDEL

SEQ ID NO: 30470 - protein, 339 aa, Homo sapiens
MSVRTLPLLFLNLGGEMLYILDQRLRAQNIPGDKARKDEWTEVDRKRVLNDIISTMFNRKFMEELFKPQELYSKKALRTVYERLAHASIMKLNQASMDKLYDLMTMAFKYQVLLCPRPKDVLLVTFNHLDTIKGFIRDSPTILQQVDETLRQLTEIYGGLSAGEFQLIRQTLLIFFQDLHIRVSMFLKDKVQNNNGRFVLPVSGPVPWGTEVPGLIRMFNNKGEEVKRIEFKHGGNYVPAPKEGSFELYGDRVLKLGTNMYSVNQPVETHVSGSSKNLASWTQESIAPNPLAKEELNFLARLMGGMEIKKPSGPEPGFRLNLFTTDEEGDDLLAMMDEL

SEQ ID NO: 30471 - protein, 379 aa, Homo sapiens
MSVRTLPLLFLNLGGEMLYILDQRLRAQNIPGDKARKVLNDIISTMFNRKFMEELFKPQELYSKKALRTVYERLAHASIMKLNQASMDKLYDLMTMAFKYQVLLCPRPKDVLLVTFNHLDTIKGFIRDSPTILQQVDETLRQLTEIYGGLSAGEFQLIRQTLLIFFQDLHIRVSMFLKDKVQNNNGRFVLPVSGPVPWGTEVPGLIRMFNNKGEEVKRIEFKHGGNYVPAPKEGSFELYGDRVLKLGTNMYSVNQPVETHVSGSSKNLASWTQESIAPNPLAKEELNFLARLMGGMEIKKPSGPEPGFRLNLFTTDEEEEQAALTRPEELSYEVINIQATQDQQRSEELARIMGEFEITEQPRLSTSKGDDLLAMMDEL

SEQ ID NO: 30472 - protein, 223 aa, Homo sapiens
MSVRTLPLLFLNLGGEMLYILDQRLRAQNIPGDKARKVLNDIISTMFNRKFMEELFKPQELYSKKALRTVYERLAHASIMKLNQASMDKLYDLMTMAFKYQVLLCPRPKDVLLVTFNHLDTIKGFIRDSPTILQQVDETLRQLTEIYGGLSAGEFQLIRQTLLIFFQDLHIRRECFWKHMQETVHSAQCCLPGVGNYMEDRRRRLTFHYVYPFENFEFCTWAK

SEQ ID NO: 30473 - protein, 312 aa, Homo sapiens
MEQHNLTTVNEFILTGITDIAELQAPLFALFLMIYVISVMGNLGMIVLTKLDSRLQTPMYFFLRHLAFMDLGYSTTVGPKMLVNFVVDKNIISYYFCATQLAFFLVFIGSELFILSAMSYDLYVAICNPLLYTVIMSRRVCQVLVAIPYLYCTFISLLVTIKIFTLSFCGYNVISHFYCDSLPLLPLLCSNTHEIELIILIFAAIDLISSLLIVLLSYLLILVAILRMNSAGRQKAFSTCGAHLTVVIVFYGTLLFMYVQPKSSHSFDTDKVASIFYTLVIPMLNPLIYSLRNKDVKYALRRTWNNLCNIFV

SEQ ID NO: 30474 - protein, 314 aa, Homo sapiens
MDNSNWTSVSHFVLLGISTHPEEQIPLFLVFSLMYAINISGNLAIITLILSAPRLHIPMYIFLSNLALTDICFTSTTVPKMLQIIFSPTKVISYTGCLAQTYFFICFAVMENFILAVMAYDRYIAICHPFHYTMILTRMLCVKMVVMCHALSHLHAMLHTFLIGQLIFCADNRIPHFFCDLYALMKISCTSTYLNTLMIHTEGAVVISGALAFITASYACIILVVLRIPSAKGRWKTFSTCGSHLTVVAIFYGTLSWVYFRPLSSYSVTKGRIITVVYTVVTPMLNPFIYSLRNGDVKGGFMKWMSRMQTFFFR

SEQ ID NO: 30475 - protein, 309 aa, Homo sapiens
MTLGNSTEVTEFYLLGFGAQHEFWCILFIVFLLIYVTSIMGNSGIILLINTDSRFQTLTYFFLQHLAFVDICYTSAITPKMLQSFTEEKNLMLFQGCVIQFLVYATFATSDCYLLAMMAVDPYVAICKPLHYTVIMSRTVCIRLVAGSYIMGSINASVQTGFTCSLSFCKSNSINHFFCDVPPILALSCSNVDINIMLLVVFVGSNLIFTGLVVIFSYIYIMATILKMSSSAGRKKSFSTCASHLTAVTIFYGTLSYMYLQSHSNNSQENMKVAFIFYGTVIPMLNPLIYSLRNKEVKEALKVIGKKLF

SEQ ID NO: 30476 - protein, 330 aa, Homo sapiens
MLSLKLPRLFSIDQIPQVFHEQGILFGYRHPQSSATACILSLFQMTNETLNIWTHLLPFWFFAWRFVTALYMTDIKNDSYSWPMLVYMCTSCVYPLVSSCAHTFSSMSKNARHICYFLDYGAVNLFSLGSAIAYSAYTFPDALMCTTFHDYYVALAVLNTILSTGLSCYSRFLEIQKPRLCKVIRVLAFAYPYTWDSLPIFYRLFLFPGESAQNEATSYHQKHMIMTLLASFLYSAHLPERLAPGRFDYIGHSHQLFHVCVILATHMQMEAILLDKTLRKEWLLATSKPFSFSQIAGAILLCIIFSLSNIIYFSAALYRIPKPELHKKET

SEQ ID NO: 30477 - protein, 311 aa, Homo sapiens
MNDDGKVNASSEGYFILVGFSNWPHLEVVIFVVVLIFYLMTLIGNLFIIILSYLDSHLHTPMYFFLSNLSFLDLCYTTSSIPQLLVNLWGPEKTISYAGCMIQLYFVLALGTTECVLLVVMSYDRYAAVCRPLHYTVLMHPRFCHLLAVASWVSGFTNSALHSSFTFWVPLCGHRQVDHFFCEVPALLRLSCVDTHVNELTLMITSSIFVLIPLILILTSYGAIVRAVLRMQSTTGLQKVFGTCGAHLMAVSLFFIPAMCIYLQPPSGNSQDQGKFIALFYTVVTPSLNPLIYTLRNKVVRGAVKRLMGWE

SEQ ID NO: 30478 - protein, 377 aa, Homo sapiens
MPRRLQPRGAGTKGPPAPAPAASGAARNSHSAASRDPPASAKPLLRWDEVPDDFVECFILSGYRRLPCTAQECLASVLKPTNETLNFWTHFIPLLLFLSKFCRLFFLSGGDVPFHHPWLLPLWCYASGVLLTFAMSCTAHVFSCLSLRLRAAFFYLDYASISYYGFGSTVAYYYYLLPGLSLLDARVMTPYLQQRLGWHVDCTRLIAAYRALVLPVAFVLAVACTVACCKSRTDWCTYPFALRTFVFVMPLSMACPIMLESWLFDLRGENPTLFVHFYRRYFWLVVAAFFNVSKIPERIQPGLFDIIGHSHQLFHIFTFLSIYDQVYYVEEGLRQFLQAPPAAPTFSGTVGYMLLLVVCLGLVIRKFLNSSEFCSKK

SEQ ID NO: 30479 - protein, 477 aa, Homo sapiens
MWMFSWLCAILIILAIAGMNTIAKTTPHTKFTKKSEEREMPKGLKPSSGPPPEEEETLFTEMAEMAEPITKPSALDSVFGTATLSPFENFTLDPADFFLNCCDCCSPVPGQKGEPGETGQPGPKGEAGNLGIPGPPGVVGPQGPRGYKGEKGLKGERGDQGVPGYPGKPGAQGEPGPKGDKGNIGLGGVKGQKGSKGDTCGNCTKGEKGDQGAMGSPGLHGGPGAKGEKGEMGEKGEMGDKGCCGDSGERGGKGQKGEGGMKGEKGSKGDSGMEGKSGRNGLPGAKGDPGIKGEKGELGPPGLLGPTGPKGDIGNKGVRGPTGKKGSRGFKGSKGELARVPRSAFSAGLSKPFPPPNIPIKFEKILYNDQGNYSPVTGKFNCSIPGTYVFSYHITVRGRPARISLVAQNKKQFKSRETLYGQEIDQASLLVILKLSAGDQVWLEVSKDWNGVYVSAEDDSIFTGFLLYPEETSGISP

SEQ ID NO: 30480 - protein, 1114 aa, Homo sapiens
MEAAVGVPDGGDQGGAGPREDATPMDAYLRKLGLYRKLVAKDGSCLFRAVAEQVLHSQSRHVEVRMACIHYLRENREKFEAFIEGSFEEYLKRLENPQEWVGQVEISALSLMYRKDFIIYREPNVSPSQVTENNFPEKVLLCFSNGNHYDIVYPIKYKESSAMCQSLLYELLYEKVFKTDVSKIVMELDTLEVADEDNSEISDSEDDSCKSKTAAAAADVNGFKPLSGNEQLKNNGNSTSLPLSRKVLKSLNPAVYRNVEYEIWLKSKQAQQKRDYSIAAGLQYEVGDKCQVRLDHNGKFLNADVQGIHSENGPVLVEELGKKHTSKNLKAPPPESWNTVSGKKMKKPSTSGQNFHSDVDYRGPKNPSKPIKAPSALPPRLQHPSGVRQHAFSSHSSGSQSQKFSSEHKNLSRTPSQIIRKPDRERVEDFDHTSRESNYFGLSPEERREKQAIEESRLLYEIQNRDEQAFPALSSSSVNQSASQSSNPCVQRKSSHVGDRKGSRRRMDTEERKDKDSIHGHSQLDKRPEPSTLENITDDKYATVSSPSKSKKLECPSPAEQKPAEHVSLSNPAPLLVSPEVHLTPAVPSLPATVPAWPSEPTTFGPTGVPAPIPVLSVTQTLTTGPDSAVSQAHLTPSPVPVSIQAVNQPLMPLPQTLSLYQDPLYPGFPCNEKGDRAIVPPYSLCQTGEDLPKDKNILRFFFNLGVKAYSCPMWAPHSYLYPLHQAYLAACRMYPKVPVPVYPHNPWFQEAPAAQNESDCTCTDAHFPMQTEASVNGQMPQPEIGPPTFSSPLVIPPSQVSESHGQLSYQADLESETPGQLLHADYEESLSGKNMFPQPSFGPNPFLGPVPIAPPFFPHVWYGYPFQGFIENPVMRQNIVLPSDEKGELDLSLENLDLSKDCGSVSTVDEFPEARGEHVHSLPEASVSSKPDEGRTEQSSQTRKADTALASIPPVAEGKAHPPTQILNRERETVPVELEPKRTIQSLKEKTEKVKDPKTAADVVSPGANSVDSRVQRPKEESSEDENEVSNILRSGRSKQFYNQTYGSRKYKSDWGYSGRGGYQHVRSEESWKGQPSRSRDEGYQYHRNVRGRPFRGDRRRSGMGDGHRGQHT

SEQ ID NO: 30481 - protein, 1048 aa, Homo sapiens
MACIHYLRENREKFEAFIEGSFEEYLKRLENPQEWVGQVEISALSLMYRKDFIIYREPNVSPSQVTENNFPEKVLLCFSNGNHYDIVYPIKYKESSAMCQSLLYELLYEKVFKTDVSKIVMELDTLEVADEDNSEISDSEDDSCKSKTAAAAADVNGFKPLSGNELKNNGNSTSLPLSRKVLKSLNPAVYRNVEYEIWLKSKQAQQKRDYSIAAGLQYEVGDKCQVRLDHNGKFLNADVQGIHSENGPVLVEELGKKHTSKNLKAPPPESWNTVSGKKMKKPSTSGQNFHSDVDYRGPKNPSKPIKAPSALPPRLQHPSGVRQHAFSSHSSGSQSQKFSSEHKNLSRTPSQIIRKPDRERVEDFDHTSRESNYFGLSPEERREKQAIEESRLLYEIQNRDEQAFPALSSSSVNQSASQSSNPCVQRKSSHVGDRKGSRRRMDTEERKDKDSIHGHSQLDKRPEPSTLENITDDKYATVSSPSKSKKLECPSPAEQKPAEHVSLSNPAPLLVSPEVHLTPAVPSLPATVPAWPSEPTTFGPTGVPAPIPVLSVTQTLTTGPDSAVSQAHLTPSPVPVSIQAVNQPLMPLPQTLSLYQDPLYPGFPCNEKGDRAIVPPYSLCQTGEDLPKDKNILRFFFNLGVKAYSCPMWAPHSYLYPLHQAYLAACRMYPKVPVPVYPHNPWFQEAPAAQNESDCTCTDAHFPMQTEASVNGQMPQPEIGPPTFSSPLVIPPSQVSESHGQLSYQADLESETPGQLLHADYEESLSGKNMFPQPSFGPNPFLGPVPIAPPFFPHVWYGYPFQGFIENPVMRQNIVLPSDEKGELDLSLENLDLSKDCGSVSTVDEFPEARGEHVHSLPEASVSSKPDEGRTEQSSQTRKADTALASIPPVAEGKAHPPTQILNRERETVPVELEPKRTIQSLKEKTEKVKDPKTAADVVSPGANSVDSRVQRPKEESSEDENEVSNILRSGRSKQFYNQTYGSRKYKSDWGYSGRGGYQHVRSEESWKGQPSRSRDEGYQYHRNVRGRPFRGDRRRSGMGDGHRGQHT

SEQ ID NO: 30482 - protein, 1049 aa, Homo sapiens
MACIHYLRENREKFEAFIEGSFEEYLKRLENPQEWVGQVEISALSLMYRKDFIIYREPNVSPSQVTENNFPEKVLLCFSNGNHYDIVYPIKYKESSAMCQSLLYELLYEKVFKTDVSKIVMELDTLEVADEDNSEISDSEDDSCKSKTAAAAADVNGFKPLSGNEQLKNNGNSTSLPLSRKVLKSLNPAVYRNVEYEIWLKSKQAQQKRDYSIAAGLQYEVGDKCQVRLDHNGKFLNADVQGIHSENGPVLVEELGKKHTSKNLKAPPPESWNTVSGKKMKKPSTSGQNFHSDVDYRGPKNPSKPIKAPSALPPRLQHPSGVRQHAFSSHSSGSQSQKFSSEHKNLSRTPSQIIRKPDRERVEDFDHTSRESNYFGLSPEERREKQAIEESRLLYEIQNRDEQAFPALSSSSVNQSASQSSNPCVQRKSSHVGDRKGSRRRMDTEERKDKDSIHGHSQLDKRPEPSTLENITDDKYATVSSPSKSKKLECPSPAEQKPAEHVSLSNPAPLLVSPEVHLTPAVPSLPATVPAWPSEPTTFGPTGVPAPIPVLSVTQTLTTGPDSAVSQAHLTPSPVPVSIQAVNQPLMPLPQTLSLYQDPLYPGFPCNEKGDRAIVPPYSLCQTGEDLPKDKNILRFFFNLGVKAYSCPMWAPHSYLYPLHQAYLAACRMYPKVPVPVYPHNPWFQEAPAAQNESDCTCTDAHFPMQTEASVNGQMPQPEIGPPTFSSPLVIPPSQVSESHGQLSYQADLESETPGQLLHADYEESLSGKNMFPQPSFGPNPFLGPVPIAPPFFPHVWYGYPFQGFIENPVMRQNIVLPSDEKGELDLSLENLDLSKDCGSVSTVDEFPEARGEHVHSLPEASVSSKPDEGRTEQSSQTRKADTALASIPPVAEGKAHPPTQILNRERETVPVELEPKRTIQSLKEKTEKVKDPKTAADVVSPGANSVDSRVQRPKEESSEDENEVSNILRSGRSKQFYNQTYGSRKYKSDWGYSGRGGYQHVRSEESWKGQPSRSRDEGYQYHRNVRGRPFRGDRRRSGMGDGHRGQHT

SEQ ID NO: 30483 - protein, 145 aa, Homo sapiens
MACIHYLRENREKFEAFIEGSFEEYLKRLENPQEWVGQVEISALSLMYRKDFIIYREPNVSPSQVTENNFPEKVLLCFSNGNHYDIVYPIKYKESSAMCQSLLYELLYEKVFKTDVSKIVMELDTLEVADEDNSEISDSEDDSCK

SEQ ID NO: 30484 - protein, 346 aa, Homo sapiens
MARPQRTPARSPDSIVEVKSKFDAEFRRFALPRASVSGFQEFSRLLRAVHQIPGLDVLLGYTDAHGDLLPLTNDDSLHRALASGPPPLRLLVQKRAEADSSGLAFASNSLQRRKKGLLLRPVAPLRTRPPLLISLPQDFRQVSSVIDVDLLPETHRRVRLHKHGSDRPLGFYIRDGMSVRVAPQGLERVPGIFISRLVRGGLAESTGLLAVSDEILEVNGIEVAGKTLDQVTDMMVANSHNLIVTVKPANQRNNVVRGASGRLTGPPSAGPGPAEPDSDDDSSDLVIENRQPPSSNGLSQGPPCWDLHPGCRHPGTRSSLPSLDDQEQASSGWGSRIRGDGSGFSL

SEQ ID NO: 30485 - protein, 345 aa, Homo sapiens
MARPQRTPARSPDSIVEVKSKFDAEFRRFALPRASVSGFQEFSRLLRAVHQIPGLDVLLGYTDAHGDLLPLTNDDSLHRALASGPPPLRLLVQKREADSSGLAFASNSLQRRKKGLLLRPVAPLRTRPPLLISLPQDFRQVSSVIDVDLLPETHRRVRLHKHGSDRPLGFYIRDGMSVRVAPQGLERVPGIFISRLVRGGLAESTGLLAVSDEILEVNGIEVAGKTLDQVTDMMVANSHNLIVTVKPANQRNNVVRGASGRLTGPPSAGPGPAEPDSDDDSSDLVIENRQPPSSNGLSQGPPCWDLHPGCRHPGTRSSLPSLDDQEQASSGWGSRIRGDGSGFSL

SEQ ID NO: 30486 - protein, 780 aa, Homo sapiens
MEQVEILRKFIQRVQAMKSPDHNGEDNFARDFMRLRRLSTKYRTEKIYPTATGEKEENVKKNRYKDILPFDHSRVKLTLKTPSQDSDYINANFIKGVYGPKAYVATQGPLANTVIDFWRMIWEYNVVIIVMACREFEMGRKKCERYWPLYGEDPITFAPFKISCEDEQARTDYFIRTLLLEFQNESRRLYQFHYVNWPDHDVPSSFDSILDMISLMRKYQEHEDVPICIHCSAGCGRTGAICAIDYTWNLLKAGKIPEEFNVFNLIQEMRTQRHSAVQTKEQYELVHRAIAQLFEKQLQLYEIHGAQKIADGVNEINTENMVSSIEPEKQDSPPPKPPRTRSCLVEGDAKEEILQPPEPHPVPPILTPSPPSAFPTVTTVWQDNDRYHPKPVLHMVSSEQHSADLNRNYSKSTELPGKNESTIEQIDKKLERNLSFEIKKVPLQEGPKSFDGNTLLNRGHAIKIKSASPCIADKISKPQELSSDLNVGDTSQNSCVDCSVTQSNKVSVTPPEESQNSDTPPRPDRLPLDEKGHVTWSFHGPENAIPIPDLSEGNSSDINYQTRKTVSLTPSPTTQVETPDLVDHDNTSPLFRTPLSFTNPLHSDDSDSDERNSDGAVTQNKTNISTASATVSAATSTESISTRKVLPMSIARHNIAGTTHSGAEKDVDVSEDSPPPLPERTPESFVLASEHNTPVRSEWSELQSQERSEQKKSEGLITSENEKCDHPAGGIHYEMCIECPPTFSDKREQISENPTEATDIGFGNRCGKPKGPRDPPSEWT

SEQ ID NO: 30487 - protein, 650 aa, Homo sapiens
MACREFEMGRKKCERYWPLYGEDPITFAPFKISCEDEQARTDYFIRTLLLEFQNESRRLYQFHYVNWPDHDVPSSFDSILDMISLMRKYQEHEDVPICIHCSAGCGRTGAICAIDYTWNLLKAGKIPEEFNVFNLIQEMRTQRHSAVQTKEQYELVHRAIAQLFEKQLQLYEIHGAQKIADGVNEINTENMVSSIEPEKQDSPPPKPPRTRSCLVEGDAKEEILQPPEPHPVPPILTPSPPSAFPTVTTVWQDNDRYHPKPVLHMVSSEQHSADLNRNYSKSTELPGKNESTIEQIDKKLERNLSFEIKKVPLQEGPKSFDGNTLLNRGHAIKIKSASPCIADKISKPQELSSDLNVGDTSQNSCVDCSVTQSNKVSVTPPEESQNSDTPPRPDRLPLDEKGHVTWSFHGPENAIPIPDLSEGNSSDINYQTRKTVSLTPSPTTQVETPDLVDHDNTSPLFRTPLSFTNPLHSDDSDSDERNSDGAVTQNKTNISTASATVSAATSTESISTRKVLPMSIARHNIAGTTHSGAEKDVDVSEDSPPPLPERTPESFVLASEHNTPVRSEWSELQSQERSEQKKSEGLITSENEKCDHPAGGIHYEMCIECPPTFSDKREQISENPTEATDIGFGNRCGKPKGPRDPPSEWT

SEQ ID NO: 30488 - protein, 661 aa, Homo sapiens
MIWEYNVVIIVMACREFEMGRKKCERYWPLYGEDPITFAPFKISCEDEQARTDYFIRTLLLEFQNESRRLYQFHYVNWPDHDVPSSFDSILDMISLMRKYQEHEDVPICIHCSAGCGRTGAICAIDYTWNLLKAGKIPEEFNVFNLIQEMRTQRHSAVQTKEQYELVHRAIAQLFEKQLQLYEIHGAQKIADGVNEINTENMVSSIEPEKQDSPPPKPPRTRSCLVEGDAKEEILQPPEPHPVPPILTPSPPSAFPTVTTVWQDNDRYHPKPVLHMVSSEQHSADLNRNYSKSTELPGKNESTIEQIDKKLERNLSFEIKKVPLQEGPKSFDGNTLLNRGHAIKIKSASPCIADKISKPQELSSDLNVGDTSQNSCVDCSVTQSNKVSVTPPEESQNSDTPPRPDRLPLDEKGHVTWSFHGPENAIPIPDLSEGNSSDINYQTRKTVSLTPSPTTQVETPDLVDHDNTSPLFRTPLSFTNPLHSDDSDSDERNSDGAVTQNKTNISTASATVSAATSTESISTRKVLPMSIARHNIAGTTHSGAEKDVDVSEDSPPPLPERTPESFVLASEHNTPVRSEWSELQSQERSEQKKSEGLITSENEKCDHPAGGIHYEMCIECPPTFSDKREQISENPTEATDIGFGNRCGKPKGPRDPPSEWT

SEQ ID NO: 30489 - protein, 408 aa, Homo sapiens
MPGHLQEGFGCVVTNRFDQLFDDESDPFEVLKAAENKKKEAGGGGVGGPGAKSAAQAAAQTNSNAAGKQLRKESQKDRKNPLPPSVGVVDKKEETQPPVALKKEGIRRVGRRPDQQLQGEGKIIDRRPERRPPRERRFEKPLEEKGEGGEFSVDRPIIDRPIRGRGGLGRGRGGRGRGMGRGDGFDSRGKREFDRHSGSDRSSFSHYSGLKHEDKRGGSGSHNWGTVKDELTESPKYIQKQISYNYSDLDQSNVTEETPEGEEHHPVADTENKENEVEEVKEEGPKEMTLDEWKAIQNKDRAKVEFNIRKPNEGADGQWKKGFVLHKSKSEEAHAEDSVMDHHFRKPANDITSQLEINFGDLGRPGRGGRGGRGGRGRGGRPNRGSRTDKSSASAPDVDDPEAFPALA

SEQ ID NO: 30490 - protein, 402 aa, Homo sapiens
MPGHLQEGFGCVVTNRFDQLFDDESDPFEVLKAAENKKKEAGGGGVGGPGAKSAAQAAAQTNSNAAGKQLRKESQKDRKNPLPPSVGVVDKKEETQPPVALKKEGIRRVGRRPDQQLQGEGKIIDRRPERRPPRERRFEKPLEEKGEGGEFSVDRPIIDRPIRGRGGLGRGRGGRGRGMGRGDGFDSRGKREFDRHSGSDRSGLKHEDKRGGSGSHNWGTVKDELTESPKYIQKQISYNYSDLDQSNVTEETPEGEEHHPVADTENKENEVEEVKEEGPKEMTLDEWKAIQNKDRAKVEFNIRKPNEGADGQWKKGFVLHKSKSEEAHAEDSVMDHHFRKPANDITSQLEINFGDLGRPGRGGRGGRGGRGRGGRPNRGSRTDKSSASAPDVDDPEAFPALA

SEQ ID NO: 30491 - protein, 393 aa, Homo sapiens
MPGHLQEGFGCVVTNRFDQLFDDESDPFEVLKAAENKKKEAGGGGVGGPGAKSAAQAAAQTNSNAAGKQLRKESQKDRKNPLPPSVGVVDKKEETQPPVALKKEGIRRVGRRPDQQLQGEGKIIDRRPERRPPRERRFEKPLEEKGEGGEFSVDRPIIDRPIRGRGGLGRGRGGRGRGMGRGDGFDSRGKREFDRHSGSDRSSFSHYSGLKHEDKRGGSGSHNWGTVKDELTDLDQSNVTEETPEGEEHHPVADTENKENEVEEVKEEGPKEMTLDEWKAIQNKDRAKVEFNIRKPNEGADGQWKKGFVLHKSKSEEAHAEDSVMDHHFRKPANDITSQLEINFGDLGRPGRGGRGGRGGRGRGGRPNRGSRTDKSSASAPDVDDPEAFPALA

SEQ ID NO: 30492 - protein, 387 aa, Homo sapiens
MPGHLQEGFGCVVTNRFDQLFDDESDPFEVLKAAENKKKEAGGGGVGGPGAKSAAQAAAQTNSNAAGKQLRKESQKDRKNPLPPSVGVVDKKEETQPPVALKKEGIRRVGRRPDQQLQGEGKIIDRRPERRPPRERRFEKPLEEKGEGGEFSVDRPIIDRPIRGRGGLGRGRGGRGRGMGRGDGFDSRGKREFDRHSGSDRSGLKHEDKRGGSGSHNWGTVKDELTDLDQSNVTEETPEGEEHHPVADTENKENEVEEVKEEGPKEMTLDEWKAIQNKDRAKVEFNIRKPNEGADGQWKKGFVLHKSKSEEAHAEDSVMDHHFRKPANDITSQLEINFGDLGRPGRGGRGGRGGRGRGGRPNRGSRTDKSSASAPDVDDPEAFPALA

SEQ ID NO: 30493 - protein, 331 aa, Homo sapiens
MGTPQKDVIIKSDAPDTLLLEKHADYIASYGSKKDDYEYCMSEYLRMSGIYWGLTVMDLMGQLHRMNREEILAFIKSCQHECGGISASIGHDPHLLYTLSAVQILTLYDSINVIDVNKVVEYVKGLQKEDGSFAGDIWGEIDTRFSFCAVATLALLGKLDAINVEKAIEFVLSCMNFDGGFGCRPGSESHAGQIYCCTGFLAITSQLHQVNSDLLGWWLCERQLPSGGLNGRPEKLPDVCYSWWVLASLKIIGRLHWIDREKLRNFILACQDEETGGFADRPGDMVDPFHTLFGIAGLSLLGEEQIKPVNPVFCMPEEVLQRVNVQPELVS

SEQ ID NO: 30494 - protein, 289 aa, Homo sapiens
MAFRQALQLAACGLAGGSAAVLFSAVAVGKPRAGGDAEPRPAEPPAWAGGARPGPGVWDPNWDRREPLSLINVRKRNVESGEEELASKLDHYKAKATRHIFLIRHSQYHVDGSLEKDRTLTPLGREQAELTGLRLASLGLKFNKIVHSSMTRAIETTDIISRHLPGVCKVSTDLLREGAPIEPDPPVSHWKPEAVQYYEDGARIEAAFRNYIHRADARQEEDSYEIFICHANVIRYIVCRALQFPPEGWLRLSLNNGSITHLVIRPNGRVALRTLGDTGFMPPDKITRS

SEQ ID NO: 30495 - protein, 255 aa, Homo sapiens
MAFRQALQLAACGLAGGSAAVLFSAVAVGKPRAGGDAEPRPAEPPAWAGGARPGPGVWDPNWDRREPLSLINVRKRNVESGEEELASKLDHYKAKATRHIFLIRHSQYHVDGSLEKDRTLTPLGREQAELTGLRLASLGLKFNKIVHSSMTRAIETTDIISRHLPGVCKVSTDLLREGAPIEPDPPVSHWKPEAVQYYEDGARIEAAFRNYIHRADARQEEDSYEIFICHANVIRYIVCSIPPLLSAGDFVLLGS

SEQ ID NO: 30496 - protein, 195 aa, Homo sapiens
MKLASGFLVLWLSLGGGLAQSDTSPDTEESYSDWGLRHLRGSFESVNSYFDSFLELLGGKNGVCQYRCRYGKAPMPRPGYKPQEPNGCGSYFLGLKVPESMDLGIPAMTKCCNQLDVCYDTCGANKYRCDAKFRWCLHSICSDLKRSLGFVSKVEAACDSLVDTVFNTVWTLGCRPFMNSQRAACICAEEEKEEL

SEQ ID NO: 30497 - protein, 194 aa, Homo sapiens
MKLASGFLVLWLSLGGGLAQSDTSPDTEESYSDWGLRHLRGSFESVNSYFDSFLELLGGKNGVCQYRCRYGKAPMPRPGYKPQEPNGCGSYFLGLKVPESMDLGIPAMTKCCNQLDVCYDTCGANKYRCDAKFRWCLHSICSDLKRSLGFVSKVEACDSLVDTVFNTVWTLGCRPFMNSQRAACICAEEEKEEL

SEQ ID NO: 30498 - protein, 402 aa, Homo sapiens
MNGGVQTWTQPRLCYLVKEGGSHGFSLKTVQGKKGVYMTDITPQGVAMRAGVLADDHLIEVNGENVEDASHEEVVEKVKKSGSRVMFLLVDKETDKRHVEQKIQFKRETASLKLLPHQPRIVEMKKGSNGYGFYLRAGSEQKGWGRVGQIIKDIDSGSPAEEAGLKNNDLVVAVNGESVETLDHDSVVEMIRKGGDQTSLLVVDKETDNMYRLAHFSPFLYYQSQELPNGSVKEAPAPTPTSLEVSSPPDTTEEEDHKPKLCRLAKGENGYGFHLNAIRGLPGSFIKEVQKGGPADLAGLEDEDVIIEVNGVNVLDEPYEKVVDRIQSSGKNVTLLVCGKKAYDYFQAKKIPIVSSLADPLDTPPDSKEGIVVESKHDSHMAKERAHSTASHSSSNSEDTEM

SEQ ID NO: 30499 - protein, 268 aa, Homo sapiens
MNGGVQTWTQPRLCYLVKEGGSHGFSLKTVQGKKGVYMTDITPQGVAMRAGVLADDHLIEVNGENVEDASHEEVVEKVKKSGSRVMFLLVDKETDKRHVEQKIQFKRETASLKLLPHQPRIVEMKKGSNGYGFYLRAGSEQKGQIIKDIDSGSPAEEAGLKNNDLVVAVNGESVETLDHDSVVEMIRKGGDQTSLLVVDKETDNMYRLAHFSPFLYYQSQELPNGSVKEAPAPTPTSLEVSSPPDTTEEEDHKPKLCRLAKGTEGRSC

SEQ ID NO: 30500 - protein, 352 aa, Homo sapiens
MALTVDVAGPAPWGFRITGGRDFHTPIMVTKVAERGKAKDADLRPGDIIVAINGESAEGMLHAEAQSKIRQSPSPLRLQLDRSQATSPGQTNGDSSLEVLATRFQGSVRTYTESQSSLRSSYSSPTSLSPRAGSPFSPPPSSSSLTGEAAISRSFQSLACSPGLPAADRLSYSGRPGSRQAGLGRAGDSAVLVLPPSPGPRSSRPSMDSEGGSLLLDEDSEVFKMLQENREGRAAPRQSSSFRLLQEALEAEERGGTPAFLPSSLSPQSSLPASRALATPPKLHTCEKCSTSIANQAVRIQEGRYRHPGCYTCADCGLNLKMRGHFWVGDELYCEKHARQRYSAPATLSSRA

SEQ ID NO: 30501 - protein, 224 aa, Homo sapiens
MALTVDVAGPAPWGFRITGGRDFHTPIMVTKVAERGKAKDADLRPGDIIVAINGESAEGMLHAEAQSKIRQSPSPLRLQLDRSQATSPGQTNGDSSLEVLATRFQGSVRTYTESQSSLRSSYSSPTSLSPRAGSPFSPPPSSSSLTGEAAISRRRPRPRWRLGGAGAAAFPGPSFLQAQHGLGRGKPPPGRGLGSLQDAAGKSRGTGGPPTVQLLSALAGSPGG

SEQ ID NO: 30502 - protein, 366 aa, Homo sapiens
MALTVDVAGPAPWGFRITGGRDFHTPIMVTKVAERGKAKDADLRPGDIIVAINGESAEGMLHAEAQSKIRQSPSPLRLQLDRSQATSPGQTNGDSSLEVLATRFQGSVRTYTESQSSLRSSYSSPTSLSPRAGSPFSPPPSSSSLTGEAAISRSFQSLACSPGLPAADRLSYSGRPGSRQAGLGRAGDSAVLVLPPSPGPRSSRPSMDSEGGSLLLDEDSEVFKMLQENREGRAAPRQSSSFRLLQEALEAEERGGTPAFLPSSLSPQSSLPASRALATPPKLHTCEKCSTSIANQAVRIQEGRYRHPGCYTCADCGLNLKMRGHFWEDACAMEGMRLSLEALEGMVEGAKRRDRRKTRRPIQPSW

SEQ ID NO: 30503 - protein, 278 aa, Homo sapiens
MALTVDVAGPAPWGFRITGGRDFHTPIMVTKVAERGKAKDADLRPGDIIVAINGESAEGMLHAEAQSKIRQSPSPLRLQLDRSQATSPGQTNGDSSLEVLATRFQGSVRTYTESQSSLRSSYSSPTSLSPRAGSPFSPPPSSSSLTGEAAISRSFQSLACSPGLPAADRLSYSGRPGSRQAGLGRAGDSAVLVLPPSPGPRSSRPSMDSEGGSLLLDEDSEVFKMLQENREGRAAPRQSSSFRLLQEALEAEERGTRLCASRRAGTATPAATPVPTVG

SEQ ID NO: 30504 - protein, 602 aa, Homo sapiens
MRGGRARPAWESFMGLPPRSSAKWGAGQSLDRLCCAPGSRGLAGAPGRMRAPPAGRSQPAGGPGDSLPHPPGGLGPGGSAWARRAEAAASRARGGGRGGPGITWAEAGPGAPGGLSPESGRRQRERWRLPAFPPSRAWAPSRTGERQPGERAHLRLSARPALPGAGLLSAPLSARNPGLVRGPAPWSLASAGAPPRAALSPAGALLLQPPARRVLCPRSEGGSRTGRAGPSGWAPPRGARSAESTDRLKGMALTVDVAGPAPWGFRITGGRDFHTPIMVTKVAERGKAKDADLRPGDIIVAINGESAEGMLHAEAQSKIRQSPSPLRLQLDRSQATSPGQTNGDSSLEVLATRFQGSVRTYTESQSSLRSSYSSPTSLSPRAGSPFSPPPSSSSLTGEAAISRSFQSLACSPGLPAADRLSYSGRPGSRQAGLGRAGDSAVLVLPPSPGPRSSRPSMDSEGGSLLLDEDSEVFKMLQENREGRAAPRQSSSFRLLQEALEAEERGGTPAFLPSSLSPQSSLPASRALATPPKLHTCEKCSTSIANQAVRIQEGRYRHPGCYTCADCGLNLKMRGHFWVGDELYCEKHARQRYSAPATLSSRA

SEQ ID NO: 30505 - protein, 488 aa, Homo sapiens
MSTPGVNSSASLSPDRLNSPVTIPAVMFIFGVVGNLVAIVVLCKSRKEQKETTFYTLVCGLAVTDLLGTLLVSPVTIATYMKGQWPGGQPLCEYSTFILLFFSLSGLSIICAMSVERYLAINHAYFYSHYVDKRLAGLTLFAVYASNVLFCALPNMGLGSSRLQYPDTWCFIDWTTNVTAHAAYSYMYAGFSSFLILATVLCNVLVCGALLRMHRQFMRRTSLGTEQHHAAAAASVASRGHPAASPALPRLSDFRRRRSFRRIAGAEIQMVILLIATSLVVLICSIPLVVRVFVNQLYQPSLEREVSKNPDLQAIRIASVNPILDPWIYILLRKTVLSKAIEKIKCLFCRIGGSRRERSGQHCSDSQRTSSAMSGHSRSFISRELKEISSTSQTLLPDLSLPDLSENGLGGRNLLPGVPGMGLAQEDTTSLRTLRISETSDSSQGQDSESVLLVDEAGGSGRAGPAPKGSSLQVTFPSETLNLSEKCI

SEQ ID NO: 30506 - protein, 329 aa, Homo sapiens
MTTQQIDLQGPGPWGFRLVGGKDFEQPLAISRVTPGSKAALANLCIGDVITAIDGENTSNMTHLEAQNRIKGCTDNLTLTVARSEHKVWSPLVTEEGKRHPYKMNLASEPQEVLHIGSAHNRSAMPFTASPASSTTARVITNQYNNPAGLYSSENISNFNNALESKTAASGVEANSRPLDHAQPPSSLVIDKESEVYKMLQEKQELNEPPKQSTSFLVLQEILESEEKGDPNKPSGFRSVKAPVTKVAASIGNAQKLPMCDKCGTGIVGVFVKLRDRHRHPECYVCTDCGTNLKQKGHFFVEDQIYCEKHARERVTPPEGYEVVTVFPK

SEQ ID NO: 30507 - protein, 506 aa, Homo sapiens
MLKPLWKAAVAPTWPCSMPPRRPWDREAGTLQVLGALAVLWLGSVALICLLWQVPRPPTWGQVQPKDVPRSWEHGSSPAWEPLEAEARQQRDSCQLVLVESIPQDLPSAAGSPSAQPLGQAWLQLLDTAQESVHVASYYWSLTGPDIGVNDSSSQLGEALLQKLQQLLGRNISLAVATSSPTLARTSTDLQVLAARGAHVRQVPMGRLTRGVLHSKFWVVDGRHIYMGSANMDWRSLTQVKELGAVIYNCSHLAQDLEKTFQTYWVLGVPKAVLPKTWPQNFSSHFNRFQPFHGLFDGVPTTAYFSASPPALCPQGRTRDLEALLAVMGSAQEFIYASVMEYFPTTRFSHPPRYWPVLDNALRAAAFGKGVRVRLLVGCGLNTDPTMFPYLRSLQALSNPAANVSVDVKVFIVPVGNHSNIPFSRVNHSKFMVTEKAAYIGTSNWSEDYFSSTAGVGLVVTQSPGAQPAGATVQEQLRQLFERDWSSRYAVGLDGQAPGQDCVWQG

SEQ ID NO: 30508 - protein, 176 aa, Homo sapiens
MKVLLCDLLLLSLFSSVFSSCQRDCLTCQEKLHPALDSFDLEVCILECEEKVFPSPLWTPCTKVMARSSWQLSPAAPEHVAAALYQPRASEMQHLRRMPRVRSLFQEQEEPEPGMEEAGEMEQKQLQKRFGGFTGARKSARKLANQKRFSEFMRQYLVLSMQSSQRRRTLHQNGNV

SEQ ID NO: 30509 - protein, 112 aa, Homo sapiens
MARSSWQLSPAAPEHVAAALYQPRASEMQHLRRMPRVRSLFQEQEEPEPGMEEAGEMEQKQLQKRFGGFTGARKSARKLANQKRFSEFMRQYLVLSMQSSQRRRTLHQNGNV

SEQ ID NO: 30510 - protein, 836 aa, Homo sapiens
MIPFLPMFSLLLLLIVNPINANNHYDKILAHSRIRGRDQGPNVCALQQILGTKKKYFSTCKNWYKKSICGQKTTVLYECCPGYMRMEGMKGCPAVLPIDHVYGTLGIVGATTTQRYSDASKLREEIEGKGSFTYFAPSNEAWDNLDSDIRRGLESNVNVELLNALHSHMINKRMLTKDLKNGMIIPSMYNNLGLFINHYPNGVVTVNCARIIHGNQIATNGVVHVIDRVLTQIGTSIQDFIEAEDDLSSFRAAAITSDILEALGRDGHFTLFAPTNEAFEKLPRGVLERIMGDKVASEALMKYHILNTLQCSESIMGGAVFETLEGNTIEIGCDGDSITVNGIKMVNKKDIVTNNGVIHLIDQVLIPDSAKQVIELAGKQQTTFTDLVAQLGLASALRPDGEYTLLAPVNNAFSDDTLSMDQRLLKLILQNHILKVKVGLNELYNGQILETIGGKQLRVFVYRTAVCIENSCMEKGSKQGRNGAIHIFREIIKPAEKSLHEKLKQDKRFSTFLSLLEAADLKELLTQPGDWTLFVPTNDAFKGMTSEEKEILIRDKNALQNIILYHLTPGVFIGKGFEPGVTNILKTTQGSKIFLKEVNDTLLVNELKSKESDIMTTNGVIHVVDKLLYPADTPVGNDQLLEILNKLIKYIQIKFVRGSTFKEIPVTVYTTKIITKVVEPKIKVIEGSLQPIIKTEGPTLTKVKIEGEPEFRLIKEGETITEVIHGEPIIKKYTKIIDGVPVEITEKETREERIITGPEIKYTRISTGGGETEETLKKLLQEEVTKVTKFIEGGDGHLFEDEEIKRLLQGDTPVRKLQANKKVQGSRRRLREGRSQ

SEQ ID NO: 30511 - protein, 779 aa, Homo sapiens
MIPFLPMFSLLLLLIVNPINANNHYDKILAHSRIRGRDQGPNVCALQQILGTKKKYFSTCKNWYKKSICGQKTTVLYECCPGYMRMEGMKGCPAVLPIDHVYGTLGIVGATTTQRYSDASKLREEIEGKGSFTYFAPSNEAWDNLDSDIRRGLESNVNVELLNALHSHMINKRMLTKDLKNGMIIPSMYNNLGLFINHYPNGVVTVNCARIIHGNQIATNGVVHVIDRVLTQIGTSIQDFIEAEDDLSSFRAAAITSDILEALGRDGHFTLFAPTNEAFEKLPRGVLERIMGDKVASEALMKYHILNTLQCSESIMGGAVFETLEGNTIEIGCDGDSITVNGIKMVNKKDIVTNNGVIHLIDQVLIPDSAKQVIELAGKQQTTFTDLVAQLGLASALRPDGEYTLLAPVNNAFSDDTLSMDQRLLKLILQNHILKVKVGLNELYNGQILETIGGKQLRVFVYRTAVCIENSCMEKGSKQGRNGAIHIFREIIKPAEKSLHEKLKQDKRFSTFLSLLEAADLKELLTQPGDWTLFVPTNDAFKGMTSEEKEILIRDKNALQNIILYHLTPGVFIGKGFEPGVTNILKTTQGSKIFLKEVNDTLLVNELKSKESDIMTTNGVIHVVDKLLYPADTPVGNDQLLEILNKLIKYIQIKFVRGSTFKEIPVTVYKPIIKKYTKIIDGVPVEITEKETREERIITGPEIKYTRISTGGGETEETLKKLLQEEVTKVTKFIEGGDGHLFEDEEIKRLLQGDTPVRKLQANKKVQGSRRRLREGRSQ

SEQ ID NO: 30512 - protein, 781 aa, Homo sapiens
MIPFLPMFSLLLLLIVNPINANNHYDKILAHSRIRGRDQGPNVCALQQILGTKKKYFSTCKNWYKKSICGQKTTVLYECCPGYMRMEGMKGCPAVLPIDHVYGTLGIVGATTTQRYSDASKLREEIEGKGSFTYFAPSNEAWDNLDSDIRRGLESNVNVELLNALHSHMINKRMLTKDLKNGMIIPSMYNNLGLFINHYPNGVVTVNCARIIHGNQIATNGVVHVIDRVLTQIGTSIQDFIEAEDDLSSFRAAAITSDILEALGRDGHFTLFAPTNEAFEKLPRGVLERIMGDKVASEALMKYHILNTLQCSESIMGGAVFETLEGNTIEIGCDGDSITVNGIKMVNKKDIVTNNGVIHLIDQVLIPDSAKQVIELAGKQQTTFTDLVAQLGLASALRPDGEYTLLAPVNNAFSDDTLSMDQRLLKLILQNHILKVKVGLNELYNGQILETIGGKQLRVFVYRTAVCIENSCMEKGSKQGRNGAIHIFREIIKPAEKSLHEKLKQDKRFSTFLSLLEAADLKELLTQPGDWTLFVPTNDAFKGMTSEEKEILIRDKNALQNIILYHLTPGVFIGKGFEPGVTNILKTTQGSKIFLKEVNDTLLVNELKSKESDIMTTNGVIHVVDKLLYPADTPVGNDQLLEILNKLIKYIQIKFVRGSTFKEIPVTVYRPTLTKVKIEGEPEFRLIKEGETITEVIHGEPIIKKYTKIIDGVPVEITEKETREERIITGPEIKYTRISTGGGETEETLKKLLQEDTPVRKLQANKKVQGSRRRLREGRSQ

SEQ ID NO: 30513 - protein, 751 aa, Homo sapiens
MIPFLPMFSLLLLLIVNPINANNHYDKILAHSRIRGRDQGPNVCALQQILGTKKKYFSTCKNWYKKSICGQKTTVLYECCPGYMRMEGMKGCPAVLPIDHVYGTLGIVGATTTQRYSDASKLREEIEGKGSFTYFAPSNEAWDNLDSDIRRGLESNVNVELLNALHSHMINKRMLTKDLKNGMIIPSMYNNLGLFINHYPNGVVTVNCARIIHGNQIATNGVVHVIDRVLTQIGTSIQDFIEAEDDLSSFRAAAITSDILEALGRDGHFTLFAPTNEAFEKLPRGVLERIMGDKVASEALMKYHILNTLQCSESIMGGAVFETLEGNTIEIGCDGDSITVNGIKMVNKKDIVTNNGVIHLIDQVLIPDSAKQVIELAGKQQTTFTDLVAQLGLASALRPDGEYTLLAPVNNAFSDDTLSMDQRLLKLILQNHILKVKVGLNELYNGQILETIGGKQLRVFVYRTAVCIENSCMEKGSKQGRNGAIHIFREIIKPAEKSLHEKLKQDKRFSTFLSLLEAADLKELLTQPGDWTLFVPTNDAFKGMTSEEKEILIRDKNALQNIILYHLTPGVFIGKGFEPGVTNILKTTQGSKIFLKEVNDTLLVNELKSKESDIMTTNGVIHVVDKLLYPADTPVGNDQLLEILNKLIKYIQIKFVRGSTFKEIPVTVYKPIIKKYTKIIDGVPVEITEKETREERIITGPEIKYTRISTGGGETEETLKKLLQEDTPVRKLQANKKVQGSRRRLREGRSQ

SEQ ID NO: 30514 - protein, 809 aa, Homo sapiens
MIPFLPMFSLLLLLIVNPINANNHYDKILAHSRIRGRDQGPNVCALQQILGTKKKYFSTCKNWYKKSICGQKTTVLYECCPGYMRMEGMKGCPAVLPIDHVYGTLGIVGATTTQRYSDASKLREEIEGKGSFTYFAPSNEAWDNLDSDIRRGLESNVNVELLNALHSHMINKRMLTKDLKNGMIIPSMYNNLGLFINHYPNGVVTVNCARIIHGNQIATNGVVHVIDRVLTQIGTSIQDFIEAEDDLSSFRAAAITSDILEALGRDGHFTLFAPTNEAFEKLPRGVLERIMGDKVASEALMKYHILNTLQCSESIMGGAVFETLEGNTIEIGCDGDSITVNGIKMVNKKDIVTNNGVIHLIDQVLIPDSAKQVIELAGKQQTTFTDLVAQLGLASALRPDGEYTLLAPVNNAFSDDTLSMDQRLLKLILQNHILKVKVGLNELYNGQILETIGGKQLRVFVYRTAVCIENSCMEKGSKQGRNGAIHIFREIIKPAEKSLHEKLKQDKRFSTFLSLLEAADLKELLTQPGDWTLFVPTNDAFKGMTSEEKEILIRDKNALQNIILYHLTPGVFIGKGFEPGVTNILKTTQGSKIFLKEVNDTLLVNELKSKESDIMTTNGVIHVVDKLLYPADTPVGNDQLLEILNKLIKYIQIKFVRGSTFKEIPVTVYRPTLTKVKIEGEPEFRLIKEGETITEVIHGEPIIKKYTKIIDGVPVEITEKETREERIITGPEIKYTRISTGGGETEETLKKLLQEEVTKVTKFIEGGDGHLFEDEEIKRLLQGDTPVRKLQANKKVQGSRRRLREGRSQ

SEQ ID NO: 30515 - protein, 749 aa, Homo sapiens
MIPFLPMFSLLLLLIVNPINANNHYDKILAHSRIRGRDQGPNVCALQQILGTKKKYFSTCKNWYKKSICGQKTTVLYECCPGYMRMEGMKGCPAVLPIDHVYGTLGIVGATTTQRYSDASKLREEIEGKGSFTYFAPSNEAWDNLDSDIRRGLESNVNVELLNALHSHMINKRMLTKDLKNGMIIPSMYNNLGLFINHYPNGVVTVNCARIIHGNQIATNGVVHVIDRVLTQIGTSIQDFIEAEDDLSSFRAAAITSDILEALGRDGHFTLFAPTNEAFEKLPRGVLERIMGDKVASEALMKYHILNTLQCSESIMGGAVFETLEGNTIEIGCDGDSITVNGIKMVNKKDIVTNNGVIHLIDQVLIPDSAKQVIELAGKQQTTFTDLVAQLGLASALRPDGEYTLLAPVNNAFSDDTLSMDQRLLKLILQNHILKVKVGLNELYNGQILETIGGKQLRVFVYRTAVCIENSCMEKGSKQGRNGAIHIFREIIKPAEKSLHEKLKQDKRFSTFLSLLEAADLKELLTQPGDWTLFVPTNDAFKGMTSEEKEILIRDKNALQNIILYHLTPGVFIGKGFEPGVTNILKTTQGSKIFLKEVNDTLLVNELKSKESDIMTTNGVIHVVDKLLYPADTPVGNDQLLEILNKLIKYIQIKFVRGSTFKEIPVTVYSPEIKYTRISTGGGETEETLKKLLQEEVTKVTKFIEGGDGHLFEDEEIKRLLQGDTPVRKLQANKKVQGSRRRLREGRSQ

SEQ ID NO: 30516 - protein, 721 aa, Homo sapiens
MIPFLPMFSLLLLLIVNPINANNHYDKILAHSRIRGRDQGPNVCALQQILGTKKKYFSTCKNWYKKSICGQKTTVLYECCPGYMRMEGMKGCPAVLPIDHVYGTLGIVGATTTQRYSDASKLREEIEGKGSFTYFAPSNEAWDNLDSDIRRGLESNVNVELLNALHSHMINKRMLTKDLKNGMIIPSMYNNLGLFINHYPNGVVTVNCARIIHGNQIATNGVVHVIDRVLTQIGTSIQDFIEAEDDLSSFRAAAITSDILEALGRDGHFTLFAPTNEAFEKLPRGVLERIMGDKVASEALMKYHILNTLQCSESIMGGAVFETLEGNTIEIGCDGDSITVNGIKMVNKKDIVTNNGVIHLIDQVLIPDSAKQVIELAGKQQTTFTDLVAQLGLASALRPDGEYTLLAPVNNAFSDDTLSMDQRLLKLILQNHILKVKVGLNELYNGQILETIGGKQLRVFVYRTAVCIENSCMEKGSKQGRNGAIHIFREIIKPAEKSLHEKLKQDKRFSTFLSLLEAADLKELLTQPGDWTLFVPTNDAFKGMTSEEKEILIRDKNALQNIILYHLTPGVFIGKGFEPGVTNILKTTQGSKIFLKEVNDTLLVNELKSKESDIMTTNGVIHVVDKLLYPADTPVGNDQLLEILNKLIKYIQIKFVRGSTFKEIPVTVYSPEIKYTRISTGGGETEETLKKLLQEDTPVRKLQANKKVQGSRRRLREGRSQ

SEQ ID NO: 30517 - protein, 163 aa, Homo sapiens
MADEEKLPPGWEKRMSRSSGRVYYFNHITNASQWERPSGNSSSGGKNGQGEPARVRCSHLLVKHSQSRRPSSWRQEKITRTKEEALELINGYIQKIKSGEEDFESLASQFSDCSSAKARGDLGAFSRGQMQKPFEDASFALRTGEMSGPVFTDSGIHIILRTE

SEQ ID NO: 30518 - protein, 717 aa, Homo sapiens
MAVAVRTLQEQLEKAKESLKNVDENIRKLTGRDPNDVRPIQARLLALSGPGGGRGRGSLLLRRGFSDSGGGPPAKQRDLEGAVSRLGGERRTRRESRQESDPEDDDVKKPALQSSVVATSKERTRRDLIQDQNMDEKGKQRNRRIFGLLMGTLQKFKQESTVATERQKRRQEIEQKLEVQAEEERKQVENERRELFEERRAKQTELRLLEQKVELAQLQEEWNEHNAKIIKYIRTKTKPHLFYIPGRMCPATQKLIEESQRKMNALFEGRRIEFAEQINKMEARPRRQSMKEKEHQVVRNEEQKAEQEEGKVAQREEELEETGNQHNDVEIEEAGEEEEKEIAIVHSDAEKEQEEEEQKQEMEVKMEEETEVRESEKQQDSQPEEVMDVLEMVENVKHVIADQEVMETNRVESVEPSENEASKELEPEMEFEIEPDKECKTLSPGKENVSALDMEKESEEKEEKESEPQPEPVAQPQPQSQPQLQLQSQSQPVLQSQPPSQPEDLSLAVLQPTPQVTQEQGHLLPERKDFPVESVKLTEVPVEPVLTVHPESKSKTKTRSRSRGRARNKTSKSRSRSSSSSSSSSSSTSSSSGSSSSSGSSSSRSSSSSSSSTSGSSSRDSSSSTSSSSESRSRSRGRGHNRDRKHRRSVDRKRRDTSGLERSHKSSKGGSSRDTKGSKDKNSRSDRKRSISESSRSGKRSSRSERDRKSDRKDKRR

SEQ ID NO: 30519 - protein, 350 aa, Homo sapiens
MEPKRIREGYLVKKGSVFNTWKPMWVVLLEDGIEFYKKKSDNSPKGMIPLKGSTLTSPCQDFGKRMFVFKITTTKQQDHFFQAAFLEERDAWVRDIKKAIKCIEGGQKFARKSTRRSIRLPETIDLGALYLSMKDTEKGIKELNLEKDKKIFNHCFTGNCVIDWLVSNQSVRNRQEGLMIASSLLNEGYLQPAGDMSKSAVDGTAENPFLDNPDAFYYFPDSGFFCEENSSDDDVILKEEFRGVIIKQGCLLKQGHRRKNWKVRKFILREDPAYLHYYDPAGAEDPLGAIHLRGCVVTSVESNSNGRKSEEENLFEIITADEVHYFLQAATPKERTEWIRAIQMASRTGK

SEQ ID NO: 30520 - protein, 756 aa, Homo sapiens
MDSGRDFLTLHGLQDDEDLQALLKGSQLLKVKSSSWRRERFYKLQEDCKTIWQESRKVMRTPESQLFSIEDIQEVRMGHRTEGLEKFARDVPEDRCFSIVFKDQRNTLDLIAPSPADAQHWVLGLHKIIHHSGSMDQRQKLQHWIHSCLRKADKNKDNKMSFKELQNFLKELNIQVDDSYARKIFRECDHSQTDSLEDEEIEAFYKMLTQRVEIDRTFAEAAGSGETLSVDQLVTFLQHQQREEAAGPALALSLIERYEPSETAKAQRQMTKDGFLMYLLSADGSAFSLAHRRVYQDMGQPLSHYLVSSSHNTYLLEDQLAGPSSTEAYIRALCKGCRCLELDCWDGPNQEPIIYHGYTFTSKILFCDVLRAIRDYAFKASPYPVILSLENHCTLEQQRVMARHLHAILGPMLLNRPLDGVTNSLPSPEQLKGKILLKGKKLGGLLPPGGEGGPEATVVSDEDEAAEMEDEAVRSRVQHKPKEDKLRLAQELSDMVIYCKSVHFGGFSSPGTPGQAFYEMASFSENRALRLLQESGNGFVRHNVGHLSRIYPAGWRTDSSNYSPVEMWNGGCQIVALNFQTPGPEMDVYQGRFQDNGACGYVLKPAFLRDPNGTFNPRALAQGPWWARKRLNIRVISGQQLPKVNKNKNSIVDPKVTVEIHGVSRDVASRQTAVITNNGFNPWWDTEFAFEVVVPDLALIRFLVEDYDASSKNDFIGQSTIPLNSLKQGYRHVHLMSKNGDQHPSATLFVKISLQD

SEQ ID NO: 30521 - protein, 777 aa, Homo sapiens
MQCLGIRSRSRSRELYLQERSLKVAALNGRRLGLQDDEDLQALLKGSQLLKVKSSSWRRERFYKLQEDCKTIWQESRKVMRTPESQLFSIEDIQEVRMGHRTEGLEKFARDVPEDRCFSIVFKDQRNTLDLIAPSPADAQHWVLGLHKIIHHSGSMDQRQKLQHWIHSCLRKADKNKDNKMSFKELQNFLKELNIQVDDSYARKIFRECDHSQTDSLEDEEIEAFYKMLTQRVEIDRTFAEAAGSGETLSVDQLVTFLQHQQREEAAGPALALSLIERYEPSETAKAQRQMTKDGFLMYLLSADGSAFSLAHRRVYQDMGQPLSHYLVSSSHNTYLLEDQLAGPSSTEAYIRALCKGCRCLELDCWDGPNQEPIIYHGYTFTSKILFCDVLRAIRDYAFKASPYPVILSLENHCTLEQQRVMARHLHAILGPMLLNRPLDGVTNSLPSPEQLKGKILLKGKKLGGLLPPGGEGGPEATVVSDEDEAAEMEDEAVRSRVQHKPKEDKLRLAQELSDMVIYCKSVHFGGFSSPGTPGQAFYEMASFSENRALRLLQESGNGFVRHNVGHLSRIYPAGWRTDSSNYSPVEMWNGGCQIVALNFQTPGPEMDVYQGRFQDNGACGYVLKPAFLRDPNGTFNPRALAQGPWWARKRLNIRVISGQQLPKVNKNKNSIVDPKVTVEIHGVSRDVASRQTAVITNNGFNPWWDTEFAFEVVVPDLALIRFLVEDYDASSKNDFIGQSTIPLNSLKQGYRHVHLMSKNGDQHPSATLFVKISLQD

SEQ ID NO: 30522 - protein, 283 aa, Homo sapiens
MDLWPGAWMLLLLLFLLLLFLLPTLWFCSPSAKYFFKMAFYNGWILFLAVLAIPVCAVRGRNVENMKILRLMLLHIKYLYGIRVEVRGAHHFPPSQPYVVVSNHQSSLDLLGMMEVLPGRCVPIAKRELLWAGSAGLACWLAGVIFIDRKRTGDAISVMSEVAQTLLTQDVRVWVFPEGTRNHNGSMLPFKRGAFHLAVQAQVPIVPIVMSSYQDFYCKKERRFTSGQCQVRVLPPVPTEGLTPDDVPALADRVRHSMLTVFREISTDGRGGGDYLKKPGGGG

SEQ ID NO: 30523 - protein, 507 aa, Homo sapiens
MRRLPRALLLQLRLALLVAAGAPEVLVSAPRSLVWGPGLQAAVVLPVRYFYLQAVNSEGQNLTRSPAGETPFKVVVKSLSPKELVRIHVPKPLDRNDGTFLMRYRMYETVDEGLKIEVLYGDEHVAQSPYILKGPVYHEYCECPEDPQAWQKTLSCPTKEPQIAKDFASFPSINLQQMLKEVPKRFGDERGAIVHYTILNNHVYRRSLGKYTDFKMFSDEILLSLTRKVLLPDLEFYVNLGDWPLEHRKVNGTPSPIPIISWCGSLDSRDVVLPTYDITHSMLEAMRGVTNDLLSIQGNTGPSWINKTERAFFRGRDSREERLQLVQLSKENPQLLDAGITGYFFFQEKEKELGKAKLMGFFDFFKYKYQVNVDGTVAAYRYPYLMLGDSLVLKQDSPYYEHFYMALEPWKHYVPIKRNLSDLLEKVKWAKENDEEAKKIAKEGQLMARDLLQPHRLYCYYYQVLQKYAERQSSKPEVRDGMELVPQPEDSTAICQCHRKKPSREEL

SEQ ID NO: 30524 - protein, 451 aa, Homo sapiens
MVELFIFLFLLGETPFKVVVKSLSPKELVRIHVPKPLDRNDGTFLMRYRMYETVDEGLKIEVLYGDEHVAQSPYILKGPVYHEYCECPEDPQAWQKTLSCPTKEPQIAKDFASFPSINLQQMLKEVPKRFGDERGAIVHYTILNNHVYRRSLGKYTDFKMFSDEILLSLTRKVLLPDLEFYVNLGDWPLEHRKVNGTPSPIPIISWCGSLDSRDVVLPTYDITHSMLEAMRGVTNDLLSIQGNTGPSWINKTERAFFRGRDSREERLQLVQLSKENPQLLDAGITGYFFFQEKEKELGKAKLMGFFDFFKYKYQVNVDGTVAAYRYPYLMLGDSLVLKQDSPYYEHFYMALEPWKHYVPIKRNLSDLLEKVKWAKENDEEAKKIAKEGQLMARDLLQPHRLYCYYYQVLQKYAERQSSKPEVRDGMELVPQPEDSTAICQCHRKKPSREEL

SEQ ID NO: 30525 - protein, 409 aa, Homo sapiens
MVELFIFLFLLGETPFKVVVKSLSPKELVRIHVPKPLDRNDGTFLMRYRMYETVDEGLKIEVLYGDEHVAQSPYILKGPVYHEYCECPEDPQAWQKTLSCPTKEPQIAKDFASFPSINLQQMLKEVPKRFGDERGAIVHYTILNNHVYRRSLGKYTDFKMFSDEILLSLTRKVLLPDLEFYVNLGDWPLEHRKVNGTPSPIPIISWCGSLDSRDVVLPTYDITHSMLEAMRGVTNDLLSIQGNTGPSWINKTERAFFRGRDSREERLQLVQLSKENPQLLDAGITGYFFFQEKEKELGKAKLMGFFDFFKYKYQVNVDGTVAAYRYPYLMLGDSLVLKQDSPYYEHFYMALEPWKHYVPIKRNLSDLLEKVKWAKSFTLSPRLECSGTISTHCNLCLPGSRNFVPQPPE

SEQ ID NO: 30526 - protein, 522 aa, Homo sapiens
MAVNKGLTLLDGDLPEQENVLQRVLQLPVVSGTCECFQKTYTSTKEAHPLVASVCNAYEKGVQSASSLAAWSMEPVVRRLSTQFTAANELACRGLDHLEEKIPALQYPPEKIASELKDTISTRLRSARNSISVPIASTSDKVLGAALAGCELAWGVARDTAEFAANTRAGRLASGGADLALGSIEKVVEYLLPPDKEESAPAPGHQQAQKSPKAKPSLLSRVGALTNTLSRYTVQTMARALEQGHTVAMWIPGVVPLSSLAQWGASVAMQAVSRRRSEVRVPWLHSLAAAQEEDHEDQTDTEGEDTEEEEELETEENKFSEVAALPGPRGLLGGVAHTLQKTLQTTISAVTWAPAAVLGMAGRVLHLTPAPAVSSTKGRAMSLSDALKGVTDNVVDTVVHYVPLPRLSLMEPESEFRDIDNPPAEVERREAERRASGAPSAGPEPAPRLAQPRRSLRSAQSPGAPPGPGLEDEVATPAAPRPGFPAVPREKPKRRVSDSFFRPSVMEPILGRTHYSQLRKKS

SEQ ID NO: 30527 - protein, 933 aa, Homo sapiens
MTATPESLFPTGDELDSSQLQMESDEVDTLKEGEDPADRMHPFLAIYELQSLKVHPLVFAPGVPVTAQVVGTERYTSGSKVGTCTLYSVRLTHGDFSWTTKKKYRHFQELHRDLLRHKVLMSLLPLARFAVAYSPARDAGNREMPSLPRAGPEGSTRHAASKQKYLENYLNRLLTMSFYRNYHAMTEFLEVSQLSFIPDLGRKGLEGMIRKRSGGHRVPGLTCCGRDQVCYRWSKRWLVVKDSFLLYMCLETGAISFVQLFDPGFEVQVGKRSTEARHGVRIDTSHRSLILKCSSYRQARWWAQEITELAQGPGRDFLQLHRHDSYAPPRPGTLARWFVNGAGYFAAVADAILRAQEEIFITDWWLSPEVYLKRPAHSDDWRLDIMLKRKAEEGVRVSILLFKEVELALGINSGYSKRALMLLHPNIKVMRHPDQVTLWAHHEKLLVVDQVVAFLGGLDLAYGRWDDLHYRLTDLGDSSESAASQPPTPRPDSPATPDLSHNQFFWLGKDYSNLITKDWVQLDRPFEDFIDRETTPRMPWRDVGVVVHGLPARDLARHFIQRWNFTKTTKAKYKTPTYPYLLPKSTSTANQLPFTLPGGQCTTVQVLRSVDRWSAGTLENSILNAYLHTIRESQHFLYIENQFFISCSDGRTVLNKVGDEIVDRILKAHKQGWCYRVYVLLPLLPGFEGDISTGGGNSIQAILHFTYRTLCRGEYSILHRLKAAMGTAWRDYISICGLRTHGELGGHPVSELIYIHSKVLIADDRTVIIGSANINDRSLLGKRDSELAVLIEDTETEPSLMNGAEYQAGRFALSLRKHCFGVILGANTRPDLDLRDPICDDFFQLWQDMAESNANIYEQIFRCLPSNATRSLRTLREYVAVEPLATVSPPLARSELTQVQGHLVHFPLKFLEDESLLPPLGSKEGMIPLEVWT

SEQ ID NO: 30528 - protein, 336 aa, Homo sapiens
MTATPESLFPTGDELDSSQLQMESDEVDTLKEGEDPADRMHPFLAIYELQSLKVHPLVFAPGVPVTAQVVGTERYTSGSKVGTCTLYSVRLTHGDFSWTTKKKYRHFQELHRDLLRHKVLMSLLPLARFAVAYSPARDAGNREMPSLPRAGPEGSTRHAASKQKYLENYLNRLLTMSFYRNYHAMTEFLEVSQLSFIPDLGRKGLEGMIRKRSGGHRVPGLTCCGRDQVCYRWSKRWLVVKDSFLLYMCLETGAISFVQLFDPGFEVQVGKRSTEARHGVRIDTSHRSLILKCSSYRQARWWAQEITELAQGPGRDFLQLHRHDSYAPPRPGTLAR

SEQ ID NO: 30529 - protein, 922 aa, Homo sapiens
MTATPESLFPTGDELDSSQLQMESDEVDTLKEGEDPADRMHPFLAIYELQSLKVHPLVFAPGVPVTAQVVGTERYTSGSKVGTCTLYSVRLTHGDFSWTTKKKYRHFQELHRDLLRHKVLMSLLPLARFAVAYSPARDAGNREMPSLPRAGPEGSTRHAASKQKYLENYLNRLLTMSFYRNYHAMTEFLEVSQLSFIPDLGRKGLEGMIRKRSGGHRVPGLTCCGRDQVCYRWSKRWLVVKDSFLLYMCLETGAISFVQLFDPGFEVQVGKRSTEARHGVRIDTSHRSLILKCSSYRQARWWAQEITELAQGPGRDFLQLHRHDSYAPPRPGTLARWFVNGAGYFAAVADAILRAQEEIFITDWWLSPEVYLKRPAHSDDWRLDIMLKRKAEEGVRVSILLFKEVELALGINSGYSKRALMLLHPNIKVMRHPDQVTLWAHHEKLLVVDQVVAFLGGLDLAYGRWDDLHYRLTDLGDSSESAASQPPTPRPDSPATPDLSHNQFFWLGKDYSNLITKDWVQLDRPFEDFIDRETTPRMPWRDVGVVVHGLPARDLARHFIQRWNFTKTTKAKYKTPTYPYLLPKSTSTANQLPFTLPGGQCTTVQVLRSVDRWSAGTLENSILNAYLHTIRESQHFLYIENQFFISCSDGRTVLNKVGDEIVDRILKAHKQGWCYRVYVLLPLLPGFEGDISTGGGNSIQAILHFTYRTLCRGEYSILHRLKAAMGTAWRDYISICGLRTHGELGGHPVSELIYIHSKVLIADDRTVIIGSANINDRSLLGKRDSELAVLIEDTETEPSLMNGAEYQAGSVILGANTRPDLDLRDPICDDFFQLWQDMAESNANIYEQIFRCLPSNATRSLRTLREYVAVEPLATVSPPLARSELTQVQGHLVHFPLKFLEDESLLPPLGSKEGMIPLEVWT

SEQ ID NO: 30530 - protein, 1007 aa, Homo sapiens
MKDEAGERDREVSSLNSKLLSLQLDIKNLHDVCKRQRKTLQDNQLCMEEAMNSSHDKKQAQALAFEESEVEFGSSKQCHLRQLQQLKKKLLVLQQELEFHTEELQTSYYSLRQYQSILEKQTSDLVLLHHHCKLKEDEVILYEEEMGNHNENTGEKLHLAQEQLALAGDKIASLERSLNLYRDKYQSSLSNIELLECQVKMLQGELGGIMGQEPENKGDHSKVRIYTSPCMIQEHQETQKRLSEVWQKVSQQDDLIQELRNKLACSNALVLEREKALIKLQADFASCTATHRYPPSSSEECEDIKKILKHLQEQKDSQCLHVEEYQNLVKDLRVELEAVSEQKRNIMKDMMKLELDLHGLREETSAHIERKDKDITILQCRLQELQLEFTETQKLTLKKDKFLQEKDEMLQELEKKLTQVQNSLLKKEKELEKQQCMATELEMTVKEAKQDKSKEAECKALQAEVQKLKNSLEEAKQQERLAAQQAAQCKEEAALAGCHLEDTQRKLQKGLLLDKQKADTIQELQRELQMLQKESSMAEKEQTSNRKRVEELSLELSEALRKLENSDKEKRQLQKTVAEQDMKMNDMLDRIKHQHREQGSIKCKLEEDLQEATKLLEDKREQLKKSKEHEKLMEGELEALRQEFKKKDKTLKENSRKLEEENENLRAELQCCSTQLESSLNKYNTSQQVIQDLNKEIALQKESLMSLQAQLDKALQKEKHYLQTTITKEAYDALSRKSAACQDDLTQALEKLNHVTSETKSLQQSLTQTQEKKAQLEEEIIAYEERMKKLNTELRKLRGFHQESELEVHAFDKKLEEMSCQVLQWQKQHQNDLKMLAAKEEQLREFQEEMAALKENLLEDDKEPCCLPQWSVPKDTCRLYRGNDQIMTNLEQWAKQQKVANEKLGNQLREQVKYIAKLSGEKDHLHSVMVHLQQENKKLKKEIEEKKMKAENTRLCTKALGPSRTESTQREKVCGTLGWKGLPQDMGQRMDLTKYIGMPHCPGSSYC

SEQ ID NO: 30531 - protein, 1022 aa, Homo sapiens
MKDEAGERDREVSSLNSKLLSLQLDIKNLHDVCKRQRKTLQDNQLCMEEAMNSSHDKKQAQALAFEESEVEFGSSKQCHLRQLQQLKKKLLVLQQELEFHTEELQTSYYSLRQYQSILEKQTSDLVLLHHHCKLKEDEVILYEEEMGNHNENTGEKLHLAQEQLALAGDKIASLERSLNLYRDKYQSSLSNIELLECQVKMLQGELGGIMGQEPENKGDHSKVRIYTSPCMIQEHQETQKRLSEVWQKVSQQDDLIQELRNKLACSNALVLEREKALIKLQADFASCTATHRYPPSSSEECEDIKKILKHLQEQKDSQCLHVEEYQNLVKDLRVELEAVSEQKRNIMKDMMKLELDLHGLREETSAHIERKDKDITILQCRLQELQLEFTETQKLTLKKDKFLQEKDEMLQELEKKLTQVQNSLLKKEKELEKQQCMATELEMTVKEAKQDKSKEAECKALQAEVQKLKNSLEEAKQQERLAGEAPAAQQAAQCKEEAALAGCHLEDTQRKLQKGLLLDKQKADTIQELQRELQMLQKESSMAEKEQTSNRKRVEELSLELSEALRKLENSDKEKRQLQKTVAEQDMKMNDMLDRIKHQHREQGSIKCKLEEDLQEATKLLEDKREQLKKSKEHEKLMEGELEALRQEFKKKDKTLKENSRKLEEENENLRAELQCCSTQLESSLNKYNTSQQVIQDLNKEIALQKESLMSLQAQLDKALQKEKHYLQTTITKEAYDALSRKSAACQDDLTQALEKLNHVTSETKSLQQSLTQTQEKKAQLEEEIIAYEERMKKLNTELRKLRGFHQESELEVHAFDKKLEEMSCQVLQWQKQHQNDLKMLAAKEEQLREFQEEMAALKENLLEDDKEPCCLPQWSVPKDTCRLYRGNDQIMTNLEQWAKQQKVANEKLGNQLREQVKYIAKLSGEKDHLHSVMVHLQQENKKLKKEIEEKKMKAENTRLCTKALGPSRTESTQREKVCGTLGWKGLPQDMGQRMDLTKYIGMPHCPGTSAICQKNKCDFFL

SEQ ID NO: 30532 - protein, 797 aa, Homo sapiens
MKDEAGERDREVSSLNSKLLSLQLDIKNLHDVCKRQRKTLQDNQLCMEEAMNSSHDKKQAQALAFEESEVEFGSSKQCHLRQLQQLKKKLLVLQQELEFHTEELQTSYYSLRQYQSILEKQTSDLVLLHHHCKLKEDEVILYEEEMGNHNENTGEKLHLAQEQLALAGDKIASLERSLNLYRDKYQSSLSNIELLECQVKMLQGELGGIMGQEPENKGDHSKVRIYTSPCMIQEHQETQKRLSEVWQKVSQQDDLIQELRNKLACSNALVLEREKALIKLQADFASCTATHRYPPSSSEECEDIKKILKHLQEQKDSQCLHVEEYQNLVKDLRVELEAVSEQKRNIMKDMMKLELDLHGLREETSAHIERKDKDITILQCRLQELQLEFTETQKLTLKKDKFLQEKDEMLQELEKKLTQVQNSLLKKEKELEKQQCMATELEMTVKEAKQDKSKEAECKALQAEVQKLKNSLEEAKQQERLAAQQAAQCKEEAALAGCHLEDTQRKLQKHYLQTTITKEAYDALSRKSAACQDDLTQALEKLNHVTSETKSLQQSLTQTQEKKAQLEEEIIAYEERMKKLNTELRKLRGFHQESELEVHAFDKKLEEMSCQVLQWQKQHQNDLKMLAAKEEQLREFQEEMAALKENLLEDDKEPCCLPQWSVPKDTCRLYRGNDQIMTNLEQWAKQQKVANEKLGNQLREQVKYIAKLSGEKDHLHSVMVHLQQENKKLKKEIEEKKMKAENTRLCTKALGPSRTESTQREKVCGTLGWKGLPQDMGQRMDLTKYIGMPHCPGSSYC

SEQ ID NO: 30533 - protein, 882 aa, Homo sapiens
MGNHNENTGEKLHLAQEQLALAGDKIASLERSLNLYRDKYQSSLSNIELLECQVKMLQGELGGIMGQEPENKGDHSKVRIYTSPCMIQEHQETQKRLSEVWQKVSQQDDLIQELRNKLACSNALVLEREKALIKLQADFASCTATHRYPPSSSEECEDIKKILKHLQEQKDSQCLHVEEYQNLVKDLRVELEAVSEQKRNIMKDMMKLELDLHGLREETSAHIERKDKDITILQCRLQELQLEFTETQKLTLKKDKFLQEKDEMLQELEKKLTQVQNSLLKKEKELEKQQCMATELEMTVKEAKQDKSKEAECKALQAEVQKLKNSLEEAKQQERLAAQQAAQCKEEAALAGCHLEDTQRKLQKGLLLDKQKADTIQELQRELQMLQKESSMAEKEQTSNRKRVEELSLELSEALRKLENSDKEKRQLQKTVAEQDMKMNDMLDRIKHQHREQGSIKCKLEEDLQEATKLLEDKREQLKKSKEHEKLMEGELEALRQEFKKKDKTLKENSRKLEEENENLRAELQCCSTQLESSLNKYNTSQQVIQDLNKEIALQKESLMSLQAQLDKALQKEKHYLQTTITKEAYDALSRKSAACQDDLTQALEKLNHVTSETKSLQQSLTQTQEKKAQLEEEIIAYEERMKKLNTELRKLRGFHQESELEVHAFDKKLEEMSCQVLQWQKQHQNDLKMLAAKEEQLREFQEEMAALKENLLEDDKEPCCLPQWSVPKDTCRLYRGNDQIMTNLEQWAKQQKVANEKLGNQLREQVKYIAKLSGEKDREPTRASSPNTTRPSSPSHSHLHSVMVHLQQENKKLKKEIEEKKMKAENTRLCTKALGPSRTESTQREKVCGTLGWKGLPQDMGQRMDLTKYIGMPHCPGSSYC

SEQ ID NO: 30534 - protein, 205 aa, Homo sapiens
MAEASSANLGSGCEEKRHEGSSSESVPPGTTISRVKLLDTMVDTFLQKLVAAGSYQRFTDCYKCFYQLQPAMTQQIYDKFIAQLQTSIREEISDIKEEGNLEAVLNALDKIVEEGKVRKEPAWRPSGIPEKDLHSVMAPYFLQQRDTLRRHVQKQEAENQQLADAVLAGRRQVEELQLQVQAQQQAWQALHREQRELVAVLREPE

SEQ ID NO: 30535 - protein, 207 aa, Homo sapiens
MAEASSANLGSGCEEKRHEGSSSESVPPGTTISRVKLLDTMVDTFLQKLVAAGSSPLLHWDGSAGPRLPSGGQSVKQAFSWAACRLPQGRKEEISDIKEEGNLEAVLNALDKIVEEGKVRKEPAWRPSGIPEKDLHSVMAPYFLQQRDTLRRHVQKQEAENQQLADAVLAGRRQVEELQLQVQAQQQAWQALHREQRELVAVLREPE

SEQ ID NO: 30536 - protein, 175 aa, Homo sapiens
MAEASSANLGSGCEEKRHEGSSSESVPPGTTISRVKLLDTMVDTFLQKLVAAGSYQRFTDCYKCFYQLQPAMTQQIYDKFIAQLQTSIREEISDIKEEGNLEAVLNALDKIVEEGKVRKEPAWCEAQRCRVQQRCSLCVQAGGQRGSEETQALPVSMAGSPSPLPGSPGAQEGGV

SEQ ID NO: 30537 - protein, 165 aa, Homo sapiens
MVDTFLQKLVAAGSYQRFTDCYKCFYQLQPAMTQQIYDKFIAQLQTSIREEISDIKEEGNLEAVLNALDKIVEEGKVRKEPAWRPSGIPEKDLHSVMAPYFLQQRDTLRRHVQKQEAENQQLADAVLAGRRQVEELQLQVQAQQQAWQALHREQRELVAVLREPE

SEQ ID NO: 30538 - protein, 220 aa, Homo sapiens
MAEASSANLGSGCEEKRHEGSSSESVPPGTTISRVKLLDTMVDTFLQKLVAAGSYQRFTDCYKCFYQLQPAMTQQIYDKFIAQLQTSIREEISDIKEEGNLEAVLNALDKIVEEGKVRKEPACNGTPCGAMCRNRRPRTSSWQMPSWQGGGRWRSCSYRSRPSSRPGRCEAQRCRVQQRCSLCVQAGGQRGSEETQALPVSMAGSPSPLPGSPGAQEGGV

SEQ ID NO: 30539 - protein, 180 aa, Homo sapiens
MAEASSANLGSGCEEKRHEGSSSESVPPGTTISRVKLLDTMVDTFLQKLVAAGSYQRFTDCYKCFYQLQPAMTQQIYDKFIAQLQTSIREEISDIKEEGNLEAVLNALDKIVEEGKVRKEPACNGTPCGAMCRNRRPRTSSWQMPSWQGGGRWRSCSYRSRPSSRPGRLYTENRGSWLLC

SEQ ID NO: 30540 - protein, 805 aa, Homo sapiens
MWDQGGQPWQQWPLNQQQWMQSFQHQQDPSQIDWAALAQAWIAQREASGQQSMVEQPPGMMPNGQDMSTMESGPNNHGNFQGDSNFNRMWQPEWGMHQQPPHPPPDQPWMPPTPGPMDIVPPSEDSNSQDSGEFAPDNRHIFNQNNHNFGGPPDNFAVGPVNQFDYQHGAAFGPPQGGFHPPYWQPGPPGPPAPPQNRRERPSSFRDRQRSPIALPVKQEPPQIDAVKRRTLPAWIREGLEKMEREKQKKLEKERMEQQRSQLSKKEKKATEDAEGGDGPRLPQRSKFDSDEEEEDTENVEAASSGKVTRSPSPVPQEEHSDPEMTEEEKEYQMMLLTKMLLTEILLDVTDEEIYYVAKDAHRKATKAPAKQLAQSSALASLTGLGGLGGYGSGDSEDERSDRGSESSDTDDEELRHRIRQKQEAFWRKEKEQQLLHDKQMEEEKQQTERVTKEMNEFIHKEQNSLSLLEAREADGDVVNEKKRTPNETTSVLEPKKEHKEKEKQGRSRSGSSSSGSSSSNSRTSSTSSTVSSSSYSSSSGSSRTSSRSSSPKRKKRHSRSRSPTIKARRSRSRSYSRRIKIESNRARVKIRDRRRSNRNSIERERRRNRSPSRERRRSRSRSRDRRTNRASRSRSRDRRKIDDQRGNLSGNSHKHKGEAKEQERKKERSRSIDKDRKKKDKEREREQDKRKEKQKREEKDFKFSSQDDRLKRKRESERTFSRSGSISVKIIRHDSRQDSKKSTTKDSKKHSGSDSSGRSSSESPGSSKEKKAKKPKHSRSRSVEKSQRSGKKASRKHKSKSRSR

SEQ ID NO: 30541 - protein, 413 aa, Homo sapiens
MWDQGGQPWQQWPLNQQQWMQSFQHQQDPSQIDWAALAQAWIAQREASGQQSMVEQPPGMMPNGQDMSTMESGPNNHGNFQGDSNFNRMWQPEWGMHQQPPHPPPDQPWMPPTPGPMDIVPPSEDSNSQDSGEFAPDNRHIFNQNNHNFGGPPDNFAVGPVNQFDYQHGAAFGPPQGGFHPPYWQPGPPGPPAPPQNRRERPSSFRDRQRSPIALPVKQEPPQIDAVKRRTLPAWIREGLEKMEREKQKKLEKERMEQQRSQLSKKEKKATEDAEGGDGPRLPQRSKFDSDEEEEDTENVEAASSGKVTRSPSPVPQEEHSDPEMTEEEKEYQMMLLTKMLLTEILLDVTDEEIYYVAKDAHRKATKGIFWCFWFCFSWGILVLMTILAFFCCPCWISTRYLNILLHVLTLKD

SEQ ID NO: 30542 - protein, 1416 aa, Homo sapiens
MSGPWPSPDSRTKGTVAWLAEVLLWVGGSVVLSSEWQLGPLVERCMGAMQEGMQMVKLRGGSKGLVRFYYLDEHRSCIRWRPSRKNEKAKISIDSIQEVSEGRQSEVFQRYPDGSFDPNCCFSIYHGSHRESLDLVSTSSEVARTWVTGLRYLMAGISDEDSLARRQRTRDQWLKQTFDEADKNGDGSLSIGEVLQLLHKLNVNLPRQRVKQMFREADTDDHQGTLGFEEFCAFYKMMSTRRDLYLLMLTYSNHKDHLDAASLQRFLQVEQKMAGVTLESCQDIIEQFEPCPENKSKGLLGIDGFTNYTRSPAGDIFNPEHHHVHQDMTQPLSHYFITSSHNTYLVGDQLMSQSRVDMYAWVLQAGCRCVEVDCWDGPDGEPIVHHGYTLTSKILFKDVIETINKYAFIKNEYPVILSIENHCSVIQQKKMAQYLTDILGDKLDLSSVSSEDATTLPSPQMLKGKILVKGKKLPANISEDAEEGEVSDEDSADEIDDDCKLLNGDASTNRKRVENTAKRKLDSLIKESKIRDCEDPNNFSVSTLSPSGKLGRKSKAEEDVESGEDAGASRRNGRLVVGSFSRRKKKGSKLKKAASVEEGDEGQDSPGGQSRGATRQKKTMKLSRALSDLVKYTKSVATHDIEMEAASSWQVSSFSETKAHQILQQKPAQYLRFNQQQLSRIYPSSYRVDSSNYNPQPFWNAGCQMVALNYQSEGRMLQLNRAKFSANGGCGYVLKPGCMCQGVFNPNSEDPLPGQLKKQLVLRIISGQQLPKPRDSMLGDRGEIIDPFVEVEIIGLPVDCSREQTRVVDDNGFNPTWEETLVFMVHMPEIALVRFLVWDHDPIGRDFIGQRTLAFSSMMPGYRHVYLEGMEEASIFVHVAVSDISGKVKQALGLKGLFLRGPKPGSLDSHAAGRPPARPSVSQRILRRTASAPTKSQKPGRRGFPELVLGTRDTGSKGVADDVVPPGPGPAPEAPAQEGPGSGSPRDTRPLSTQRPLPPLCSLETIAEEPAPGPGPPPPAAVPTSSSQGRPPYPTGPGANVASPLEDTEEPRDSRPRPCNGEGAGGAYERAPGSQTDGRSQPRTLGHLPVIRRVKSEGQVPTEPLGGWRPLAAPFPAPAVYSDATGSDPLWQRLEPCGHRDSVSSSSSMSSSDTVIDLSLPSLGLGRSRENLAGAHMGRLPPRPHSASAARPDLPPVTKSKSNPNLRATGQRPPIPDELQPRSLAPRMAGLPFRPPWGCLSLVGVQDCPVAAKSKSLGDLTADDFAPSFEGGSRRLSHSLGLPGGTRRVSGPGVRRDTLTEQLRWLTVFQQAGDITSPTSLGPAGEGVAGGPGFVRRSSSRSHSRVRAIASRARQAQERQQRLQGLGRQGPPEEERGTPEGACSVGHEGSVDAPAPSKGALGPASAAAENLVLLRL

SEQ ID NO: 30543 - protein, 1129 aa, Homo sapiens
MEEPGPPGGLSQDQVERCMGAMQEGMQMVKLRGGSKGLVRFYYLDEHRSCIRWRPSRKNEKAKISIDSIQEVSEGRQSEVFQRYPDGSFDPNCCFSIYHGSHRESLDLVSTSSEVARTWVTGLRYLMAGISDEDSLARRQRTRDQWLKQTFDEADKNGDGSLSIGEVLQLLHKLNVNLPRQRVKQMFREADTDDHQGTLGFEEFCAFYKMMSTRRDLYLLMLTYSNHKDHLDAASLQRFLQVEQKMAGVTLESCQDIIEQFEPCPENKSKGLLGIDGFTNYTRSPAGDIFNPEHHHVHQDMTQPLSHYFITSSHNTYLVGDQLMSQSRVDMYAWVLQAGCRCVEVDCWDGPDGEPIVHHGYTLTSKILFKDVIETINKYAFIKNEYPVILSIENHCSVIQQKKMAQYLTDILGDKLDLSSVSSEDATTLPSPQMLKGKILVKGKKLPANISEDAEEGEVSDEDSADEIDDDCKLLNGDASTNRKRVENTAKRKLDSLIKESKIRDCEDPNNFSVSTLSPSGKLGRKSKAEEDVESGEDAGASRRNGRLVVGSFSRRKKKGSKLKKAASVEEGDEGQDSPGGQSRGATRQKKTMKLSRALSDLVKYTKSVATHDIEMEAASSWQVSSFSETKAHQILQQKPAQYLRFNQQQLSRIYPSSYRVDSSNYNPQPFWNAGCQMVALNYQSEGRMLQLNRAKFSANGGCGYVLKPGCMCQGVFNPNSEDPLPGQLKKQLVLRIISGQQLPKPRDSMLGDRGEIIDPFVEVEIIGLPVDCSREQTRVVDDNGFNPTWEETLVFMVHMPEIALVRFLVWDHDPIGRDFIGQRTLAFSSMMPGYRHVYLEGMEEASIFVHVAVSDISGKVKQALGLKGLFLRGPKPGSLDSHAAGRPPARPSVSQRILRRTASAPTKSQKPGRRGFPELVLGTRDTGSKGVADDVVPPGPGPAPEAPAQEGPGSGSPRGKAPAAVAEKSPVRVRPPRVLDGPGPAGMAATCMKCVVGSCAGVNTGGLQRERPPSPGPASRQAAIRQQPRARADSLGAPCCGLDPHAIPGRSREAPKGPGAWRQGPGGSGSMSSDSSSPDSPGIPERSPRWPEGACRQPGALQGEMSALFAQKLEEIRSKSPMFSAVRN

SEQ ID NO: 30544 - protein, 1380 aa, Homo sapiens
MSGPWPSPDSRTKGTVAWLAEVLLWVGGSVVLSSEWQLGPLVERCMGAMQEGMQMVKLRGGSKGLVRFYYLDEHRSCIRWRPSRKNEKAKISIDSIQEVSEGRQSEVFQRYPDGSFDPNCCFSIYHGSHRESLDLVSTSSEVARTWVTGLRYLMAGISDEDSLARRQRTRDQWLKQTFDEADKNGDGSLSIGEVLQLLHKLNVNLPRQRVKQMFREADTDDHQGTLGFEEFCAFYKMMSTRRDLYLLMLTYSNHKDHLDAASLQRFLQVEQKMAGVTLESCQDIIEQFEPCPENKSKGLLGIDGFTNYTRSPAGDIFNPEHHHVHQDMTQPLSHYFITSSHNTYLVGDQLMSQSRVDMYAWVLQAGCRCVEVDCWDGPDGEPIVHHGYTLTSKILFKDVIETINKYAFIKNEYPVILSIENHCSVIQQKKMAQYLTDILGDKLDLSSVSSEDATTLPSPQMLKGKILVKGKKLPANISEDAEEGEVSDEDSADEIDDDCKLLNGDASTNRKRVENTAKRKLDSLIKESKIRDCEDPNNFSVSTLSPSGKLGRKSKAEEDVESGEDAGASRRNGRLVVGSFSRRKKKGSKLKKAASVEEGDEGQDSPGGQSRGATRQKKTMKLSRALSDLVKYTKSVATHDIEMEAASSWQVSSFSETKAHQILQQKPAQYLRFNQQQLSRIYPSSYRVDSSNYNPQPFWNAGCQMGVFNPNSEDPLPGQLKKQLVLRIISGQQLPKPRDSMLGDRGEIIDPFVEVEIIGLPVDCSREQTRVVDDNGFNPTWEETLVFMVHMPEIALVRFLVWDHDPIGRDFIGQRTLAFSSMMPGYRHVYLEGMEEASIFVHVAVSDISGKVKQALGLKGLFLRGPKPGSLDSHAAGRPPARPSVSQRILRRTASAPTKSQKPGRRGFPELVLGTRDTGSKGVADDVVPPGPGPAPEAPAQEGPGSGSPRDTRPLSTQRPLPPLCSLETIAEEPAPGPGPPPPAAVPTSSSQGRPPYPTGPGANVASPLEDTEEPRDSRPRPCNGEGAGGAYERAPGSQTDGRSQPRTLGHLPVIRRVKSEGQVPTEPLGGWRPLAAPFPAPAVYSDATGSDPLWQRLEPCGHRDSVSSSSSMSSSDTVIDLSLPSLGLGRSRENLAGAHMGRLPPRPHSASAARPDLPPVTKSKSNPNLRATGQRPPIPDELQPRSLAPRMAGLPFRPPWGCLSLVGVQDCPVAAKSKSLGDLTADDFAPSFEGGSRRLSHSLGLPGGTRRVSGPGVRRDTLTEQLRWLTVFQQAGDITSPTSLGPAGEGVAGGPGFVRRSSSRSHSRVRAIASRARQAQERQQRLQGLGRQGPPEEERGTPEGACSVGHEGSVDAPAPSKGALGPASAAAENLVLLRL

SEQ ID NO: 30545 - protein, 1211 aa, Homo sapiens
MSGPWPSPDSRTKGTVAWLAEVLLWVGGSVVLSSEWQLGPLVERCMGAMQEGMQMVKLRGGSKGLVRFYYLDEHRSCIRWRPSRKNEKAKISIDSIQEVSEGRQSEVFQRYPDGSFDPNCCFSIYHGSHRESLDLVSTSSEVARTWVTGLRYLMAGISDEDSLARRQRTRDQWLKQTFDEADKNGDGSLSIGEVLQLLHKLNVNLPRQRVKQMFREADTDDHQGTLGFEEFCAFYKMMSTRRDLYLLMLTYSNHKDHLDAASLQRFLQVEQKMAGVTLESCQDIIEQFEPCPENKSKGLLGIDGFTNYTRSPAGDIFNPEHHHVHQDMTQPLSHYFITSSHNTYLVGDQLMSQSRVDMYAWVLQAGCRCVEVDCWDGPDGEPIVHHGYTLTSKILFKDVIETINKYAFIKNEYPVILSIENHCSVIQQKKMAQYLTDILGDKLDLSSVSSEDATTLPSPQMLKGKILVKGKKLPANISEDAEEGEVSDEDSADEIDDDCKLLNGDASTNRKRVENTAKRKLDSLIKESKIRDCEDPNNFSVSTLSPSGKLGRKSKAEEDVESGEDAGASRRNGRLVVGSFSRRKKKGSKLKKAASVEEGDEGQDSPGGQSRGATRQKKTMKLSRALSDLVKYTKSVATHDIEMEAASSWQVSSFSETKAHQILQQKPAQYLRFNQQQLSRIYPSSYRVDSSNYNPQPFWNAGCQMVALNYQSEGRMLQLNRAKFSANGGCGYVLKPGCMCQGVFNPNSEDPLPGQLKKQLVLRIISGQQLPKPRDSMLGDRGEIIDPFVEVEIIGLPVDCSREQTRVVDDNGFNPTWEETLVFMVHMPEIALVRFLVWDHDPIGRDFIGQRTLAFSSMMPGYRHVYLEGMEEASIFVHVAVSDISGKVKQALGLKGLFLRGPKPGSLDSHAAGRPPARPSVSQRILRRTASAPTKSQKPGRRGFPELVLGTRDTGSKGVADDVVPPGPGPAPEAPAQEGPGSGSPRGKAPAAVAEKSPVRVRPPRVLDGPGPAGMAATCMKCVVGSCAGVNTGGLQRERPPSPGPASRQAAIRQQPRARADSLGAPCCGLDPHAIPGRSREAPKGPGAWRQGPGGSGSMSSDSSSPDSPGIPERSPRWPEGACRQPGALQGEMSALFAQKLEEIRSKSPMFSAGKPLLPCVVLPHAPGMAGPGSPAAASAWTVSPRVLVLVALYPWHCLRGTLLPWLACGP

SEQ ID NO: 30546 - protein, 497 aa, Homo sapiens
MGAMQEGMQMVKLRGGSKGLVRFYYLDEHRSCIRWRPSRKNEKAKISIDSIQEVSEGRQSEVFQRYPDGSFDPFVEVEIIGLPVDCSREQTRVVDDNGFNPTWEETLVFMVHMPEIALVRFLVWDHDPIGRDFIGQRTLAFSSMMPGYRHVYLEGMEEASIFVHVAVSDISGKVKQALGLKGLFLRGPKPGSLDSHAAGRPPARPSVSQRILRRTASAPTKSQKPGRRGFPELVLGTRDTGSKGVADDVVPPGPGPAPEAPAQEGPGSGSPRGKAPAAVAEKSPVRVRPPRVLDGPGPAGMAATCMKCVVGSCAGVNTGGLQRERPPSPGPASRQAAIRQQPRARADSLGAPCCGLDPHAIPGRSREAPKGPGAWRQGPGGSGSMSSDSSSPDSPGIPERSPRWPEGACRQPGALQGEMSALFAQKLEEIRSKSPMFSAGKPLLPCVVLPHAPGMAGPGSPAAASAWTVSPRVLVLVALYPWHCLRGTLLPWLACGP

SEQ ID NO: 30547 - protein, 540 aa, Homo sapiens
MARKQNRNSKELGLVPLTDDTSHAGPPGPGRALLECDHLRSGVPGGRRRKDWSCSLLVASLAGAFGSSFLYGYNLSVVNAPTPYIKAFYNESWERRHGRPIDPDTLTLLWSVTVSIFAIGGLVGTLIVKMIGKVLGRKHTLLANNGFAISAALLMACSLQAGAFEMLIVGRFIMGIDGGVALSVLPMYLSEISPKEIRGSLGQVTAIFICIGVFTGQLLGLPELLGKESTWPYLFGVIVVPAVVQLLSLPFLPDSPRYLLLEKHNEARAVKAFQTFLGKADVSQEVEEVLAESRVQRSIRLVSVLELLRAPYVRWQVVTVIVTMACYQLCGLNAIWFYTNSIFGKAGIPPAKIPYVTLSTGGIETLAAVFSGLVIEHLGRRPLLIGGFGLMGLFFGTLTITLTLQDHAPWVPYLSIVGILAIIASFCSGPGGIPFILTGEFFQQSQRPAAFIIAGTVNWLSNFAVGLLFPFIQKSLDTYCFLVFATICITGAIYLYFVLPETKNRTYAEISQAFSKRNKAYPPEEKIDSAVTDGKINGRP

SEQ ID NO: 30548 - protein, 511 aa, Homo sapiens
MKLSKKDRGEDEESDSAKKKLDWSCSLLVASLAGAFGSSFLYGYNLSVVNAPTPYIKAFYNESWERRHGRPIDPDTLTLLWSVTVSIFAIGGLVGTLIVKMIGKVLGRKHTLLANNGFAISAALLMACSLQAGAFEMLIVGRFIMGIDGGVALSVLPMYLSEISPKEIRGSLGQVTAIFICIGVFTGQLLGLPELLGKESTWPYLFGVIVVPAVVQLLSLPFLPDSPRYLLLEKHNEARAVKAFQTFLGKADVSQEVEEVLAESRVQRSIRLVSVLELLRAPYVRWQVVTVIVTMACYQLCGLNAIWFYTNSIFGKAGIPPAKIPYVTLSTGGIETLAAVFSGLVIEHLGRRPLLIGGFGLMGLFFGTLTITLTLQDHAPWVPYLSIVGILAIIASFCSGPGGIPFILTGEFFQQSQRPAAFIIAGTVNWLSNFAVGLLFPFIQKSLDTYCFLVFATICITGAIYLYFVLPETKNRTYAEISQAFSKRNKAYPPEEKIDSAVTDGKINGRP

SEQ ID NO: 30549 - protein, 919 aa, Homo sapiens [sequence omitted]

SEQ ID NO: 30550 - protein, 872 aa, Homo sapiens
MTAPWRRLRSLVWEYWAGLLVCAFWIPDSRGMPHVIRIGGIFEYADGPNAQVMNAEEHAFRFSANIINRNRTLLPNTTLTYDIQRIHFHDSFEATKKACDQLALGVVAIFGPSQGSCTNAVQSICNALEVPHIQLRWKHHPLDNKDTFYVNLYPDYASLSHAILDLVQYLKWRSATVVYDDSTGLIRLQELIMAPSRYNIRLKIRQLPIDSDDSRPLLKEMKRGREFRIIFDCSHTMAAQILKQAMAMGMMTEYYHFIFTTLDLYALDLEPYRYSGVNLTGFRILNVDNPHVSAIVEKWSMERLQAAPRSESGLLDGVMMTDAALLYDAVHIVSVCYQRAPQMTVNSLQCHRHKAWRFGGRFMNFIKEAQWEGLTGRIVFNKTSGLRTDFDLDIISLKEDGLEKVGVWSPADGLNITEVAKGRGPNVTDSLTNRSLIVTTVLEEPFVMFRKSDRTLYGNDRFEGYCIDLLKELAHILGFSYEIRLVEDGKYGAQDDKGQWNGMVKELIDHKADLAVAPLTITHVREKAIDFSKPFMTLGVSILYRKPNGTNPSVFSFLNPLSPDIWMYVLLAYLGVSCVLFVIARFSPYEWYDAHPCNPGSEVVENNFTLLNSFWFGMGSLMQQGSELMPKALSTRIIGGIWWFFTLIIISSYTANLAAFLTVERMESPIDSADDLAKQTKIEYGAVKDGATMTFFKKSKISTFEKMWAFMSSKPSALVKNNEEGIQRALTADYALLMESTTIEYVTQRNCNLTQIGGLIDSKGYGIGTPMGSPYRDKITIAILQLQEEDKLHIMKEKWWRGSGCPEEENKEASALGIQKIGGIFIVLAAGLVLSVLVAVGEFVYKLRKTAEREQVSLRAWSLHRMGNGDSR

SEQ ID NO: 30551 - protein, 231 aa, Homo sapiens
MLHASTIWHLRSTPPRRKQWGHCDPHRILVASEVTTEITSPTPAPRAQVCGGQPWVTVLDPLSGHTGREAERHFATVSISAVELKYCHGWRPAGQRVPSKTATGQRTCAKPCQKPSTSKVILRAVADKGTCKYVSLATLKKAVSTTGYDMARNAYHFKRVLKGLVDKGSAGSFTLGKKQASKSKLKVKRQRQQRWRSGQRPFGQHRSLLGSKQGHKRLIKGVRRVAKCHCN

SEQ ID NO: 30552 - protein, 1026 aa, Homo sapiens
MTRTQKGKTFLPHCFYQSLPPRLGWGMILNYSKLKGKEECASVSSVPMVFFSSQYRLHRKSQYLKMAAANLTFSQEVVWQRGLPSIPYSQYSFDHLYNTNDIIHTPQIRKARPQKPVSFKFLGSSSPLTGDTSLAVKTESSANPEKKLKKSKPASTVREAPRPLIHHPCMHPDMLGRPPSLDVNLEEREAWLLPPEKEARAWEATVLEKLNERTARWIQSKRPRRPGASPNKWQSFLRQQYDWSHIRDELTSASDLELLKQLEAEETAEFEDQSVILPPQEKKKPELLLPVYYRLPSYFQQAETVEIMPGNKSTEDIHEKTSLSQPQTQSYFRQVTPRAGKFAYSTDNTFEQEIYFDEVQIIHQIGAKRDQIVLENLNRYNKQLSKVFPETPEKWSAQAIPEASYRPVQGALRWTALPTPAKDMLLQVGEKDVPIKTRRLKKQAKSLQEDVTWELVVLRRMLKEWKTAWALIIEWHHETVENLLQSLGDLHDDVRIKAITTCATAALERPRIATSQRDSDKTIQDLPEVLLPALEAALCDKNAHVRMAAAICQYAIQSHNPLARNIMQTALLKGNSVDSWAAAQCLALEGTATYPVIKRILHQLFTKKNEDTEEQSYILLSYLSEKTTLIHTMLAVELNSCQWKNRIVACQAFSRISGNVCLDMKHKLIQLMWNDWNKEVRRAAAQALGQMSLGKEVHDIIRVKLGQGNSQERVEALYLIGELKLMTAKLLPSFLHCFSDDFTAVRRAACLAAGALQIRDKMVLECLLNLMQRDPYWKIKAFAIRALGQIGQVSPELTDLLLWAIHYEESPGVRLEACRSILALKLQGDRVRDTFLDVLLLENHDAVLKEMYQTMKILNLGNEGNQEMLQEIKNRIKTLSQKDLLTHKILKLEMVMGKVREEAKRVYLKPKGEQGPLTLQTLLQETFQDEMVLPRRPSEVCDTEAVIKPVKPRAPNPWLQSSVPGLTTRSKVRSSLVKDLRTSPEKRIAVGPFRSDYPALYLGKFSERTFFSPIMSSPSGKKGAHL

SEQ ID NO: 30553 - protein, 99 aa, Homo sapiens
MSANRRWWVPPDDEDCVSEKLLRKTRESPLVPIGLGGCLVVAAYRIYRLRSRGSTKMSIHLIHTRVAAQACAVGAIMLGAVYTMYSDYVKRMAQDAGEK

SEQ ID NO: 30554 - protein, 317 aa, Homo sapiens
MSHGPKQPGAAAAPAGGKAPGQHGGFVVTVKQERGEGPRAGEKGSHEEEPVKKRGWPKGKKRKKILPNGPKAPVTGYVRFLNERREQIRTRHPDLPFPEITKMLGAEWSKLQPTEKQRYLDEAEREKQQYMKELRAYQQSEAYKMCTEKIQEKKIKKEDSSSGLMNTLLNGHKGGDCDGFSTFDVPIFTEEFLDQNKAREAELRRLRKMNVAFEEQNAVLQRHTQSMSSARERLEQELALEERRTLALQQQLQAVRQALTASFASLPVPGTGETPTLGTLDFYMARLHGAIERDPAQHEKLIVRIKEILAQVASEHL

SEQ ID NO: 30555 - protein, 215 aa, Homo sapiens
MLGAEWSKLQPTEKQRYLDEAEREKQQYMKELRAYQQSEAYKMCTEKIQEKKIKKEDSSSGLMNTLLNGHKGGDCDGFSTFDVPIFTEEFLDQNKAREAELRRLRKMNVAFEEQNAVLQRHTQSMSSARERLEQELALEERRTLALQQQLQAVRQALTASFASLPVPGTGETPTLGTLDFYMARLHGAIERDPAQHEKLIVRIKEILAQVASEHL

SEQ ID NO: 30556 - protein, 293 aa, Homo sapiens
MSHGPKQPGAAAAPAGGKAPGQHGGFVVTVKQERGEGPRAGEKGSHEEEPVKKRGWPKGKKRKKILPNGPKAPVTGYVRFLNEWSKLQPTEKQRYLDEAEREKQQYMKELRAYQQSEAYKMCTEKIQEKKIKKEDSSSGLMNTLLNGHKGGDCDGFSTFDVPIFTEEFLDQNKAREAELRRLRKMNVAFEEQNAVLQRHTQSMSSARERLEQELALEERRTLALQQQLQAVRQALTASFASLPVPGTGETPTLGTLDFYMARLHGAIERDPAQHEKLIVRIKEILAQVASEHL

SEQ ID NO: 30557 - protein, 418 aa, Homo sapiens
MESLTDPSKLDSGKEPHISLIPNKQDRTLTIVDTGIGMTKADLINNLGTITKSETKVFMEVLQAGADISMIGQFSVGFYSAYSVAEKVTVITKHNNDEQYAWESSLRGSFTEYREFYKSLTINWEDYLAVKHFSVEGQLEFRAFLFVPRLAPFELLETRKKKNKIKLSARRDLIMDNCEELIPEYLNFIRGVVDSEDLPLNIFRETKDQVANSTIVQRLWKHGLEVIYTIEPIDEYCVQQLKEFEGKTLVSVTKEDLELPEDEEEKKKQEEGKQKTKQKKNQSLRTSAKSTYGWTANMERIMKAQALRDNSTTGYMAAKKHLEINPDHSFIDTLRQKAETDKNDKSVKDLVILLYETALLSSDFGLEGPQTHANRIYRMNKLGLGTDEDDPTADDTSAAVTEEMPPLEGDDDTSRMEK

SEQ ID NO: 30558 - protein, 509 aa, Homo sapiens
MAAIGVHLGCTSACVAVYKDGRAGVVANDAGDRVTPAVVAYSENEEIVGLAAKQSRIRNISNTVMKVKQILGRSSSDPQAQKYIAESKCLVIEKNGKLRYEIDTGEETKFVNPEDVARLIFSKMKETAHSVLGSDANDVVITVPFDFGEKQKNALGEAARAAGFNVLRLIHEPSAALLAYGIGQDSPTGKSNILVFKLGGTSLSLSVMEVNSGIYRVLSTNTDDNIGGAHFTETLAQYLASEFQRSFKHDVRGNARAMMKLTNSAEVAKHSLSTLGSANCFLDSLYEGQDFDCNVSRARFELLCSPLFNKCIEAIRGLLDQNGFTADDINKVVLCGGSSRIPKLQQLIKDLFPAVELLNSIPPDEVIPIGAAIEAGILIGKENLLVEDSLMIECSARDILVKGVDESGASRFTVLFPSGTPLPARRQHTLQAPGSISSVCLELYESDGKNSAKEETKFAQVVLQDLDKKENGLRDILAVLTMKRDGSLHVTCTDQETGKCEAISIEIAS

SEQ ID NO: 30559 - protein, 393 aa, Homo sapiens
MTTYSDKGAKPERGRFLHFHSVTFWVGNAKQAASFYCSKMGFEPLAYRGLETGSREVVSHVIKQGKIVFVLSSALNPWNKEMGDHLVKHGDGVKDIAFEVEDCDYIVQKARERGAKIMREPWVEQDKFGKVKFAVLQTYGDTTHTLVEKMNYIGQFLPGYEAPAFMDPLLPKLPKCSLEMIDHIVGNQPDQEMVSASEWYLKNLQFHRFWSVDDTQVHTEYSSLRSIVVANYEESIKMPINEPAPGKKKSQIQEYVDYNGGAGVQHIALKTEDIITAIRHLRERGLEFLSVPSTYYKQLREKLKTAKIKVKENIDALEELKILVDYDEKGYLLQIFTKPVQDRPTLFLEVIQRHNHQGFGAGNFNSLFKAFEEEQNLRGNLTNMETNGVVPGM

SEQ ID NO: 30560 - protein, 354 aa, Homo sapiens
MGFEPLAYRGLETGSREVVSHVIKQGKIVFVLSSALNPWNKEMGDHLVKHGDGVKDIAFEVEDCDYIVQKARERGAKIMREPWVEQDKFGKVKFAVLQTYGDTTHTLVEKMNYIGQFLPGYEAPAFMDPLLPKLPKCSLEMIDHIVGNQPDQEMVSASEWYLKNLQFHRFWSVDDTQVHTEYSSLRSIVVANYEESIKMPINEPAPGKKKSQIQEYVDYNGGAGVQHIALKTEDIITAIRHLRERGLEFLSVPSTYYKQLREKLKTAKIKVKENIDALEELKILVDYDEKGYLLQIFTKPVQDRPTLFLEVIQRHNHQGFGAGNFNSLFKAFEEEQNLRGNLTNMETNGVVPGM

SEQ ID NO: 30561 - protein, 119 aa, Homo sapiens
MVPRIFAPAYVSVCLLLLCPREVIAPAGSEPWLCQPAPRCGDKIYNPLEQCCYNDAIVSLSETRQCGPPCTFWPCFELCCLDSFGLTNDFVVKLKVQGVNSQCHSSPISSKCESRRRFP

SEQ ID NO: 30562 - protein, 130 aa, Homo sapiens
MRFSVSGMRTDYPRSVLAPAYVSVCLLLLCPREVIAPAGSEPWLCQPAPRCGDKIYNPLEQCCYNDAIVSLSETRQCGPPCTFWPCFELCCLDSFGLTNDFVVKLKVQGVNSQCHSSPISSKCESRRRFP

SEQ ID NO: 30563 - protein, 125 aa, Homo sapiens
MRPRCCILALVCWITVFLLQCSKGTTDAPVGSGLWLCQPTPRCGNKIYNPSEQCCYDDAILSLKETRRCGSTCTFWPCFELCCPESFGPQQKFLVKLRVLGMKSQCHLSPISRSCTRNRRHVLYP

SEQ ID NO: 30564 - protein, 124 aa, Homo sapiens
MVPRISAAIFIFELLGSNSEGVTDLRLWLCQPAPRCGEWTYNPLEQCCDDGVILDLNQTRLCGSSCTFWPCFQHCCLESLGSQNQTVVRFKVPGMKPDCKSSPITRICAQEYHPKSPVSRSDLI

SEQ ID NO: 30565 - protein, 453 aa, Homo sapiens
GSASAPTLFPLVSCENSPSDTSSVAVGCLAQDFLPDSITFSWKYKNNSDISSTRGFPSVLRGGKYAATSQVLLPSKDVMQGTDEHVVCKVQHPNGNKEKNVPLPVIAELPPKVSVFVPPRDGFFGNPRKSKLICQATGFSPRQIQVSWLREGKQVGSGVTTDQVQAEAKESGPTTYKVTSTLTIKESDWLGQSMFTCRVDHRGLTFQQNASSMCVPDQDTAIRVFAIPPSFASIFLTKSTKLTCLVTDLTTYDSVTISWTRQNGEAVKTHTNISESHPNATFSAVGEASICEDDWNSGERFTCTVTHTDLPSPLKQTISRPKGVALHRPDVYLLPPAREQLNLRESATITCLVTGFSPADVFVQWMQRGQPLSPEKYVTSAPMPEPQAPGRYFAHSILTVSEEEWNTGETYTCVVAHEALPNRVTERTVDKSTGKPTLYNVSLVMSDTAGTCY

SEQ ID NO: 30566 - protein, 474 aa, Homo sapiens
GSASAPTLFPLVSCENSPSDTSSVAVGCLAQDFLPDSITFSWKYKNNSDISSTRGFPSVLRGGKYAATSQVLLPSKDVMQGTDEHVVCKVQHPNGNKEKNVPLPVIAELPPKVSVFVPPRDGFFGNPRKSKLICQATGFSPRQIQVSWLREGKQVGSGVTTDQVQAEAKESGPTTYKVTSTLTIKESDWLGQSMFTCRVDHRGLTFQQNASSMCVPDQDTAIRVFAIPPSFASIFLTKSTKLTCLVTDLTTYDSVTISWTRQNGEAVKTHTNISESHPNATFSAVGEASICEDDWNSGERFTCTVTHTDLPSPLKQTISRPKGVALHRPDVYLLPPAREQLNLRESATITCLVTGFSPADVFVQWMQRGQPLSPEKYVTSAPMPEPQAPGRYFAHSILTVSEEEWNTGETYTCVVAHEALPNRVTERTVDKSTEGEVSADEEGFENLWATASTFIVLFLLSLFYSTTVTLFKVK

SEQ ID NO: 30567 - protein, 327 aa, Homo sapiens
ASTKGPSVFPLAPCSRSTSESTAALGCLVKDYFPEPVTVSWNSGALTSGVHTFPAVLQSSGLYSLSSVVTVPSSSLGTKTYTCNVDHKPSNTKVDKRVESKYGPPCPSCPAPEFLGGPSVFLFPPKPKDTLMISRTPEVTCVVVDVSQEDPEVQFNWYVDGVEVHNAKTKPREEQFNSTYRVVSVLTVLHQDWLNGKEYKCKVSNKGLPSSIEKTISKAKGQPREPQVYTLPPSQEEMTKNQVSLTCLVKGFYPSDIAVEWESNGQPENNYKTTPPVLDSDGSFFLYSRLTVDKSRWQEGNVFSCSVMHEALHNHYTQKSLSLSLGK

SEQ ID NO: 30568 - protein, 385 aa, Homo sapiens
MAALSGVRWLTRALVSAGNPGAWRGLSTSAAAHAASRSQAEDVRVEGSFPVTMLPGDGVGPELMHAVKEVFKAAAVPVEFQEHHLSEVQNMASEEKLEQVLSSMKENKVAIIGKIHTPMEYKGELASYDMRLRRKLDLFANVVHVKSLPGYMTRHNNLDLVIIREQTEGEYSSLEHESARGVIECLKIVTRAKSQRIAKFAFDYATKKGRGKVTAVHKANIMKLGDGLFLQCCEEVAELYPKIKFETMIIDNCCMQLVQNPYQFDVLVMPNLYGNIIDNLAAGLVGGAGVVPGESYSAEYAVFETGARHPFAQAVGRNIANPTAMLLSASNMLRHLNLEYHSSMIADAVKKVIKVGKVRTRDMGGYSTTTDFIKSVIGHLQTKGS

SEQ ID NO: 30569 - protein, 383 aa, Homo sapiens
MAALSGVRWLTRALVSAGNPGAWRGLSTSAAAHAASRSQAEDVRVEGSFPVTMLPGDGVGPELMHAVKEVFKAAAVPVEFQEHHLSEVQNMASEEKLEQVLSSMKENKVAIIGKIHTPMEYKGELASYDMRLRRKLDLFANVVHVKSLPGYMTRHNNLDLVIIREQTEGEYSSLEHESARGVIECLKIVTRAKSQRIAKFAFDYATKKGRGKVTAVHKANIMKLGDGLFLQCCEEVAELYPKIKFETMIIDNCCMQLVQNPYQFDVLVMPNLYGNIIDNLAAGLVGGAGVVPGESYSAEYAVFETGARHPFAQAVGRNIANPTAMLLSASNMLRHLNLEYHSSMIADAVKKVIKVGKVRTSDMGGYATCHDFTEAVIAALPHP

SEQ ID NO: 30570 - protein, 233 aa, Homo sapiens
MKMGERWSSLFPFPVSPSCCFLLTQSARGVIECLKIVTRAKSQRIAKFAFDYATKKGRGKVTAVHKANIMKLGDGLFLQCCEEVAELYPKIKFETMIIDNCCMQLVQNPYQFDVLVMPNLYGNIIDNLAAGLVGGAGVVPGESYSAEYAVFETGARHPFAQAVGRNIANPTAMLLSASNMLRHLNLEYHSSMIADAVKKVIKVGKVRTRDMGGYSTTTDFIKSVIGHLQTKGS

SEQ ID NO: 30571 - protein, 559 aa, Homo sapiens
MNPLFGPNLFLLQQEQQGLAGPLGDSLGGDHFAGGGDLPPAPLSPAGPAAYSPPGPGPAPPAAMALRNDLGSNINVLKTLNLRFRCFLAKVHELERRNRLLEKQLQQALEEGKQGRRGLGRRDQAVQTGFVSPIRPLGLQLGARPAAVCSPSARVLGSPARSPAGPLAPSAASLSSSSTSTSTTYSSSARFMPGTIWSFSHARRLGPGLEPTLVQGPGLSWVHPDGVGVQIDTITPEIRALYNVLAKVKRERDEYKRRWEEEYTVRIQLQDRVNELQEEAQEADACQEELALKVEQLKAELVVFKGLMSNNLSELDTKIQEKAMKVDMDICRRIDITAKLCDVAQQRNCEDMIQMFQVPSMGGRKRERKAAVEEDTSLSESEGPRQPDGDEEESTALSINEEMQRMLNQLREYDFEDDCDSLTWEETEETLLLWEDFSGYAMAAAEAQGEQEDSLEKVIKDTESLFKTREKEYQETIDQIELELATAKNDMNRHLHEYMEMCSMKRGLDVQMETCRRLITQSGDRKSPAFTAVPLSDPPPPPSEAEDSDRDVSSDSSMR

SEQ ID NO: 30572 - protein, 199 aa, Homo sapiens
MGGRKRERKAAVEEDTSLSESEGPRQPDGDEEESTALSINEEMQRMLNQLREYDFEDDCDSLTWEETEETLLLWEDFSGYAMAAAEAQGEQEDSLEKVIKDTESLFKTREKEYQETIDQIELELATAKNDMNRHLHEYMEMCSMKRGLDVQMETCRRLITQSGDRKSPAFTAVPLSDPPPPPSEAEDSDRDVSSDSSMR

SEQ ID NO: 30573 - protein, 264 aa, Homo sapiens
MNPLFGPNLFLLQQEQQGLAGPLGDSLGGDHFAGGGDLPPAPLSPAGPAAYSPPGPGPAPPAAMALRNDLGSNINVLKTLNLRFRCFLAKVHELERRNRLLEKQLQQALEEGKQGRRGLGRRDQAVQTGFVSPIRPLGLQLGARPAAVCSPSARVLGSPARSPAGPLAPSAASLSSSSTSTSTTYSSSARFMPGTIWSFSHARRLGPGLEPTLVQGPGLSWVHPDGVGVQIDTITPEIRALYNVLAKVKRERDEYKRRCFYRVK

SEQ ID NO: 30574 - protein, 562 aa, Homo sapiens
MNPLFGPNLFLLQQEQQGLAGPLGDSLGGDHFAGGGDLPPAPLSPAGPAAYSPPGPGPAPPAAMALRNDLGSNINVLKTLNLRFRCFLAKVHELERRNRLLEKQLQQALEEGKQGRRGLGRRDQAVQTGFVSPIRPLGLQLGARPAAVCSPSARVLGSPARSPAGPLAPSAASLSSSSTSTSTTYSSSARFMPGTIWSFSHARRLGPGLEPTLVQGPGLSWVHPDGVGVQIDTITPEIRALYNVLAKVKRERDEYKRRWEEEYTVRIQLQDRVNELQEEAQEADACQEELALKVEQLKAELVVFKGLMSNNLSELDTKIQEKAMKVDMDICRRIDITAKLCDVAQQRNCEDMIQMFQKKLVPSMGGRKRERKAAVEEDTSLSESEGPRQPDGDEEESTALSINEEMQRMLNQLREYDFEDDCDSLTWEETEETLLLWEDFSGYAMAAAEAQGEQEDSLEKVIKDTESLFKTREKEYQETIDQIELELATAKNDMNRHLHEYMEMCSMKRGLDVQMETCRRLITQSGDRKSPAFTAVPLSDPPPPPSEAEDSDRDVSSDSSMR

SEQ ID NO: 30575 - protein, 563 aa, Homo sapiens
MNPLFGPNLFLLQQEQQGLAGPLGDSLGGDHFAGGGDLPPAPLSPAGPAAYSPPGPGPAPPAAMALRNDLGSNINVLKTLNLRFRCFLAKVHELERRNRLLEKQLQQALEEGKQGRRGLGRRDQAVQTGFVSPIRPLGLQLGARPAAVCSPSARVLGSPARSPAGPLAPSAASLSSSSTSTSTTYSSSARFMPGTIWSFSHARRLGPGLEPTLVQGPGLSWVHPDGVGVQIDTITPEIRALYNVLAKVKRERDEYKRRWEEEYTVRIQLQDRVNELQEEAQEADACQEELALKVEQLKAELVVFKGLMSNNLSELDTKIQEKAMKVDMDICRRIDITAKLCDVAQQRNCEDMIQMFQKKLVPSMGGRKRERKAAVEEDTSLSESEGPRQPDGDEEESTALSINEEMQRMLNQLREYDFEDDCDSLTWEETEETLLLWEDFSGYAMAAAEAQGEQQEDSLEKVIKDTESLFKTREKEYQETIDQIELELATAKNDMNRHLHEYMEMCSMKRGLDVQMETCRRLITQSGDRKSPAFTAVPLSDPPPPPSEAEDSDRDVSSDSSMR

SEQ ID NO: 30576 - protein, 200 aa, Homo sapiens
MGGRKRERKAAVEEDTSLSESEGPRQPDGDEEESTALSINEEMQRMLNQLREYDFEDDCDSLTWEETEETLLLWEDFSGYAMAAAEAQGEQQEDSLEKVIKDTESLFKTREKEYQETIDQIELELATAKNDMNRHLHEYMEMCSMKRGLDVQMETCRRLITQSGDRKSPAFTAVPLSDPPPPPSEAEDSDRDVSSDSSMR

SEQ ID NO: 30577 - protein, 562 aa, Homo sapiens
MNPLFGPNLFLLQQEQQGLAGPLGDSLGGDHFAGGGDLPPAPLSPAGPAAYSPPGPGPAPPAAMALRNDLGSNINVLKTLNLRFRCFLAKVHELERRNRLLEKQLQQALEEGKQGRRGLGRRDQAVQTGFVSPIRPLGLQLGARPAAVCSPSARVLGSPARSPAGPLAPSAASLSSSSTSTSTTYSSSARFMPGTIWSFSHARRLGPGLEPTLVQGPGLSWVHPDGVGVQIDTITPEIRALYNVLAKVKRERDEYKRRWEEEYTVRIQLQDRVNELQEEAQEADACQEELALKVEQLKAELVVFKGLMSNNLSELDTKIQEKAMKVDMDICRRIDITAKLCDVAQQRNCEDMIQMFQKLVPSMGGRKRERKAAVEEDTSLSESEGPRQPDGDEEESTALSINEEMQRMLNQLREYDFEDDCDSLTWEETEETLLLWEDFSGYAMAAAEAQGEQQEDSLEKVIKDTESLFKTREKEYQETIDQIELELATAKNDMNRHLHEYMEMCSMKRGLDVQMETCRRLITQSGDRKSPAFTAVPLSDPPPPPSEAEDSDRDVSSDSSMR

SEQ ID NO: 30578 - protein, 284 aa, Homo sapiens
MAGCAARAPPGSEARLSLATFLLGASVLALPLLTRAGLQGRTGLALYVAGLNALLLLLYRPPRYQIAIRACFLGFVFGCGTLLSFSQSSWSHFGWYMCSLSLFHYSEYLVTAVNNPKSLSLDSFLLNHSLEYTVAALSSWLEFTLENIFWPELKQITWLSVTGLLMVVFGECLRKAAMFTAGSNFNHVVQNEKSDTHTLVTSGVYAWFRHPSYVGWFYWSIGTQVMLCNPICGVSYALTVWRFFRDRTEEEEISLIHFFGEEYLEYKKRVPTGLPFIKGVKVDL

SEQ ID NO: 30579 - protein, 492 aa, Homo sapiens
MANNYKKIVLLKGLEVINDYHFRIVKSLLSNDLKLNPKMKEEYDKIQIADLMEEKFPGDAGLGKLIEFFKEIPTLGDLAETLKREKLKVANKIESIPVKGIIPSKKTKQKEVYPATPACTPSNRLTAKGAEETLGPQKRKKPSEEETGTKRSKMSKEQTRPSCSAGASTSTAMGRSPPPQTSSSAPPNTSSTESLKPLANRHATASKNIFREDPIIAMVLNATKVFKYESSENEQRRMFHATVATQTQFFHVKVLNINLKRKFIKKRIIIISNYSKRNSLLEVNEASSVSEAGPDQTFEVPKDIIRRAKKIPKINILHKQTSGYIVYGLFMLHTKIVNRKTTIYEIQDKTGSMAVVGKGECHNIPCEKGDKLRLFCFRLRKRENMSKLMSEMHSFIQIQKNTNQRSHDSRSMALPQEQSQHPKPSEASTTLPESHLKTPQMPPTTPSSSSFTKKDETHPGAQSSPANFRITSPTVAPPLSSDTSTNRHPAVP

SEQ ID NO: 30580 - protein, 483 aa, Homo sapiens
MANNYKKIVLLKGLEVINDYHFRIVKSLLSNDLKLNPKMKEEYDKIQIADLMEEKFPGDAGLGKLIEFFKEIPTLGDLAETLKREKLKVKGIIPSKKTKQKEVYPATPACTPSNRLTAKGAEETLGPQKRKKPSEEETGTKRSKMSKEQTRPSCSAGASTSTAMGRSPPPQTSSSAPPNTSSTESLKPLANRHATASKNIFREDPIIAMVLNATKVFKYESSENEQRRMFHATVATQTQFFHVKVLNINLKRKFIKKRIIIISNYSKRNSLLEVNEASSVSEAGPDQTFEVPKDIIRRAKKIPKINILHKQTSGYIVYGLFMLHTKIVNRKTTIYEIQDKTGSMAVVGKGECHNIPCEKGDKLRLFCFRLRKRENMSKLMSEMHSFIQIQKNTNQRSHDSRSMALPQEQSQHPKPSEASTTLPESHLKTPQMPPTTPSSSSFTKKDETHPGAQSSPANFRITSPTVAPPLSSDTSTNRHPAVP

SEQ ID NO: 30581 - protein, 461 aa, Homo sapiens
MANNYKKIVLLKGLEVINDYHFRIVKSLLSNDLKLNPKMKEEYDKIQIADLMEEKFPGDAGLGKLIEFFKEIPTLGDLAETLKREKLKVANKIESIPVKGIIPSKKTKQKEVYPATPACTPSNRLTAKGAEETLGPQKRKKPSEEETGTKRSKMSKEQTRPSCSAGASTSTAMGRSPPPQTSSSAPPNTSSTESLKPLANRHATASKNIFREDPIIAMVLNATKVFKYESSENEQRRMFHATVATQTQFFHVKVLNINLKRKFIKKRIIIISNYSKRNSLLEVNEASSVSEAGPDQTFEVPKDIIRRAKKIPKINILHKQTSGYIVYGLFMLHTKIVNRKTTIYEIQDKTGSMAVVGKGECHNIPCEKGDKLRLFCFRLRKRENMSKLMSEMHSFIQIQKNTNQRSHDSRSMALPQEQSQHPKPSEASTTLPESHLKTPQMPPTTPSSSSFTKVTKDKDIK

SEQ ID NO: 30582 - protein, 452 aa, Homo sapiens
MANNYKKIVLLKGLEVINDYHFRIVKSLLSNDLKLNPKMKEEYDKIQIADLMEEKFPGDAGLGKLIEFFKEIPTLGDLAETLKREKLKVKGIIPSKKTKQKEVYPATPACTPSNRLTAKGAEETLGPQKRKKPSEEETGTKRSKMSKEQTRPSCSAGASTSTAMGRSPPPQTSSSAPPNTSSTESLKPLANRHATASKNIFREDPIIAMVLNATKVFKYESSENEQRRMFHATVATQTQFFHVKVLNINLKRKFIKKRIIIISNYSKRNSLLEVNEASSVSEAGPDQTFEVPKDIIRRAKKIPKINILHKQTSGYIVYGLFMLHTKIVNRKTTIYEIQDKTGSMAVVGKGECHNIPCEKGDKLRLFCFRLRKRENMSKLMSEMHSFIQIQKNTNQRSHDSRSMALPQEQSQHPKPSEASTTLPESHLKTPQMPPTTPSSSSFTKVTKDKDIK

SEQ ID NO: 30583 - protein, 245 aa, Homo sapiens
MANNYKKIVLLKGLEVINDYHFRIVKSLLSNDLKLNPKMKEEYDKIQIADLMEEKFPGDAGLGKLIEFFKEIPTLGDLAETLKREKLKVANKIESIPVKGIIPSKKTKQKEVYPATPACTPSNRLTAKGAEETLGPQKRKKPSEEETGTKRSKMSKEQTRPSCSAGASTSTAMGRSPPPQTSSSAPPNTSSTEAYLMNLTLSLTAGSFLSCAVWGRDRELRNLELSATDSLSTAPIYYTPIPFAH

SEQ ID NO: 30584 - protein, 236 aa, Homo sapiens
MANNYKKIVLLKGLEVINDYHFRIVKSLLSNDLKLNPKMKEEYDKIQIADLMEEKFPGDAGLGKLIEFFKEIPTLGDLAETLKREKLKVKGIIPSKKTKQKEVYPATPACTPSNRLTAKGAEETLGPQKRKKPSEEETGTKRSKMSKEQTRPSCSAGASTSTAMGRSPPPQTSSSAPPNTSSTEAYLMNLTLSLTAGSFLSCAVWGRDRELRNLELSATDSLSTAPIYYTPIPFAH

SEQ ID NO: 30585 - protein, 189 aa, Homo sapiens
MALSFSLLMAVLVLSYKSICSLGCDLPQTHSLGNRRALILLAQMGRISPFSCLKDRHDFGLPQEEFDGNQFQKTQAISVLHEMIQQTFNLFSTEDSSAAWEQSLLEKFSTELYQQLNNLEACVIQEVGMEETPLMNEDSILAVRKYFQRITLYLTEKKYSPCAWEVVRAEIMRSLSFSTNLQKILRRKD

SEQ ID NO: 30586 - protein, 125 aa, Homo sapiens
MHKEEHEVAVLGPPPSTILPRSTVINIHSETSVPDHVVWSLFNTLFLNWCCLGFIAFAYSVKSRDRKMVGDVTGAQAYASTAKCLNIWALILGILMTIGFILLLVFGSVTVYHIMLQIIQEKRGY

SEQ ID NO: 30587 - protein, 189 aa, Homo sapiens
MALSFSLLMAVLVLSYKSICSLGCDLPQTHSLGNRRALILLAQMGRISPFSCLKDRHDFGFPQEEFDGNQFQKAQAISVLHEMIQQTFNLFSTKDSSATWEQSLLEKFSTELNQQLNDLEACVIQEVGVEETPLMNVDSILAVKKYFQRITLYLTEKKYSPCAWEVVRAEIMRSFSLSKIFQERLRRKE

SEQ ID NO: 30588 - protein, 134 aa, Homo sapiens
MKAFSPVRSVRKNSLSDHSLGISRSKTPVDDPMSLLYNMNDCYSKLKELVPSIPQNKKVSKMEILQHVIDYILDLQIALDSHPTIVSLHHQRPGQNQASRTPLTTLNTDISILSLQASEFPSELMSNDSKALCG

SEQ ID NO: 30589 - protein, 36 aa, Homo sapiens
MKAFSPVRSIRKNSLLDHRLGISQSKTPVDDLMSLL

SEQ ID NO: 30590 - protein, 266 aa, Homo sapiens
MRTEPLCGASPLLVPGDPYSVVVLLQGYAEPEGVGDAVRADGSVTLVLPQTRGPASSHRESPRGSGGAEAALEEAARGPILVDTGGPWAREALLGALAGQGVAPGDVTLVVGTHGHSDHIGNLGLFPGAALLVSHDFCLPGGRYLPHGLGEGQPLRLGPGLEVWATPGHGGQRDVSVVVAGTALGTVVVAGDVFERDGDEDSWQALSEDPAAQERSRKRVLVVADVVVPGHGPPFRVLREASQPETEGGGNSQQEPVVGDEEPALH

SEQ ID NO: 30591 - protein, 1045 aa, Homo sapiens
MNLQAQPKAQNKRKRCLFGGQEPAPKEQPPPLQPPQQSIRVKEEQYLGHEGPGGAVSTSQPVELPPPSSLALLNSVVYGPERTSAAMLSQQVASVKWPNSVMAPGRGPERGGGGGVSDSSWQQQPGQPPPHSTWNCHSLSLYSATKGSPHPGVGVPTYYNHPEALKREKAGGPQLDRYVRPMMPQKVQLEVGRPQAPLNSFHAAKKPPNQSLPLQPFQLAFGHQVNRQVFRQGPPPPNPVAAFPPQKQQQQQQPQQQQQQQQAALPQMPLFENFYSMPQQPSQQPQDFGLQPAGPLGQSHLAHHSMAPYPFPPNPDMNPELRKALLQDSAPQPALPQVQIPFPRRSRRLSKEGILPPSALDGAGTQPGQEATGNLFLHHWPLQQPPPGSLGQPHPEALGFPLELRESQLLPDGERLAPNGREREAPAMGSEEGMRAVSTGDCGQVLRGGVIQSTRRRRRASQEANLLTLAQKAVELASLQNAKDGSGSEEKRKSVLASTTKCGVEFSEPSLATKRAREDSGMVPLIIPVSVPVRTVDPTEAAQAGGLDEDGKGPEQNPAEHKPSVIVTRRRSTRIPGTDAQAQAEDMNVKLEGEPSVRKPKQRPRPEPLIIPTKAGTFIAPPVYSNITPYQSHLRSPVRLADHPSERSFELPPYTPPPILSPVREGSGLYFNAIISTSTIPAPPPITPKSAHRTLLRTNSAEVTPPVLSVMGEATPVSIEPRINVGSRFQAEIPLMRDRALAAADPHKADLVWQPWEDLESSREKQRQVEDLLTAACSSIFPGAGTNQELALHCLHESRGDILETLNKLLLKKPLRPHNHPLATYHYTGSDQWKMAERKLFNKGIAIYKKDFFLVQKLIQTKTVAQCVEFYYTYKKQVKIGRNGTLTFGDVDTSDEKSAQEEVEVDIKTSQKFPRVPLPRRESPSEERLEPKREVKEPRKEGEEEVPEIQEKEEQEEGRERSRRAAAVKATQTLQANESASDILILRSHESNAPGSAGGQASEKPREGTGKSRRALPFSEKKKKTETFSKTQNQENTFPCKKCGR

SEQ ID NO: 30592 - protein, 189 aa, Homo sapiens
MALPFALLMALVVLSCKSSCSLDCDLPQTHSLGHRRTMMLLAQMRRISLFSCLKDRHDFRFPQEEFDGNQFQKAEAISVLHEVIQQTFNLFSTKDSSVAWDERLLDKLYTELYQQLNDLEACVMQEVWVGGTPLMNEDSILAVRKYFQRITLYLTEKKYSPCAWEVVRAEIMRSFSSSRNLQERLRRKE

SEQ ID NO: 30593 - protein, 227 aa, Homo sapiens
MSDINLDWVDRRQLQRLEEMLIVVDENDKVIGADTKRNCHLNENIEKGLLHRAFSVVLFNTKNRILIQQRSDTKVTFPGYFTDSCSSHPLYNPAELEEKDAIGVRRAAQRRLQAELGIPGEQISPEDIVFMTIYHHKAKSDRIWGEHEICYLLLVRKNVTLNPDPSETKSILYLSQEELWELLEREARGEVKVTPWLRTIAERFLYRWWPHLDDVTPFVELHKIHRV

SEQ ID NO: 30594 - protein, 473 aa, Homo sapiens
MRAGPGPTVTLALVLAVSWAMELKPTAPPIFTGRPFVVAWDVPTQDCGPRLKVPLDLNAFDVQASPNEGFVNQNITIFYRDRLGLYPRFDSAGRSVHGGVPQNVSLWAHRKMLQKRVEHYIRTQESAGLAVIDWEDWRPVWVRNWQDKDVYRRLSRQLVASRHPDWPPDRIVKQAQYEFEFAAQQFMLETLRYVKAVRPRHLWGFYLFPDCYNHDYVQNWESYTGRCPDVEVARNDQLAWLWAESTALFPSVYLDETLASSRHGRNFVSFRVQEALRVARTHHANHALPVYVFTRPTYSRRLTGLSEMDLISTIGESAALGAAGVILWGDAGYTTSTETCQYLKDYLTRLLVPYVVNVSWATQYCSRAQCHGHGRCVRRNPSASTFLHLSTNSFRLVPGHAPGEPQLRPVGELSWADIDHLQTHFRCQCYLGWSGEQCQWDHRQAAGGASEAWAGSHLTSLLALAALAFTWTL

SEQ ID NO: 30595 - protein, 518 aa, Homo sapiens
MAKFVIAGRADCPYYAKTELVADYLQKNLPDFRIHKITQRPEVWEDWLKDVCEKNKWSHKNSPIIWRELLDRGGKGLLLGGYNEFLEHAQLYYDVTSSMTTELMMVIAQENLGAHIEKEQEEEALKTCINPLQVWITSASAPACYNLIPILTSGEVFGMHTEISITLFDNKQAEEHLKSLVVETQDLASPVLRSVSICTKVEEAFRQAHVIVVLDDSTNKEVFTLEDCLRSRVPLCRLYGYLIEKNAHESVRVIVGGRTFVNLKTVLLMRYAPRIAHNIIAVALGVEGEAKAILARKLKTAPSYIKDVIIWGNISGNNYVDLRKTRVYRYESAIWGPLHYSRPVLNLIFDSEWVKREFVAILKNLTTTGRQFGGILAAHSIATTLKYWYHGSPPGEIVSLGILSEGQFGIPKGIVFSMPVKFENGTWVVLTDLKDVEISEQIMTRMTSDLIQEKLVALGDKIHFQPYQSGHKDLVPDEEKNLAMSDAAEFPNQIPQTTFEKPQSLEFLNEFEGKTVES

SEQ ID NO: 30596 - protein, 517 aa, Homo sapiens
MAKFVIAGRADCPYYAKTELVADYLQKNLPDFRIHKITQRPEVWEDWLKDVCEKNKWSHKNSPIIWRELLDRGGKGLLLGGYNEFLEHAQLYYDVTSSMTTELMMVIAQENLGAHIEKEQEEEALKTCINPLQVWITSASAPACYNLIPILTSGEVFGMHTEISITLFDNKQAEEHLKSLVVETQDLASPVLRSVSICTKVEEAFRQAHVIVVLDDSTNKEVFTLEDCLRSRVPLCRLYGYLIEKNAHESVRVIVGGRTFVNLKTVLLMRYAPRIAHNIIAVALGVEGEAKAILARKLKTAPSYIKDVIIWGNISGNNYVDLRKTRVYRYESAIWGPLHYSRPVLNLIFDSEWVKREFVAILKNLTTTGRQFGGILAAHSIATTLKYWYHGSPPGEIVSLGILSEGQFGIPKGIVFSMPVKFENGTWVVLTDLKDVEISEQIMTRMTSDLIQEKLVALGDKIHFQPYQSGHKDLVPDEEKNLAMSDAEFPNQIPQTTFEKPQSLEFLNEFEGKTVES

SEQ ID NO: 30597 - protein, 283 aa, Homo sapiens
MAKFVIAGRADCPYYAKTELVADYLQKNLPDFRIHKITQRPEVWEDWLKDVCEKNKWSHKNSPIIWRELLDRGGKGLLLGGYNEFLEHAQLYYDVTSSMTTELMMVIAQENLGAHIEKEQEEEALKTCINPLQVWITSEWVKREFVAILKNLTTTGRQFGGILAAHSIATTLKYWYHGSPPGEIVSLGILSEGQFGIPKGIVFSMPVKFENGTWVVLTDLKDVEISEQIMTRMTSDLIQEKLVALGDKIHFQPYQSDTPRINTLHPSIQSSWHSVLTITIRKR

SEQ ID NO: 30598 - protein, 187 aa, Homo sapiens
MTNKCLLQIALLLCFSTTALSMSYNLLGFLQRSSNFQCQKLLWQLNGRLEYCLKDRMNFDIPEEIKQLQQFQKEDAALTIYEMLQNIFAIFRQDSSSTGWNETIVENLLANVYHQINHLKTVLEEKLEKEDFTRGKLMSSLHLKRYYGRILHYLKAKEYSHCAWTIVRVEILRNFYFINRLTGYLRN

SEQ ID NO: 30599 - protein, 509 aa, Homo sapiens
MGVLKFKHIFFRSFVKSSGVSQIVFTFLLIPCCLTLNFRAPPVIPNVPFLWAWNAPSEFCLGKFDEPLDMSLFSFIGSPRINATGQGVTIFYVDRLGYYPYIDSITGVTVNGGIPQKISLQDHLDKAKKDITFYMPVDNLGMAVIDWEEWRPTWARNWKPKDVYKNRSIELVQQQNVQLSLTEATEKAKQEFEKAGKDFLVETIKLGKLLRPNHLWGYYLFPDCYNHHYKKPGYNGSCFNVEIKRNDDLSWLWNESTALYPSIYLNTQQSPVAATLYVRNRVREAIRVSKIPDAKSPLPVFAYTRIVFTDQVLKFLSQDELVYTFGETVALGASGIVIWGTLSIMRSMKSCLLLDNYMETILNPYIINVTLAAKMCSQVLCQEQGVCIRKNWNSSDYLHLNPDNFAIQLEKGGKFTVRGKPTLEDLEQFSEKFYCSCYSTLSCKEKADVKDTDAVDVCIADGVCIDAFLKPPMETEEPQIFYNASPSTLSATMFIVSILFLIISSVASL

SEQ ID NO: 30600 - protein, 511 aa, Homo sapiens
MGVLKFKHIFFRSFVKSSGVSQIVFTFLLIPCCLTLNFRAPPVIPNVPFLWAWNAPSEFCLGKFDEPLDMSLFSFIGSPRINATGQGVTIFYVDRLGYYPYIDSITGVTVNGGIPQKISLQDHLDKAKKDITFYMPVDNLGMAVIDWEEWRPTWARNWKPKDVYKNRSIELVQQQNVQLSLTEATEKAKQEFEKAGKDFLVETIKLGKLLRPNHLWGYYLFPDCYNHHYKKPGYNGSCFNVEIKRNDDLSWLWNESTALYPSIYLNTQQSPVAATLYVRNRVREAIRVSKIPDAKSPLPVFAYTRIVFTDQVLKFLSQDELVYTFGETVALGASGIVIWGTLSIMRSMKSCLLLDNYMETILNPYIINVTLAAKMCSQVLCQEQGVCIRKNWNSSDYLHLNPDNFAIQLEKGGKFTVRGKPTLEDLEQFSEKFYCSCYSTLSCKEKADVKDTDAVDVCIADGVCIDAFLKPPMETEEPQIFYNASPSTLSATMFIWRLEVWDQGISRIGFF

SEQ ID NO: 30601 - protein, 258 aa, Homo sapiens
MLPLCLVAALLLAAGPGPSLGDEAIHCPPCSEEKLARCRPPVGCEELVREPGCGCCATCALGLGMPCGVYTPRCGSGLRCYPPRGVEKPLHTLMHGQGVCMELAEIEAIQESLQPSDKDEGDHPNNSFSPCSAHDRRCLQKHFAKIRDRSTSGGKMKVNGAPREDARPVPQGSCQSELHRALERLAASQSRTHEDLYIIPIPNCDRNGNFHPKQCHPALDGQRGKCWCVDRKTGVKLPGGLEPKGELDCHQLADSFRE

SEQ ID NO: 30602 - protein, 158 aa, Homo sapiens
MELAEIEAIQESLQPSDKDEGDHPNNSFSPCSAHDRRCLQKHFAKIRDRSTSGGKMKVNGAPREDARPVPQGSCQSELHRALERLAASQSRTHEDLYIIPIPNCDRNGNFHPKQCHPALDGQRGKCWCVDRKTGVKLPGGLEPKGELDCHQLADSFRE

SEQ ID NO: 30603 - protein, 487 aa, Homo sapiens
MASSAEGDEGTVVALAGVLQSGFQELSLNKLATSLGASEQALRLIISIFLGYPFALFYRHYLFYKETYLIHLFHTFTGLSIAYFNFGNQLYHSLLCIVLQFLILRLMGRTITAVLTTFCFQMAYLLAGYYYTATGNYDIKWTMPHCVLTLKLIGLAVDYFDGGKDQNSLSSEQQKYAIRGVPSLLEVAGFSYFYGAFLVGPQFSMNHYMKLVQGELIDIPGKIPNSIIPALKRLSLGLFYLVGYTLLSPHITEDYLLTEDYDNHPFWFRCMYMLIWGKFVLYKYVTCWLVTEGVCILTGLGFNGFEEKGKAKWDACANMKVWLFETNPRFTGTIASFNINTNAWVARYIFKRLKFLGNKELSQGLSLLFLALWHGLHSGYLVCFQMEFLIVIVERQAARLIQESPTLSKLAAITVLQPFYYLVQQTIHWLFMGYSMTAFCLFTWDKWLKVYKSIYFLGHIFFLSLLFILPYIHKAMVPRKEKLKKME

SEQ ID NO: 30604 - protein, 407 aa, Homo sapiens
MASSAEGDEGTVVALAGVLQFLILRLMGRTITAVLTTFCFQMAYLLAGYYYTATGNYDIKWTMPHCVLTLKLIGLAVDYFDGGKDQNSLSSEQQKYAIRGVPSLLEVAGFSYFYGAFLVGPQFSMNHYMKLVQGELIDIPGKIPNSIIPALKRLSLGLFYLVGYTLLSPHITEDYLLTEDYDNHPFWFRCMYMLIWGKFVLYKYVTCWLVTEGVCILTGLGFNGFEEKGKAKWDACANMKVWLFETNPRFTGTIASFNINTNAWVARYIFKRLKFLGNKELSQGLSLLFLALWHGLHSGYLVCFQMEFLIVIVERQAARLIQESPTLSKLAAITVLQPFYYLVQQTIHWLFMGYSMTAFCLFTWDKWLKVYKSIYFLGHIFFLSLLFILPYIHKAMVPRKEKLKKME

SEQ ID NO: 30605 - protein, 1647 aa, Homo sapiens
MVQKKKFCPRLLDYLVIVGARHPSSDSVAQTPELLRRYPLEDHTEFPLPPDVVFFCQPEGCLSVRQRRMSLRDDTSFVFTLTDKDTGVTRYGICVNFYRSFQKRISKEKGEGGAGSRGKEGTHATCASEEGGTESSESGSSLQPLSADSTPDVNQSPRGKRRAKAGSRSRNSTLTSLCVLSHYPFFSTFRECLYTLKRLVDCCSERLLGKKLGIPRGVQRDTMWRIFTGSLLVEEKSSALLHDLREIEAWIYRLLRSPVPVSGQKRVDIEVLPQELQPALTFALPDPSRFTLVDFPLHLPLELLGVDACLQVLTCILLEHKVVLQSRDYNALSMSVMAFVAMIYPLEYMFPVIPLLPTCMASAEQLLLAPTPYIIGVPASFFLYKLDFKMPDDVWLVDLDSNRVIAPTNAEVLPILPEPESLELKKHLKQALASMSLNTQPILNLEKFHEGQEIPLLLGRPSNDLQSTPSTEFNPLIYGNDVDSVDVATRVAMVRFFNSANVLQGFQMHTRTLRLFPRPVVAFQAGSFLASRPRQTPFAEKLARTQAVEYFGEWILNPTNYAFQRIHNNMFDPALIGDKPKWYAHQLQPIHYRVYDSNSQLAEALSVPPERDSDSEPTDDSGSDSMDYDDSSSSYSSLGDFVSEMMKCDINGDTPNVDPLTHAALGDASEVEIDELQNQKEAEEPGPDSENSQENPPLRSSSSTTASSSPSTVIHGANSEPADSTEMDDKAAVGVSKPLPSVPPSIGKSNVDRRQAEIGEGSVRRRIYDNPYFEPQYGFPPEEDEDEQGESYTPRFSQHVSGNRAQKLLRPNSLRLASDSDAESDSRASSPNSTVSNTSTEGFGGIMSFASSLYRNHSTSFSLSNLTLPTKGAREKATPFPSLKVFGLNTLMEIVTEAGPGSGEGNRRALVDQKSSVIKHSPTVKREPPSPQGRSSNSSENQQFLKEVVHSVLDGQGVGWLNMKKVRRLLESEQLRVFVLSKLNRMVQSEDDARQDIIPDVEISRKVYKGMLDLLKCTVLSLEQSYAHAGLGGMASIFGLLEIAQTHYYSKEPDKRKRSPTESVNTPVGKDPGLAGRGDPKAMAQLRVPQLGPRAPSATGKGPKELDTRSLKEENFIASIELWNKHQEVKKQKALEKQRPEVIKPVFDLGETEEKKSQISADSGVSLTSSSQRTDQDSVIGVSPAVMIRSSSQDSEVSTVVSNSSGETLGADSDLSSNAGDGPGGEGSVHLASSRGTLSDSEIETNSATSTIFGKAHSLKPSIKEKLAGSPIRTSEDVSQRVYLYEGLLGRDKGSMWDQLEDAAMETFSISKERSTLWDQMQFWEDAFLDAVMLEREGMGMDQGPQEMIDRYLSLGEHDRKRLEDDEDRLLATLLHNLISYMLLMKVNKNDIRKKVRRLMGKSHIGLVYSQQINEVLDQLANLNGRDLSIWSSGSRHMKKQTFVVHAGTDTNGDIFFMEVCDDCVVLRSNIGTVYERWWYEKLINMTYCPKTKVLCLWRRNGSETQLNKFYTKKCRELYYCVKDSMERAAARQQSIKPGPELGGEFPVQDLKTGEGGLLQVTLEGINLKFMHNQVFIELNHIKKCNTVRGVFVLEEFVPEIKEVVSHKYKTPMAHEICYSVLCLFSYVAAVHSSEEDLRTPPRPVSS

SEQ ID NO: 30606 - protein, 1608 aa, Homo sapiens
MVQKKKFCPRLLDYLVIVGARHPSSDSVAQTPELLRRYPLEDHTEFPLPPDVVFFCQPEGCLSVRQRRMSLRDDTSFVFTLTDKDTGVTRYGICVNFYRSFQKRISKEKGEGGAGSRGKEGTHATCASEEGGTESSESGSSLQPLSADSTPDVNQSPRGKRRAKAGSRSRNSTLTSLCVLSHYPFFSTFRECLYTLKRLVDCCSERLLGKKLGIPRGVQRDTMWRIFTGSLLVEEKSSALLHDLREIEAWIYRLLRSPVPVSGQKRVDIEVLPQELQPALTFALPDPSRFTLVDFPLHLPLELLGVDACLQVLTCILLEHKVVLQSRDYNALSMSVMAFVAMIYPLEYMFPVIPLLPTCMASAEQLLLAPTPYIIGVPASFFLYKLDFKMPDDVWLVDLDSNRVIAPTNAEVLPILPEPESLELKKHLKQALASMSLNTQPILNLEKFHEGQEIPLLLGRPSNDLQSTPSTEFNPLIYGNDVDSVDVATRVAMVRFFNSANVLQGFQMHTRTLRLFPRPVVAFQAGSFLASRPRQTPFAEKLARTQAVEYFGEWILNPTNYAFQRIHNNMFDPALIGDKPKWYAHQLQPIHYRVYDSNSQLAEALSVPPERDSDSEPTDDSGSDSMDYDDSSSSYSSLGDFVSEMMKCDINGDTPNVDPLTHAALGDASEVEIDELQNQKEAEEPGPDSENSQENPPLRSSSSTTASSSPSTVIHGANSEPADSTEMDDKAAVGVSKPLPSVPPSIGKSNVDRRQAEIGEGSVRRRIYDNPYFEPQYGFPPEEDEDEQGESYTPRFSQHVSGNRAQKLLRPNSLRLASDSDAESDSRASSPNSTVSNTSTEGFGGIMSFASSLYRNHSTSFSLSNLTLPTKGAREKATPFPSLKVFGLNTLMEIVTEAGPGSGEGNRRALVDQKSSVIKHSPTVKREPPSPQGRSSNSSENQQFLKEVVHSVLDGQGVGWLNMKKVRRLLESEQLRVFVLSKLNRMVQSEDDARQDIIPDVEISRKVYKGMLDLLKCTVLSLEQSYAHAGLGGMASIFGLLEIAQTHYYSKEPDKRKRSPTESVNTPVGKDPGLAGRGDPKAMAQLRVPQLGPRAPSATGKGPKELDTRSLKEENFIASIGPEVIKPVFDLGETEEKKSQISADSGVSLTSSSQRTDQDSVIGVSPAVMIRSSSQDSEVSTVVSNSSGETLGADSDLSSNAGDGPGGEGSVHLASSRGTLSDSEIETNSATSTIFGKAHSLKPSIKEKLAGSPIRTSEDVSQRVYLYEGLLGKERSTLWDQMQFWEDAFLDAVMLEREGMGMDQGPQEMIDRYLSLGEHDRKRLEDDEDRLLATLLHNLISYMLLMKVNKNDIRKKVRRLMGKSHIGLVYSQQINEVLDQLANLNGRDLSIWSSGSRHMKKQTFVVHAGTDTNGDIFFMEVCDDCVVLRSNIGTVYERWWYEKLINMTYCPKTKVLCLWRRNGSETQLNKFYTKKCRELYYCVKDSMERAAARQQSIKPGPELGGEFPVQDLKTGEGGLLQVTLEGINLKFMHNQVFIELNHIKKCNTVRGVFVLEEFVPEIKEVVSHKYKTPMAHEICYSVLCLFSYVAAVHSSEEDLRTPPRPVSS

SEQ ID NO: 30607 - protein, 1587 aa, Homo sapiens
MVQKKKFCPRLLDYLVIVGARHPSSDSVAQTPELLRRYPLEDHTEFPLPPDVVFFCQPEGCLSVRQRRMSLRDDTSFVFTLTDKDTGVTRYGICVNFYRSFQKRISKEKGEGGAGSRGKEGTHATCASEEGGTESSESGSSLQPLSADSTPDVNQSPRGKRRAKAGSRSRNSTLTSLCVLSHYPFFSTFRECLYTLKRLVDCCSERLLGKKLGIPRGVQRDTMWRIFTGSLLVEEKSSALLHDLREIEAWIYRLLRSPVPVSGQKRVDIEVLPQELQPALTFALPDPSRFTLVDFPLHLPLELLGVDACLQVLTCILLEHKVVLQSRDYNALSMSVMAFVAMIYPLEYMFPVIPLLPTCMASAEQLLLAPTPYIIGVPASFFLYKLDFKMPDDVWLVDLDSNRVIAPTNAEVLPILPEPESLELKKHLKQALASMSLNTQPILNLEKFHEGQEIPLLLGRPSNDLQSTPSTEFNPLIYGNDVDSVDVATRVAMVRFFNSANVLQGFQMHTRTLRLFPRPVVAFQAGSFLASRPRQTPFAEKLARTQAVEYFGEWILNPTNYAFQRIHNNMFDPALIGDKPKWYAHQLQPIHYRVYDSNSQLAEALSVPPERDSDSEPTDDSGSDSMDYDDSSSSYSSLGDFVSEMMKCDINGDTPNVDPLTHAALGDASEVEIDELQNQKEAEEPGPDSENSQENPPLRSSSSTTASSSPSTVIHGANSEPADSTEMDDKAAVGVSKPLPSVPPSIGKSNVDRRQAEIGEGSVRRRIYDNPYFEPQYGFPPEEDEDEQGESYTPRFSQHVSGNRAQKLLRPNSLRLASDSDAESDSRASSPNSTVSNTSTEGFGGIMSFASSLYRNHSTSFSLSNLTLPTKGAREKATPFPSLKGNRRALVDQKSSVIKHSPTVKREPPSPQGRSSNSSENQQFLKEVVHSVLDGQGVGWLNMKKVRRLLESEQLRVFVLSKLNRMVQSEDDARQDIIPDVEISRKVYKGMLDLLKCTVLSLEQSYAHAGLGGMASIFGLLEIAQTHYYSKEPDKRKRSPTESVNTPVGKDPGLAGRGDPKAMAQLRVPQLGPRAPSATGKGPKELDTRSLKEENFIASIGPEVIKPVFDLGETEEKKSQISADSGVSLTSSSQRTDQDSVIGVSPAVMIRSSSQDSEVSTVSNSSGETLGADSDLSSNAGDGPGGEGSVHLASSRGTLSDSEIETNSATSTIFGKAHSLKPSIKEKLAGSPIRTSEDVSQRVYLYEGLLGKERSTLWDQMQFWEDAFLDAVMLEREGMGMDQGPQEMIDRYLSLGEHDRKRLEDDEDRLLATLLHNLISYMLLMKVNKNDIRKKVRRLMGKSHIGLVYSQQINEVLDQLANLNGRDLSIWSSGSRHMKKQTFVVHAGTDTNGDIFFMEVCDDCVVLRSNIGTVYERWWYEKLINMTYCPKTKVLCLWRRNGSETQLNKFYTKKCRELYYCVKDSMERAAARQQSIKPGPELGGEFPVQDLKTGEGGLLQVTLEGINLKFMHNQVFIELNHIKKCNTVRGVFVLEEFVPEIKEVVSHKYKTPMAHEICYSVLCLFSYVAAVHSSEEDLRTPPRPVSS

SEQ ID NO: 30608 - protein, 1565 aa, Homo sapiens
MVQKKKFCPRLLDYLVIVGARHPSSDSVAQTPELLRRYPLEDHTEFPLPPDVVFFCQPEGCLSVRQRRMSLRDDTSFVFTLTDKDTGVTRYGICVNFYRSFQKRISKEKGEGGAGSRGKEGTHATCASEEGGTESSESGSSLQPLSADSTPDVNQSPRGKRRAKAGSRSRNSTLTSLCVLSHYPFFSTFRECLYTLKRLVDCCSERLLGKKLGIPRGVQRDTMWRIFTGSLLVEEKSSALLHDLREIEAWIYRLLRSPVPVSGQKRVDIEVLPQELQPALTFALPDPSRFTLVDFPLHLPLELLGVDACLQVLTCILLEHKVVLQSRDYNALSMSVMAFVAMIYPLEYMFPVIPLLPTCMASAEQLLLAPTPYIIGVPASFFLYKLDFKMPDDVWLVDLDSNRVIAPTNAEVLPILPEPESLELKKHLKQALASMSLNTQPILNLEKFHEGQEIPLLLGRPSNDLQSTPSTEFNPLIYGNDVDSVDVATRVAMVRFFNSANVLQGFQMHTRTLRLFPRPVVAFQAGSFLASRPRQTPFAEKLARTQAVEYFGEWILNPTNYAFQRIHNNMFDPALIGDKPKWYAHQLQPIHYRVYDSNSQLAEALSVPPERDSDSEPTDDSGSDSMDYDDSSSSYSSLGDFVSEMMKCDINGDTPNVDPLTHAALGDASEVEIDELQNQKEAEEPGPDSENSQENPPLRSSSSTTASSSPSTVIHGANSEPADSTEMDDKAAVGVSKPLPSVPPSIGKSNVDRRQAEIGEGAQKLLRPNSLRLASDSDAESDSRASSPNSTVSNTSTEGFGGIMSFASSLYRNHSTSFSLSNLTLPTKGAREKATPFPSLKVFGLNTLMEIVTEAGPGSGEGNRRALVDQKSSVIKHSPTVKREPPSPQGRSSNSSENQQFLKEVVHSVLDGQGVGWLNMKKVRRLLESEQLRVFVLSKLNRMVQSEDDARQDIIPDVEISRKVYKGMLDLLKCTVLSLEQSYAHAGLGGMASIFGLLEIAQTHYYSKEPDKRKRSPTESVNTPVGKDPGLAGRGDPKAMAQLRVPQLGPRAPSATGKGPKELDTRSLKEENFIASIGPEVIKPVFDLGETEEKKSQISADSGVSLTSSSQRTDQDSVIGVSPAVMIRSSSQDSEVSTVVSNSSGETLGADSDLSSNAGDGPGGEGSVHLASSRGTLSDSEIETNSATSTIFGKAHSLKPSIKEKLAGSPIRTSEDVSQRVYLYEGLLGKERSTLWDQMQFWEDAFLDAVMLEREGMGMDQGPQEMIDRYLSLGEHDRKRLEDDEDRLLATLLHNLISYMLLMKVNKNDIRKKVRRLMGKSHIGLVYSQQINEVLDQLANLNGRDLSIWSSGSRHMKKQTFVVHAGTDTNGDIFFMEVCDDCVVLRSNIGTVYERWWYEKLINMTYCPKTKVLCLWRRNGSETQLNKFYTKKCRELYYCVKDSMERAAARQQSIKPGPELGGEFPVQDLKTGEGGLLQVTLEGINLKFMHNQVFIELNHIKKCNTVRGVFVLEEFVPEIKEVVSHKYKTPMAHEICYSVLCLFSYVAAVHSSEEDLRTPPRPVSS

SEQ ID NO: 30609 - protein, 1545 aa, Homo sapiens
MVQKKKFCPRLLDYLVIVGARHPSSDSVAQTPELLRRYPLEDHTEFPLPPDVVFFCQPEGCLSVRQRRMSLRDDTSFVFTLTDKDTGVTRYGICVNFYRSFQKRISKEKGEGGAGSRGKEGTHATCASEEGGTESSESGSSLQPLSADSTPDVNQSPRGKRRAKAGSRSRNSTLTSLCVLSHYPFFSTFRECLYTLKRLVDCCSERLLGKKLGIPRGVQRDTMWRIFTGSLLVEEKSSALLHDLREIEAWIYRLLRSPVPVSGQKRVDIEVLPQELQPALTFALPDPSRFTLVDFPLHLPLELLGVDACLQVLTCILLEHKVVLQSRDYNALSMSVMAFVAMIYPLEYMFPVIPLLPTCMASAEQLLLAPTPYIIGVPASFFLYKLDFKMPDDVWLVDLDSNRVIAPTNAEVLPILPEPESLELKKHLKQALASMSLNTQPILNLEKFHEGQEIPLLLGRPSNDLQSTPSTEFNPLIYGNDVDSVDVATRVAMVRFFNSANVLQGFQMHTRTLRLFPRPVVAFQAGSFLASRPRQTPFAEKLARTQAVEYFGEWILNPTNYAFQRIHNNMFDPALIGDKPKWYAHQLQPIHYRVYDSNSQLAEALSVPPERDSDSEPTDDSGSDSMDYDDSSSSYSSLGDFVSEMMKCDINGDTPNVDPLTHAALGDASEVEIDELQNQKEAEEPGPDSENSQENPPLRSSSSTTASSSPSTVIHGANSEPADSTEMDDKAAVGVSKPLPSVPPSIGKSNVDRRQAEIGEGAQKLLRPNSLRLASDSDAESDSRASSPNSTVSNTSTEGFGGIMSFASSLYRNHSTSFSLSNLTLPTKGAREKATPFPSLKGNRRALVDQKSSVIKHSPTVKREPPSPQGRSSNSSENQQFLKEVVHSVLDGQGVGWLNMKKVRRLLESEQLRVFVLSKLNRMVQSEDDARQDIIPDVEISRKVYKGMLDLLKCTVLSLEQSYAHAGLGGMASIFGLLEIAQTHYYSKEPDKRKRSPTESVNTPVGKDPGLAGRGDPKAMAQLRVPQLGPRAPSATGKGPKELDTRSLKEENFIASIGPEVIKPVFDLGETEEKKSQISADSGVSLTSSSQRTDQDSVIGVSPAVMIRSSSQDSEVSTVVSNSSGETLGADSDLSSNAGDGPGGEGSVHLASSRGTLSDSEIETNSATSTIFGKAHSLKPSIKEKLAGSPIRTSEDVSQRVYLYEGLLGKERSTLWDQMQFWEDAFLDAVMLEREGMGMDQGPQEMIDRYLSLGEHDRKRLEDDEDRLLATLLHNLISYMLLMKVNKNDIRKKVRRLMGKSHIGLVYSQQINEVLDQLANLNGRDLSIWSSGSRHMKKQTFVVHAGTDTNGDIFFMEVCDDCVVLRSNIGTVYERWWYEKLINMTYCPKTKVLCLWRRNGSETQLNKFYTKKCRELYYCVKDSMERAAARQQSIKPGPELGGEFPVQDLKTGEGGLLQVTLEGINLKFMHNQVFIELNHIKKCNTVRGVFVLEEFVPEIKEVVSHKYKTPMAHEICYSVLCLFSYVAAVHSSEEDLRTPPRPVSS

SEQ ID NO: 30610 - protein, 1479 aa, Homo sapiens
MVQKKKFCPRLLDYLVIVGARHPSSDSVAQTPELLRRYPLEDHTEFPLPPDVVFFCQPEGCLSVRQRRMSLRDDTSFVFTLTDKDTGVTRYGICVNFYRSFQKRISKEKGEGGAGSRGKEGTHATCASEEGGTESSESGSSLQPLSADSTPDVNQSPRGKRRAKAGSRSRNSTLTSLCVLSHYPFFSTFRECLYTLKRLVDCCSERLLGKKLGIPRGVQRDTMWRIFTGSLLVEEKSSALLHDLREIEAWIYRLLRSPVPVSGQKRVDIEVLPQELQPALTFALPDPSRFTLVDFPLHLPLELLGVDACLQVLTCILLEHKVVLQSRDYNALSMSVMAFVAMIYPLEYMFPVIPLLPTCMASAEQLLLAPTPYIIGVPASFFLYKLDFKMPDDVWLVDLDSNRVIAPTNAEVLPILPEPESLELKKHLKQALASMSLNTQPILNLEKFHEGQEIPLLLGRPSNDLQSTPSTEFNPLIYGNDVDSVDVATRVAMVRFFNSANVLQGFQMHTRTLRLFPRPVVAFQAGSFLASRPRQTPFAEKLARTQAVEYFGEWILNPTNYAFQRIHNNMFDPALIGDKPKWYAHQLQPIHYRVYDSNSQLAEALSVPPERDSDSEPTDDSGSDSMDYDDSSSSYSSLGDFVSEMMKCDINGDTPNVDPLTHAALGDASEVEIDELQNQKEAEEPGPDSENSQENPPLRSSSSTTASSSPSTVIHGANSEPADSTEMDDKAAVGVSKPLPSVPPSIGKSNVDRRQAEIGEGAQKLLRPNSLRLASDSDAESDSRASSPNSTVSNTSTEGFGGIMSFASSLYRNHSTSFSLSNLTLPTKGAREKATPFPSLKGNRRALVDQKSSVIKHSPTVKREPPSPQGRSSNSSENQQFLKEVVHSVLDGQGVGWLNMKKVRRLLESEQLRVFVLSKLNRMVQSEDDARQDIIPDVEISRKVYKGMLDLLKCTVLSLEQSYAHAGLGGMASIFGLLEIAQTHYYSKEPDKRKRSPTESVNTPVGKDPGLAGRGDPKAMAQLRVPQLGPRAPSATGKGPKELDTRSLKEENFIASIGPEVIKPVFDLGETEEKKSQISADSGVSLTSSSQRTDQDSVIGVSPAVMIRSSSQDSEVSTVVSNSSGETLGADSDLSSNAGDGPGGEGSVHLASSRGTLSDSEIETNSATSTIFGKAHSLKPSIKEKLAGSPIRTSEDVSQRVYLYEGLLGKERSTLWDQMQFWEDAFLDAVMLEREGMGMDQGPQEMIDRYLSLGEHDRKRLEDDEDRLLATLLHNLISYMLLMKVNKNDIRKKVRRLMGKSHIGLVYSQQINEVLDQLANLNGRDLSIWSSGSRHMKKQTFVVHAGTDTNGDIFFMEVCDDCVVLRSNIGTVYERWWYEKLINMTYCPKTKVLCLWRRNGSETQLNKFYTKKCRELYYCVKDSMERAAARQQSIKPGPELGGEFPVQDLKTGEGGLLQVTLEGINLKFMHNQFLKLKKW

SEQ ID NO: 30611 - protein, 1581 aa, Homo sapiens
MVQKKKFCPRLLDYLVIVGARHPSSDSVAQTPELLRRYPLEDHTEFPLPPDVVFFCQPEGCLSVRQRRMSLRDDTSFVFTLTDKDTGVTRYGICVNFYRSFQKRISKEKGEGGAGSRGKEGTHATCASEEGGTESSESGSSLQPLSADSTPDVNQSPRGKRRAKAGSRSRNSTLTSLCVLSHYPFFSTFRECLYTLKRLVDCCSERLLGKKLGIPRGVQRDTMWRIFTGSLLVEEKSSALLHDLREIEAWIYRLLRSPVPVSGQKRVDIEVLPQELQPALTFALPDPSRFTLVDFPLHLPLELLGVDACLQVLTCILLEHKVVLQSRDYNALSMSVMAFVAMIYPLEYMFPVIPLLPTCMASAEQLLLAPTPYIIGVPASFFLYKLDFKMPDDVWLVDLDSNRVIAPTNAEVLPILPEPESLELKKHLKQALASMSLNTQPILNLEKFHEGQEIPLLLGRPSNDLQSTPSTEFNPLIYGNDVDSVDVATRVAMVRFFNSANVLQGFQMHTRTLRLFPRPVVAFQAGSFLASRPRQTPFAEKLARTQAVEYFGEWILNPTNYAFQRIHNNMFDPALIGDKPKWYAHQLQPIHYRVYDSNSQLAEALSVPPERDSDSEPTDDSGSDSMDYDDSSSSYSSLGDFVSEMMKCDINGDTPNVDPLTHAALGDASEVEIDELQNQKEAEEPGPDSENSQENPPLRSSSSTTASSSPSTVIHGANSEPADSTEMDDKAAVGVSKPLPSVPPSIGKSNVDRRQAEIGEGSVRRRIYDNPYFEPQYGFPPEEDEDEQGESYTPRFSQHVSGNRAQKLLRPNSLRLASDSDAESDSRASSPNSTVSNTSTEGFGGIMSFASSLYRNHSTSFSLSNLTLPTKGAREKATPFPSLKVFGLNTLMEIVTEAGPGSGEGNRRALVDQKSSVIKHSPTVKREPPSPQGRSSNSSENQQFLKEVVHSVLDGQGVGWLNMKKVRRLLESEQLRVFVLSKLNRMVQSEDDARQDIIPDVEISRKVYKGMLDLLKCTVLSLEQSYAHAGLGGMASIFGLLEIAQTHYYSKEPDKRKRSPTESVNTPVGKDPGLAGRGDPKAMAQLRVPQLGPRAPSATGKGPKELDTRSLKEENFIASIELWNKHQEVKKQKALEKQRPEVIKPVFDLGETEEKKSQISADSGVSLTSSSQRTDQDSVIGVSPAVMIRSSSQDSEVSTVVSNSSGETLGADSDLSSNAGDGPGGEGSVHLASSRGTLSDSEIETNSATSTIFGKAHSLKPSIKEKLAGSPIRTSEDVSQRVYLYEGLLGRDKGSMWDQLEDAAMETFSISKERSTLWDQMQFWEDAFLDAVMLEREGMGMDQGPQEMIDRYLSLGEHDRKRLEDDEDRLLATLLHNLISYMLLMKVNKNDIRKKVRRLMGKSHIGLVYSQQINEVLDQLANLNGRDLSIWSSGSRHMKKQTFVVHAGTDTNGDIFFMEVCDDCVVLRSNIGTVYERWWYEKLINMTYCPKTKVLCLWRRNGSETQLNKFYTKKCRELYYCVKDSMERAAARQQSIKPGPELGGEFPVQDLKTGEGGLLQVTLEGINLKFMHNQFLKLKKW

SEQ ID NO: 30612 - protein, 1541 aa, Homo sapiens
MVQKKKFCPRLLDYLVIVGARHPSSDSVAQTPELLRRYPLEDHTEFPLPPDVVFFCQPEGCLSVRQRRMSLRDDTSFVFTLTDKDTGVTRYGICVNFYRSFQKRISKEKGEGGAGSRGKEGTHATCASEEGGTESSESGSSLQPLSADSTPDVNQSPRGKRRAKAGSRSRNSTLTSLCVLSHYPFFSTFRECLYTLKRLVDCCSERLLGKKLGIPRGVQRDTMWRIFTGSLLVEEKSSALLHDLREIEAWIYRLLRSPVPVSGQKRVDIEVLPQELQPALTFALPDPSRFTLVDFPLHLPLELLGVDACLQVLTCILLEHKVVLQSRDYNALSMSVMAFVAMIYPLEYMFPVIPLLPTCMASAEQLLLAPTPYIIGVPASFFLYKLDFKMPDDVWLVDLDSNRVIAPTNAEVLPILPEPESLELKKHLKQALASMSLNTQPILNLEKFHEGQEIPLLLGRPSNDLQSTPSTEFNPLIYGNDVDSVDVATRVAMVRFFNSANVLQGFQMHTRTLRLFPRPVVAFQAGSFLASRPRQTPFAEKLARTQAVEYFGEWILNPTNYAFQRIHNNMFDPALIGDKPKWYAHQLQPIHYRVYDSNSQLAEALSVPPERDSDSEPTDDSGSDSMDYDDSSSSYSSLGDFVSEMMKCDINGDTPNVDPLTHAALGDASEVEIDELQNQKEAEEPGPDSENSQENPPLRSSSSTTASSSPSTVIHGANSEPADSTEMDDKAAVGVSKPLPSVPPSIGKSNVDRRQAEIGEGAQKLLRPNSLRLASDSDAESDSRASSPNSTVSNTSTEGFGGIMSFASSLYRNHSTSFSLSNLTLPTKGAREKATPFPSLKGNRRALVDQKSSVIKHSPTVKREPPSPQGRSSNSSENQQFLKEVVHSVLDGQGVGWLNMKKVRRLLESEQLRVFVLSKLNRMVQSEDDARQDIIPDVEISRKVYKGMLDLLKCTVLSLEQSYAHAGLGGMASIFGLLEIAQTHYYSKEPDKRKRSPTESVNTPVGKDPGLAGRGDPKAMAQLRVPQLGPRAPSATGKGPKELDTRSLKEENFIASIGPEVIKPVFDLGETEEKKSQISADSGVSLTSSSQRTDQDSVIGVSPAVMIRSSSQDSEVSNSSGETLGADSDLSSNAGDGPGGEGSVHLASSRGTLSDSEIETNSATSTIFGKAHSLKPSIKEKLAGSPIRTSEDVSQRVYLYEGLLGKERSTLWDQMQFWEDAFLDAVMLEREGMGMDQGPQEMIDRYLSLGEHDRKRLEDDEDRLLATLLHNLISYMLLMKVNKNDIRKKVRRLMGKSHIGLVYSQQINEVLDQLANLNGRDLSIWSSGSRHMKKQTFVVHAGTDTNGDIFFMEVCDDCVVLRSNIGTVYERWWYEKLINMTYCPKTKVLCLWRRNGSETQLNKFYTKKCRELYYCVKDSMERAAARQQSIKPGPELGGEFPVQDLKTGEGGLLQVTLEGINLKFMHNQVFIELNHIKKCNTVRGVFVLEEFVPEIKEVVSHKYKTPMAHEICYSVLCLFSYVAAVHSSEEDLRTPPRPVSS

SEQ ID NO: 30613 - protein, 496 aa, Homo sapiens
MRVLSGTSLMLCSLLLLLQALCSPGLAPQSRGHLCRTRPTDLVFVVDSSRSVRPVEFEKVKVFLSQVIESLDVGPNATRVGMVNYASTVKQEFSLRAHVSKAALLQAVRRIQPLSTGTMTGLAIQFAITKAFGDAEGGRSRSPDISKVVIVVTDGRPQDSVQDVSARARASGVELFAIGVGSVDKATLRQIASEPQDEHVDYVESYSVIEKLSRKFQEAFCVVSDLCATGDHDCEQVCISSPGSYTCACHEGFTLNSDGKTCNVCSGGGGSSATDLVFLIDGSKSVRPENFELVKKFISQIVDTLDVSDKLAQVGLVQYSSSVRQEFPLGRFHTKKDIKAAVRNMSYMEKGTMTGAALKYLIDNSFTVSSGARPGAQKVGIVFTDGRSQDYINDAAKKAKDLGFKMFAVGVGNAVEDELREIASEPVAEHYFYTADFKTINQIGKKLQKKICVEEDPCACESLVKFQAKVEGLLQALTRKLEAVSKRLAILENTVV

SEQ ID NO: 30614 - protein, 956 aa, Homo sapiens
MEKMLAGCFLLILGQIVLLPAEARERSRGRSISRGRHARTHPQTALLESSCENKRADLVFIIDSSRSVNTHDYAKVKEFIVDILQFLDIGPDVTRVGLLQYGSTVKNEFSLKTFKRKSEVERAVKRMRHLSTGTMTGLAIQYALNIAFSEAEGARPLRENVPRVIMIVTDGRPQDSVAEVAAKARDTGILIFAIGVGQVDFNTLKSIGSEPHEDHVFLVANFSQIETLTSVFQKKLCTAHMCSTLEHNCAHFCINIPGSYVCRCKQGYILNSDQTTCRIQDLCAMEDHNCEQLCVNVPGSFVCQCYSGYALAEDGKRCVAVDYCASENHGCEHECVNADGSYLCQCHEGFALNPDKKTCTKIDYCASSNHGCQHECVNTDDSYSCHCLKGFTLNPDKKTCRRINYCALNKPGCEHECVNMEESYYCRCHRGYTLDPNGKTCSRVDHCAQQDHGCEQLCLNTEDSFVCQCSEGFLINEDLKTCSRVDYCLLSDHGCEYSCVNMDRSFACQCPEGHVLRSDGKTCAKLDSCALGDHGCEHSCVSSEDSFVCQCFEGYILREDGKTCRRKDVCQAIDHGCEHICVNSDDSYTCECLEGFRLAEDGKRCRRKDVCKSTHHGCEHICVNNGNSYICKCSEGFVLAEDGRRCKKCTEGPIDLVFVIDGSKSLGEENFEVVKQFVTGIIDSLTISPKAARVGLLQYSTQVHTEFTLRNFNSAKDMKKAVAHMKYMGKGSMTGLALKHMFERSFTQGEGARPLSTRVPRAAIVFTDGRAQDDVSEWASKAKANGITMYAVGVGKAIEEELQEIASEPTNKHLFYAEDFSTMDEISEKLKKGICEALEDSDGRQDSPAGELPKTVQQPTESEPVTINIQDLLSCSNFAVQHRYLFEEDNLLRSTQKLSHSTKPSGSPLEEKHDQCKCENLIMFQNLANEEVRKLTQRLEEMTQRMEALENRLRYR

SEQ ID NO: 30615 - protein, 937 aa, Homo sapiens
MEKMLAGCFLLILGQIVLLPAEARERSRGRSISRGRHARTHPQTALLESSCENKRADLVFIIDSSRSVNTHDYAKVKEFIVDILQFLDIGPDVTRVGLLQYGSTVKNEFSLKTFKRKSEVERAVKRMRHLSTGTMTGLAIQYALNIAFSEAEGARPLRENVPRVIMIVTDGRPQDSVAEVAAKARDTGILIFAIGVGQVDFNTLKSIGSEPHEDHVFLVANFSQIETLTSVFQKKLCTAHMCSTLEHNCAHFCINIPGSYVCRCKQGYILNSDQTTCRIQDLCAMEDHNCEQLCVNVPGSFVCQCYSGYALAEDGKRCVAVDYCASENHGCEHECVNADGSYLCQCHEGFALNPDKKTCTKIDYCASSNHGCQHECVNTDDSYSCHCLKGFTLNPDKKTCRRINYCALNKPGCEHECVNMEESYYCRCHRGYTLDPNGKTCSRVDHCAQQDHGCEQLCLNTEDSFVCQCSEGFLINEDLKTCSRVDYCLLSDHGCEYSCVNMDRSFACQCPEGHVLRSDGKTCAKLDSCALGDHGCEHSCVSSEDSFVCQCFEGYILREDGKTCRRKDVCQAIDHGCEHICVNSDDSYTCECLEGFRLAEDGKRCRRKDVCKSTHHGCEHICVNNGNSYICKCSEGFVLAEDGRRCKKCTEGPIDLVFVIDGSKSLGEENFEVVKQFVTGIIDSLTISPKAARVGLLQYSTQVHTEFTLRNFNSAKDMKKAVAHMKYMGKGSMTGLALKHMFERSFTQGEGARPLSTRVPRAAIVFTDGRAQDDVSEWASKAKANGITMYAVGVGKAIEEELQEIASEPTNKHLFYAEDFSTMDEISEKLKKGICEALEDSDGRQDSPAGELPKTVQQPTVQHRYLFEEDNLLRSTQKLSHSTKPSGSPLEEKHDQCKCENLIMFQNLANEEVRKLTQRLEEMTQRMEALENRLRYR

SEQ ID NO: 30616 - protein, 915 aa, Homo sapiens
MEKMLAGCFLLILGQIVLLPAEARERSRGRSISRGRHARTHPQTALLESSCENKRADLVFIIDSSRSVNTHDYAKVKEFIVDILQFLDIGPDVTRVGLLQYGSTVKNEFSLKTFKRKSEVERAVKRMRHLSTGTMTGLAIQYALNIAFSEAEGARPLRENVPRVIMIVTDGRPQDSVAEVAAKARDTGILIFAIGVGQVDFNTLKSIGSEPHEDHVFLVANFSQIETLTSVFQKKLCTAHMCSTLEHNCAHFCINIPGSYVCRCKQGYILNSDQTTCRIQDLCAMEDHNCEQLCVNVPGSFVCQCYSGYALAEDGKRCVAVDYCASENHGCEHECVNADGSYLCQCHEGFALNPDKKTCTRINYCALNKPGCEHECVNMEESYYCRCHRGYTLDPNGKTCSRVDHCAQQDHGCEQLCLNTEDSFVCQCSEGFLINEDLKTCSRVDYCLLSDHGCEYSCVNMDRSFACQCPEGHVLRSDGKTCAKLDSCALGDHGCEHSCVSSEDSFVCQCFEGYILREDGKTCRRKDVCQAIDHGCEHICVNSDDSYTCECLEGFRLAEDGKRCRRKDVCKSTHHGCEHICVNNGNSYICKCSEGFVLAEDGRRCKKCTEGPIDLVFVIDGSKSLGEENFEVVKQFVTGIIDSLTISPKAARVGLLQYSTQVHTEFTLRNFNSAKDMKKAVAHMKYMGKGSMTGLALKHMFERSFTQGEGARPLSTRVPRAAIVFTDGRAQDDVSEWASKAKANGITMYAVGVGKAIEEELQEIASEPTNKHLFYAEDFSTMDEISEKLKKGICEALEDSDGRQDSPAGELPKTVQQPTESEPVTINIQDLLSCSNFAVQHRYLFEEDNLLRSTQKLSHSTKPSGSPLEEKHDQCKCENLIMFQNLANEEVRKLTQRLEEMTQRMEALENRLRYR

SEQ ID NO: 30617 - protein, 672 aa, Homo sapiens
MEDHNCEQLCVNVPGSFVCQCYSGYALAEDGKRCVAVDYCASENHGCEHECVNADGSYLCQCHEGFALNPDKKTCTKIDYCASSNHGCQHECVNTDDSYSCHCLKGFTLNPDKKTCRRINYCALNKPGCEHECVNMEESYYCRCHRGYTLDPNGKTCSRVDHCAQQDHGCEQLCLNTEDSFVCQCSEGFLINEDLKTCSRVDYCLLSDHGCEYSCVNMDRSFACQCPEGHVLRSDGKTCAKLDSCALGDHGCEHSCVSSEDSFVCQCFEGYILREDGKTCRRKDVCQAIDHGCEHICVNSDDSYTCECLEGFRLAEDGKRCRRKDVCKSTHHGCEHICVNNGNSYICKCSEGFVLAEDGRRCKKCTEGPIDLVFVIDGSKSLGEENFEVVKQFVTGIIDSLTISPKAARVGLLQYSTQVHTEFTLRNFNSAKDMKKAVAHMKYMGKGSMTGLALKHMFERSFTQGEGARPLSTRVPRAAIVFTDGRAQDDVSEWASKAKANGITMYAVGVGKAIEEELQEIASEPTNKHLFYAEDFSTMDEISEKLKKGICEALEDSDGRQDSPAGELPKTVQQPTESEPVTINIQDLLSCSNFAVQHRYLFEEDNLLRSTQKLSHSTKPSGSPLEEKHDQCKCENLIMFQNLANEEVRKLTQRLEEMTQRMEALENRLRYR

SEQ ID NO: 30618 - protein, 334 aa, Homo sapiens
MSEPIRVLVTGAAGQIAYSLLYSIGNGSVFGKDQPIILVLLDITPMMGVLDGVLMELQDCALPLLKDVIATDKEDVAFKDLDVAILVGSMPRREGMERKDLLKANVKIFKSQGAALDKYAKKSVKVIVVGNPANTNCLTASKSAPSIPKENFSCLTRLDHNRAKAQIALKLGVTANDVKNVIIWGNHSSTQYPDVNHAKVKLQGKEVGVYEALKDDSWLKGEFVTTVQQRGAAVIKARKLSSAMSAAKAICDHVRDIWFGTPEGEFVSMGVISDGNSYGVPDDLLYSFPVVIKNKTWKFVEGLPINDFSREKMDLTAKELTEEKESAFEFLSSA

SEQ ID NO: 30619 - protein, 245 aa, Homo sapiens
MPRREGMERKDLLKANVKIFKSQGAALDKYAKKSVKVIVVGNPANTNCLTASKSAPSIPKENFSCLTRLDHNRAKAQIALKLGVTANDVKNVIIWGNHSSTQYPDVNHAKVKLQGKEVGVYEALKDDSWLKGEFVTTVQQRGAAVIKARKLSSAMSAAKAICDHVRDIWFGTPEGEFVSMGVISDGNSYGVPDDLLYSFPVVIKNKTWKFVEGLPINDFSREKMDLTAKELTEEKESAFEFLSSA

SEQ ID NO: 30620 - protein, 352 aa, Homo sapiens
MRRCSYFPKDVTVFDKDDKSEPIRVLVTGAAGQIAYSLLYSIGNGSVFGKDQPIILVLLDITPMMGVLDGVLMELQDCALPLLKDVIATDKEDVAFKDLDVAILVGSMPRREGMERKDLLKANVKIFKSQGAALDKYAKKSVKVIVVGNPANTNCLTASKSAPSIPKENFSCLTRLDHNRAKAQIALKLGVTANDVKNVIIWGNHSSTQYPDVNHAKVKLQGKEVGVYEALKDDSWLKGEFVTTVQQRGAAVIKARKLSSAMSAAKAICDHVRDIWFGTPEGEFVSMGVISDGNSYGVPDDLLYSFPVVIKNKTWKFVEGLPINDFSREKMDLTAKELTEEKESAFEFLSSA

SEQ ID NO: 30621 - protein, 307 aa, Homo sapiens
MGSTMEPPGGAYLHLGAVTSPVGTARVLQLAFGCTTFSLVAHRGGFAGVQGTFCMAAWGFCFAVSALVVACEFTRLHGCLRLSWGNFTAAFAMLATLLCATAAVLYPLYFARRECSPEPAGCAARDFRLAASVFAGLLFLAYAVEVALTRARPGQVSSYMATVSGLLKIVQAFVACIIFGALVHDSRYGRYVATQWCVAVYSLCFLATVAVVALSVMGHTGGLGCPFDRLVVVYTFLAVLLYLSAAVIWPVFCFDPKYGEPKRPPNCARGSCPWDSQLVVAIFTYVNLLLYVVDLAYSQRIRFVPSL

SEQ ID NO: 30622 - protein, 350 aa, Homo sapiens
MFGLKRNAVIGLNLYCGGAGLGAGSGGATRPGGRLLATEKEASARREIGGGEAGAVIGGSAGASPPSTLTPDSRRVARPPPIGAEVPDVTATPARLLFFAPTRRAAPLEEMEAPAADAIMSPEEELDGYEPEPLGKRPAVLPLLELVGESGNNTSTDGSLPSTPPPAEEEEDELYRQSLEIISRYLREQATGAKDTKPMGRSGATSRKALETLRRVGDGVQRNHETAFQGMLRKLDIKNEDDVKSLSRVMIHVFSDGVTNWGRIVTLISFGAFVAKHLKTINQESCIEPLAESITDVLVRTKRDWLVKQRGWDGFVEFFHVEDLEGGIRNVLLAFAGVAGVGAGLAYLIR

SEQ ID NO: 30623 - protein, 271 aa, Homo sapiens
MFGLKRNAVIGLNLYCGGAGLGAGSGGATRPGGRLLATEKEASARREIGGGEAGAVIGGSAGASPPSTLTPDSRRVARPPPIGAEVPDVTATPARLLFFAPTRRAAPLEEMEAPAADAIMSPEEELDGYEPEPLGKRPAVLPLLELVGESGNNTSTDGSLPSTPPPAEEEEDELYRQSLEIISRYLREQATGAKDTKPMGRSGATSRKALETLRRVGDGVQRNHETAFQGWVCGVLPCRGPRRWHQECAAGFCRCCWSRSWFGISNKIALL

SEQ ID NO: 30624 - protein, 486 aa, Homo sapiens
MPRPAPARRLPGLLLLLWPLLLLPSAAPDPVARPGFRRLETRGPGGSPGRRPSPAAPDGAPASGTSEPGRARGAGVCKSRPLDLVFIIDSSRSVRPLEFTKVKTFVSRIIDTLDIGPADTRVAVVNYASTVKIEFQLQAYTDKQSLKQAVGRITPLSTGTMSGLAIQTAMDEAFTVEAGAREPSSNIPKVAIIVTDGRPQDQVNEVAARAQASGIELYAVGVDRADMASLKMMASEPLEEHVFYVETYGVIEKLSSRFQETFCALDPCVLGTHQCQHVCISDGEGKHHCECSQGYTLNADKKTCSALDRCALNTHGCEHICVNDRSGSYHCECYEGYTLNEDRKTCSAQDKCALGTHGCQHICVNDRTGSHHCECYEGYTLNADKKTCSVRDKCALGSHGCQHICVSDGAASYHCDCYPGYTLNEDKKTCSATEEARRLVSTEDACGCEATLAFQDKVSSYLQRLNTKLDDILEKLKINEYGQIHR

SEQ ID NO: 30625 - protein, 444 aa, Homo sapiens
MPRPAPARRLPGLLLLLWPLLLLPSAAPDPVARPGFRRLETRGPGGSPGRRPSPAAPDGAPASGTSEPGRARGAGVCKSRPLDLVFIIDSSRSVRPLEFTKVKTFVSRIIDTLDIGPADTRVAVVNYASTVKIEFQLQAYTDKQSLKQAVGRITPLSTGTMSGLAIQTAMDEAFTVEAGAREPSSNIPKVAIIVTDGRPQDQVNEVAARAQASGIELYAVGVDRADMASLKMMASEPLEEHVFYVETYGVIEKLSSRFQETFCALDRCALNTHGCEHICVNDRSGSYHCECYEGYTLNEDRKTCSAQDKCALGTHGCQHICVNDRTGSHHCECYEGYTLNADKKTCSVRDKCALGSHGCQHICVSDGAASYHCDCYPGYTLNEDKKTCSATEEARRLVSTEDACGCEATLAFQDKVSSYLQRLNTKLDDILEKLKINEYGQIHR

SEQ ID NO: 30626 - protein, 552 aa, Homo sapiens
MHCERFLCILRIIGTTLFGVSLLLGITAAYIVGYQFIQTDNYYFSFGLYGAFLASHLIIQSLFAFLEHRKMKKSLETPIKLNKTVALCIAAYQEDPDYLRKCLQSVKRLTYPGIKVVMVIDGNSEDDLYMMDIFSEVMGRDKSATYIWKNNFHEKGPGETDESHKESSQHVTQLVLSNKSICIMQKWGGKREVMYTAFRALGRSVDYVQVCDSDTMLDPASSVEMVKVLEEDPMVGGVGGDVQILNKYDSWISFLSSVRYWMAFNIERACQSYFGCVQCISGPLGMYRNSLLHEFVEDWYNQEFMGNQCSFGDDRHLTNRVLSLGYATKYTARSKCLTETPIEYLRWLNQQTRWSKSYFREWLYNAMWFHKHHLWMTYEAIITGFFPFFLIATVIQLFYRGKIWNILLFLLTVQLVGLIKSSFASCLRGNIVMVFMSLYSVLYMSSLLPAKMFAIATINKAGWGTSGRKTIVVNFIGLIPVSVWFTILLGGVIFTIYKESKRPFSESKQTVLIVGTLLYACYWVMLLTLYVVLINKCGRRKKGQQYDMVLDV

SEQ ID NO: 30627 - protein, 553 aa, Homo sapiens
MADPEVVVSSCSSHEEENRCNFNQQTSPSEELLLEDQMRRKLKFFFMNPCEKFWARGRKPWKLAIQILKIAMVTIQLVLFGLSNQMVVAFKEENTIAFKHLFLKGYMDRMDDTYAVYTQSDVYDQLIFAVNQYLQLYNVSVGNHAYENKGTKQSAMAICQHFYKRGNIYPGNDTFDIDPEIETECFFVEPDEPFHIGTPAENKLNLTLDFHRLLTVELQFKLKAINLQTVRHQELPDCYDFTLTITFDNKAHSGRIKISLDNDISIRECKDWHVSGSIQKNTHYMMIFDAFVILTCLVSLILCIRSVIRGLQLQQEFVNFFLLHYKKEVSVSDQMEFVNGWYIMIIISDILTIIGSILKMEIQAKSLTSYDVCSILLGTSTMLVWLGVIRYLGFFAKYNLLILTLQAALPNVIRFCCCAAMIYLGYCFCGWIVLGPYHDKFRSLNMVSECLFSLINGDDMFATFAKMQQKSYLVWLFSRIYLYSFISLFIYMILSLFIALITDTYETIKQYQQDGFPETELRTFISECKDLPNSGKYRLEDDPPVSLFCCCKK

SEQ ID NO: 30628 - protein, 497 aa, Homo sapiens
MADPEVVVSSCSSHEEENRCNFNQQTSPSEELLLEDQMRRKLKFFFMNPCEKFWARGRKPWKLAIQILKIAMVTIQYLQLYNVSVGNHAYENKGTKQSAMAICQHFYKRGNIYPGNDTFDIDPEIETECFFVEPDEPFHIGTPAENKLNLTLDFHRLLTVELQFKLKAINLQTVRHQELPDCYDFTLTITFDNKAHSGRIKISLDNDISIRECKDWHVSGSIQKNTHYMMIFDAFVILTCLVSLILCIRSVIRGLQLQQEFVNFFLLHYKKEVSVSDQMEFVNGWYIMIIISDILTIIGSILKMEIQAKSLTSYDVCSILLGTSTMLVWLGVIRYLGFFAKYNLLILTLQAALPNVIRFCCCAAMIYLGYCFCGWIVLGPYHDKFRSLNMVSECLFSLINGDDMFATFAKMQQKSYLVWLFSRIYLYSFISLFIYMILSLFIALITDTYETIKQYQQDGFPETELRTFISECKDLPNSGKYRLEDDPPVSLFCCCKK

SEQ ID NO: 30629 - protein, 490 aa, Homo sapiens
MTSFSTSAQCSTSDSACRISPGQINQVRPKLPLLKILHAAGAQGEMFTVKEVMHYLGQYIMVKQLYDQQEQHMVYCGGDLLGELLGRQSFSVKDPSPLYDMLRKNLVTLATATTDAAQTLALAQDHSMDIPSQDQLKQSAEESSTSRKRTTEDDIPTLPTSEHKCIHSREDEDLIENLAQDETSRLDLGFEEWDVAGLPWWFLGNLRSNYTPRSNGSTDLQTNQDVGTAIVSDTTDDLWFLNESVSEQLGVGIKVEAADTEQTSEEVGKVSDKKVIEVGKNDDLEDSKSLSDDTDVEVTSEDEWQCTECKKFNSPSKRYCFRCWALRKDWYSDCSKLTHSLSTSDITAIPEKENEGNDVPDCRRTISAPVVRPKDAYIKKENSKLFDPCNSVEFLDLAHSSESQETISSMGEQLDNLSEQRTDTENMEDCQNLLKPCSLCEKRPRDGNIIHGRTGHLVTCFHCARRLKKAGASCPICKKEIQLVIKVFIA

SEQ ID NO: 30630 - protein, 127 aa, Homo sapiens
MTSFSTSAQCSTSDSACRISPGQINQVRPKLPLLKILHAAGAQGEMFTVKEVMHYLGQYIMVKQLYDQQEQHMVYCGGDLLGELLGRQSFSVKDPSPLYDMLRKNLVTSASNNTARCNRILQSQKKN

SEQ ID NO: 30631 - protein, 127 aa, Homo sapiens
MTSFSTSAQCSTSDSACRISPGQINQVRPKLPLLKILHAAGAQGEMFTVKEVMHYLGQYIMVKQLYDQQEQHMVYCGGDLLGELLGRQSFSVKDPSPLYDMLRKNLVTSASNNTDAAQTLALAQDHT

SEQ ID NO: 30632 - protein, 164 aa, Homo sapiens
MTSFSTSAQCSTSDSACRISPGQINQENEGNDVPDCRRTISAPVVRPKDAYIKKENSKLFDPCNSVEFLDLAHSSESQETISSMGEQLDNLSEQRTDTENMEDCQNLLKPCSLCEKRPRDGNIIHGRTGHLVTCFHCARRLKKAGASCPICKKEIQLVIKVFIA

SEQ ID NO: 30633 - protein, 440 aa, Homo sapiens
MTSFSTSAQCSTSDSACRISPGQINQVRPKLPLLKILHAAGAQGEMFTVKEVMHYLGQYIMVKQLYDQQEQHMVYCGGDLLGELLGRQSFSVKDPSPLYDMLRKNLVTLATATTDAAQTLALAQDHSMDIPSQDQLKQSAEESSTSRKRTTEDDIPTLPTSEHKCIHSREDEDLIENLAQDETSRLDLGFEEWDVAGLPWWFLGNLRSNYTPRSNGSTDLQTNQVIEVGKNDDLEDSKSLSDDTDVEVTSEDEWQCTECKKFNSPSKRYCFRCWALRKDWYSDCSKLTHSLSTSDITAIPEKENEGNDVPDCRRTISAPVVRPKDAYIKKENSKLFDPCNSVEFLDLAHSSESQETISSMGEQLDNLSEQRTDTENMEDCQNLLKPCSLCEKRPRDGNIIHGRTGHLVTCFHCARRLKKAGASCPICKKEIQLVIKVFIA

SEQ ID NO: 30634 - protein, 325 aa, Homo sapiens
MDGSNVTSFVVEEPTNISTGRNASVGNAHRQIPIVHWVIMSISPVGFVENGILLWFLCFRMRRNPFTVYITHLSIADISLLFCIFILSIDYALDYELSSGHYYTIVTLSVTFLFGYNTGLYLLTAISVERCLSVLYPIWYRCHRPKYQSALVCALLWALSCLVTTMEYVMCIDREEESHSRNDCRAVIIFIAILSFLVFTPLMLVSSTILVVKIRKNTWASHSSKLYIVIMVTIIIFLIFAMPMRLLYLLYYEYWSTFGNLHHISLLFSTINSSANPFIYFFVGSSKKKRFKESLKVVLTRAFKDEMQPRRQKDNCNTVTVETVV

SEQ ID NO: 30635 - protein, 904 aa, Homo sapiens
MAESSESFTMASSPAQRRRGNDPLTSSPGRSSRRTDALTSSPGRDLPPFEDESEGLLGTEGPLEEEEDGEELIGDGMERDYRAIPELDAYEAEGLALDDEDVEELTASQREAAERAMRQRDREAGRGLGRMRRGLLYDSDEEDEERPARKRRQVERATEDGEEDEEMIESIENLEDLKGHSVREWVSMAGPRLEIHHRFKNFLRTHVDSHGHNVFKERISDMCKENRESLVVNYEDLAAREHVLAYFLPEAPAELLQIFDEAALEVVLAMYPKYDRITNHIHVRISHLPLVEELRSLRQLHLNQLIRTSGVVTSCTGVLPQLSMVKYNCNKCNFVLGPFCQSQNQEVKPGSCPECQSAGPFEVNMEETIYQNYQRIRIQESPGKVAAGRLPRSKDAILLADLVDSCKPGDEIELTGIYHNNYDGSLNTANGFPVFATVILANHVAKKDNKVAVGELTDEDVKMITSLSKDQQIGEKIFASIAPSIYGHEDIKRGLALALFGGEPKNPGGKHKVRGDINVLLCGDPGTAKSQFLKYIEKVSSRAIFTTGQGASAVGLTAYVQRHPVSREWTLEAGALVLADRGVCLIDEFDKMNDQDRTSIHEAMEQQSISISKAGIVTSLQARCTVIAAANPIGGRYDPSLTFSENVDLTEPIISRFDILCVVRDTVDPVQDEMLARFVVGSHVRHHPSNKEEEGLANGSAAEPAMPNTYGVEPLPQEVLKKYIIYAKERVHPKLNQMDQDKVAKMYSDLRKESMATGSIPITVRHIESMIRMAEAHARIHLRDYVIEDDVNMAIRVMLESFIDTQKFSVMRSMRKTFARYLSFRRDNNELLLFILKQLVAEQVTYQRNRFGAQQDTIEVPEKDLVDKARQINIHNLSAFYDSELFRMNKFSHDLKRKMILQQF

SEQ ID NO: 30636 - protein, 847 aa, Homo sapiens
MSKSFQQSSLSRDSQGHGRDLSAAGIGLLAAATQSLSMPASLGRMNQGTARLASLMNLGMSSSLNQQGAHSALSSASTSSHNLQSIFNIGSRGPLPLSSQHRGDADQASNILASFGLSARDLDELSRYPEDKITPENLPQILLQLKRRRTEEGPTLSYGRDGRSATREPPYRVPRDDWEEKRHFRRDSFDDRGPSLNPVLDYDHGSRSQESGYYDRMDYEDDRLRDGERCRDDSFFGETSHNYHKFDSEYERMGRGPGPLQERSLFEKKRGAPPSSNIEDFHGLLPKGYPHLCSICDLPVHSNKEWSQHINGASHSRRCQLLLEIYPEWNPDNDTGHTMGDPFMLQQSTNPAPGILGPPPPSFHLGGPAVGPRGNLGAGNGNLQGPRHMQKGRVETSRVVHIMDFQRGKNLRYQLLQLVEPFGVISNHLILNKINEAFIEMATTEDAQAAVDYYTTTPALVFGKPVRVHLSQKYKRIKKPEGKPDQKFDQKQELGRVIHLSNLPHSGYSDSAVLKLAEPYGKIKNYILMRMKSQAFIEMETREDAMAMVDHCLKKALWFQGRCVKVDLSEKYKKLVLRIPNRGIDLLKKDKSRKRSYSPDGKESPSDKKSKTDGSQKTESSTEGKEQEEKSGEDGEKDTKDDQTEQEPNMLLESEDELLVDEEEAAALLESGSSVGDETDLANLGDVASDGKKEPSDKAVKKDGSASAAAKKKLKKVDKIEELDQENEAALENGIKNEENTEPGAESSENADDPNKDTSENADGQSDENKDDYTIPDEYRIGPYQPNVPVGIDYVIPKTGFYCKLCSLFYTNEEVAKNTHCSSLPHYQKLKKFLNKLAEERRQKKET

SEQ ID NO: 30637 - protein, 559 aa, Homo sapiens
MLGAQWRRNQPSRAAEEWSQHINGASHSRRCQLLLEIYPEWNPDNDTGHTMGDPFMLQQSTNPAPGILGPPPPSFHLGGPAVGPRGNLGAGNGNLQGPRHMQKGRVETSRVVHIMDFQRGKNLRYQLLQLVEPFGVISNHLILNKINEAFIEMATTEDAQAAVDYYTTTPALVFGKPVRVHLSQKYKRIKKPEGKPDQKFDQKQELGRVIHLSNLPHSGYSDSAVLKLAEPYGKIKNYILMRMKSQAFIEMETREDAMAMVDHCLKKALWFQGRCVKVDLSEKYKKLVLRIPNRGIDLLKKDKSRKRSYSPDGKESPSDKKSKTDGSQKTESSTEGKEQEEKSGEDGEKDTKDDQTEQEPNMLLESEDELLVDEEEAAALLESGSSVGDETDLANLGDVASDGKKEPSDKAVKKDGSASAAAKKKLKKVDKIEELDQENEAALENGIKNEENTEPGAESSENADDPNKDTSENADGQSDENKDDYTIPDEYRIGPYQPNVPVGIDYVIPKTGFYCKLCSLFYTNEEVAKNTHCSSLPHYQKLKKFLNKLAEERRQKKET

SEQ ID NO: 30638 - protein, 309 aa, Homo sapiens
MDDQGCPRCKTTKYRNPSLKLMVNVCGHTLCESCVDLLFVRGAGNCPECGTPLRKSNFRVQLFEDPTVDKEVEIRKKVLKIYNKREEDFPSLREYNDFLEEVEEIVFNLTNNVDLDNTKKKMEIYQKENKDVIQKNKLKLTREQEELEEALEVERQENEQRRLFIQKEEQLQQILKRKNKQAFLDELESSDLPVALLLAQHKDRSTQLEMQLEKPKPVKPVTFSTGIKMGQHISLAPIHKLEEALYEYQPLQIETYGPHVPELEMLGRLGYLNHVRAASPQDLAGGYTSSLACHRALQDAFSGLFWQPS

SEQ ID NO: 30639 - protein, 267 aa, Homo sapiens
MDDQGCPRCKTTKYRNPSLKLMVNVCGHTLCESCVDLLFVRGAGNCPECGTPLRKSNFRVQLFEDPTVDKEVEIRKKVLKIYNKREEDFPSLREYNDFLEEVEEIVFNLTNNVDLDNTKKKMEIYQKENKDVIQKNKLKLTREQEELEEALEVERQENEQRRLFIQKEEQLQQILKRKNKQAFLDELGQHISLAPIHKLEEALYEYQPLQIETYGPHVPELEMLGRLGYLNHVRAASPQDLAGGYTSSLACHRALQDAFSGLFWQPS

SEQ ID NO: 30640 - protein, 434 aa, Homo sapiens
MPNRKASRNAYYFFVQEKIPELRRRGLPVARVADAIPYCSSDWALLREEEKEKYAEMAREWRAAQGKDPGPSEKQKPVFTPLRRPGMLVPKQNVSPPDMSALSLKGDQALLGGIFYFLNIFSHGELPPHCEQRFLPCEIGCVKYSLQEGIMADFHSFINPGEIPRGFRFHCQAASDSSHKIPISNFERGHNQATVLQNLYRFIHPNPGNWPPIYCKSDDRTRVNWCLKHMAKASEIRQDLQLLTVEDLVVGIYQQKFLKEPSKTWIRSLLDVAMWDYSSNTRCKWHEENDILFCALAVCKKIAYCISNSLATLFGIQLTEAHVPLQDYEASNSVTPKMVVLDAGRYQKLRVGSSGFSHFNSSNEEQRSNTPIGDYPSRAKISGQNSSVRGRGITRLLESISNSSSNIHKFSNCDTSLSPYMSQKDGYKSFSSLS

SEQ ID NO: 30641 - protein, 403 aa, Homo sapiens
MPNRKASRNAYYFFVQEKIPELRRRGLPVARVADAIPYCSSDWAKPVFTPLRRPGMLVPKQNVSPPDMSALSLKGDQALLGGIFYFLNIFSHGELPPHCEQRFLPCEIGCVKYSLQEGIMADFHSFINPGEIPRGFRFHCQAASDSSHKIPISNFERGHNQATVLQNLYRFIHPNPGNWPPIYCKSDDRTRVNWCLKHMAKASEIRQDLQLLTVEDLVVGIYQQKFLKEPSKTWIRSLLDVAMWDYSSNTRCKWHEENDILFCALAVCKKIAYCISNSLATLFGIQLTEAHVPLQDYEASNSVTPKMVVLDAGRYQKLRVGSSGFSHFNSSNEEQRSNTPIGDYPSRAKISGQNSSVRGRGITRLLESISNSSSNIHKFSNCDTSLSPYMSQKDGYKSFSSLS

SEQ ID NO: 30642 - protein, 156 aa, Homo sapiens
MIQRCKWHEENDILFCALAVCKKIAYCISNSLATLFGIQLTEAHVPLQDYEASNSVTPKMVVLDAGRYQKLRVGSSGFSHFNSSNEEQRSNTPIGDYPSRAKISGQNSSVRGRGITRLLESISNSSSNIHKFSNCDTSLSPYMSQKDGYKSFSSLS

SEQ ID NO: 30643 - protein, 620 aa, Homo sapiens
MSEHVEPAAPGPGPNGGGGGPAPARGPRTPNLNPNPLINVRDRLFHALFFKMAVTYSRLFPPAFRRLFEFFVLLKALFVLFVLAYIHIVFSRSPINCLEHVRDKWPREGILRVEVRHNSSRAPVFLQFCDSGGRGSFPGLAVEPGSNLDMEDEEEEELTMEMFGNSSIKFELDIEPKVFKPPSSTEALNDSQEFPFPETPTKVWPQDEYIVEYSLEYGFLRLSQATRQRLSIPVMVVTLDPTRDQCFGDRFSRLLLDEFLGYDDILMSSVKGLAENEENKGFLRNVVSGEHYRFVSMWMARTSYLAAFAIMVIFTLSVSMLLRYSHHQIFVFIVDLLQMLEMNMAIAFPAAPLLTVILALVGMEAIMSEFFNDTTTAFYIILIVWLADQYDAICCHTSTSKRHWLRFFYLYHFAFYAYHYRFNGQYSSLALVTSWLFIQHSMIYFFHHYELPAILQQVRIQEMLLQAPPLGPGTPTALPDDMNNNSGAPATAPDSAGQPPALGPVSPGASGSPGPVAAAPSSLVAAAASVAAAAGGDLGWMAETAAIITDASFLSGLSASLLERRPASPLGPAGGLPHAPQDSVPPSDSAASDTTPLGAAVGGPSPASMAPTEAPSEVGS

SEQ ID NO: 30644 - protein, 408 aa, Homo sapiens
MSEHVEPAAPGPGPNGGGGGPAPARGPRTPNLNPNPLINVRDRLFHALFFKMAVTYSRLFPPAFRRLFEFFVLLKALFVLFVLAYIHIVFSRSPINCLEHVRDKWPREGILRVEVRHNSSRAPVFLQFCDSGGRGSFPGLAVEPGSNLDMEDEEEEELTMEMFGNSSIKFELDIEPKVFKPPSSTEALNDSQEFPFPETPTKVWPQDEYIVEYSLEYGFLRLSQATRQRLSIPVMVVTLDPTRDQCFGDRFSRLLLDEFLGYDDILMSSVKGLAENEENKGFLRNVVSGEHYRFVSMWMARTSYLAAFAIMVIFTLSVSMLLRYSHHQIFVFIVDLLQMLEMNMAIAFPAAPLLTVILALVGMEAIMSEFFNDTTTAFYIILIVWLADQYDAICCHTSTSKRHWLRIP

SEQ ID NO: 30645 - protein, 122 aa, Homo sapiens
MTTATRQEVLGLYRSIFRLARKWQATSGQMEDTIKEKQYILNEARTLFRKNKNLTDTDLIKQCIDECTARIEIGLHYKIPYPRPIHLPPMGLTPLRGRGLRSQEKLRKLSKPVYLRSHDEVS

SEQ ID NO: 30646 - protein, 334 aa, Homo sapiens
MVGREKELSIHFVPGSCRLVEEEVNIPNRRVLVTGATGLLGRAVHKEFQQNNWHAVGCGFRRARPKFEQVNLLDSNAVHHIIHDFQPHVIVHCAAERRPDVVENQPDAASQLNVDASGNLAKEAAAVGAFLIYISSDYVFDGTNPPYREEDIPAPLNLYGKTKLDGEKAVLENNLGAAVLRIPILYGEVEKLEESAVTVMFDKVQFSNKSANMDHWQQRFPTHVKDVATVCRQLAEKRMLDPSIKGTFHWSGNEQMTKYEMACAIADAFNLPSSHLRPITDSPVLGAQRPRNAQLDCSKLETLGIGQRTPFRIGIKESLWPFLIDKRWRQTVFH

SEQ ID NO: 30647 - protein, 323 aa, Homo sapiens
MPEMPEDMEQEEVNIPNRRVLVTGATGLLGRAVHKEFQQNNWHAVGCGFRRARPKFEQVNLLDSNAVHHIIHDFQPHVIVHCAAERRPDVVENQPDAASQLNVDASGNLAKEAAAVGAFLIYISSDYVFDGTNPPYREEDIPAPLNLYGKTKLDGEKAVLENNLGAAVLRIPILYGEVEKLEESAVTVMFDKVQFSNKSANMDHWQQRFPTHVKDVATVCRQLAEKRMLDPSIKGTFHWSGNEQMTKYEMACAIADAFNLPSSHLRPITDSPVLGAQRPRNAQLDCSKLETLGIGQRTPFRIGIKESLWPFLIDKRWRQTVFH

SEQ ID NO: 30648 - protein, 259 aa, Homo sapiens
MVGREKELSIHFVPGSCRLVEEEVNIPNRRVLVTGATGLLGRAVHKEFQQNNWHAVGCGFRRARPKFEQVNLLDSNAVHHIIHDFQPHVIVHCAAERRPDVVENQPDAASQLNVDASGNLAKEAAAVGAFLIYISSDYVFDGTNPPYREEDIPAPLNLYGKTKLDGEKAVLENNLGAAVLRIPILYGEVEKLEESAVTVMFDKVQFSNKSANMDHWQQRFPTHVKDVATVCRQLAEKRMLVRRIPESCLSEGPLCLFHA

SEQ ID NO: 30649 - protein, 306 aa, Homo sapiens
MPEMPEDMEQEEVNIPNRRVLVTGATGLLGRAVHKEFQQNNWHAVGCGFRRARPKFEQVNLLDSNAVHHIIHDFQPHVIVHCAAERRPDVVENQPDAASQLNVDASGNLAKEAAAVGAFLIYISSDYVFDGTNPPYREEDIPAPLNLYGKTKLDGEKAVLENNLGAAVLRIPILYGEVEKLEESAVTVMFDKVQFSNKSANMDHWQQRFPTHVKDVATVCRQLAEKRMLDPSIKGTFHWSGNEQMTKYEMACAIADAFNLPSSHLRPDCSKLETLGIGQRTPFRIGIKESLWPFLIDKRWRQTVFH

SEQ ID NO: 30650 - protein, 83 aa, Homo sapiens
MPEMPEDMEQEEEVNIPNRRVLVTGATGLLGRAVHKEFQQNNWHAVGCGFRRARPKFEQVNLLDSNAVHHIIHDFQVLLTALS

SEQ ID NO: 30651 - protein, 256 aa, Homo sapiens
MKLLENSSFEAINSQLTVETGDAHIIGRIESYSCKMAGDDKHMFKQFCQEGQPHVLEALSPPQTSGLSPSRLSKSQGGEEEGPLSDKCSRKTLFYLIATLNESFRPDYDFSTARSHEFSREPSLSWVVNAVNCSLFSAVREDFKDLKPQLWNAVDEEICLAECDIYSYNPDLDSDPFGEDGSLWSFNYFFYNKRLKRIVFFSCRSISGSTYTPSEAGNELDMELGEEEVEEESRSGGSGAEETSTMEEDRVPVICI

SEQ ID NO: 30652 - protein, 91 aa, Homo sapiens
MAASSRAQVLSLYRAMLRESKRFSAYNYRTYAVRRIRDAFRENKNVKDPVEIQTLVNKAKRDLGVIRRQVHIGQLYSTDKLIIENRDMPRT

SEQ ID NO: 30653 - protein, 628 aa, Homo sapiens
MFDGYDSCSEDTSSSSSSEESEEEVAPLPSNLPIIKNNGQVYTYPDGKSGMATCEMCGMVGVRDAFYSKTKRFCSVSCSRSYSSNSKKASILARLQGKPPTKKAKVLQKQPLVAKLAAYAQYQATLQNQAKTKAAVSMEGFSWGNYINSNSFIAAPVTCFKHAPMGTCWGDISENVRVEVPNTDCSLPTKVFWIAGIVKLAGYNALLRYEGFENDSGLDFWCNICGSDIHPVGWCAASGKPLVPPRTIQHKYTNWKAFLVKRLTGAKTLPPDFSQKVSESMQYPFKPCMRVEVVDKRHLCRTRVAVVESVIGGRLRLVYEESEDRTDDFWCHMHSPLIHHIGWSRSIGHRFKRSDITKKQDGHFDTPPHLFAKVKEVDQSGEWFKEGMKLEAIDPLNLSTICVATIRKVLADGFLMIGIDGSEAADGSDWFCYHATSPSIFPVGFCEINMIELTPPRGYTKLPFKWFDYLRETGSIAAPVKLFNKDVPNHGFRVGMKLEAVDLMEPRLICVATVTRIIHRLLRIHFDGWEEEYDQWVDCESPDLYPVGWCQLTGYQLQPPASQSSRENQSASSKQKKKAKSQQYKGHKKMTTLQLKEELLDGEDYNFLQGASDQESNGSANFYIKQEP

SEQ ID NO: 30654 - protein, 169 aa, Homo sapiens
MFDGYDSCSEDTSSSSSSEESEEEVAPLPSNLPIIKNNGQVYTYPDGKSGMATCEMCGMVGVRDAFYSKTKRFCSVSCSRSYSSNSKKASILARLQGKPPTKKAKVLQKQPLVAKLAAYAQYQATLQNQAKTKAAVSMEGFSWGNYINSNSFIAAPVTCFKHGRRVAPR

SEQ ID NO: 30655 - protein, 410 aa, Homo sapiens
MGTCWGDISENVRVEVPNTDCSLPTKVFWIAGIVKLAGYNALLRYEGFENDSGLDFWCNICGSDIHPVGWCAASGKPLVPPRTIQHKYTNWKAFLVKRLTGAKTLPPDFSQKVSESMQYPFKPCMRVEVVDKRHLCRTRVAVVESVIGGRLRLVYEESEDRTDDFWCHMHSPLIHHIGWSRSIGHRFKRSDITKKQDGHFDTPPHLFAKVKEVDQSGEWFKEGMKLEAIDPLNLSTICVATIRKVLADGFLMIGIDGSEAADGSDWFCYHATSPSIFPVGFCEINMIELTPPRGYTKLPFKWFDYLRETGSIAAPVKLFNKDVPNHGFRVGMKLEAVDLMEPRLICVATVTRIIHRLLRIHFDGWEEEYDQWVDCESPDLYPVGWCQLTGYQLQPPASQCKLVYRKGVLL

SEQ ID NO: 30656 - protein, 104 aa, Homo sapiens
MGRAVKVLQLFKTLHRTRQQVFKNDARALEAARIKINEEFKNNKSETSSKKIEELMKIGSDVELLLRTSVIQGIHTDHNTLKLVPRKDLLVENVPYCDAPTQKQ

SEQ ID NO: 30657 - protein, 808 aa, Homo sapiens
MAGTVVLDDVELREAQRDYLDFLDDEEDQGIYQSKVRELISDNQYRLIVNVNDLRRKNEKRANRLLNNAFEELVAFQRALKDFVASIDATYAKQYEEFYVGLEGSFGSKHVSPRTLTSCFLSCVVCVEGIVTKCSLVRPKVVRSVHYCPATKKTIERRYSDLTTLVAFPSSSVYPTKDEENNPLETEYGLSVYKDHQTITIQEMPEKAPAGQLPRSVDVILDDDLVDKAKPGDRVQVVGTYRCLPGKKGGYTSGTFRTVLIACNVKQMSKDAQPSFSAEDIAKIKKFSKTRSKDIFDQLAKSLAPSIHGHDYVKKAILCLLLGGVERDLENGSHIRGDINILLIGDPSVAKSQLLRYVLCTAPRAIPTTGRGSSGVGLTAAVTTDQETGERRLEAGAMVLADRGVVCIDEFDKMSDMDRTAIHEVMEQGRVTIAKAGIHARLNARCSVLAAANPVYGRYDQYKTPMENIGLQDSLLSRFDLLFIMLDQMDPEQDREISDHVLRMHRYRAPGEQDGDAMPLGSAVDILATDDPNFSQEDQQDTQIYEKHDNLLHGTKKKKEKMVSAAFMKKYIHVAKIIKPVLTQESATYIAEEYSRLRSQDSMSSDTARTSPVTARTLETLIRLATAHAKARMSKTVDLQDAEEAVELVQYAYFKKVLEKEKKRKKRSEDESETEDEEEKSQEDQEQKRKRRKTRQPDAKDGDSYDPYDFSDTEEEMPQVHTPKTADSQETKESQKVELSESRLKAFKVALLDVFREAHAQSIGMNRLTESINRDSEEPFSSVEIQAALSKMQDDNQVMVSEGIIFLI

SEQ ID NO: 30658 - protein, 853 aa, Homo sapiens
MLPRSPPLPRGNLWWREEFGSFRAGVESSWEPPRDFGGGSSLAAGMAGTVVLDDVELREAQRDYLDFLDDEEDQGIYQSKVRELISDNQYRLIVNVNDLRRKNEKRANRLLNNAFEELVAFQRALKDFVASIDATYAKQYEEFYVGLEGSFGSKHVSPRTLTSCFLSCVVCVEGIVTKCSLVRPKVVRSVHYCPATKKTIERRYSDLTTLVAFPSSSVYPTKDEENNPLETEYGLSVYKDHQTITIQEMPEKAPAGQLPRSVDVILDDDLVDKAKPGDRVQVVGTYRCLPGKKGGYTSGTFRTVLIACNVKQMSKDAQPSFSAEDIAKIKKFSKTRSKDIFDQLAKSLAPSIHGHDYVKKAILCLLLGGVERDLENGSHIRGDINILLIGDPSVAKSQLLRYVLCTAPRAIPTTGRGSSGVGLTAAVTTDQETGERRLEAGAMVLADRGVVCIDEFDKMSDMDRTAIHEVMEQGRVTIAKAGIHARLNARCSVLAAANPVYGRYDQYKTPMENIGLQDSLLSRFDLLFIMLDQMDPEQDREISDHVLRMHRYRAPGEQDGDAMPLGSAVDILATDDPNFSQEDQQDTQIYEKHDNLLHGTKKKKEKMVSAAFMKKYIHVAKIIKPVLTQESATYIAEEYSRLRSQDSMSSDTARTSPVTARTLETLIRLATAHAKARMSKTVDLQDAEEAVELVQYAYFKKVLEKEKKRKKRSEDESETEDEEEKSQEDQEQKRKRRKTRQPDAKDGDSYDPYDFSDTEEEMPQVHTPKTADSQETKESQKVELSESRLKAFKVALLDVFREAHAQSIGMNRLTESINRDSEEPFSSVEIQAALSKMQDDNQVMVSEGIIFLI

SEQ ID NO: 30659 - protein, 164 aa, Homo sapiens
MSVDPLSSKALKIKRELSENTPHLSDEALMGLSVRELNRHLRGLSAEEVTRLKQRRRTLKNRGYAASCRVKRVCQKEELQKQKSELEREVDKLARENAAMRLELDALRGKCEALQGFARSVAAARGPATLVAPASVITIVKSTPGSGSGPAHGPDPAHGPASCS

SEQ ID NO: 30660 - protein, 135 aa, Homo sapiens
MGLSVRELNRHLRGLSAEEVTRLKQRRRTLKNRGYAASCRVKRVCQKEELQKQKSELEREVDKLARENAAMRLELDALRGKCEALQGFARSVAAARGPATLVAPASVITIVKSTPGSGSGPAHGPDPAHGPASCS

SEQ ID NO: 30661 - protein, 1052 aa, Homo sapiens
MKLVNIWLLLLVVLLCGKKHLGDRLEKKSFEKAPCPGCSHLTLKVEFSSTVVEYEYIVAFNGYFTAKARNSFISSALKSSEVDNWRIIPRNNPSSDYPSDFEVIQIKEKQKAGLLTLEDHPNIKRVTPQRKVFRSLKYAESDPTVPCNETRWSQKWQSSRPLRRASLSLGSGFWHATGRHSSRRLLRAIPRQVAQTLQADVLWQMGYTGANVRVAVFDTGLSEKHPHFKNVKERTNWTNERTLDDGLGHGTFVAGVIASMRECQGFAPDAELHIFRVFTNNQVSYTSWFLDAFNYAILKKIDVLNLSIGGPDFMDHPFVDKVWELTANNVIMVSAIGNDGPLYGTLNNPADQMDVIGVGGIDFEDNIARFSSRGMTTWELPGGYGRMKPDIVTYGAGVRGSGVKGGCRALSGTSVASPVVAGAVTLLVSTVQKRELVNPASMKQALIASARRLPGVNMFEQGHGKLDLLRAYQILNSYKPQASLSPSYIDLTECPYMWPYCSQPIYYGGMPTVVNVTILNGMGVTGRIVDKPDWQPYLPQNGDNIEVAFSYSSVLWPWSGYLAISISVTKKAASWEGIAQGHVMITVASPAETESKNGAEQTSTVKLPIKVKIIPTPPRSKRVLWDQYHNLRYPPGYFPRDNLRMKNDPLDWNGDHIHTNFRDMYQHLRSMGYFVEVLGAPFTCFDASQYGTLLMVDSEEEYFPEEIAKLRRDVDNGLSLVIFSDWYNTSVMRKVKFYDENTRQWWMPDTGGANIPALNELLSVWNMGFSDGLYEGEFTLANHDMYYASGCSIAKFPEDGVVITQTFKDQGLEVLKQETAVVENVPILGLYQIPAEGGGRIVLYGDSNCLDDSHRQKDCFWLLDALLQYTSYGVTPPSLSHSGNRQRPPSGAGSVTPERMEGNHLHRYSKVLEAHLGDPKPRPLPACPRLSWAKPQPLNETAPSNLWKHQKLLSIDLDKVVLPNFRSNRPQVRPLSPGESGAWDIPGGIMPGRYNQEVGQTIPVFAFLGAMVVLAFFVVQINKAKSRPKRRKPRVKRPQLMQQVHPPKTPSV

SEQ ID NO: 30662 - protein, 162 aa, Homo sapiens
MTTPNKGNKALKVKREPGENGTSLTDEELVTMSVRELNQHLRGLSKEEIVQLKQRRRTLKNRGYAASCRVKRVTQKEELEKQKAELQQEVEKLASENASMKLELDALRSKYEALQTFARTVARSPVAPARGPLAAGLGPLVPGKVAATSVITIVKSKTDARS

SEQ ID NO: 30663 - protein, 160 aa, Homo sapiens
MSDNDDIEVESDEEQPRFQSAADKRAHHNALERKRRDHIKDSFHSLRDSVPSLQGEKASRAQILDKATEYIQYMRRKNHTHQQDIDDLKRQNALLEQQVRALEKARSSAQLQTNYPSSDNSLYTNAKGSTISAFDGGSDSSSESEPEEPQSRKKLRMEAS

SEQ ID NO: 30664 - protein, 151 aa, Homo sapiens
MSDNDDIEVESDADKRAHHNALERKRRDHIKDSFHSLRDSVPSLQGEKASRAQILDKATEYIQYMRRKNHTHQQDIDDLKRQNALLEQQVRALEKARSSAQLQTNYPSSDNSLYTNAKGSTISAFDGGSDSSSESEPEEPQSRKKLRMEAS

SEQ ID NO: 30665 - protein, 103 aa, Homo sapiens
MSDNDDIEVESDEEQPRFQSAADKRAHHNALERKRRDHIKDSFHSLRDSVPSLQGEKASRAQILDKATEYIQYMRRKNHTHQQDIDDLKRQNALLEQQGESES

SEQ ID NO: 30666 - protein, 134 aa, Homo sapiens
MSDNDDIEVESDEEQPRFQSAADKRAHHNALERKRRDHIKDSFHSLRDSVPSLQGEKASRAQILDKATEYIQYMRRKNHTHQQDIDDLKRQNALLEQQGEHPSSWGSWPCCAPARSGFGTWACRVRASHGVCAQ

SEQ ID NO: 30667 - protein, 96 aa, Homo sapiens
MSDNDDIEVESDEEQPRFQSAADKRAHHNALERKRRDHIKDSFHSLRDSVPSLQGEKLYFLFWKLCTPVLHRQSLMQKCHTFISSYQVHKKKECKI

SEQ ID NO: 30668 - protein, 83 aa, Homo sapiens
MSDNDDIEVESDEEQPRFQSAADKRAHHNALERKRRDHIKDSFHSLRDSVPSLQGEKGTKMKLTLPPVFPYEHLPFPTVFCHG

SEQ ID NO: 30669 - protein, 907 aa, Homo sapiens
MESAIAEGGASRFSASSGGGGSRGAPQHYPKTAGNSEFLGKTPGQNAQKWIPARSTRRDDNSAANNSANEKERHDAIFRKVRGILNKLTPEKFDKLCLELLNVGVESKLILKGVILLIVDKALEEPKYSSLYAQLCLRLAEDAPNFDGPAAEGQPGQKQSTTFRRLLISKLQDEFENRTRNVDVYDKRENPLLPEEEEQRAIAKIKMLGNIKFIGELGKLDLIHESILHKCIKTLLEKKKRVQLKDMGEDLECLCQIMRTVGPRLDHERAKSLMDQYFARMCSLMLSKELPARIRFLLQDTVELREHHWVPRKAFLDNGPKTINQIRQDAVKDLGVFIPAPMAQGMRSDFFLEGPFMPPRMKMDRDPLGGLADMFGQMPGSGIGTGPGVIQDRFSPTMGRHRSNQLFNGHGGHIMPPTQSQFGEMGGKFMKSQGLSQLYHNQSQGLLSQLQGQSKDMPPRFSKKGQLNADEISLRPAQSFLMNKNQVPKLQPQITMIPPSAQPPRTQTPPLGQTPQLGLKTNPPLIQEKPAKTSKKPPPSKEELLKLTETVVTEYLNSGNANEAVNGVREMRAPKHFLPEMLSKVIILSLDRSDEDKEKASSLISLLKQEGIATSDNFMQAFLNVLDQCPKLEVDIPLVKSYLAQFAARAIISELVSISELAQPLESGTHFPLFLLCLQQLAKLQDREWLTELFQQSKVNMQKMLPEIDQNKDRMLEILEGKGLSFLFPLLKLEKELLKQIKLDPSPQTIYKWIKDNISPKLHVDKGFVNILMTSFLQYISSEVNPPSDETDSSSAPSKEQLEQEKQLLLSFKPVMQKFLHDHVDLQVSALYALQVHCYNSNFPKGMLLRFFVHFYDMEIIEEEAFLAWKEDITQEFPGKGKALFQVNQWLTWLETAEEEESEEEAD

SEQ ID NO: 30670 - protein, 869 aa, Homo sapiens
MESAIAEGGASRFSASSGGGGSRGAPQHYPKTAGNSEFLGKTPGQNAQKWIPARSTRRDDNSAANNSANEKERHDAIFRKVRGILNKLTPEKFDKLCLELLNVGVESKLILKGVILLIVDKALEEPKYSSLYAQLCLRLAEDAPNFDGPAAEGQPGQKQSTTFRRLLISKLQDEFENRTRNVDVYDKRENPLLPEEEEQRAIAKIKMLGNIKFIGELGKLDLIHESILHKCIKTLLEKKKRVQLKDMGEDLECLCQIMRTVGPRLDHERAKSLMDQYFARMCSLMLSKELPARIRFLLQDTVELREHHWVPRKAFLDNGPKTINQIRQDAVKDLGVFIPAPMAQGMRSDFFLEGPFMPPRMKMDRDPLGGLADMFGQMPGSGIGTGPGVIQDRFSPTMGRHRSNQLFNGHGGHIMPPTQSQFGEMGGKFMKSQISLRPAQSFLMNKNQVPKLQPQITMIPPSAQPPRTQTPPLGQTPQLGLKTNPPLIQEKPAKTSKKPPPSKEELLKLTETVVTEYLNSGNANEAVNGVREMRAPKHFLPEMLSKVIILSLDRSDEDKEKASSLISLLKQEGIATSDNFMQAFLNVLDQCPKLEVDIPLVKSYLAQFAARAIISELVSISELAQPLESGTHFPLFLLCLQQLAKLQDREWLTELFQQSKVNMQKMLPEIDQNKDRMLEILEGKGLSFLFPLLKLEKELLKQIKLDPSPQTIYKWIKDNISPKLHVDKGFVNILMTSFLQYISSEVNPPSDETDSSSAPSKEQLEQEKQLLLSFKPVMQKFLHDHVDLQVSALYALQVHCYNSNFPKGMLLRFFVHFYDMEIIEEEAFLAWKEDITQEFPGKGKALFQVNQWLTWLETAEEEESEEEAD

SEQ ID NO: 30671 - protein, 1585 aa, Homo sapiens
MNSQPQTRSPFFQRPQIQPPRATIPNSSPSIRPGAQTPTAVYQANQHIMMVNHLPMPYPVPQGPQYCIPQYRHSGPPYVGPPQQYPVQPPGPGPFYPGPGPGDFPNAYGTPFYPSQPVYQSAPIIVPTQQQPPPAKREKKTIRIRDPNQGGKDITEEIMSGGGSRNPTPPIGRPTSTPTPPQQLPSQVPEHSPVVYGTVESAHLAASTPVTAASDQKQEEKPKPDPVLKSPSPVLRLVLSGEKKEQEGQTSETTAIVSIAELPLPPSPTTVSSVARSTIAAPTSSALSSQPIFTTAIDDRCELSSPREDTIPIPSLTSCTETSDPLPTNENDDDICKKPCSVAPNDIPLVSSTNLINEINGVSEKLSATESIVEIVKQEVLPLTLELEILENPPEEMKLECIPAPITPSTVPSFPPTPPTPPASPPHTPVIVPAAATTVSSPSAAITVQRVLEEDESIRTCLSEDAKEIQNKIEVEADGQTEEILDSQNLNSRRSPVPAQIAITVPKTWKKPKDRTRTTEEMLEAELELKAEEELSIDKVLESEQDKMSQGFHPERDPSDLKKVKAVEENGEEAEPVRNGAESVSEGEGIDANSGSTDSSGDGVTFPFKPESWKPTDTEGKKQYDREFLLDFQFMPACIQKPEGLPPISDVVLDKINQPKLPMRTLDPRILPRGPDFTPAFADFGRQTPGGRGVPLLNVGSRRSQPGQRREPRKIITVSVKEDVHLKKAENAWKPSQKRDSQADDPENIKTQELFRKVRSILNKLTPQMFNQLMKQVSGLTVDTEERLKGVIDLVFEKAIDEPSFSVAYANMCRCLVTLKVPMADKPGNTVNFRKLLLNRCQKEFEKDKADDDVFEKKQKELEAASAPEERTRLHDELEEAKDKARRRSIGNIKFIGELFKLKMLTEAIMHDCVVKLLKNHDEESLECLCRLLTTIGKDLDFEKAKPRMDQYFNQMEKIVKERKTSSRIRFMLQDVIDLRLCNWVSRRADQGPKTIEQIHKEAKIEEQEEQRKVQQLMTKEKRRPGVQRVDEGGWNTVQGAKNSRVLDPSKFLKITKPTIDEKIQLVPKAQLGSWGKGSSGGAKASETDALRSSASSLNRFSALQPPAPSGSTPSTPVEFDSRRTLTSRGSMGREKNDKPLPSATARPNTFMRGGSSKDLLDNQSQEEQRREMLETVKQLTGGVDVERNSTEAERNKTRESAKPEISAMSAHDKAALSEEELERKSKSIIDEFLHINDFKEAMQCVEELNAQGLLHVFVRVGVESTLERSQITRDHMGQLLYQLVQSEKLSKQDFFKGFSETLELADDMAIDIPHIWLYLAELVTPMLKEGGISMRELTIEFSKPLLPVGRAGVLLSEILHLLCKQMSHKKVGALWREADLSWKDFLPEGEDVHNFLLEQKLDFIESDSPCSSEALSKKELSAEELYKRLEKLIIEDKANDEQIFDWVEANLDEIQMSSPTFLRALMTAVCKAAIIADSSTFRVDTAVIKQRVPILLKYLDSDTEKELQALYALQASIVKLDQPANLLRMFFDCLYDEEVISEDAFYKWESSKDPAEQNGKGVALKSVTAFFTWLREAEEESEDN

SEQ ID NO: 30672 - protein, 515 aa, Homo sapiens
MNSQPQTRSPFAAGPRPPHHQFFQRPQIQPPRATIPNSSPSIRPGAQTPTAVYQANQHIMMVNHLPMPYPVPQGPQYCIPQYRHSGPPYVGPPQQYPVQPPGPGPFYPGPGPGDFPNAYGTPFYPSQPVYQSAPIIVPTQQQPPPAKREKKTIRIRDPNQGGKDITEEIMSGGGSRNPTPPIGRPTSTPTPPQQLPSQVPEHSPVVYGTVESAHLAASTPVTAASDQKQEEKPKPDPVLKSPSPVLRLVLSGEKKEQEGQTSETTAIVSIAELPLPPSPTTVSSVARSTIAAPTSSALSSQPIFTTAIDDRCELSSPREDTIPIPSLTSCTETSDPLPTNENDDDICKKPCSVAPNDIPLVSSTNLINEINGVSEKLSATESIVEIVKQEVLPLTLELEILENPPEEMKLECIPAPITPSTVPSFPPTPPTPPASPPHTPVIVPAAATTVSSPSAAITVQRVLEEDESIRTCLSEDAKEIQNKIEVEADGQTEEILDSQNLNSRRSPVPETSNEC

SEQ ID NO: 30673 - protein, 1591 aa, Homo sapiens
MNSQPQTRSPGGFRPIQFFQRPQIQPPRATIPNSSPSIRPGAQTPTAVYQANQHIMMVNHLPMPYPVPQGPQYCIPQYRHSGPPYVGPPQQYPVQPPGPGPFYPGPGPGDFPNAYGTPFYPSQPVYQSAPIIVPTQQQPPPAKREKKTIRIRDPNQGGKDITEEIMSGGGSRNPTPPIGRPTSTPTPPQLPSQVPEHSPVVYGTVESAHLAASTPVTAASDQKQEEKPKPDPVLKSPSPVLRLVLSGEKKEQEGQTSETTAIVSIAELPLPPSPTTVSSVARSTIAAPTSSALSSQPIFTTAIDDRCELSSPREDTIPIPSLTSCTETSDPLPTNENDDDICKKPCSVAPNDIPLVSSTNLINEINGVSEKLSATESIVEIVKQEVLPLTLELEILENPPEEMKLECIPAPITPSTVPSFPPTPPTPPASPPHTPVIVPAAATTVSSPSAAITVQRVLEEDESIRTCLSEDAKEIQNKIEVEADGQTEEILDSQNLNSRRSPVPAQIAITVPKTWKKPKDRTRTTEEMLEAELELKAEEELSIDKVLESEQDKMSQGFHPERDPSDLKKVKAVEENGEEAEPVRNGAESVSEGEGIDANSGSTDSSGDGVTFPFKPESWKPTDTEGKKQYDREFLLDFQFMPACIQKPEGLPPISDVVLDKINQPKLPMRTLDPRILPRGPDFTPAFADFGRQTPGGRGVPLLNVGSRRSQPGQRREPRKIITVSVKEDVHLKKAENAWKPSQKRDSQADDPENIKTQELFRKVRSILNKLTPQMFNQLMKQVSGLTVDTEERLKGVIDLVFEKAIDEPSFSVAYANMCRCLVTLKVPMADKPGNTVNFRKLLLNRCQKEFEKDKADDDVFEKKQKELEAASAPEERTRLHDELEEAKDKARRRSIGNIKFIGELFKLKMLTEAIMHDCVVKLLKNHDEESLECLCRLLTTIGKDLDFEKAKPRMDQYFNQMEKIVKERKTSSRIRFMLQDVIDLRLCNWVSRRADQGPKTIEQIHKEAKIEEQEEQRKVQQLMTKEKRRPGVQRVDEGGWNTVQGAKNSRVLDPSKFLKITKPTIDEKIQLVPKAQLGSWGKGSSGGAKASETDALRSSASSLNRFSALQPPAPSGSTPSTPVEFDSRRTLTSRGSMGREKNDKPLPSATARPNTFMRGGSSKDLLDNQSQEEQRREMLETVKQLTGGVDVERNSTEAERNKTRESAKPEISAMSAHDKAALSEEELERKSKSIIDEFLHINDFKEAMQCVEELNAQGLLHVFVRVGVESTLERSQITRDHMGQLLYQLVQSEKLSKQDFFKGFSETLELADDMAIDIPHIWLYLAELVTPMLKEGGISMRELTIEFSKPLLPVGRAGVLLSEILHLLCKQMSHKKVGALWREADLSWKDFLPEGEDVHNFLLEQKLDFIESDSPCSSEALSKKELSAEELYKRLEKLIIEDKANDEQIFDWVEANLDEIQMSSPTFLRALMTAVCKAAIIADSSTFRVDTAVIKQRVPILLKYLDSDTEKELQALYALQASIVKLDQPANLLRMFFDCLYDEEVISEDAFYKWESSKDPAEQNGKGVALKSVTAFFTWLREAEEESEDN

SEQ ID NO: 30674 - protein, 1305 aa, Homo sapiens
MNSQPQTRSPFFQRPQIQPPRATIPNSSPSIRPGAQTPTAVYQANQHIMMVNHLPMPYPVPQGPQYCIPQYRHSGPPYVGPPQQYPVQPPGPGPFYPGPGPGDFPNAYGTPFYPSQPVYQSAPIIVPTQQQPPPAKREKKTIRIRDPNQGGKDITEEIMSGGGSRNPTPPIGRPTSTPTPPQQLPSQVPEHSPVVYGTVESAHLAASTPVTAASDQKQAQIAITVPKTWKKPKDRTRTTEEMLEAELELKAEEELSIDKVLESEQDKMSQGFHPERDPSDLKKVKAVEENGEEAEPVRNGAESVSEGEGIDANSGSTDSSGDGVTFPFKPESWKPTDTEGKKQYDREFLLDFQFMPACIQKPEGLPPISDVVLDKINQPKLPMRTLDPRILPRGPDFTPAFADFGRQTPGGRGVPLLNVGSRRSQPGQRREPRKIITVSVKEDVHLKKAENAWKPSQKRDSQADDPENIKTQELFRKVRSILNKLTPQMFNQLMKQVSGLTVDTEERLKGVIDLVFEKAIDEPSFSVAYANMCRCLVTLKVPMADKPGNTVNFRKLLLNRCQKEFEKDKADDDVFEKKQKELEAASAPEERTRLHDELEEAKDKARRRSIGNIKFIGELFKLKMLTEAIMHDCVVKLLKNHDEESLECLCRLLTTIGKDLDFEKAKPRMDQYFNQMEKIVKERKTSSRIRFMLQDVIDLRLCNWVSRRADQGPKTIEQIHKEAKIEEQEEQRKVQQLMTKEKRRPGVQRVDEGGWNTVQGAKNSRVLDPSKFLKITKPTIDEKIQLVPKAQLGSWGKGSSGGAKASETDALRSSASSLNRFSALQPPAPSGSTPSTPVEFDSRRTLTSRGSMGREKNDKPLPSATARPNTFMRGGSSKDLLDNQSQEEQRREMLETVKQLTGGVDVERNSTEAERNKTRESAKPEISAMSAHDKAALSEEELERKSKSIIDEFLHINDFKEAMQCVEELNAQGLLHVFVRVGVESTLERSQITRDHMGQLLYQLVQSEKLSKQDFFKGFSETLELADDMAIDIPHIWLYLAELVTPMLKEGGISMRELTIEFSKPLLPVGRAGVLLSEILHLLCKQMSHKKVGALWREADLSWKDFLPEGEDVHNFLLEQKLDFIESDSPCSSEALSKKELSAEELYKRLEKLIIEDKANDEQIFDWVEANLDEIQMSSPTFLRALMTAVCKAAIIADSSTFRVDTAVIKQRVPILLKYLDSDTEKELQALYALQASIVKLDQPANLLRMFFDCLYDEEVISEDAFYKWESSKDPAEQNGKGVALKSVTAFFTWLREAEEESEDN

SEQ ID NO: 30675 - protein, 373 aa, Homo sapiens
MPPVPGVPFRNVDNDSPTSVELEDWVDAQHPTDEEEEEASSASSTLYLVFSPSSFSTSSSLILGGPEEEEVPSGVIPNLTESIPSSPPQGPPQGPSQSPLSSCCSSFSWSSFSEESSSQKGEDTGTCQGLPDSESSFTYTLDEKVAELVEFLLLKYEAEEPVTEAEMLMIVIKYKDYFPVILKRAREFMELLFGLALIEVGPDHFCVFANTVGLTDEGSDDEGMPENSLLIIILSVIFIKGNCASEEVIWEVLNAVGVYAGREHFVYGEPRELLTKVWVQGHYLEYREVPHSSPPYYEFLWGPRAHSESIKKKVLEFLAKLNNTVPSSFPSWYKDALKDVEERVQATIDTADDATVMASESLSVMSSNVSFSE

SEQ ID NO: 30676 - protein, 550 aa, Homo sapiens
MPPPRTGRGLLWLGLVLSSVCVALGSETQANSTTDALNVLLIIVDDLRPSLGCYGDKLVRSPNIDQLASHSLLFQNAFAQQAVCAPSRVSFLTGRRPDTTRLYDFNSYWRVHAGNFSTIPQYFKENGYVTMSVGKVFHPGISSNHTDDSPYSWSFPPYHPSSEKYENTKTCRGPDGELHANLLCPVDVLDVPEGTLPDKQSTEQAIQLLEKMKTSASPFFLAVGYHKPHIPFRYPKEFQKLYPLENITLAPDPEVPDGLPPVAYNPWMDIRQREDVQALNISVPYGPIPVDFQRKIRQSYFASVSYLDTQVGRLLSALDDLQLANSTIIAFTSDHGWALGEHGEWAKYSNFDVATHVPLIFYVPGRTASLPEAGEKLFPYLDPFDSASQLMEPGRQSMDLVELVSLFPTLAGLAGLQVPPRCPVPSFHVELCREGKNLLKHFRFRDLEEDPYLPGNPRELIAYSQYPRPSDIPQWNSDKPSLKDIKIMGYSIRTIDYRYTVWVGFNPDEFLANFSDIHAGELYFVDSDPLQDHNMYNDSQGGDLFQLLMP

SEQ ID NO: 30677 - protein, 343 aa, Homo sapiens
MPPPRTGRGLLWLGLVLSSVCVALGSETQANSTTDALNVLLIIVDDLRPSLGCYGDKLVRSPNIDQLASHSLLFQNAFAQQAVCAPSRVSFLTGRRPDTTRLYDFNSYWRVHAGNFSTIPQYFKENGYVTMSVGKVFHPGISSNHTDDSPYSWSFPPYHPSSEKYENTKTCRGPDGELHANLLCPVDVLDVPEGTLPDKQSTEQAIQLLEKMKTSASPFFLAVGYHKPHIPFRYPKEFQKLYPLENITLAPDPEVPDGLPPVAYNPWMDIRQREDVQALNISVPYGPIPVDFQRKIRQSYFASVSYLDTQVGRLLSALDDLQLANSTIIAFTSDHGFLMRTNT

SEQ ID NO: 30678 - protein, 312 aa, Homo sapiens
MPPPRTGRGLLWLGLVLSSVCVALGSETQANSTTDALNVLLIIVDDLRPSLGCYGDKLVRSPNIDQLASHSLLFQNAFAQQAVCAPSRVSFLTGRRPDTTRLYDFNSYWRVHAGNFSTIPQYFKENGYVTMSVGKVFHPGISSNHTDDSPYSWSFPPYHPSSEKYENTKTCRGPDGELHANLLCPVDVLDVPEGTLPDKQSTEQAIQLLEKMKTSASPFFLAVGYHKPHIPFRYPKEFQKLYPLENITLAPDPEVPDGLPPVAYNPWMDIRQREDVQALNISVPYGPIPVDFQEDQSSTGFRLKTSSTRKYK

SEQ ID NO: 30679 - protein, 117 aa, Homo sapiens
MDCTWRILFLVAAATGTHAQVQLVQSGAEVKKPGASVKVSCKVSGYTLTELSMHWVRQAPGKGLEWMGGFDPEDGETIYAQKFQGRVTMTEDTSTDTAYMELSSLRSEDTAVYYCAT

SEQ ID NO: 30680 - protein, 117 aa, Homo sapiens
MDWTWRVFCLLAVAPGAHSQVQLVQSGAEVKKPGASVKVSCKASGYTFTSYYMHWVRQAPGQGLEWMGIINPSGGSTSYAQKFQGRVTMTRDTSTSTVYMELSSLRSEDTAVYYCAR

SEQ ID NO: 30681 - protein, 117 aa, Homo sapiens
MDWTWRILFLVAAATSAHSQVQLVQSGAEVKKPGASVKVSCKASGYTFTSYDINWVRQATGQGLEWMGWMNPNSGNTGYAQKFQGRVTMTRNTSISTAYMELSSLRSEDTAVYYCAR

SEQ ID NO: 30682 - protein, 195 aa, Homo sapiens
MGKISSLPTQLFKCCFCDFLKVKMHTMSSSHLFYLALCLLTFTSSATAGPETLCGAELVDALQFVCGDRGFYFNKPTGYGSSSRRAPQTGIVDECCFRSCDLRRLEMYCAPLKPAKSARSVRAQRHTDMPKTQKYQPPSTNKNTKSQRRKGWPKTHPGGEQKEGTEASLQIRGKKKEQRREIGSRNAECRGKKGK

SEQ ID NO: 30683 - protein, 153 aa, Homo sapiens
MGKISSLPTQLFKCCFCDFLKVKMHTMSSSHLFYLALCLLTFTSSATAGPETLCGAELVDALQFVCGDRGFYFNKPTGYGSSSRRAPQTGIVDECCFRSCDLRRLEMYCAPLKPAKSARSVRAQRHTDMPKTQKEVHLKNASRGSAGNKNYRM

SEQ ID NO: 30684 - protein, 137 aa, Homo sapiens
MITPTVKMHTMSSSHLFYLALCLLTFTSSATAGPETLCGAELVDALQFVCGDRGFYFNKPTGYGSSSRRAPQTGIVDECCFRSCDLRRLEMYCAPLKPAKSARSVRAQRHTDMPKTQKEVHLKNASRGSAGNKNYRM

SEQ ID NO: 30685 - protein, 158 aa, Homo sapiens
MGKISSLPTQLFKCCFCDFLKVKMHTMSSSHLFYLALCLLTFTSSATAGPETLCGAELVDALQFVCGDRGFYFNKPTGYGSSSRRAPQTGIVDECCFRSCDLRRLEMYCAPLKPAKSARSVRAQRHTDMPKTQKYQPPSTNKNTKSQRRKGSTFEERK

SEQ ID NO: 30686 - protein, 117 aa, Homo sapiens
MDWIWRILFLVGAATGAHSQMQLVQSGPEVKKPGTSVKVSCKASGFTFTSSAVQWVRQARGQRLEWIGWIVVGSGNTNYAQKFQERVTITRDMSTSTAYMELSSLRSEDTAVYYCAA

SEQ ID NO: 30687 - protein, 117 aa, Homo sapiens
MDWTWSILFLVAAATGAHSQVQLVQSGAEVKKPGASVKVSCKASGYTFTSYGISWVRQAPGQGLEWMGWISAYNGNTNYAQKLQGRVTMTTDTSTSTAYMELRSLRSDDTAVYYCAR

SEQ ID NO: 30688 - protein, 144 aa, Homo sapiens
MPKNKGKGGKNRRRGKNENESEKRELVFKEDGQEYAQVIKMLGNGRLEAMCFDGVKRLCHIRGKLRKKVWINTSDIILVGLRDYQDNKADVILKYNADEARSLKAYGELPEHAKINETDTFGPGDDDEIQFDDIGDDDEDIDDI

SEQ ID NO: 30689 - protein, 716 aa, Homo sapiens
MQSTANYLWHTDDLLGQGATASVYKARNKKSGELVAVKVFNTTSYLRPREVQVREFEVLRKLNHQNIVKLFAVEETGGSRQKVLVMEYCSSGSLLSVLESPENAFGLPEDEFLVVLRCVVAGMNHLRENGIVHRDIKPGNIMRLVGEEGQSIYKLTDFGAARELDDDEKFVSVYGTEEYLHPDMYERAVLRKPQQKAFGVTVDLWSIGVTLYHAATGSLPFIPFGGPRRNKEIMYRITTEKPAGAIAGAQRRENGPLEWSYTLPITCQLSLGLQSQLVPILANILEVEQAKCWGFDQFFAETSDILQRVVVHVFSLSQAVLHHIYIHAHNTIAIFQEAVHKQTSVAPRHQEYLFEGHLCVLEPSVSAQHIAHTTASSPLTLFSTAIPKGLAFRDPALDVPKFVPKVDLQADYNTAKGVLGAGYQALRLARALLDGQELMFRGLHWVMEVLQATCRRTLEVARTSLLYLSSSLGTERFSSVAGTPEIQELKAAAELRSRLRTLAEVLSRCSQNITETQESLSSLNRELVKSRDQVHEDRSIQQIQCCLDKMNFIYKQFKKSRMRPGLGYNEEQIHKLDKVNFSHLAKRLLQVFQEECVQKYQASLVTHGKRMRVVHETRNHLRLVGCSVAACNTEAQGVQESLSKLLEELSHQLLQDRAKGAQASPPPIAPYPSPTRKDLLLHMQELCEGMKLLASDLLDNNRIIERLNRVPAPPDV

SEQ ID NO: 30690 - protein, 631 aa, Homo sapiens
MEYCSSGSLLSVLESPENAFGLPEDEFLVVLRCVVAGMNHLRENGIVHRDIKPGNIMRLVGEEGQSIYKLTDFGAARELDDDEKFVSVYGTEEYLHPDMYERAVLRKPQQKAFGVTVDLWSIGVTLYHAATGSLPFIPFGGPRRNKEIMYRITTEKPAGAIAGAQRRENGPLEWSYTLPITCQLSLGLQSQLVPILANILEVEQAKCWGFDQFFAETSDILQRVVVHVFSLSQAVLHHIYIHAHNTIAIFQEAVHKQTSVAPRHQEYLFEGHLCVLEPSVSAQHIAHTTASSPLTLFSTAIPKGLAFRDPALDVPKFVPKVDLQADYNTAKGVLGAGYQALRLARALLDGQELMFRGLHWVMEVLQATCRRTLEVARTSLLYLSSSLGTERFSSVAGTPEIQELKAAAELRSRLRTLAEVLSRCSQNITETQESLSSLNRELVKSRDQVHEDRSIQQIQCCLDKMNFIYKQFKKSRMRPGLGYNEEQIHKLDKVNFSHLAKRLLQVFQEECVQKYQASLVTHGKRMRVVHETRNHLRLVGCSVAACNTEAQGVQESLSKLLEELSHQLLQDRAKGAQASPPPIAPYPSPTRKDLLLHMQELCEGMKLLASDLLDNNRIIERLNRVPAPPDV

SEQ ID NO: 30691 - protein, 119 aa, Homo sapiens
MDILCSTLLLLTVPSWVLSQVTLKESGPALVKPTQTLTLTCTFSGFSLSTSGMRVSWIRQPPGKALEWLARIDWDDDKFYSTSLKTRLTISKDTSKNQVVLTMTNMDPVDTATYYCARI

SEQ ID NO: 30692 - protein, 117 aa, Homo sapiens
MKHLWFFLLLVAAPRWVLSQVQLQESGPGLVKPSETLSLTCTVSGYSISSGYYWGWIRQPPGKGLEWIGSIYHSGSTYYNPSLKSRVTISVDTSKNQFSLKLSSVTAADTAVYYCAR

SEQ ID NO: 30693 - protein, 427 aa, Homo sapiens
MEWPARLCGLWALLLCAGGGGGGGGAAPTETQPPVTNLSVSVENLCTVIWTWNPPEGASSNCSLWYFSHFGDKQDKKIAPETRRSIEVPLNERICLQVGSQCSTNESEKPSILVEKCISPPEGDPESAVTELQCIWHNLSYMKCSWLPGRNTSPDTNYTLYYWHRSLEKIHQCENIFREGQYFGCSFDLTKVKDSSFEQHSVQIMVKDNAGKIKPSFNIVPLTSRVKPDPPHIKNLSFHNDDLYVQWENPQNFISRCLFYEVEVNNSQTETHNVFYVQEAKCENPEFERNVENTSCFMVPGVLPDTLNTVRIRVKTNKLCYEDDKLWSNWSQEMSIGKKRNSTLYITMLLIVPVIVAGAIIVLLLYLKRLKIIIFPPIPDPGKIFKEMFGDQNDDTLHWKKYDIYEKQTKEETDSVVLIENLKKASQ

SEQ ID NO: 30694 - protein, 279 aa, Homo sapiens
MEWPARLCGLWALLLCAGGGGGGGGAAPTETQPPVTNLSVSVENLCTVIWTWNPPEGASSNCSLWYFSHFGDKQDKKIAPETRRSIEVPLNERICLQVGSQCSTNESEKPSILVEKCISPPEGDPESAVTELQCIWHNLSYMKCSWLPGRNTSPDTNYTLYYWHRSLEKIHQCENIFREGQYFGCSFDLTKVKDSSFEQHSVQIMVKDNAGKIKPSFNIVPLTSRVKPDPPHIKNLSFHNDDLYVQWENPQNFISRCLFYEVEVNNSQTETHNVFYVRF

SEQ ID NO: 30695 - protein, 251 aa, Homo sapiens
MAMSSFLINSNYVDPKFPPCEEYSQSDYLPSDHSPGYYAGGQRRESSFQPEAGFGRRAACTVQRYAACRDPGPPPPPPPPPPPPPPPGLSPRAPAPPPAGALLPEPGQRCEAVSSSPPPPPCAQNPLHPSPSHSACKEPVVYPWMRKVHVSTVNPNYAGGEPKRSRTAYTRQQVLELEKEFHYNRYLTRRRRVEIAHALCLSERQIKIWFQNRRMKWKKDHKLPNTKIRSGGAAGSAGGPPGRPNGGPRAL

SEQ ID NO: 30696 - protein, 272 aa, Homo sapiens
MATTGALGNYYVDSFLLGADAADELSVGRYAPGTLGQPPRQAATLAEHPDFSPCSFQSKATVFGASWNPVHAAGANAVPAAVYHHHHHHPYVHPQAPVAAAAPDGRYMRSWLEPTPGALSFAGLPSSRPYGIKPEPLSARRGDCPTLDTHTLSLTDYACGSPPVDREKQPSEGAFSENNAENESGGDKPPIDPNNPAANWLHARSTRKKRCPYTKHQTLELEKEFLFNMYLTRDRRYEVARLLNLTERQVKIWFQNRRMKMKKINKDRAKDE

SEQ ID NO: 30697 - protein, 320 aa, Homo sapiens
MTMSSFLINSNYIEPKFPPFEEYAQHSGSGGADGGPGGGPGYQQPPAPPTQHLPLQQPQLPHAGGGREPTASYYAPRTAREPAYPAAALYPAHGAADTAYPYGYRGGASPGRPPQPEQPPAQAKGPAHGLHASHVLQPQLPPPLQPRAVPPAAPRRCEAAPATPGVPAGGSAPACPLLLADKSPLGLKGKEPVVYPWMKKIHVSAVNPSYNGGEPKRSRTAYTRQQVLELEKEFHFNRYLTRRRRIEIAHTLCLSERQVKIWFQNRRMKWKKDHKLPNTKMRSSNSASASAGPPGKAQTQSPHLHPHPHPSTSTPVPSSI

SEQ ID NO: 30698 - protein, 217 aa, Homo sapiens
MSSLYYANTLFSKYPASSSVFATGAFPEQTSCAFASNPQRPGYGAGSGASFAASMQGLYPGGGGMAGQSAAGVYAAGYGLEPSSFNMHCAPFEQNLSGVCPGDSAKAAGAKEQRDSDLAAESNFRIYPWMRSSGTDRKRGRQTYTRYQTLELEKEFHYNRYLTRRRRIEIAHTLCLTERQIKIWFQNRRMKWKKENKTAGPGTTGQDRAEAEEEEEE

SEQ ID NO: 30699 - protein, 356 aa, Homo sapiens
MAGVACLGKAADADEWCDSGLGSLGPDAAAPGGPGLGAELGPGLSWAPLVFGYVTEDGDTALHLAVIHQHEPFLDFLLGFSAGTEYMDLQNDLGQTALHLAAILGETSTVEKLYAAGAGLCVAERRGHTALHLACRVGAHACARALLQPRPRRPREAPDTYLAQGPDRTPDTNHTPVALYPDSDLEKEEEESEEDWKLQLEAENYEGHTPLHVAVIHKDVEMVRLLRDAGADLDKPEPTCGRSPLHLAVEAQAADVLELLLRAGANPAARMYGGRTPLGSAMLRPNPILARLLRAHGAPEPEGEDEKSGPCSSSSDSDSGDEGDEYDDIVVHSSRSQTRLPPTPASKPLPDDPRPV

SEQ ID NO: 30700 - protein, 338 aa, Homo sapiens
MAGVACLGKAADADEWCDSGLGSLGPDAAAPGGPGLGAELGPGLSWAPLVFGYVTEDGDTALHLAVIHQHEPFLDFLLGFSAGTEYMDLQNDLGQTALHLAAILGETSTVEKLYAAGAGLCVAERRGHTALHLACRVGAHACARALLQPRPRRPREAPDTYLAQGPDRTPDTNHTPVALYPDSDLEKEEEESEEDWKLQLEAENYEGHTPLHVAVIHKDVEMVRLLRDAGADLDKPEPTCGRSPLHLAVEAQAADVLELLLRAGANPAARMYGGRTPLGSAMLRPNPILARLLRAHGAPEPEGEDEKSGPCSSSSDSDSGDEGVSQEERQGSPAGGSG

SEQ ID NO: 30701 - protein, 2540 aa, Homo sapiens
MAVETRAELVGKRFLCVAVGDEARSERWESGRGWRSWRAGVIRAVSHRDSRNPDLAVYVEFDDLEWDKREWVKVYEDFSTFLVEYHLIWAKRNDPSQTQGSKSKQIQWPALTFKPLVERNIPSSVTAVEFLVDKQLDFLTEDSAFQPYQDDIDSLNPVLRDNPQLHEEVKVWVKEQKVQEIFMQGPYSLNGYRVRVYRQDSATQWFTGIITHHDLFTRTMIVMNDQVLEPQNVDPSMVQMTFLDDVVHSLLKGENIGITSRRRSRANQNVNAVHSHYTRAQANSPRPAMNSQAAVPKQNTHQQQQQRSIRPNKRKGSDSSIPDEEKMKEEKYDYISRGENPKGKNKHLMNKRRKPEEDEKKLNMKRLRTDNVSDFSESSDSENSNKRIIDNSSEQKPENELKNKNTSKINGEEGKPHNNEKAGEETLKNSQPPWDQIQEDKKHEEAEKRKSVDTQLQEDMIIHSSEQSTVSDHNSNDLLPQECNMDKTHTMELLPKEKFVSRPPTPKCVIDITNDTNLEKVAQENSSTFGLQTLQKMDPNVSDSKHSIANAKFLETAKKDSDQSWVSDVVKVDLTQSSVTNASSGNDHLNMEKEKYVSYISPLSAVSVMEDKLHKRSPPPETIKSKLNTSVDTHKIKSSPSPEVVKPKITHSPDSVKSKATYVNSQATGERRLANKIEHELSRCSFHPIPTRSSTLETTKSPLIIDKNEHFTVYRDPALIGSETGANHISPFLSQHPFPLHSSSHRTCLNPGTHHPALTPAPHLLAGSSSQTPLPTINTHPLTSGPHHAVHHPHLLPTVLPGVPTASLLGGHPRLESAHASSLSHLALAHQQQQQLLQHQSPHLLGQAHPSASYNQLGLYPIIWQYPNGTHAYSGLGLPSSKWVHPENAVNAEASLRRNSPSPWLHQPTPVTSADGIGLLSHIPVRPSSAEPHRPLKITAHSSPPLTKTLVDHHKEELERKAFMEPLRSVASTSAKNDLDLNRSQTGKDCHLHRHFVDPVLNQLQRPPQETGERLNKYKEEHRRILQESIDVAPFTTKIKGLEGERENYSRVASSSSSPKSHIIKQDMDVERSVSDLYKMKHSVPQSLPQSNYFTTLSNSVVNEPPRSYPSKEVSNIYGDKQSNALAAAAANPQTLTSFITSLSKPPPLIKHQPESEGLVGKIPEHLPHQIASHSVTTFRNDCRSPTHLTVSSTNTLRSMPALHRAPVFHPPIHHSLERKEGSYSSLSPPTLTPVMPVNAGGKVQESQKPPTLIPEPKDSQANFKSSSEQSLTEMWRPNNNLSKEKTEWHVEKSSGKLQAAMASVIVRPSSSTKTDSMPAMQLASKDRVSERSSAGAHKTDCLKLAEAGETGRIILPNVNSDSVHTKSEKNFQAVSQGSVPSSVMSAVNTMCNTKTDVITSAADTTSVSSWGGSEVISSLSNTILASTSSECVSSKSVSQPVAQKQECKVSTTAPVTLASSKTGSVVQPSSGFSGTTDFIHLKKHKAALAAAQYKSSNASETEPNAIKNQTLSASLPLDSTVICSTINKANSVGNGQASQTSQPNYHTKLKKAWLTRHSEEDKNTNKMENSGNSVSEIIKPCSVNLIASTSSDIQNSVDSKIIVDKYVKDDKVNRRKAKRTYESGSESGDSDESESKSEQRTKRQPKPTYKKKQNDLQKRKGEIEEDLKPNGVLSRSAKERSKLKLQSNSNTGIPRSVLKDWRKVKKLKQTGESFLQDDSCCEIGPNLQKCRECRLIRSKKGEEPAHSPVFCRFYYFRRLSFSKNGVVRIDGFSSPDQYDDEAMSLWTHENFEDDELDIETSKYILDIIGDKFCQLVTSEKTALSWVKKDAKIAWKRAVRGVREMCDACEATLFNIHWVCQKCGFVVCLDCYKAKERKSSRDKELYAWMKCVKGQPHDHKHLMPTQIIPGSVLTDLLDAMHTLREKYGIKSHCHCTNKQNLQVGNFPTMNGVSQVLQNVLNHSNKISLCMPESQQQNTPPKSEKNGGSSPESDVGTDNKLTPPESQSPLHWLADLAEQKAREEKKENKELTLENQIKEEREQDNSESPNGRTSPLVSQNNEQGSTLRDLLTTTAGKLRVGSTDAGIAFAPVYSMGAPSSKSGRTMPNILDDIIASVVENKIPPSKTSKINVKPELKEEPEESIISAVDENNKLYSDIPHSWICEKHILWLKDYKNSSNWKLFKECWKQGQPAVVSGVHKKMNISLWKAESISLDFGDHQADLLNCKDSIISNANVKEFWDGFEEVSKRQKNKSGETVVLKLKDWPSGEDFKTMMPARYEDLLKSLPLPEYCNPEGKFNLASHLPGFFVRPDLGPRLCSAYGVVAAKDHDIGTTNLHIEVSDVVNILVYVGIAKGNGILSKAGILKKFEEEDLDDILRKRLKDSSEIPGALWHIYAGKDVDKIREFLQKISKEQGLEVLPEHDPIRDQSWYVNKKLRQRLLEEYGVRTCTLIQFLGDAIVLPAGALHQVQNFHSCIQVTEDFVSPEHLVESFHLTQELRLLKEEINYDDKLQVKNILYHAVKEMVRALKIHEDEVEDMEEN

SEQ ID NO: 30702 - protein, 1480 aa, Homo sapiens
MIVMNDQVLEPQNVDPSMVQMTFLDDVVHSLLKGENIGITSRRRSRANQNVNAVHSHYTRAQANSPRPAMNSQAAVPKQNTHQQQQQRSIRPNKRKGSDSSIPDEEKMKEEKYDYISRGENPKGKNKHLMNKRRKPEEDEKKLNMKRLRTDNVSDFSESSDSENSNKRIIDNSSEQKPENELKNKNTSKINGEEGKPHNNEKAGEETLKNSQPPWDQIQEDKKHEEAEKRKSVDTQLQEDMIIHSSEQSTVSDHNSNDLLPQECNMDKTHTMELLPKEKFVSRPPTPKCVIDITNDTNLEKVAQENSSTFGLQTLQKMDPNVSDSKHSIANAKFLETAKKDSDQSWVSDVVKVDLTQSSVTNASSGNDHLNMEKEKYVSYISPLSAVSVMEDKLHKRSPPPETIKSKLNTSVDTHKIKSSPSPEVVKPKITHSPDSVKSKATYVNSQATGERRLANKIEHELSRCSFHPIPTRSSTLETTKSPLIIDKNEHFTVYRDPALIGSETGANHISPFLSQHPFPLHSSSHRTCLNPGTHHPALTPAPHLLAGSSSQTPLPTINTHPLTSGPHHAVHHPHLLPTVLPGVPTASLLGGHPRLESAHASSLSHLALAHQQQQQLLQHQSPHLLGQAHPSASYNQLGLYPIIWQYPNGTHAYSGLGLPSSKWVHPENAVNAEASLRRNSPSPWLHQPTPVTSADGIGLLSHIPVRPSSAEPHRPLKITAHSSPPLTKTLVDHHKEELERKAFMEPLRSVASTSAKNDLDLNRSQTGKDCHLHRHFVDPVLNQLQRPPQETGERLNKYKEEHRRILQESIDVAPFTTKIKGLEGERENYSRVASSSSSPKSHIIKQDMDVERSVSDLYKMKHSVPQSLPQSNYFTTLSNSVVNEPPRSYPSKEVSNIYGDKQSNALAAAAANPQTLTSFITSLSKPPPLIKHQPESEGLVGKIPEHLPHQIASHSVTTFRNDCRSPTHLTVSSTNTLRSMPALHRAPVFHPPIHHSLERKEGSYSSLSPPTLTPVMPVNAGGKVQESQKPPTLIPEPKDSQANFKSSSEQSLTEMWRPNNNLSKEKTEWHVEKSSGKLQAAMASVIVRPSSSTKTDSMPAMQLASKDRVSERSSAGAHKTDCLKLAEAGETGRIILPNVNSDSVHTKSEKNFQAVSQGSVPSSVMSAVNTMCNTKTDVITSAADTTSVSSWGGSEVISSLSNTILASTSSECVSSKSVSQPVAQKQECKVSTTAPVTLASSKTGSVVQPSSGFSGTTDFIHLKKHKAALAAAQYKSSNASETEPNAIKNQTLSASLPLDSTVICSTINKANSVGNGQASQTSQPNYHTKLKKAWLTRHSEEDKNTNKMENSGNSVSEIIKPCSVNLIASTSSDIQNSVDSKIIVDKYVKDDKVNRRKAKRTYESGSESGDSDESESKSEQRTKRQPKPTYKKKQNDLQKRKGEIEEDLKPNGVLSRSAKERSKLKLQSNSNSCHLVKTE

SEQ ID NO: 30703 - protein, 2358 aa, Homo sapiens
MQGPYSLNGYRVRVYRQDSATQWFTGIITHHDLFTRTMIVMNDQVLEPQNVDPSMVQMTFLDDVVHSLLKGENIGITSRRRSRANQNVNAVHSHYTRAQANSPRPAMNSQAAVPKQNTHQQQQQRSIRPNKRKGSDSSIPDEEKMKEEKYDYISRGENPKGKNKHLMNKRRKPEEDEKKLNMKRLRTDNVSDFSESSDSENSNKRIIDNSSEQKPENELKNKNTSKINGEEGKPHNNEKAGEETLKNSQPPWDQIQEDKKHEEAEKRKSVDTQLQEDMIIHSSEQSTVSDHNSNDLLPQECNMDKTHTMELLPKEKFVSRPPTPKCVIDITNDTNLEKVAQENSSTFGLQTLQKMDPNVSDSKHSIANAKFLETAKKDSDQSWVSDVVKVDLTQSSVTNASSGNDHLNMEKEKYVSYISPLSAVSVMEDKLHKRSPPPETIKSKLNTSVDTHKIKSSPSPEVVKPKITHSPDSVKSKATYVNSQATGERRLANKIEHELSRCSFHPIPTRSSTLETTKSPLIIDKNEHFTVYRDPALIGSETGANHISPFLSQHPFPLHSSSHRTCLNPGTHHPALTPAPHLLAGSSSQTPLPTINTHPLTSGPHHAVHHPHLLPTVLPGVPTASLLGGHPRLESAHASSLSHLALAHQQQQQLLQHQSPHLLGQAHPSASYNQLGLYPIIWQYPNGTHAYSGLGLPSSKWVHPENAVNAEASLRRNSPSPWLHQPTPVTSADGIGLLSHIPVRPSSAEPHRPLKITAHSSPPLTKTLVDHHKEELERKAFMEPLRSVASTSAKNDLDLNRSQTGKDCHLHRHFVDPVLNQLQRPPQETGERLNKYKEEHRRILQESIDVAPFTTKIKGLEGERENYSRVASSSSSPKSHIIKQDMDVERSVSDLYKMKHSVPQSLPQSNYFTTLSNSVVNEPPRSYPSKEVSNIYGDKQSNALAAAAANPQTLTSFITSLSKPPPLIKHQPESEGLVGKIPEHLPHQIASHSVTTFRNDCRSPTHLTVSSTNTLRSMPALHRAPVFHPPIHHSLERKEGSYSSLSPPTLTPVMPVNAGGKVQESQKPPTLIPEPKDSQANFKSSSEQSLTEMWRPNNNLSKEKTEWHVEKSSGKLQAAMASVIVRPSSSTKTDSMPAMQLASKDRVSERSSAGAHKTDCLKLAEAGETGRIILPNVNSDSVHTKSEKNFQAVSQGSVPSSVMSAVNTMCNTKTDVITSAADTTSVSSWGGSEVISSLSNTILASTSSECVSSKSVSQPVAQKQECKVSTTAPVTLASSKTGSVVQPSSGFSGTTDFIHLKKHKAALAAAQYKSSNASETEPNAIKNQTLSASLPLDSTVICSTINKANSVGNGQASQTSQPNYHTKLKKAWLTRHSEEDKNTNKMENSGNSVSEIIKPCSVNLIASTSSDIQNSVDSKIIVDKYVKDDKVNRRKAKRTYESGSESGDSDESESKSEQRTKRQPKPTYKKKQNDLQKRKGEIEEDLKPNGVLSRSAKERSKLKLQSNSNTGIPRSVLKDWRKVKKLKQTGESFLQDDSCCEIGPNLQKCRECRLIRSKKGEEPAHSPVFCRFYYFRRLSFSKNGVVRIDGFSSPDQYDDEAMSLWTHENFEDDELDIETSKYILDIIGDKFCQLVTSEKTALSWVKKDAKIAWKRAVRGVREMCDACEATLFNIHWVCQKCGFVVCLDCYKAKERKSSRDKELYAWMKCVKGQPHDHKHLMPTQIIPGSVLTDLLDAMHTLREKYGIKSHCHCTNKQNLQVGNFPTMNGVSQVLQNVLNHSNKISLCMPESQQQNTPPKSEKNGGSSPESDVGTDNKLTPPESQSPLHWLADLAEQKAREEKKENKELTLENQIKEEREQDNSESPNGRTSPLVSQNNEQGSTLRDLLTTTAGKLRVGSTDAGIAFAPVYSMGAPSSKSGRTMPNILDDIIASVVENKIPPSKTSKINVKPELKEEPEESIISAVDENNKLYSDIPHSWICEKHILWLKDYKNSSNWKLFKECWKQGQPAVVSGVHKKMNISLWKAESISLDFGDHQADLLNCKDSIISNANVKEFWDGFEEVSKRQKNKSGETVVLKLKDWPSGEDFKTMMPARYEDLLKSLPLPEYCNPEGKFNLASHLPGFFVRPDLGPRLCSAYGVVAAKDHDIGTTNLHIEVSDVVNILVYVGIAKGNGILSKAGILKKFEEEDLDDILRKRLKDSSEIPGALWHIYAGKDVDKIREFLQKISKEQGLEVLPEHDPIRDQSWYVNKKLRQRLLEEYGVRTCTLIQFLGDAIVLPAGALHQVQNFHSCIQVTEDFVSPEHLVESFHLTQELRLLKEEINYDDKLQVKNILYHAVKEMVRALKIHEDEVEDMEEN

SEQ ID NO: 30704 - protein, 459 aa, Homo sapiens
MTILGTTFGMVFSLLQVVSGESGYAQNGDLEDAELDDYSFSCYSQLEVNGSQHSLTCAFEDPDVNITNLEFEICGALVEVKCLNFRKLQEIYFIETKKFLLIGKSNICVKVGEKSLTCKKIDLTTIVKPEAPFDLSVVYREGANDFVVTFNTSHLQKKYVKVLMHDVAYRQEKDENKWTHVNLSSTKLTLLQRKLQPAAMYEIKVRSIPDHYFKGFWSEWSPSYYFRTPEINNSSGEMDPILLTISILSFFSVALLVILACVLWKKRIKPIVWPSLPDHKKTLEHLCKKPRKNLNVSFNPESFLDCQIHRVDDIQARDEVEGFLQDTFPQQLEESEKQRLGGDVQSPNCPSEDVVITPESFGRDSSLTCLAGNVSACDAPILSSSRSLDCRESGKNGPHVYQDLLLSLGTTNSTLPPPFSLQSGILTLNPVAQGQPILTSLGSNQEEAYVTMSSFYQNQ

SEQ ID NO: 30705 - protein, 298 aa, Homo sapiens
MTILGTTFGMVFSLLQVVSGESGYAQNGDLEDAELDDYSFSCYSQLEVNGSQHSLTCAFEDPDVNITNLEFEICGALVEVKCLNFRKLQEIYFIETKKFLLIGKSNICVKVGEKSLTCKKIDLTTIVKPEAPFDLSVVYREGANDFVVTFNTSHLQKKYVKVLMHDVAYRQEKDENKWTHVNLSSTKLTLLQRKLQPAAMYEIKVRSIPDHYFKGFWSEWSPSYYFRTPEINNSSGEMDPILLTISILSFFSVALLVILACVLWKKRIKPIVWPSLPDHKKTLEHLCKKPRKVSVFGA

SEQ ID NO: 30706 - protein, 261 aa, Homo sapiens
MTILGTTFGMVFSLLQVVSGESGYAQNGDLEDAELDDYSFSCYSQLEVNGSQHSLTCAFEDPDVNITNLEFEICGALVEVKCLNFRKLQEIYFIETKKFLLIGKSNICVKVGEKSLTCKKIDLTTIVKPEAPFDLSVVYREGANDFVVTFNTSHLQKKYVKVLMHDVAYRQEKDENKWTHVNLSSTKLTLLQRKLQPAAMYEIKVRSIPDHYFKGFWSEWSPSYYFRTPEINNSSGLSLSYGPVSPIIRRLWNIFVRNQEK

SEQ ID NO: 30707 - protein, 252 aa, Homo sapiens
MTILGTTFGMVFSLLQVVSGESGYAQNGDLEDAELDDYSFSCYSQLEVNGSQHSLTCAFEDPDVNITNLEFEICGALVEVKCLNFRKLQEIYFIETKKFLLIGKSNICVKVGEKSLTCKKIDLTTIVKPEAPFDLSVVYREGANDFVVTFNTSHLQKKYVKVLMHDVAYRQEKDENKWTHVNLSSTKLTLLQRKLQPAAMYEIKVRSIPDHYFKGFWSEWSPSYYFRTPEINNSSGLSLSYGPVSPIIRQEL

SEQ ID NO: 30708 - protein, 464 aa, Homo sapiens
MAAQPPRPVGERSMGSSREAARAPARSPAWASTQASTPGAALAVQRESPESGLQKHYSNLCMEKSQKINPFILHILQEVDEEIKKGLAAGITLNIAGNNRLVPVERVTGEDFWILSKILKNCLYINGLDVGYNLLCDVGAYYAAKLLQKQLNLIYLNLMFNDIGPEGGELIAKVLHKNRTLKYLRMTGNKIENKGGMFFAAMLQINSSLEKLDLGDCDLGMQSVIAFATVLTQNQAIKAINLNRPILYSEQEESTVHVGRMLKENHCLVALHMCKHDIKNSGIQQLCDALYLNSSLRYLDVSCNKITHDGMVYLADVLKSNTTLEVIDLSFNRIENAGANYLSETLTSHNRSLKALSVVSNNIEGEGLVALSQSMKTNLTFSHIYIWGNKFDEATCIAYSDLIQMGCLKPDNTDVEPFVVDGRVYLAEVSNGLKKHYYWTSTYGESYDHSSNAGFALVPVGQQP

SEQ ID NO: 30709 - protein, 432 aa, Homo sapiens
MAAQPPRPVGERSMGSSREAARAPARSPAWASTQASTPGAALAVQRESPESGLQKHYSNLCMEKSQKINPFILHILQEVDEEIKKGLAAGITLNIAGNNRLVPVERVTGEDFWILSKILKNCLYINGLDVGYNLLCDVGAYYAAKLLQKQLNLIYLNLMFNDIGPEGGELIAKVLHKNRTLKYLRMTGNKIENKGGMFFAAMLQINSSLEKLDLGDCDLEESTVHVGRMLKENHCLVALHMCKHDIKNSGIQQLCDALYLNSSLRYLDVSCNKITHDGMVYLADVLKSNTTLEVIDLSFNRIENAGANYLSETLTSHNRSLKALSVVSNNIEGEGLVALSQSMKTNLTFSHIYIWGNKFDEATCIAYSDLIQMGCLKPDNTDVEPFVVDGRVYLAEVSNGLKKHYYWTSTYGESYDHSSNAGFALVPVGQQP

SEQ ID NO: 30710 - protein, 123 aa, Homo sapiens
MAVSHSVKERTISENSLIILLQGLQGRVTTVDLRDESVAHGRIDNVDAFMNIRLAKVTYTDRWGHQVKLDDLFVTGRNVRYVHIPDDVNITSTIEQQLQIIHRVRNFGGKGQGRWEFPPKNCK

SEQ ID NO: 30711 - protein, 388 aa, Homo sapiens
MLEGSWINRREDKLGVYSLVHFSPKMLGSVATTLPLSSSNSSGMPLGYYLSSPQISRVTISTTGQLTSKATVGSCSRVENSLDASPFSVPKKQDESPMIGDGEDYFLSLFGDSKKLTAHSNYTQKTLKYFSMILEEVGQFTSSSLGDVEIAEVNVKGLFVKLINSSLDKEMAIGDHILQQNVNGQTISLYRFLPNIVMQANSTVTVWAAASEAKHQPPSDFLWKEQDKFRASPDCITILCKPNGQAIAWYTPIHWKQAWEKLDADVEFNRCSVVSPTFRKRVFQWTASTATITKEKQDQPKKDISNYQVEQAQVLLKREKEIPPTVFPNRSPWCQNPYVSAHPYCPLIEPHNTSTAGGRLDRQPRTRSTRPNRASGSKKKKTSESQKQ

SEQ ID NO: 30712 - protein, 291 aa, Homo sapiens
MIGDGEDYFLSLFGDSKKLTAHSNYTQKTLKYFSMILEEVGQFTSSSLGDVEIAEVNVKGLFVKLINSSLDKEMAIGDHILQQNVNGQTISLYRFLPNIVMQANSTVTVWAAASEAKHQPPSDFLWKEQDKFRASPDCITILCKPNGQAIAWYTPIHWKQAWEKLDADVEFNRCSVVSPTFRKRVFQWTASTATITKEKQDQPKKDISNYQVEQAQVLLKREKEIPPTVFPNRSPWCQNPYVSAHPYCPLIEPHNTSTAGGRLDRQPRTRSTRPNRASGSKKKKTSESQKQ

SEQ ID NO: 30713 - protein, 325 aa, Homo sapiens
MQQPVRAGDIGVSRVQTHHNASPFSVPKKQDESPMIGDGEDYFLSLFGDSKKLTAHSNYTQKTLKYFSMILEEVGQFTSSSLGDVEIAEVNVKGLFVKLINSSLDKEMAIGDHILQQNVNGQTISLYRFLPNIVMQANSTVTVWAAASEAKHQPPSDFLWKEQDKFRASPDCITILCKPNGQAIAWYTPIHWKQAWEKLDADVEFNRCSVVSPTFRKRVFQWTASTATITKEKQDQPKKDISNYQVEQAQVLLKREKEIPPTVFPNRSPWCQNPYVSAHPYCPLIEPHNTSTAGGRLDRQPRTRSTRPNRASGSKKKKTSESQKQ

SEQ ID NO: 30714 - protein, 369 aa, Homo sapiens
MKDTQDIQEASKAMQNKVHEQEDKNEKQKQREDKLGVYSLVHFSPKMLGSVATTLPLSSSNSSGMPLGYYLSSPQISRVTISTTGQLTSKATVGSCSRVENSLDASPFSVPKKQDESPMIGDGEDYFLSLFGDSKKLTAHSNYTQKTLKYFSMILEEVGQFTSSSLGDVEIAEVNVKGLFVKLINSSLDKEMAIGDHILQQNVNGQTISLYRFLPNIVMQANSTVTAIAWYTPIHWKQAWEKLDADVEFNRCSVVSPTFRKRVFQWTASTATITKEKQDQPKKDISNYQVEQAQVLLKREKEIPPTVFPNRSPWCQNPYVSAHPYCPLIEPHNTSTAGGRLDRQPRTRSTRPNRASGSKKKKTSESQKQ

SEQ ID NO: 30715 - protein, 409 aa, Homo sapiens
MKDTQDIQEASKAMQNKVHEQEDKNEKQKQREDKLGVYSLVHFSPKMLGSVATTLPLSSSNSSGMPLGYYLSSPQISRVTISTTGQLTSKATVGSCSRVENSLDASPFSVPKKQDESPMIGDGEDYFLSLFGDSKKLTAHSNYTQKTLKYFSMILEEVGQFTSSSLGDVEIAEVNVKGLFVKLINSSLDKEMAIGDHILQQNVNGQTISLYRFLPNIVMQANSTVTVWAAASEAKHQPPSDFLWKEQDKFRASPDCITILCKPNGQAIAWYTPIHWKQAWEKLDADVEFNRCSVVSPTFRKRVFQWTASTATITKEKQDQPKKDISNYQVEQAQVLLKREKEIPPTVFPNRSPWCQNPYVSAHPYCPLIEPHNTSTAGGRLDRQPRTRSTRPNRASGSKKKKTSESQKQ

SEQ ID NO: 30716 - protein, 164 aa, Homo sapiens
MPSLAPDCPLLAMPEETQEDSVAPMMPSQRSRGPLAPNHVHEVCLHQVESISDLHSGAGTLRPYLTEEARPWDELLGVLPPSLCAQAGCSPVYRRGGFLLLLALLVLTCLVLALLAVYLSVLQSESLRILAHTLRTQEETLLKLRLASLSQLRRLNSSEAQAPS

SEQ ID NO: 30717 - protein, 635 aa, Homo sapiens
MAPPLLLLLLASGAAACPLPCVCQNLSESLSTLCAHRGLLFVPPNVDRRTVELRLADNFIQALGPPDFRNMTGLVDLTLSRNAITRIGARAFGDLESLRSLHLDGNRLVELGTGSLRGPVNLQHLILSGNQLGRIAPGAFDDFLESLEDLDLSYNNLRQVPWAGIGAMPALHTLNLDHNLIDALPPGAFAQLGQLSRLDLTSNRLATLAPDPLFSRGRDAEASPAPLVLSFSGNPLHCNCELLWLRRLARPDDLETCASPPGLAGRYFWAVPEGEFSCEPPLIARHTQRLWVLEGQRATLRCRALGDPAPTMHWVGPDDRLVGNSSRARAFPNGTLEIGVTGAGDAGGYTCIATNPAGEATARVELRVLALPHGGNSSAEGGRPGPSDIAASARTAAEGEGTLESEPAVQVTEVTATSGLVSWGPGRPADPVWMFQIQYNSSEDETLIYRIVPASSHHFLLKHLVPGADYDLCLLALSPAAGPSDLTATRLLGCAHFSTLPASPLCHALQAHVLGGTLTVAVGGVLVAALLVFTVALLVRGRGAGNGRLPLKLSHVQSQTNGGPSPTPKAHPPRSPPPRPQRSCSLDLGDAGCYGYARRLGGAWARRSHSVHGGLLGAGCRGVGGSAERLEESVV

SEQ ID NO: 30718 - protein, 868 aa, Homo sapiens
MASFPETDFQICLLCKEMCGSPAPLSSNSSASSSSSQTSTSSGGGGGGPGAAARRLHVLPCLHAFCRPCLEAHRLPAAGGGAAGEPLKLRCPVCDQKVVLAEAAGMDALPSSAFLLSNLLDAVVATADEPPPKNGRAGAPAGAGGHSNHRHHAHHAHPRASASAPPLPQAPQPPAPSRSAPGGPAASPSALLLRRPHGCSSCDEGNAASSRCLDCQEHLCDNCVRAHQRVRLTKDHYIERGPPGPGAAAAAQQLGLGPPFPGPPFSILSVFPERLGFCQHHDDEVLHLYCDTCSVPICRECTMGRHGGHSFIYLQEALQDSRALTIQLLADAQQGRQAIQLSIEQAQTVAEQVEMKAKVVQSEVKAVTARHKKALEERECELLWKVEKIRQVKAKSLYLQVEKLRQNLNKLESTISAVQQVLEEGRALDILLARDRMLAQVQELKTVRSLLQPQEDDRVMFTPPDQALYLAIKSFGFVSSGAFAPLTKATGDGLKRALQGKVASFTVIGYDHDGEPRLSGGDLMSAVVLGPDGNLFGAEVSDQQNGTYVVSYRPQLEGEHLVSVTLCNQHIENSPFKVVVKSGRSYVGIGLPGLSFGSEGDSDGKLCRPWGVSVDKEGYIIVADRSNNRIQVFKPCGAFHHKFGTLGSRPGQFDRPAGVACDASRRIVVADKDNHRIQIFTFEGQFLLKFGEKGTKNGQFNYPWDVAVNSEGKILVSDTRNHRIQLFGPDGVFLNKYGFEGALWKHFDSPRGVAFNHEGHLVVTDFNNHRLLVIHPDCQSARFLGSEGTGNGQFLRPQGVAVDQEGRIIVADSRNHRVQMFESNGSFLCKFGAQGSGFGQMDRPSGIAITPDGMIVVVDFGNNRILVF

SEQ ID NO: 30719 - protein, 356 aa, Homo sapiens
MQILSRCQGLMSEECGRTTALAAGRTRKGAGEEGLVSPEGAGDEDSCSSSAPLSPSSSPRSMASGSGCPPGKCVCNSCGLEIVDKYLLKVNDLCWHVRCLSCSVCRTSLGRHTSCYIKDKDIFCKLDYFRRYGTRCSRCGRHIHSTDWVRRAKGNVYHLACFACFSCKRQLSTGEEFALVEEKVLCRVHYDCMLDNLKREVENGNGISVEGALLTEQDVNHPKPAKRARTSFTADQLQVMQAQFAQDNNPDAQTLQKLAERTGLSRRVIQVWFQNCRARHKKHVSPNHSSSTPVTAVPPSRLSPPMLEEMAYSAYVPQDGTMLTALHSYMDAHSPTTLGLQPLLPHSMTQLPISHT

SEQ ID NO: 30720 - protein, 346 aa, Homo sapiens
MSEECGRTTALAAGRTRKGAGEEGLVSPEGAGDEDSCSSSAPLSPSSSPRSMASGSGCPPGKCVCNSCGLEIVDKYLLKVNDLCWHVRCLSCSVCRTSLGRHTSCYIKDKDIFCKLDYFRRYGTRCSRCGRHIHSTDWVRRAKGNVYHLACFACFSCKRQLSTGEEFALVEEKVLCRVHYDCMLDNLKREVENGNGISVEGALLTEQDVNHPKPAKRARTSFTADQLQVMQAQFAQDNNPDAQTLQKLAERTGLSRRVIQVWFQNCRARHKKHVSPNHSSSTPVTAVPPSRLSPPMLEEMAYSAYVPQDGTMLTALHSYMDAHSPTTLGLQPLLPHSMTQLPISHT

SEQ ID NO: 30721 - protein, 236 aa, Homo sapiens
MPGAAAAAAAAAAAMLPAQEAAKLYHTNYVRNSRAIGVLWAIFTICFAIVNVVCFIQPYWIGDGVDTPQAGYFGLFHYCIGNGFSRELTCRGSFTDFSTLPSGAFKAASFFIGLSMMLIIACIICFTLFFFCNTATVYKICAWMQLTSAACLVLGCMIFPDGWDSDEVKRMCGEKTDKYTLGACSVRWAYILAIIGILDALILSFLAFVLGNRQDSLMAEELKAENKVLLSQYSLE

SEQ ID NO: 30722 - protein, 238 aa, Homo sapiens
MLGSPCLLWLLAVTFLVPRAQPLAPQDFEEEEADETETAWPPLPAVPCDYDHCRHLQVPCKELQRVGPAACLCPGLSSPAQPPDPPRMGEVRIAAEEGRAVVHWCAPFSPVLHYWLLLWDGSEAAQKGPPLNATVRRAELKGLKPGGIYVVCVVAANEAGASRVPQAGGEGLEGADIPAFGPCSRLAVPPNPRTLVHAAVGVGTALALLSCAALVWHFCLRDRWGCPRRAAARAAGAL

SEQ ID NO: 30723 - protein, 664 aa, Homo sapiens
MKRRNADCSKLRRPLKRNRITEGIYGSTFLYLKFLVVWALVLLADFVLEFRFEYLWPFWLFIRSVYDSFRYQGLAFSVFFVCVAFTSNIICLLFIPIQWLFFAASTYVWVQYVWHTERGVCLPTVSLWILFVYIEAAIRFKDLKNFHVDLCRPFAAHCIGYPVVTLGFGFKSYVSYKMRLRKQKEVQKENEFYMQLLQQALPPEQQMLQKQEKEAEEAAKGLPDMDSSILIHHNGGIPANKKLSTTLPEIEYREKGKEKDKDAKKHNLGINNNNILQPVDSKIQEIEYMENHINSKRLNNDLVGSTENLLKEDSCTASSKNYKNASGVVNSSPRSHSATNGSIPSSSSKNEKKQKCTSKSPSTHKDLMENCIPNNQLSKPDALVRLEQDIKKLKADLQASRQVEQELRSQISSLSSTERGIRSEMGQLRQENELLQNKLHNAVQMKQKDKQNISQLEKKLKAEQEARSFVEKQLMEEKKRKKLEEATAARAVAFAAASRGECTETLRNRIRELEAEGKKLTMDMKVKEDQIRELELKVQELRKYKENEKDTEVLMSALSAMQDKTQHLENSLSAETRIKLDLFSALGDAKRQLEIAQGQILQKDQEIKDLKQKIAEVMAVMPSITYSAATSPLSPVSPHYSSKFVETSPSGLDPNASVYQPLKK

SEQ ID NO: 30724 - protein, 306 aa, Homo sapiens
MKRRNADCSKLRRPLKRNRITEGIYGRLEQDIKKLKADLQASRQVEQELRSQISSLSSTERGIRSEMGQLRQENELLQNKLHNAVQMKQKDKQNISQLEKKLKAEQEARSFVEKQLMEEKKRKKLEEATAARAVAFAAASRGECTETLRNRIRELEAEGKKLTMDMKVKEDQIRELELKVQELRKYKENEKDTEVLMSALSAMQDKTQHLENSLSAETRIKLDLFSALGDAKRQLEIAQGQILQKDQEIKDLKQKIAEVMAVMPSITYSAATSPLSPVSPHYSSKFVETSPSGLDPNASVYQPLKK

SEQ ID NO: 30725 - protein, 437 aa, Homo sapiens
MKRRNADCSKLRRPLKRNRITEGIYGSTFLYLKFLVVWALVLLADFVLEFRFEYLWPFWLFIRSVYDSFRYQGLAFSVFFVCVAFTSNIICLLFIPIQWLFFAASTYVWVQYVWHTERGVCLPTVSLWILFVYIEAAIRFKDLKNFHVDLCRPFAAHWLEQDIKKLKADLQASRQVEQELRSQISSLSSTERGIRSEMGQLRQENELLQNKLHNAVQMKQKDKQNISQLEKKLKAEQEARSFVEKQLMEEKKRKKLEEATAARAVAFAAASRGECTETLRNRIRELEAEGKKLTMDMKVKEDQIRELELKVQELRKYKENEKDTEVLMSALSAMQDKTQHLENSLSAETRIKLDLFSALGDAKRQLEIAQGQILQKDQEIKDLKQKIAEVMAVMPSITYSAATSPLSPVSPHYSSKFVETSPSGLDPNASVYQPLKK

SEQ ID NO: 30726 - protein, 373 aa, Homo sapiens
MALNVAPVRDTKWLTLEVCRQFQRGTCSRSDEECKFAHPPKSCQVENGRVIACFDSLKGRCSRENCKYLHPPTHLKTQLEINGRNNLIQQKTAAAMLAQQMQFMFPGTPLHPVPTFPVGPAIGTNTAISFAPYLAPVTPGVGLVPTEILPTTPVIVPGSPPVTVPGSTATQKLLRTDKLEVCREFQRGNCARGETDCRFAHPADSTMIDTSDNTVTVCMDYIKGRCMREKCKYFHPPAHLQAKIKAAQHQANQAAVAAQAAAAAATVMAFPPGALHPLPKRQALEKSNGTSAVFNPSVLHYQQALTSAQLQQHAAFIPTGSVLCMTPATSIDNSEIISRNGMECQESALRITKHCYCTYYPVSSSIELPQTAC

SEQ ID NO: 30727 - protein, 367 aa, Homo sapiens
MALNVAPVRDTKWLTLEVCRQFQRGTCSRSDEECKFAHPPKSCQVENGRVIACFDSLKGRCSRENCKYLHPPTHLKTQLEINGRNNLIQQKTAAAMLAQQMQFMFPGTPLHPVPTFPVGPAIGTNTAISFAPYLAPVTPGVGLVPTEILPTTPVIVPGSPPVTVPGSTATQKLLRTDKLEVCREFQRGNCARGETDCRFAHPADSTMIDTSDNTVTVCMDYIKGRCMREKCKYFHPPAHLQAKIKAAQHQANQAAVAAQAAAAAATVMAFPPGALHPLPKRQALEKSNGTSAVFNPSVLHYQQALTSAQLQQHAAFIPTGSVLCMTPATSIVPMMHSATSATVSAATTPATSVPFAATATANQIILK

SEQ ID NO: 30728 - protein, 361 aa, Homo sapiens
MALNVAPVRDTKWLTLEVCRQFQRGTCSRSDEECKFAHPPKSCQVENGRVIACFDSLKGRCSRENCKYLHPPTHLKTQLEINGRNNLIQQKTAAAMLAQQMQFMFPGTPLHPVPTFPVGPAIGTNTAISFAPYLAPVTPGVGLVPTEILPTTPVIVPGSPPVTVPGSTATQKLLRTDKLEVCREFQRGNCARGETDCRFAHPADSTMIDTSDNTVTVCMDYIKGRCMREKCKYFHPPAHLQAKIKAAQHQANQAAVAAQAAAAAATVMAFPPGALHPLPKRQALEKSNGTSAVFNPSVLHYQQALTSAQLQQHAAFIPTDNSEIISRNGMECQESALRITKHCYCTYYPVSSSIELPQTAC

SEQ ID NO: 30729 - protein, 323 aa, Homo sapiens
MAAELSMGPELPTSPLAMEYVNDFDLLKFDVKKEPLGRAERPGRPCTRLQPAGSVSSTPLSTPCSSVPSSPSFSPTEQKTHLEDLYWMASNYQQMNPEALNLTPEDAVEALIGSHPVPQPLQSFDSFRGAHHHHHHHHPHPHHAYPGAGVAHDELGPHAHPHHHHHHQASPPPSSAASPAQQLPTSHPGPGPHATASATAAGGNGSVEDRFSDDQLVSMSVRELNRHLRGFTKDEVIRLKQKRRTLKNRGYAQSCRYKRVQQKHHLENEKTQLIQQVEQLKQEVSRLARERDAYKVKCEKLANSGFREAGSTSDSPSSPEFFL

SEQ ID NO: 30730 - protein, 315 aa, Homo sapiens
MSLEQRSPHCKPDEDLEAQGEDLGLMGAQEPTGEEEETTSSSDSKEEEVSAAGSSSPPQSPQGGASSSISVYYTLWSQFDEGSSSQEEEEPSSSVDPAQLEFMFQEALKLKVAELVHFLLHKYRVKEPVTKAEMLESVIKNYKRYFPVIFGKASEFMQVIFGTDVKEVDPAGHSYILVTALGLSCDSMLGDGHSMPKAALLIIVLGVILTKDNCAPEEVIWEALSVMGVYVGKEHMFYGEPRKLLTQDWVQENYLEYRQVPGSDPAHYEFLWGSKAHAETSYEKVINYLVMLNAREPICYPSLYEEVLGEEQEGV

SEQ ID NO: 30731 - protein, 314 aa, Homo sapiens
MPLEQRSQHCKPEEGLEARGEALGLVGAQAPATEEQEAASSSSTLVEVTLGEVPAAESPDPPQSPQGASSLPTTMNYPLWSQSYEDSSNQEEEGPSTFPDLESEFQAALSRKVAELVHFLLLKYRAREPVTKAEMLGSVVGNWQYFFPVIFSKASSSLQLVFGIELMEVDPIGHLYIFATCLGLSYDGLLGDNQIMPKAGLLIIVLAIIAREGDCAPEEKIWEELSVLEVFEGREDSILGDPKKLLTQHFVQENYLEYRQVPGSDPACYEFLWGPRALVETSYVKVLHHMVKISGGPHISYPPLHEWVLREGEE

SEQ ID NO: 30732 - protein, 346 aa, Homo sapiens
MPRGQKSTLHAREKRQQTRGQTQDHQGAQITATNKKKVSFSSPLILGATIQKKSAGRSRSALKKPQRALSTTTSVDVSYKKSYKGANSKIEKKQSFSQGLSSTVQSRTDPLIMKTNMLVQFLMEMYKMKKPIMKADMLKIVQKSHKNCFPEILKKASFNMEVVFGVDLKKVDSTKDSYVLVSKMDLPNNGTVTRGRGFPKTGLLLNLLGVIFMKGNCATEEKIWEFLNKMRIYDGKKHFIFGEPRKLITQDLVKLKYLEYRQVPNSNPARYEFLWGPRAHAETSKMKVLEFWAKVNKTVPSAFQFWYEEALRDEEERVQAAAMLNDGSSAMGRKCSKAKASSSSHA

SEQ ID NO: 30733 - protein, 139 aa, Homo sapiens
MALSMSLSSDILSGAPTAGRGGGCSAALSPRGRGSKGLGTRAPGPRGDGQQPPLGTGGDEDPGAGSASAGGSRLAAAAAAEAAAPGDRSLCWAPRGRLLASSPAGEAGSWGRARRGGPRPGAPCKGLAGPPLRPGLARS

SEQ ID NO: 30734 - protein, 1086 aa, Homo sapiens
MANLLKTVVTGCSCPLLSNLGSCKGLRVKKDFLRTFYTHQELWCKAPVKPGIPYKQLTVGVPKEIFQNEKRVALSPAGVQNLVKQGFNVVVESGAGEASKFSDDHYRVAGAQIQGAKEVLASDLVVKVRAPMVNPTLGVHEADLLKTSGTLISFIYPAQNPELLNKLSQRKTTVLAMDQVPRVTIAQGYDALSSMANIAGYKAVVLAANHFGRFFTGQITAAGKVPPAKILIVGGGVAGLASAGAAKSMGAIVRGFDTRAAALEQFKSLGAEPLEVDLKESGEGQGGYAKEMSKEFIEAEMKLFAQQCKEVDILISTALIPGKKAPVLFNKEMIESMKEGSVVVDLAAEAGGNFETTKPGELYIHKGITHIGYTDLPSRMATQASTLYSNNITKLLKAISPDKDNFYFDVKDDFDFGTMGHVIRGTVVMKDGKVIFPAPTPKNIPQGAPVKQKTVAELEAEKAATITPFRKTMSTASAYTAGLTGILGLGIAAPNLAFSQMVTTFGLAGIVGYHTVWGVTPALHSPLMSVTNAISGLTAVGGLALMGGHLYPSTTSQGLAALAAFISSVNIAGGFLVTQRMLDMFKRPTDPPEYNYLYLLPAGTFVGGYLAALYSGYNIEQIMYLGSGLCCVGALAGLSTQGTARLGNALGMIGVAGGLAATLGVLKPGPELLAQMSGAMALGGTIGLTIAKRIQISDLPQLVAAFHSLVGLAAVLTCIAEYIIEYPHFATDAAANLTKIVAYLGTYIGGVTFSGSLIAYGKLQGLLKSAPLLLPGRHLLNAGLLAASVGGIIPFMVDPSFTTGITCLGSVSALSAVMGVTLTAAIGGADMPVVITVLNSYSGWALCAEGFLLNNNLLTIVGALIGSSGAILSYIMCVAMNRSLANVILGGYGTTSTAGGKPMEISGTHTEINLDNAIDMIREANSIIITPGYGLCAAKAQYPIADLVKMLTEQGKKVRFGIHPVAGRMPGQLNVLLAEAGVPYDIVLEMDEINHDFPDTDLVLVIGANDTVNSAAQEDPNSIIAGMPVLEVWKSKQVIVMKRSLGVGYAAVDNPIFYKPNTAMLLGDAKKTCDALQAKVRESYQK

SEQ ID NO: 30735 - protein, 187 aa, Homo sapiens
MEVEEIYKHQEVKMQAPAFRDKKQGVSAKNQGAHDPDYENITLAFKNQDHAKGGHSRPTSQVPAQCRPPSDSTQVPCWLYRAILSLYILLALAFVLCIILSAFIMVKNAEMSKELLGFKRELWNVSNSVQACEERQKRGWDSVQQSITMVRSKIDRLETTLAGIKNIDTKVQKILEVLQKMPQSSPQ

SEQ ID NO: 30736 - protein, 1280 aa, Homo sapiens
MDLEGDRNGGAKKKNFFKLNNKSEKDKKEKKPTVSVFSMFRYSNWLDKLYMVVGTLAAIIHGAGLPLMMLVFGEMTDIFANAGNLEDLMSNITNRSDINDTGFFMNLEEDMTRYAYYYSGIGAGVLVAAYIQVSFWCLAAGRQIHKIRKQFFHAIMRQEIGWFDVHDVGELNTRLTDDVSKINEGIGDKIGMFFQSMATFFTGFIVGFTRGWKLTLVILAISPVLGLSAAVWAKILSSFTDKELLAYAKAGAVAEEVLAAIRTVIAFGGQKKELERYNKNLEEAKRIGIKKAITANISIGAAFLLIYASYALAFWYGTTLVLSGEYSIGQVLTVFFSVLIGAFSVGQASPSIEAFANARGAAYEIFKIIDNKPSIDSYSKSGHKPDNIKGNLEFRNVHFSYPSRKEVKILKGLNLKVQSGQTVALVGNSGCGKSTTVQLMQRLYDPTEGMVSVDGQDIRTINVRFLREIIGVVSQEPVLFATTIAENIRYGRENVTMDEIEKAVKEANAYDFIMKLPHKFDTLVGERGAQLSGGQKQRIAIARALVRNPKILLLDEATSALDTESEAVVQVALDKARKGRTTIVIAHRLSTVRNADVIAGFDDGVIVEKGNHDELMKEKGIYFKLVTMQTAGNEVELENAADESKSEIDALEMSSNDSRSSLIRKRSTRRSVRGSQAQDRKLSTKEALDESIPPVSFWRIMKLNLTEWPYFVVGVFCAIINGGLQPAFAIIFSKIIGVFTRIDDPETKRQNSNLFSLLFLALGIISFITFFLQGFTFGKAGEILTKRLRYMVFRSMLRQDVSWFDDPKNTTGALTTRLANDAAQVKGAIGSRLAVITQNIANLGTGIIISFIYGWQLTLLLLAIVPIIAIAGVVEMKMLSGQALKDKKELEGSGKIATEAIENFRTVVSLTQEQKFEHMYAQSLQVPYRNSLRKAHIFGITFSFTQAMMYFSYAGCFRFGAYLVAHKLMSFEDVLLVFSAVVFGAMAVGQVSSFAPDYAKAKISAAHIIMIIEKTPLIDSYSTEGLMPNTLEGNVTFGEVVFNYPTRPDIPVLQGLSLEVKKGQTLALVGSSGCGKSTVVQLLERFYDPLAGKVLLDGKEIKRLNVQWLRAHLGIVSQEPILFDCSIAENIAYGDNSRVVSQEEIVRAAKEANIHAFIESLPNKYSTKVGDKGTQLSGGQKQRIAIARALVRQPHILLLDEATSALDTESEKVVQEALDKAREGRTCIVIAHRLSTIQNADLIVVFQNGRVKEHGTHQQLLAQKGIYFSMVSVQAGTKRQ

SEQ ID NO: 30737 - protein, 1216 aa, Homo sapiens
MDLEGDRNGGAKKKNFFKLNNKSEKDKKEKKPTVSVFSMFRYSNWLDKLYMVVGTLAAIIHGAGLPLMMLVFGEMTDIFANAGNLEDLMSNITNRSDINDTGFFMNLEEDMTSDVSKINEGIGDKIGMFFQSMATFFTGFIVGFTRGWKLTLVILAISPVLGLSAAVWAKILSSFTDKELLAYAKAGAVAEEVLAAIRTVIAFGGQKKELERYNKNLEEAKRIGIKKAITANISIGAAFLLIYASYALAFWYGTTLVLSGEYSIGQVLTVFFSVLIGAFSVGQASPSIEAFANARGAAYEIFKIIDNKPSIDSYSKSGHKPDNIKGNLEFRNVHFSYPSRKEVKILKGLNLKVQSGQTVALVGNSGCGKSTTVQLMQRLYDPTEGMVSVDGQDIRTINVRFLREIIGVVSQEPVLFATTIAENIRYGRENVTMDEIEKAVKEANAYDFIMKLPHKFDTLVGERGAQLSGGQKQRIAIARALVRNPKILLLDEATSALDTESEAVVQVALDKARKGRTTIVIAHRLSTVRNADVIAGFDDGVIVEKGNHDELMKEKGIYFKLVTMQTAGNEVELENAADESKSEIDALEMSSNDSRSSLIRKRSTRRSVRGSQAQDRKLSTKEALDESIPPVSFWRIMKLNLTEWPYFVVGVFCAIINGGLQPAFAIIFSKIIGVFTRIDDPETKRQNSNLFSLLFLALGIISFITFFLQGFTFGKAGEILTKRLRYMVFRSMLRQDVSWFDDPKNTTGALTTRLANDAAQVKGAIGSRLAVITQNIANLGTGIIISFIYGWQLTLLLLAIVPIIAIAGVVEMKMLSGQALKDKKELEGSGKIATEAIENFRTVVSLTQEQKFEHMYAQSLQVPYRNSLRKAHIFGITFSFTQAMMYFSYAGCFRFGAYLVAHKLMSFEDVLLVFSAVVFGAMAVGQVSSFAPDYAKAKISAAHIIMIIEKTPLIDSYSTEGLMPNTLEGNVTFGEVVFNYPTRPDIPVLQGLSLEVKKGQTLALVGSSGCGKSTVVQLLERFYDPLAGKVLLDGKEIKRLNVQWLRAHLGIVSQEPILFDCSIAENIAYGDNSRVVSQEEIVRAAKEANIHAFIESLPNKYSTKVGDKGTQLSGGQKQRIAIARALVRQPHILLLDEATSALDTESEKVVQEALDKAREGRTCIVIAHRLSTIQNADLIVVFQNGRVKEHGTHQQLLAQKGIYFSMVSVQAGTKRQ

SEQ ID NO: 30738 - protein, 1494 aa, Homo sapiens
MNGGKECDGGDKEGGLPAIQVPVGWQRRVDQNGVLYVSPSGSLLSCLEQVKTYLLTDGTCKCGLECPLILPKVFNFDPGAAVKQRTAEDVKADEDVTKLCIHKRKIIAVATLHKSMEAPHPSLVLTSPGGGTNATPVVPSRAATPRSVRNKSHEGITNSVMPECKNPFKLMIGSSNAMGRLYVQELPGSQQQELHPVYPRQRLGSSEHGQKSPFRGSHGGLPSPASSGSQIYGDGSISPRTDPLGSPDVFTRSNPGFHGAPNSSPIHLNRTPLSPPSVMLHGSPVQSSCAMAGRTNIPLSPTLTTKSPVMKKPMCNFSTNMEIPRAMFHHKPPQGPPPPPPPSCALQKKPLTSEKDPLGILDPIPSKPVNQNPVIINPTSFHSNVHSQVPMMNVSMPPAVVPLPSNLPLPTVKPGHMNHGSHVQRVQHSASTSLSPSPVTSPVHMMGTGIGRIEASPQRSRSSSTSSDHGNFMMPPVGPQATSSGIKVPPRSPRSTIGSPRPSMPSSPSTKSDGHHQYKDIPNPLIAGISNVLNTPSSAAFPTASAGSSSVKSQPGLLGMPLNQILNQHNAASFPASSLLSAAAKAQLANQNKLAGNNSSSSSNSGAVAGSGNTEGHSTLNTMFPPTANMLLPTGEGQSGRAALRDKLMSQQKDALRKRKQPPTTVLSLLRQSQMDSSAVPKPGPDLLRKQGQGSFPISSMSQLLQSMSCQSSHLSSNSTPGCGASNTALPCSANQLHFTDPSMNSSVLQNIPLRGEAVHCHNANTNFVHSNSPVPNHHLAGLINQIQASGNCGMLSQSGMALGNSLHPNPPQSRISTSSTPVIPNSIVSSYNQTSSEAGGSGPSSSIAIAGTNHPAITKTTSVLQDGVIVTTAAGNPLQSQLPIGSDFPFVGQEHALHFPSNSTSNNHLPHPLNPSLLSSLPISLPVNQQHLLNQNLLNILQPSAGEGDMSSINNTLSNHQLTHLQSLLNNNQMFPPNQQQQQLLQGYQNLQAFQGQSTIPCPANNNPMACLFQNFQVRMQEDAALLNKRISTQPGLTALPENPNTTLPPFQDTPCELQPRIDPSLGQQVKDGLVVGGPGDASVDAIYKAVVDAASKGMQVVITTAVNSTTQISPIPALSAMSAFTASIGDPLNLSSAVSAVIHGRNMGGVDHDGRLRNSRGARLPKNLDHGKNVNEGDGFEYFKSASCHTSKKQWDGEQSPRGERNRWKYEEFLDHPGHIHSSPCHERPNNVSTLPFLPGEQHPILLPPRNCPGDKILEENFRYNNYKRTMMSFKERLENTVERCAHINGNRPRQSRGFGELLSTAKQDLVLEEQSPSSSNSLENSLVKDYIHYNGDFNAKSVNGCVPSPSDAKSISSEDDLRNPDSPSSNELIHYRPRTFNVGDLVWGQIKGLTSWPGKLVREDDVHNSCQQSPEEGKVEPEKLKTLTEGLEAYSRVRKRNRKSGKLNNHLEAAIHEAMSELDKMSGTVHQIPQGDRQMRPPKPKRRKISR

SEQ ID NO: 30739 - protein, 851 aa, Homo sapiens
MNGGKECDGGDKEGGLPAIQVPVGWQRRVDQNGVLYVSPSGSLLSCLEQVKTYLLTDGTCKCGLECPLILPKVFNFDPGAAVKQRTAEDVKADEDVTKLCIHKRKIIAVATLHKSMEAPHPSLVLTSPGGGTNATPVVPSRAATPRSVRNKSHEGITNSVMPECKNPFKLMIGSSNAMGRLYVQELPGSQQQELHPVYPRQRLGSSEHGQKSPFRGSHGGLPSPASSGSQIYGDGSISPRTDPLGSPDVFTRSNPGFHGAPNSSPIHLNRTPLSPPSVMLHGSPVQSSCAMAGRTNIPLSPTLTTKSPVMKKPMCNFSTNMEIPRAMFHHKPPQGPPPPPPPSCALQKKPLTSEKDPLGILDPIPSKPVNQNPVIINPTSFHSNVHSQVPMMNVSMPPAVVPLPSNLPLPTVKPGHMNHGSHVQRVQHSASTSLSPSPVTSPVHMMGTGIGRIEASPQRSRSSSTSSDHGNFMMPPVGPQATSSGIKVPPRSPRSTIGSPRPSMPSSPSTKSDGHHQYKDIPNPLIAGISNVLNTPSSAAFPTASAGSSSVKSQPGLLGMPLNQILNQHNAASFPASSLLSAAAKAQLANQNKLAGNNSSSSSNSGAVAGSGNTEGHSTLNTMFPPTANMLLPTGEGQSGRAALRDKLMSQQKDALRKRKQPPTTVLSLLRQSQMDSSAVPKPGPDLLRKQGQGSFPISSMSQLLQSMSCQSSHLSSNSTPGCGASNTALPCSANQLHFTDPSMNSSVLQNIPLRGEAVHCHNANTNFVHSNSPVPNHHLAGLINQIQASGNCGMLSQSGMALGNSLHPNPPQSRISTSSTPVIPNSIVSSYNQTSSEAGMVLLEKSTQRY

SEQ ID NO: 30740 - protein, 558 aa, Homo sapiens
MSNDGRSRNRDRRYDEVPSDLPYQDTTIRTHPTLHDSERAVSADPLPPPPLPLQPPFGPDFYSSDTEEPAIAPDLKPVRRFVPDSWKNFFRGKKKDPEWDKPVSDIRYISDGVECSPPASPARPNHRSPLNSCKDPYGGSEGTFSSRKEADAVFPRDPYGSLDRHTQTVRTYSEKVEEYNLRYSYMKSWAGLLRILGVVELLLGAGVFACVTAYIHKDSEWYNLFGYSQPYGMGGVGGLGSMYGGYYYTGPKTPFVLVVAGLAWITTIIILVLGMSMYYRTILLDSNWWPLTEFGINVALFILYMAAAIVYVNDTNRGGLCYYPLFNTPVNAVFCRVEGGQIAAMIFLFVTMIVYLISALVCLKLWRHEAARRHREYMEQQEINEPSLSSKRKMCEMATSGDRQRDSEVNFKELRTAKMKPELLSGHIPPGHIPKPIVMPDYVAKYPVIQTDDERERYKAVFQDQFSEYKELSAEVQAVLRKFDELDAVMSRLPHHSESRQEHERISRIHEEFKKKKNDPTFLEKKERCDYLKNKLSHIKQRIQEYDKVMNWDVQGYS

SEQ ID NO: 30741 - protein, 457 aa, Homo sapiens
MSNDGRSRNRDRRYDEVPSDLPYQDTTIRTHPTLHDSERAVSADPLPPPPLPLQPPFGPDFYSSDTEEPAIAPDLKPVRRFVPDSWKNFFRGKKKDPEWDKPVSDIRYISDGVECSPPASPARPNHRSPLNSCKDPYGGSEGTFSSRKEADAVFPRDPYGSLDRHTQTVRTYSEKVEEYNLRYSYMKSWAGLLRILGVVELLLGAGVFACVTAYIHKDSEWYNLFGYSQPYGMGGVGGLGSMYGGYYYTGPKTPFVLVVAGLAWITTIIILVLGMSMYYRTILLDSNWWPLTEFGINVALFILYMAAAIVYVNDTNRGGLCYYPLFNTPVNAVFCRVEGGQIAAMIFLFVTMIVYLISALVCLKLWRHEAARRHREYMEQQEINEPSLSSKRKMCEMATSGDRQRDSEVNFKELRTAKMKPELLSGHIPPRPANFFVFLVEMGFHRVSQDDLDLLTS

SEQ ID NO: 30742 - protein, 546 aa, Homo sapiens
MSNDGRSRNRDRRYDEVPSDLPYQDTTIRTHPTLHDSERAVSADPLPPPPLPLQPPFGPDFYSSDTEEPAIAPDLKPVRRFVPDSWKNFFRGKKKDPEWDKPVSDIRYISDGVECSPPASPARPNHRSPLNSCKDPYGGSEGTFSSRKEADAVFPRDPYGSLDRHTQTVRTYSEKVEEYNLRYSYMKSWAGLLRILGVVELLLGAGVFACVTAYIHKDSEWYNLFGYSQPYGMGGVGGLGSMYGGYYYTGPKTPFVLVVAGLAWITTIIILVLGMSMYYRTILLDSNWWPLTEFGINVALFILYMAAAIVYVNDTNRGGLCYYPLFNTPVNAVFCRVEGGQIAAMIFLFVTMIVYLISALVCLKLWRHEAARRHREYMEQQECEMATSGDRQRDSEVNFKELRTAKMKPELLSGHIPPGHIPKPIVMPDYVAKYPVIQTDDERERYKAVFQDQFSEYKELSAEVQAVLRKFDELDAVMSRLPHHSESRQEHERISRIHEEFKKKKNDPTFLEKKERCDYLKNKLSHIKQRIQEYDKVMNWDVQGYS

SEQ ID NO: 30743 - protein, 382 aa, Homo sapiens
MDGETAEEQGGPVPPPVAPGGPGLGGAPGGRREPKKYAVTDDYQLSKQVLGLGVNGKVLECFHRRTGQKCALKLLYDSPKARQEVDHHWQASGGPHIVCILDVYENMHHGKRCLLIIMECMEGGELFSRIQERGDQAFTEREAAEIMRDIGTAIQFLHSHNIAHRDVKPENLLYTSKEKDAVLKLTDFGFAKETTQNALQTPCYTPYYVAPEVLGPEKYDKSCDMWSLGVIMYILLCGFPPFYSNTGQAISPGMKRRIRLGQYGFPNPEWSEVSEDAKQLIRLLLKTDPTERLTITQFMNHPWINQSMVVPQTPLHTARVLQEDKDHWDEVKEEMTSALATMRVDYDQVKIKDLKTSNNRLLNKRRKKQAGSSSASQGCNNQ

SEQ ID NO: 30744 - protein, 241 aa, Homo sapiens
MNSGRPETMENLPALYTIFQGEVAMVTDYGAFIKIPGCRKQGLVHRTHMSSCRVDKPSEIVDVGDKVWVKLIGREMKNDRIKVSLSMKVVNQGTGKDLDPNNVIIEQEERRRRSFQDYTGQKITLEAVLNTTCKKCGCKGHFAKDCFMQPGGTKYSLIPDEEEEKEEAKSAEFEKPDPTRNPSRKRKKEKKKKKHRDRKSSDSDSSDSESDTGKRARHTSKDSKAAKKKKKKKKHKKKHKE

SEQ ID NO: 30745 - protein, 217 aa, Homo sapiens
MVTDYGAFIKIPGCRKQGLVHRTHMSSCRVDKPSEIVDVGDKVWVKLIGREMKNDRIKVSLSMKVVNQGTGKDLDPNNVIIEQEERRRRSFQDYTGQKITLEAVLNTTCKKCGCKGHFAKDCFMQPGGTKYSLIPDEEEEKEEAKSAEFEKPDPTRNPSRKRKKEKKKKKHRDRKSSDSDSSDSESDTGKRARHTSKDSKAAKKKKKKKKHKKKHKE

SEQ ID NO: 30746 - protein, 233 aa, Homo sapiens
MKQLIEDTEKNKVYVAMVTDYGAFIKIPGCRKQGLVHRTHMSSCRVDKPSEIVDVGDKVWVKLIGREMKNDRIKVSLSMKVVNQGTGKDLDPNNVIIEQEERRRRSFQDYTGQKITLEAVLNTTCKKCGCKGHFAKDCFMQPGGTKYSLIPDEEEEKEEAKSAEFEKPDPTRNPSRKRKKEKKKKKHRDRKSSDSDSSDSESDTGKRARHTSKDSKAAKKKKKKKKHKKKHKE

SEQ ID NO: 30747 - protein, 332 aa, Homo sapiens
MGAQFSKTAAKGEAAAERPGEAAVASSPSKANGQENGHVKVNGDASPAAAESGAKEELQANGSAPAADKEEPAAAGSGAASPSAAEKGEPAAAAAPEAGASPVEKEAPAEGEAAEPGSPTAAEGEAASAASSTSSPKAEDGATPSPSNETPKKKKKRFSFKKSFKLSGFSFKKNKKEAGEGGEAEAPAAEGGKDEAAGGAAAAAAEAGAASGEQAAAPGEEAAAGEEGAAGGDPQEAKPQEAAVAPEKPPASDETKAAEEPSKVEEKKAEEAGASAAACEAPSAAGPGAPPEQEAAPAEEPAAAAASSACAAPSQEAQPECSPEAPPAEAAE

SEQ ID NO: 30748 - protein, 719 aa, Homo sapiens
MALKDYALEKEKVKKFLQEFYQDDELGKKQFKYGNQLVRLAHREQVALYVDLDDVAEDDPELVDSICENARRYAKLFADAVQELLPQYKEREVVNKDVLDVYIEHRLMMEQRSRDPGMVRSPQNQYPAELMRRFELYFQGPSSNKPRVIREVRADSVGKLVTVRGIVTRVSEVKPKMVVATYTCDQCGAETYQPIQSPTFMPLIMCPSQECQTNRSGGRLYLQTRGSRFIKFQEMKMQEHSDQVPVGNIPRSITVLVEGENTRIAQPGDHVSVTGIFLPILRTGFRQVVQGLLSETYLEAHRIVKMNKSEDDESGAGELTREELRQIAEEDFYEKLAASIAPEIYGHEDVKKALLLLLVGGVDQSPRGMKIRGNINICLMGDPGVAKSQLLSYIDRLAPRSQYTTGRGSSGVGLTAAVLRDSVSGELTLEGGALVLADQGVCCIDEFDKMAEADRTAIHEVMEQQTISIAKAGILTTLNARCSILAAANPAYGRYNPRRSLEQNIQLPAALLSRFDLLWLIQDRPDRDNDLRLAQHITYVHQHSRQPPSQFEPLDMKLMRRYIAMCREKQPMVPESLADYITAAYVEMRREAWASKDATYTSARTLLAILRLSTALARLRMVDVVEKEDVNEAIRLMEMSKDSLLGDKGQTARTQRPADVIFATVRELVSGGRSVRFSEAEQRCVSRGFTPAQFQAALDEYEELNVWQVNASRTRITFV

SEQ ID NO: 30749 - protein, 389 aa, Homo sapiens
MALKDYALEKEKVKKFLQEFYQDDELGKKQFKYGNQLVRLAHREQVALYVDLDDVAEDDPELVDSICENARRYAKLFADAVQELLPQYKEREVVNKDVLDVYIEHRLMMEQRSRDPGMVRSPQNQYPAELMRRFELYFQGPSSNKPRVIREVRADSVGKLVTVRGIVTRVSEVKPKMVVATYTCDQCGAETYQPIQSPTFMPLIMCPSQECQTNRSGGRLYLQTRGSRFIKFQEMKMQEHSDQVPVGNIPRSITVLVEGENTRIAQPGDHVSVTGIFLPILRTGFRQVVQGLLSETYLEAHRIVKMNKSEDDESGAGELTREELRQIADVIFATVRELVSGGRSVRFSEAEQRCVSRGFTPAQFQAALDEYEELNVWQVNASRTRITFV

SEQ ID NO: 30750 - protein, 543 aa, Homo sapiens
MVVATYTCDQCGAETYQPIQSPTFMPLIMCPSQECQTNRSGGRLYLQTRGSRFIKFQEMKMQEHSDQVPVGNIPRSITVLVEGENTRIAQPGDHVSVTGIFLPILRTGFRQVVQGLLSETYLEAHRIVKMNKSEDDESGAGELTREELRQIAEEDFYEKLAASIAPEIYGHEDVKKALLLLLVGGVDQSPRGMKIRGNINICLMGDPGVAKSQLLSYIDRLAPRSQYTTGRGSSGVGLTAAVLRDSVSGELTLEGGALVLADQGVCCIDEFDKMAEADRTAIHEVMEQQTISIAKAGILTTLNARCSILAAANPAYGRYNPRRSLEQNIQLPAALLSRFDLLWLIQDRPDRDNDLRLAQHITYVHQHSRQPPSQFEPLDMKLMRRYIAMCREKQPMVPESLADYITAAYVEMRREAWASKDATYTSARTLLAILRLSTALARLRMVDVVEKEDVNEAIRLMEMSKDSLLGDKGQTARTQRPADVIFATVRELVSGGRSVRFSEAEQRCVSRGFTPAQFQAALDEYEELNVWQVNASRTRITFV

SEQ ID NO: 30751 - protein, 1328 aa, Homo sapiens
MSSMPKPERHAESLLDICHDTNSSPTDLMTVTKNQNIILQSISRSEEFDQDGDCSHSTLVNEEEDPSGGRQDWQPRTEGVEITVTFPRDVSPPQEMSQEDLKEKNLINSSLQEWAQAHAVSHPNEIETVELRKKKLTMRPLVLQKEESSRELCNVNLGFLLPRSCLELNISKSVTREDAPHFLKEQQRKSEEFSTSHMKYSGRSIKFLLPPLSLLPTRSGVLTIPQNHKFPKEKERNIPSLTSFVPKLSVSVRQSDELSPSNEPPGALVKSLMDPTLRSSDGFIWSRNMCSFPKTNHHRQCLEKEENWKSKEIEECNKIEITHFEKGQSLVSFENLKEGNIPAVREEDIDCHGSKTRKPEEENSQYLSSRKNESSVAKNYEQDPEIVCTIPSKFQETQHSEITPSQDEEMRNNKAASKRVSLHKNEAMEPNNILEECTVLKSLSSVVFDDPIDKLPEGCSSMETNIKISIAERAKPEMSRMVPLIHITFPVDGSPKEPVIAKPSLQTRKGTIHNNHSVNIPVHQENDKHKMNSHRSKLDSKTKTSKKTPQNFVISTEGPIKPTMHKTSIKTQIFPALGLVDPRPWQLPRFQKKMPQIAKKQSTHRTQKPKKQSFPCICKNPGTQKSCVPLSVQPTEPRLNYLDLKYSDMFKEINSTANGPGIYEMFGTPVYCHVRETERDENTYYREICSAPSGRRITNKCRSSHSERKSNIRTRLSQKKTHMKCPKTSFGIKQEHKVLISKEKSSKAVHSNLHDIENGDGISEPDWQIKSSGNEFLSSKDEIHPMNLAQTPEQSMKQNEFPPVSDLSIVEEVSMEESTGDRDISNNQILTTSLRDLQELEELHHQIPFIPSEDSWAVPSEKNSNKYVQQEKQNTASLSKVNASRILTNDLEFDSVSDHSKTLTNFSFQAKQESASSQTYQYWVHYLDHDSLANKSITYQMFGKTLSGTNSISQEIMDSVNNEELTDELLGCLAAELLALDEKDNNSCQKMANETDPENLNLVLRWRGSTPKEMGRETTKVKIQRHSSGLRIYDREEKFLISNEKKIFSENSLKSEEPILWTKGEILGKGAYGTVYCGLTSQGQLIAVKQVALDTSNKLAAEKEYRKLQEEVDLLKALKHVNIVAYLGTCLQENTVSIFMEFVPGGSISSIINRFGPLPEMVFCKYTKQILQGVAYLHENCVVHRDIKGNNVMLMPTGIIKLIDFGCARRLAWAGLNGTHSDMLKSMHGTPYWMAPEVINESGYGRKSDIWSIGCTVFEMATGKPPLASMDRMAAMFYIGAHRGLMPPLPDHFSENAADFVRMCLTRDQHERPSALQLLKHSFLERSH

SEQ ID NO: 30752 - protein, 1215 aa, Homo sapiens
MSSMPKPERHAESLLDICHDTNSSPTDLMTVTKNQNIILQSISRSEEFDQDGDCSHSTLVNEEEDPSGGRQDWQPRTEEFSTSHMKYSGRSIKFLLPPLSLLPTRSGVLTIPQNHKFPKEKERNIPSLTSFVPKLSVSVRQSDELSPSNEPPGALVKSLMDPTLRSSDGFIWSRNMCSFPKTNHHRQCLEKEENWKSKEIEECNKIEITHFEKGQSLVSFENLKEGNIPAVREEDIDCHGSKTRKPEEENSQYLSSRKNESSVAKNYEQDPEIVCTIPSKFQETQHSEITPSQDEEMRNNKAASKRVSLHKNEAMEPNNILEECTVLKSLSSVVFDDPIDKLPEGCSSMETNIKISIAERAKPEMSRMVPLIHITFPVDGSPKEPVIAKPSLQTRKGTIHNNHSVNIPVHQENDKHKMNSHRSKLDSKTKTSKKTPQNFVISTEGPIKPTMHKTSIKTQIFPALGLVDPRPWQLPRFQKKMPQIAKKQSTHRTQKPKKQSFPCICKNPGTQKSCVPLSVQPTEPRLNYLDLKYSDMFKEINSTANGPGIYEMFGTPVYCHVRETERDENTYYREICSAPSGRRITNKCRSSHSERKSNIRTRLSQKKTHMKCPKTSFGIKQEHKVLISKEKSSKAVHSNLHDIENGDGISEPDWQIKSSGNEFLSSKDEIHPMNLAQTPEQSMKQNEFPPVSDLSIVEEVSMEESTGDRDISNNQILTTSLRDLQELEELHHQIPFIPSEDSWAVPSEKNSNKYVQQEKQNTASLSKVNASRILTNDLEFDSVSDHSKTLTNFSFQAKQESASSQTYQYWVHYLDHDSLANKSITYQMFGKTLSGTNSISQEIMDSVNNEELTDELLGCLAAELLALDEKDNNSCQKMANETDPENLNLVLRWRGSTPKEMGRETTKVKIQRHSSGLRIYDREEKFLISNEKKIFSENSLKSEEPILWTKGEILGKGAYGTVYCGLTSQGQLIAVKQVALDTSNKLAAEKEYRKLQEEVDLLKALKHVNIVAYLGTCLQENTVSIFMEFVPGGSISSIINRFGPLPEMVFCKYTKQILQGVAYLHENCVVHRDIKGNNVMLMPTGIIKLIDFGCARRLAWAGLNGTHSDMLKSMHGTPYWMAPEVINESGYGRKSDIWSIGCTVFEMATGKPPLASMDRMAAMFYIGAHRGLMPPLPDHFSENAADFVRMCLTRDQHERPSALQLLKHSFLERSH

SEQ ID NO: 30753 - protein, 462 aa, Homo sapiens
MSSMPKPERHAESLLDICHDTNSSPTDLMTVTKNQNIILQSISRSEEFDQDGDCSHSTLVNEEEDPSGGRQDWQPRTEGVEITVTFPRDVSPPQEMSQEDLKEKNLINSSLQEWAQAHAVSHPNEIETVELRKKKLTMRPLVLQKEESSRELCNVNLGFLLPRSCLELNISKSVTREDAPHFLKEQQRKSEEFSTSHMKYSGRSIKRHSSGLRIYDREEKFLISNEKKIFSENSLKSEEPILWTKVDLLKALKHVNIVAYLGTCLQENTVSIFMEFVPGGSISSIINRFGPLPEMVFCKYTKQILQGVAYLHENCVVHRDIKGNNVMLMPTGIIKLIDFGCARRLAWAGLNGTHSDMLKSMHGTPYWMAPEVINESGYGRKSDIWSIGCTVFEMATGKPPLASMDRMAAMFYIGAHRGLMPPLPDHFSENAADFVRMCLTRDQHERPSALQLLKHSFLERSH

SEQ ID NO: 30754 - protein, 510 aa, Homo sapiens
MSSMPKPERHAESLLDICHDTNSSPTDLMTVTKNQNIILQSISRSEEFDQDGDCSHSTLVNEEEDPSGGRQDWQPRTEGVEITVTFPRDVSPPQEMSQEDLKEKNLINSSLQEWAQAHAVSHPNEIETVELRKKKLTMRPLVLQKEESSRELCNVNLGFLLPRSCLELNISKSVTREDAPHFLKEQQRKSEEFSTSHMKYSGRSIKRHSSGLRIYDREEKFLISNEKKIFSENSLKSEEPILWTKGEILGKGAYGTVYCGLTSQGQLIAVKQVALDTSNKLAAEKEYRKLQEEVDLLKALKHVNIVAYLGTCLQENTVSIFMEFVPGGSISSIINRFGPLPEMVFCKYTKQILQGVAYLHENCVVHRDIKGNNVMLMPTGIIKLIDFGCARRLAWAGLNGTHSDMLKSMHGTPYWMAPEVINESGYGRKSDIWSIGCTVFEMATGKPPLASMDRMAAMFYIGAHRGLMPPLPDHFSENAADFVRMCLTRDQHERPSALQLLKHSFLERSH

SEQ ID NO: 30755 - protein, 460 aa, Homo sapiens
MSSMPKPERHAESLLDICHDTNSSPTDLMTVTKNQNIILQSISRSEEFDQDGDCSHSTLVNEEEDPSGGRQDWQPRTEGVEITVTFPRDVSPPQEMSQEDLKEKNLINSSLQEWAQAHAVSHPNEIETVELRKKKLTMRPLVLQKEESSRELCNVNLGFLLPRSCLELNISKSVTREDAPHFLKEQQRKSEEFSTSHMKYSGRSIKVYCGLTSQGQLIAVKQVALDTSNKLAAEKEYRKLQEEVDLLKALKHVNIVAYLGTCLQENTVSIFMEFVPGGSISSIINRFGPLPEMVFCKYTKQILQGVAYLHENCVVHRDIKGNNVMLMPTGIIKLIDFGCARRLAWAGLNGTHSDMLKSMHGTPYWMAPEVINESGYGRKSDIWSIGCTVFEMATGKPPLASMDRMAAMFYIGAHRGLMPPLPDHFSENAADFVRMCLTRDQHERPSALQLLKHSFLERSH

SEQ ID NO: 30756 - protein, 313 aa, Homo sapiens
MASFRKLTLSEKVPPNHPSRKKVNFLDMSLDDIIIYKELEGTNAEEEKNKRQNHSKKESPSRQQSKAHRHRHRRGYSRCRSNSEEGNHDKKPSQKPSGFKSGQHPLNGQPLIEQEKCSDNYEAQAEKNQGQSEGNQHQSEGNPDKSEESQGQPEENHHSERSRNHLERSLSQSDRSQGQLKRHHPQYERSHGQYKRSHGQSERSHGHSERSHGHSERSHGHSERSHGHSKRSRSQGDLVDTQSDLIATQRDLIATQKDLIATQRDLIATQRDLIVTQRDLVATERDLINQSGRSHGQSERHQRYSTGKNTITT

SEQ ID NO: 30757 - protein, 231 aa, Homo sapiens
MLKKKRIKDRTIVKRNRLQDSNQKLIDIAIGEEKCSDNYEAQAEKNQGQSEGNQHQSEGNPDKSEESQGQPEENHHSERSRNHLERSLSQSDRSQGQLKRHHPQYERSHGQYKRSHGQSERSHGHSERSHGHSERSHGHSERSHGHSKRSRSQGDLVDTQSDLIATQRDLIATQKDLIATQRDLIATQRDLIVTQRDLVATERDLINQSGRSHGQSERHQRYSTGKNTITT

SEQ ID NO: 30758 - protein, 117 aa, Homo sapiens
MTCSPLLLTLLIHCTGSWAQSVLTQPPSVSAAPGQKVTISCSGSSSNIGNNYVSWYQQLPGTAPKLLIYDNNKRPSGIPDRFSGSKSGTSATLGITGLQTGDEADYYCGTWDSSLSA

SEQ ID NO: 30759 - protein, 1608 aa, Homo sapiens
MREAAAALVPPPAFAVTPAAAMEEPPPPPPPPPPPPEPETESEPECCLAARQEGTLGDSACKSPESDLEDFSDETNTENLYGTSPPSTPRQMKRMSTKHQRNNVGRPASRSNLKEKMNAPNQPPHKDTGKTVENVEEYSYKQEKKIRAALRTTERDRKKNVQCSFMLDSVGGSLPKKSIPDVDLNKPYLSLGCSNAKLPVSVPMPIARPARQTSRTDCPADRLKFFETLRLLLKLTSVSKKKDREQRGQENTSGFWLNRSNELIWLELQAWHAGRTINDQDFFLYTARQAIPDIINEILTFKVDYGSFAFVRDRAGFNGTSVEGQCKATPGTKIVGYSTHHEHLQRQRVSFEQVKRIMELLEYIEALYPSLQALQKDYEKYAAKDFQDRVQALCLWLNITKDLNQKLRIMGTVLGIKNLSDIGWPVFEIPSPRPSKGNEPEYEGDDTEGELKELESSTDESEEEQISDPRVPEIRQPIDNSFDIQSRDCISKKLERLESEDDSLGWGAPDWSTEAGFSRHCLTSIYRPFVDKALKQMGLRKLILRLHKLMDGSLQRARIALVKNDRPVEFSEFPDPMWGSDYVQLSRTPPSSEEKCSAVSWEELKAMDLPSFEPAFLVLCRVLLNVIHECLKLRLEQRPAGEPSLLSIKQLVRECKEVLKGGLLMKQYYQFMLQEVLEDLEKPDCNIDAFEEDLHKMLMVYFDYMRSWIQMLQQLPQASHSLKNLLEEEWNFTKEITHYIRGGEAQAGKLFCDIAGMLLKSTGSFLEFGLQESCAEFWTSADDSSASDEIRRSVIEISRALKELFHEARERASKALGFAKMLRKDLEIAAEFRLSAPVRDLLDVLKSKQYVKVQIPGLENLQMFVPDTLAEEKSIILQLLNAAAGKDCSKDSDDVLIDAYLLLTKHGDRARDSEDSWGTWEAQPVKVVPQVETVDTLRSMQVDNLLLVVMQSAHLTIQRKAFQQSIEGLMTLCQEQTSSQPVIAKALQQLKNDALELCNRISNAIDRVDHMFTSEFDAEVDESESVTLQQYYREAMIQGYNFGFEYHKEVVRLMSGEFRQKIGDKYISFARKWMNYVLTKCESGRGTRPRWATQGFDFLQAIEPAFISALPEDDFLSLQALMNECIGHVIGKPHSPVTGLYLAIHRNSPRPMKVPRCHSDPPNPHLIIPTPEGFSTRSMPSDARSHGSPAAAAAAAAAAVAASRPSPSGGDSVLPKSISSAHDTRGSSVPENDRLASIAAELQFRSLSRHSSPTEERDEPAYPRGDSSGSTRRSWELRTLISQSKDTASKLGPIEAIQKSVRLFEEKRYREMRRKNIIGQVCDTPKSYDNVMHVGLRKVTFKWQRGNKIGEGQYGKVYTCISVDTGELMAMKEIRFQPNDHKTIKETADELKIFEGIKHPNLVRYFGVELHREEMYIFMEYCDEGTLEEVSRLGLQEHVIRLYSKQITIAINVLHEHGIVHRDIKGANIFLTSSGLIKLGDFGCSVKLKNNAQTMPGEVNSTLGTAAYMAPEVITRAKGEGHGRAADIWSLGCVVIEMVTGKRPWHEYEHNFQIMYKVGMGHKPPIPERLSPEGKDFLSHCLESDPKMRWTASQLLDHSFVKVCTDEE

SEQ ID NO: 30760 - protein, 1558 aa, Homo sapiens
MREAAAALVPPPAFAVTPAAAMEEPPPPPPPPPPPPEPETESEPECCLAARQEGTLGDSACKSPESDLEDFSDETNTENLYGTSPPSTPRQMKRMSTKHQRNNVGRPASRSNLKEKMNAPNQPPHKDTGKTVENVEEYSYKQEKKIRAALRTTERDRKKNVQCSFMLDSVGGSLPKKSIPDVDLNKPYLSLGCSNAKLPVSVPMPIARPARQTSRTDCPADRLKFFETLRLLLKLTSVSKKKDREQRGQENTSGFWLNRSNELIWLELQAWHAGRTINDQDFFLYTARQAIPDIINEILTFKVDYGSFAFVRDRAGFNGTSVEGQCKATPGTKIVGYSTHHEHLQRQRVSFEQVKRIMELLEYIEALYPSLQALQKDYEKYAAKDFQDRVQALCLWLNITKDLNQKLRIMGTVLGIKNLSDIGWPVFEIPSPRPSKGNEPEYEGDDTEGELKELESSTDESEEEQISDPRVPEIRQPIDNSFDIQSRDCISKKLERLESEDDSLGWGAPDWSTEAGFSRHCLTSIYRPFVDKALKQMGLRKLILRLHKLMDGSLQRARIALVKNDRPVEFSEFPDPMWGSDYVQLSRTPPSSEEKCSAVSWEELKAMDLPSFEPAFLVLCRVLLNVIHECLKLRLEQRPAGEPSLLSIKQLVRECKEVLKGGLLMKQYYQFMLQEVLEDLEKPDCNIDAFEEDLHKMLMVYFDYMRSWIQMLQQLPQASHSLKNLLEEEWNFTKEITHYIRGGEAQAGKLFCDIAGMLLKSTGSFLEFGLQESCAEFWTSADDSSASDEIRRSVIEISRALKELFHEARERASKALGFAKMLRKDLEIAAEFRLSAPVRDLLDVLKSKQYVKVQIPGLENLQMFVPDTLAEEKSIILQLLNAAAGKDCSKDSDDVLIDAYLLLTKHGDRARDSEDSWGTWEAQPVKVVPQVETVDTLRSMQVDNLLLVVMQSAHLTIQRKAFQQSIEGLMTLCQEQTSSQPVIAKALQQLKNDALELCNRISNAIDRVDHMFTSEFDAEVDESESVTLQQYYREAMIQGYNFGFEYHKEVVRLMSGEFRQKIGDKYISFARKWMNYVLTKCESGRGTRPRWATQGFDFLQAIEPAFISALPEDDFLSLQALMNECIGHVIGKPHSPVTGLYLAIHRNSPRPMKVPRCHSDPPNPHLIIPTPEGFRGSSVPENDRLASIAAELQFRSLSRHSSPTEERDEPAYPRGDSSGSTRRSWELRTLISQSKDTASKLGPIEAIQKSVRLFEEKRYREMRRKNIIGQVCDTPKSYDNVMHVGLRKVTFKWQRGNKIGEGQYGKVYTCISVDTGELMAMKEIRFQPNDHKTIKETADELKIFEGIKHPNLVRYFGVELHREEMYIFMEYCDEGTLEEVSRLGLQEHVIRLYSKQITIAINVLHEHGIVHRDIKGANIFLTSSGLIKLGDFGCSVKLKNNAQTMPGEVNSTLGTAAYMAPEVITRAKGEGHGRAADIWSLGCVVIEMVTGKRPWHEYEHNFQIMYKVGMGHKPPIPERLSPEGKDFLSHCLESDPKMRWTASQLLDHSFVKVCTDEE

SEQ ID NO: 30761 - protein, 118 aa, Homo sapiens
MAWSPLLLTLLAHCTGSWAQSVLTQPPSVSGAPGQRVTISCTGSSSNIGAGYDVHWYQQLPGTAPKLLIYGNSNRPSGVPDRFSGSKSGTSASLAITGLQAEDEADYYCQSYDSSLSG

SEQ ID NO: 30762 - protein, 311 aa, Homo sapiens
MRGAARAAWGRAGQPWPRPPAPGPPPPPLPLLLLLLAGLLGGAGAQYSSDRCSWKGSGLTHEAHRKEVEQVYLRCAAGAVEWMYPTGALIVNLRPNTFSPARHLTVCIRSFTDSSGANIYLEKTGELRLLVPDGDGRPGRVQCFGLEQGGLFVEATPQQDIGRRTTGFQYELVRRHRASDLHELSAPCRPCSDTEVLLAVCTSDFAVRGSIQQVTHEPERQDSAIHLRVSRLYRQKSRVFEPVPEGDGHWQGRVRTLLECGVRPGHGDFLFTGHMHFGEARLGCAPRFKDFQRMYRDAQERGLNPCEVGTD

SEQ ID NO: 30763 - protein, 229 aa, Homo sapiens
MYPTGALIVNLRPNTFSPARHLTVCIRSFTDSSGANIYLEKTGELRLLVPDGDGRPGRVQCFGLEQGGLFVEATPQQDIGRRTTGFQYELVRRHRASDLHELSAPCRPCSDTEVLLAVCTSDFAVRGSIQQVTHEPERQDSAIHLRVSRLYRQKSRVFEPVPEGDGHWQGRVRTLLECGVRPGHGDFLFTGHMHFGEARLGCAPRFKDFQRMYRDAQERGLNPCEVGTD

SEQ ID NO: 30764 - protein, 427 aa, Homo sapiens
MSRSKRDNNFYSVEIGDSTFTVLKRYQNLKPIGSGAQGIVCAAYDAILERNVAIKKLSRPFQNQTHAKRAYRELVLMKCVNHKNIIGLLNVFTPQKSLEEFQDVYIVMELMDANLCQVIQMELDHERMSYLLYQMLCGIKHLHSAGIIHRDLKPSNIVVKSDCTLKILDFGLARTAGTSFMMTPYVVTRYYRAPEVILGMGYKENVDLWSVGCIMGEMVCHKILFPGRDYIDQWNKVIEQLGTPCPEFMKKLQPTVRTYVENRPKYAGYSFEKLFPDVLFPADSEHNKLKASQARDLLSKMLVIDASKRISVDEALQHPYINVWYDPSEAEAPPPKIPDKQLDEREHTIEEWKELIYKEVMDLEERTKNGVIRGQPSPLGAAVINGSQHPSSSSSVNDVSSMSTDPTLASDTDSSLEAAAGPLGCCR

SEQ ID NO: 30765 - protein, 384 aa, Homo sapiens
MSRSKRDNNFYSVEIGDSTFTVLKRYQNLKPIGSGAQGIVCAAYDAILERNVAIKKLSRPFQNQTHAKRAYRELVLMKCVNHKNIIGLLNVFTPQKSLEEFQDVYIVMELMDANLCQVIQMELDHERMSYLLYQMLCGIKHLHSAGIIHRDLKPSNIVVKSDCTLKILDFGLARTAGTSFMMTPYVVTRYYRAPEVILGMGYKENVDLWSVGCIMGEMVCHKILFPGRDYIDQWNKVIEQLGTPCPEFMKKLQPTVRTYVENRPKYAGYSFEKLFPDVLFPADSEHNKLKASQARDLLSKMLVIDASKRISVDEALQHPYINVWYDPSEAEAPPPKIPDKQLDEREHTIEEWKELIYKEVMDLEERTKNGVIRGQPSPLAQVQQ

SEQ ID NO: 30766 - protein, 384 aa, Homo sapiens
MSRSKRDNNFYSVEIGDSTFTVLKRYQNLKPIGSGAQGIVCAAYDAILERNVAIKKLSRPFQNQTHAKRAYRELVLMKCVNHKNIIGLLNVFTPQKSLEEFQDVYIVMELMDANLCQVIQMELDHERMSYLLYQMLCGIKHLHSAGIIHRDLKPSNIVVKSDCTLKILDFGLARTAGTSFMMTPYVVTRYYRAPEVILGMGYKENVDIWSVGCIMGEMIKGGVLFPGTDHIDQWNKVIEQLGTPCPEFMKKLQPTVRTYVENRPKYAGYSFEKLFPDVLFPADSEHNKLKASQARDLLSKMLVIDASKRISVDEALQHPYINVWYDPSEAEAPPPKIPDKQLDEREHTIEEWKELIYKEVMDLEERTKNGVIRGQPSPLAQVQQ

SEQ ID NO: 30767 - protein, 427 aa, Homo sapiens
MSRSKRDNNFYSVEIGDSTFTVLKRYQNLKPIGSGAQGIVCAAYDAILERNVAIKKLSRPFQNQTHAKRAYRELVLMKCVNHKNIIGLLNVFTPQKSLEEFQDVYIVMELMDANLCQVIQMELDHERMSYLLYQMLCGIKHLHSAGIIHRDLKPSNIVVKSDCTLKILDFGLARTAGTSFMMTPYVVTRYYRAPEVILGMGYKENVDIWSVGCIMGEMIKGGVLFPGTDHIDQWNKVIEQLGTPCPEFMKKLQPTVRTYVENRPKYAGYSFEKLFPDVLFPADSEHNKLKASQARDLLSKMLVIDASKRISVDEALQHPYINVWYDPSEAEAPPPKIPDKQLDEREHTIEEWKELIYKEVMDLEERTKNGVIRGQPSPLGAAVINGSQHPSSSSSVNDVSSMSTDPTLASDTDSSLEAAAGPLGCCR

SEQ ID NO: 30768 - protein, 308 aa, Homo sapiens
MSRSKRDNNFYSVEIGDSTFTVLKRYQNLKPIGSGAQGIVCAAYDAILERNVAIKKLSRPFQNQTHAKRAYRELVLMKCVNHKNIIGLLNVFTPQKSLEEFQDVYIVMELMDANLCQVIQMELDHERMSYLLYQMLCGIKHLHSAGIIHRDLKPSNIVVKSDCTLKILDFGLARTAGTSFMMTPYVVTRYYRAPEVILGMGYKENADSEHNKLKASQARDLLSKMLVIDASKRISVDEALQHPYINVWYDPSEAEAPPPKIPDKQLDEREHTIEEWKELIYKEVMDLEERTKNGVIRGQPSPLAQVQQ

SEQ ID NO: 30769 - protein, 117 aa, Homo sapiens
MPSCSCALMAPCGPAAGPAAVERTQQVARGEPGSARGQLQVSPEMSITHKEKENAHLKEILLFVNAEAFSQPQPHSAPVCEGQQLTGKFSTSVLTRAGGDASPCSWERLLCYGWSHC

SEQ ID NO: 30770 - protein, 115 aa, Homo sapiens
MSGEPGQTSVAPPPEEVEPGSGVRIVVEYCEPCGFEATYLELASAVKEQYPGIEIESRLGGTGAFEIEINGQLVFSKLENGGFPYEKDLIEAIRRASNGETLEKITNSRPPCVIL

SEQ ID NO: 30771 - protein, 222 aa, Homo sapiens
MGEPSREEYKIQSFDAETQQLLKTALKDPGAVDLEKVANVIVDHSLQDCVFSKEAGRMCYAIIQAESKQAGQSVFRRGLLNRLQQEYQAREQLRARSLQGWVCYVTFICNIFDYLRVNNMPMMALVNPVYDCLFRLAQPDSLSKEEEVDCLVLQLHRVGEQLEKMNGQRMDELFVLIRDGFLLPTGLSSLAQLLLLEIIEFRAAGWKTTPAAHKYYYSEVSD

SEQ ID NO: 30772 - protein, 256 aa, Homo sapiens
MGEPSREEYKIQSFDAETQQLLKTALKVACFETEDGEYSVCQRSYSNCSRLMPSRCNTQYRDPGAVDLEKVANVIVDHSLQDCVFSKEAGRMCYAIIQAESKQAGQSVFRRGLLNRLQQEYQAREQLRARSLQGWVCYVTFICNIFDYLRVNNMPMMALVNPVYDCLFRLAQPDSLSKEEEVDCLVLQLHRVGEQLEKMNGQRMDELFVLIRDGFLLPTGLSSLAQLLLLEIIEFRAAGWKTTPAAHKYYYSEVSD

SEQ ID NO: 30773 - protein, 263 aa, Homo sapiens
MGEPSREEYKIQSFDAETQQLLKTALKAPSLECTVACFETEDGEYSVCQRSYSNCSRLMPSRCNTQYRDPGAVDLEKVANVIVDHSLQDCVFSKEAGRMCYAIIQAESKQAGQSVFRRGLLNRLQQEYQAREQLRARSLQGWVCYVTFICNIFDYLRVNNMPMMALVNPVYDCLFRLAQPDSLSKEEEVDCLVLQLHRVGEQLEKMNGQRMDELFVLIRDGFLLPTGLSSLAQLLLLEIIEFRAAGWKTTPAAHKYYYSEVSD

SEQ ID NO: 30774 - protein, 1412 aa, Homo sapiens
MAKFGVHRILLLAISLTKCLESTKLLADLKKCGDLECEALINRVSAMRDYRGPDCRYLNFTKGEEISVYVKLAGEREDLWAGSKGKEFGYFPRDAVQIEEVFISEEIQMSTKESDFLCLLGVSYTFDNEDSELNGDYGENIYPYEEDKDEKSSIYESDFQIEPGFYATYESTLFEDQVPALEAPEDIGSTSESKDWEEVVVESMEQDRIPEVHVPPSSAVSGVKEWFGLGGEQAEEKAFESVIEPVQESSFRSRKIAVEDENDLEELNNGEPQTEHQQESESEIDSVPKTQSELASESEHIPKPQSTGWFGGGFTSYLGFGDEDTGLELIAEESNPPLQDFPNSISSDKEATVPCTEILTEKKDTITNDSLSLKPSWFDFGFAILGFAYAKEDKIMLDDRKNEEDGGADEHEHPLTSELDPEKEQEIETIKIIETEDQIDKKPVSEKTDESDTIPYLKKFLYNFDNPWNFQNIPKETELPFPKQILDQNNVIENEETGEFSIDNYPTDNTKVMIFKSSYSLSDMVSNIELPTRIHEEVYFEPSSSKDSDENSKPSVDTEGPALVEIDRSVENTLLNSQMVSTDNSLSSQNYISQKEDASEFQILKYLFQIDVYDFMNSAFSPIVILTERVVAALPEGMRPDSNLYGFPWELVICAAVVGFFAVLFFLWRSFRSVRSRLYVGREKKLALMLSGLIEEKSKLLEKFSLVQKEYEGYEVESSLKDASFEKEATEAQSLEATCEKLNRSNSELEDEILCLEKELKEEKSKHSEQDELMADISKRIQSLEDESKSLKSQVAEAKMTFKIFQMNEERLKIAIKDALNENSQLQESQKQLLQEAEVWKEQVSELNKQKVTFEDSKVHAEQVLNDKESHIKTLTERLLKMKDWAAMLGEDITDDDNLELEMNSESENGAYLDNPPKGALKKLIHAAKLNASLKTLEGERNQIYIQLSEVDKTKEELTEHIKNLQTEQASLQSENTHFENENQKLQQKLKVMTELYQENEMKLHRKLTVEENYRLEKEEKLSKVDEKISHATEELETYRKRAKDLEEELERTIHSYQGQIISHEKKAHDNWLAARNAERNLNDLRKENAHNRQKLTETELKFELLEKDPYALDVPNTAFGREHSPYGPSPLGWPSSETRAFLSPPTLLEGPLRLSPLLPGGGGRGSRGPGNPLDHQITNERGESSCDRLTDPHRAPSDTGSLSPPWDQDRRMMFPPPGQSYPDSALPPQRQDRFCSNSGRLSGPAELRSFNMPSLDKMDGSMPSEMESSRNDTKDDLGNLNVPDSSLPAENEATGPGFVPPPLAPIRGPLFPVDARGPFLRRGPPFPPPPPGAMFGASRDYFPPGDFPGPPPAPFAMRNVYPPRGFPPYLPPRPGFFPPPPHSEGRSEFPSGLIPPSNEPATEHPEPQQET

SEQ ID NO: 30775 - protein, 654 aa, Homo sapiens
MAKFGVHRILLLAISLTKCLESTKLLADLKKCGDLECEALINRVSAMRDYRGPDCRYLNFTKGEEISVYVKLAGEREDLWAGSKGKEFGYFPRDAVQIEEVFISEEIQMSTKESDFLCLLGVSYTFDNEDSELNGDYGENIYPYEEDKDEKSSIYESDFQIEPGFYATYESTLFEDQVPALEAPEDIGSTSESKDWEEVVVESMEQDRIPEVHVPPSSAVSGVKEWFGLGGEQAEEKAFESVIEPVQESSFRSRKIAVEDENDLEELNNGEPQTEHQQESESEIDSVPKTQSELASESEHIPKPQSTGWFGGGFTSYLGFGDEDTGLELIAEESNPPLQDFPNSISSDKEATVPCTEILTEKKDTITNDSLSLKPSWFDFGFAILGFAYAKEDKIMLDDRKNEEDGGADEHEHPLTSELDPEKEQEIETIKIIETEDQIDKKPVSEKTDESDTIPYLKKFLYNFDNPWNFQNIPKETELPFPKQILDQNNVIENEETGEFSIDNYPTDNTKVMIFKSSYSLSDMVSNIELPTRIHEEVYFEPSSSKDSDENSKPSVDTEGPALVEIDRSVENTLLNSQMVSTDNSLSSQNYISQKEDASEFQILKYLFQIDVYDFMNSAFSPIVILTERVSLPFKPFAIILPILLNIRVATKYV

SEQ ID NO: 30776 - protein, 732 aa, Homo sapiens
MRPDSNLYGFPWELVICAAVVGFFAVLFFLWRSFRSVRSRLYVGREKKLALMLSGLIEEKSKLLEKFSLVQKEYEGYEVESSLKDASFEKEATEAQSLEATCEKLNRSNSELEDEILCLEKELKEEKSKHSEQDELMADISKRIQSLEDESKSLKSQVAEAKMTFKIFQMNEERLKIAIKDALNENSQLQESQKQLLQEAEVWKEQVSELNKQKVTFEDSKVHAEQVLNDKESHIKTLTERLLKMKDWAAMLGEDITDDDNLELEMNSESENGAYLDNPPKGALKKLIHAAKLNASLKTLEGERNQIYIQLSEVDKTKEELTEHIKNLQTEQASLQSENTHFENENQKLQQKLKVMTELYQENEMKLHRKLTVEENYRLEKEEKLSKVDEKISHATEELETYRKRAKDLEEELERTIHSYQGQIISHEKKAHDNWLAARNAERNLNDLRKENAHNRQKLTETELKFELLEKDPYALDVPNTAFGRGSRGPGNPLDHQITNERGESSCDRLTDPHRAPSDTGSLSPPWDQDRRMMFPPPGQSYPDSALPPQRQDRFCSNSGRLSGPAELRSFNMPSLDKMDGSMPSEMESSRNDTKDDLGNLNVPDSSLPAENEATGPGFVPPPLAPIRGPLFPVDARGPFLRRGPPFPPPPPGAMFGASRDYFPPGDFPGPPPAPFAMRNVYPPRGFPPYLPPRPGFFPPPPHSEGRSEFPSGLIPPSNEPATEHPEPQQET

SEQ ID NO: 30777 - protein, 672 aa, Homo sapiens
MELKSPEEEVVAALPEGMRPDSNLYGFPWELVICAAVVGFFAVLFFLWRSFRSVRSRLYVGREKKLALMLSGLIEEKSKLLEKFSLVQKEATCEKLNRSNSELEDEILCLEKELKEEKSKHSEQDELMADISKRIQSLEDESKSLKSQVAEAKMTFKIFQMNEERLKIAIKDALNENSQLQESQKQLLQEAEVWKEQVSELNKQKVTFEDSKVHAEQVLNDKESHIKTLTERLLKMKDWAAMLGEDITDDDNLELEMNSESENGAYLDNPPKGALKKLIHAAKLNASLKTLEGERNQIYIQLSEVDKTKEELTEHIKNLQTEQASLQSENTHFENENQKLQQKLKVMTELYQENEMKLHRKLTVEENYRLEKEEKLSKVDEKISHATEELETYRKRAKDLEEELERTIHSYQGQIISHEKKAHDNWLAARNAERNLNDLRKENAHNRQKLTETELKFELLEKDPYALDVPNTAFGREHSPYGPSPLGWPSSETRAFLSPPTLLEGPLRLSPLLPGGGGRGSRGPGNPLDHQITNERGESSCDRLTDPHRAPSDTGSLSPPWDQDRRMMFPPPGQSYPDSALPPQRQDRFCSNSGRLSGPAELRSFNMPPFPPPPPFAMRNVYPPRGFPPYLPPRPGFFPPPPHSEGRSEFPSGLIPPSNEPATEHPEPQQET

SEQ ID NO: 30778 - protein, 804 aa, Homo sapiens
MEEPGVTPQPYLGLLLEELRRVVAALPEGMRPDSNLYGFPWELVICAAVVGFFAVLFFLWRSFRSVRSRLYVGREKKLALMLSGLIEEKSKLLEKFSLVQKEYEGYEVESSLKDASFEKEATEAQSLEATCEKLNRSNSELEDEILCLEKELKEEKSKHSEQDELMADISKRIQSLEDESKSLKSQVAEAKMTFKIFQMNEERLKIAIKDALNENSQLQESQKQLLQEAEVWKEQVSELNKQKVTFEDSKVHAEQVLNDKESHIKTLTERLLKMKDWAAMLGEDITDDDNLELEMNSESENGAYLDNPPKGALKKLIHAAKLNASLKTLEGERNQIYIQLSEVDKTKEELTEHIKNLQTEQASLQSENTHFENENQKLQQKLKVMTELYQENEMKLHRKLTVEENYRLEKEEKLSKVDEKISHATEELETYRKRAKDLEEELERTIHSYQGQIISHEKKAHDNWLAARNAERNLNDLRKENAHNRQKLTETELKFELLEKDPYALDVPNTAFGREHSPYGPSPLGWPSSETRAFLSPPTLLEGPLRLSPLLPGGGGRGSRGPGNPLDHQITNERGESSCDRLTDPHRAPSDTGSLSPPWDQDRRMMFPPPGQSYPDSALPPQRQDRFCSNSGRLSGPAELRSFNMPSLDKMDGSMPSEMESSRNDTKDDLGNLNVPDSSLPAENEATGPGFVPPPLAPIRGPLFPVDARGPFLRRGPPFPPPPPGAMFGASRDYFPPGDFPGPPPAPFAMRNVYPPRGFPPYLPPRPGFFPPPPHSEGRSEFPSGLIPPSNEPATEHPEPQQET

SEQ ID NO: 30779 - protein, 761 aa, Homo sapiens
MEEPGVTPQPYLGLLLEELRRVVAALPEGMRPDSNLYGFPWELVICAAVVGFFAVLFFLWRSFRSVRSRLYVGREKKLALMLSGLIEEKSKLLEKFSLVQKEYEGYEVESSLKDASFEKEATEAQSLEATCEKLNRSNSELEDEILCLEKELKEEKSKHSEQDELMADISKRIQSLEDESKSLKSQVAEAKMTFKIFQMNEERLKIAIKDALNENSQLQESQKQLLQEAEVWKEQVSELNKQKVTFEDSKVHAEQVLNDKESHIKTLTERLLKMKDWAAMLGEDITDDDNLELEMNSESENGAYLDNPPKGALKKLIHAAKLNASLKTLEGERNQIYIQLSEVDKTKEELTEHIKNLQTEQASLQSENTHFENENQKLQQKLKVMTELYQENEMKLHRKLTVEENYRLEKEEKLSKVDEKISHATEELETYRKRAKDLEEELERTIHSYQGQIISHEKKAHDNWLAARNAERNLNDLRKENAHNRQKLTETELKFELLEKDPYALDVPNTAFGRGSRGPGNPLDHQITNERGESSCDRLTDPHRAPSDTGSLSPPWDQDRRMMFPPPGQSYPDSALPPQRQDRFCSNSGRLSGPAELRSFNMPSLDKMDGSMPSEMESSRNDTKDDLGNLNVPDSSLPAENEATGPGFVPPPLAPIRGPLFPVDARGPFLRRGPPFPPPPPGAMFGASRDYFPPGDFPGPPPAPFAMRNVYPPRGFPPYLPPRPGFFPPPPHSEGRSEFPSGLIPPSNEPATEHPEPQQET

SEQ ID NO: 30780 - protein, 775 aa, Homo sapiens
MRPDSNLYGFPWELVICAAVVGFFAVLFFLWRSFRSVRSRLYVGREKKLALMLSGLIEEKSKLLEKFSLVQKEYEGYEVESSLKDASFEKEATEAQSLEATCEKLNRSNSELEDEILCLEKELKEEKSKHSEQDELMADISKRIQSLEDESKSLKSQVAEAKMTFKIFQMNEERLKIAIKDALNENSQLQESQKQLLQEAEVWKEQVSELNKQKVTFEDSKVHAEQVLNDKESHIKTLTERLLKMKDWAAMLGEDITDDDNLELEMNSESENGAYLDNPPKGALKKLIHAAKLNASLKTLEGERNQIYIQLSEVDKTKEELTEHIKNLQTEQASLQSENTHFENENQKLQQKLKVMTELYQENEMKLHRKLTVEENYRLEKEEKLSKVDEKISHATEELETYRKRAKDLEEELERTIHSYQGQIISHEKKAHDNWLAARNAERNLNDLRKENAHNRQKLTETELKFELLEKDPYALDVPNTAFGREHSPYGPSPLGWPSSETRAFLSPPTLLEGPLRLSPLLPGGGGRGSRGPGNPLDHQITNERGESSCDRLTDPHRAPSDTGSLSPPWDQDRRMMFPPPGQSYPDSALPPQRQDRFCSNSGRLSGPAELRSFNMPSLDKMDGSMPSEMESSRNDTKDDLGNLNVPDSSLPAENEATGPGFVPPPLAPIRGPLFPVDARGPFLRRGPPFPPPPPGAMFGASRDYFPPGDFPGPPPAPFAMRNVYPPRGFPPYLPPRPGFFPPPPHSEGRSEFPSGLIPPSNEPATEHPEPQQET

SEQ ID NO: 30781 - protein, 771 aa, Homo sapiens
MEEPGVTPQPYLGLLLEELRRVVAALPEGMRPDSNLYGFPWELVICAAVVGFFAVLFFLWRSFRSVRSRLYVGREKKLALMLSGLIEEKSKLLEKFSLVQKEYEGYEVESSLKDASFEKEATEAQSLEATCEKLNRSNSELEDEILCLEKELKEEKSKHSEQDELMADISKRIQSLEDESKSLKSQVAEAKMTFKIFQMNEERLKIAIKDALNENSQLQESQKQLLQEAEVWKEQVSELNKQKVTFEDSKVHAEQVLNDKESHIKTLTERLLKMKDWAAMLGEDITDDDNLELEMNSESENGAYLDNPPKGALKKLIHAAKLNASLKTLEGERNQIYIQLSEVDKTKEELTEHIKNLQTEQASLQSENTHFENENQKLQQKLKVMTELYQENEMKLHRKLTVEENYRLEKEEKLSKVDEKISHATEELETYRKRAKDLEEELERTIHSYQGQIISHEKKAHDNWLAARNAERNLNDLRKENAHNRQKLTETELKFELLEKDPYALDVPNTAFGREHSPYGPSPLGWPSSETRAFLSPPTLLEGPLRLSPLLPGGGGRGSRGPGNPLDHQITNERGESSCDRLTDPHRAPSDTGSLSPPWDQDRRMMFPPPGQSYPDSALPPQRQDRFCSNSGRLSGPAELRSFNMPSLDKMDGSMPSEMESSRNDTKDDLGNLNVPDSSLPAENEATGPGFVPPPLAPIRGPLFPVDARGPFLRRGPPFPPPPPGAMFGASRDYFPPGDFPGPPPAPFASARSPPGAGAPASGRGLGGPQK

SEQ ID NO: 30782 - protein, 724 aa, Homo sapiens
MLSGLIEEKSKLLEKFSLVQKEYEGYEVESSLKDASFEKEATEAQSLEATCEKLNRSNSELEDEILCLEKELKEEKSKHSEQDELMADISKRIQSLEDESKSLKSQVAEAKMTFKIFQMNEERLKIAIKDALNENSQLQESQKQLLQEAEVWKEQVSELNKQKVTFEDSKVHAEQVLNDKESHIKTLTERLLKMKDWAAMLGEDITDDDNLELEMNSESENGAYLDNPPKGALKKLIHAAKLNASLKTLEGERNQIYIQLSEVDKTKEELTEHIKNLQTEQASLQSENTHFENENQKLQQKLKVMTELYQENEMKLHRKLTVEENYRLEKEEKLSKVDEKISHATEELETYRKRAKDLEEELERTIHSYQGQIISHEKKAHDNWLAARNAERNLNDLRKENAHNRQKLTETELKFELLEKDPYALDVPNTAFGREHSPYGPSPLGWPSSETRAFLSPPTLLEGPLRLSPLLPGGGGRGSRGPGNPLDHQITNERGESSCDRLTDPHRAPSDTGSLSPPWDQDRRMMFPPPGQSYPDSALPPQRQDRFCSNSGRLSGPAELRSFNMPSLDKMDGSMPSEMESSRNDTKDDLGNLNVPDSSLPAENEATGPGFVPPPLAPIRGPLFPVDARGPFLRRGPPFPPPPPGAMFGASRDYFPPGDFPGPPPAPFAMRNVYPPRGFPPYLPPRPGFFPPPPHSEGRSEFPSGLIPPSNEPATEHPEPQQET

SEQ ID NO: 30783 - protein, 809 aa, Homo sapiens
MEEPGVTPQPYLGLLLEELRRVVAALPEGMRPDSNLYGFPWELVICAAVVGFFAVLFFLWRSFRSVRSRLYVGREKKLALMLSGLIEEKSKLLEKFSLVQKEYEGYEVESSLKDASFEKEATEAQSLEVENQMATCEKLNRSNSELEDEILCLEKELKEEKSKHSEQDELMADISKRIQSLEDESKSLKSQVAEAKMTFKIFQMNEERLKIAIKDALNENSQLQESQKQLLQEAEVWKEQVSELNKQKVTFEDSKVHAEQVLNDKESHIKTLTERLLKMKDWAAMLGEDITDDDNLELEMNSESENGAYLDNPPKGALKKLIHAAKLNASLKTLEGERNQIYIQLSEVDKTKEELTEHIKNLQTEQASLQSENTHFENENQKLQQKLKVMTELYQENEMKLHRKLTVEENYRLEKEEKLSKVDEKISHATEELETYRKRAKDLEEELERTIHSYQGQIISHEKKAHDNWLAARNAERNLNDLRKENAHNRQKLTETELKFELLEKDPYALDVPNTAFGREHSPYGPSPLGWPSSETRAFLSPPTLLEGPLRLSPLLPGGGGRGSRGPGNPLDHQITNERGESSCDRLTDPHRAPSDTGSLSPPWDQDRRMMFPPPGQSYPDSALPPQRQDRFCSNSGRLSGPAELRSFNMPSLDKMDGSMPSEMESSRNDTKDDLGNLNVPDSSLPAENEATGPGFVPPPLAPIRGPLFPVDARGPFLRRGPPFPPPPPGAMFGASRDYFPPGDFPGPPPAPFAMRNVYPPRGFPPYLPPRPGFFPPPPHSEGRSEFPSGLIPPSNEPATEHPEPQQET

SEQ ID NO: 30784 - protein, 729 aa, Homo sapiens
MLSGLIEEKSKLLEKFSLVQKEYEGYEVESSLKDASFEKEATEAQSLEVENQMATCEKLNRSNSELEDEILCLEKELKEEKSKHSEQDELMADISKRIQSLEDESKSLKSQVAEAKMTFKIFQMNEERLKIAIKDALNENSQLQESQKQLLQEAEVWKEQVSELNKQKVTFEDSKVHAEQVLNDKESHIKTLTERLLKMKDWAAMLGEDITDDDNLELEMNSESENGAYLDNPPKGALKKLIHAAKLNASLKTLEGERNQIYIQLSEVDKTKEELTEHIKNLQTEQASLQSENTHFENENQKLQQKLKVMTELYQENEMKLHRKLTVEENYRLEKEEKLSKVDEKISHATEELETYRKRAKDLEEELERTIHSYQGQIISHEKKAHDNWLAARNAERNLNDLRKENAHNRQKLTETELKFELLEKDPYALDVPNTAFGREHSPYGPSPLGWPSSETRAFLSPPTLLEGPLRLSPLLPGGGGRGSRGPGNPLDHQITNERGESSCDRLTDPHRAPSDTGSLSPPWDQDRRMMFPPPGQSYPDSALPPQRQDRFCSNSGRLSGPAELRSFNMPSLDKMDGSMPSEMESSRNDTKDDLGNLNVPDSSLPAENEATGPGFVPPPLAPIRGPLFPVDARGPFLRRGPPFPPPPPGAMFGASRDYFPPGDFPGPPPAPFAMRNVYPPRGFPPYLPPRPGFFPPPPHSEGRSEFPSGLIPPSNEPATEHPEPQQET

SEQ ID NO: 30785 - protein, 792 aa, Homo sapiens
MELKSPEEEVVAALPEGMRPDSNLYGFPWELVICAAVVGFFAVLFFLWRSFRSVRSRLYVGREKKLALMLSGLIEEKSKLLEKFSLVQKEYEGYEVESSLKDASFEKEATEAQSLEATCEKLNRSNSELEDEILCLEKELKEEKSKHSEQDELMADISKRIQSLEDESKSLKSQVAEAKMTFKIFQMNEERLKIAIKDALNENSQLQESQKQLLQEAEVWKEQVSELNKQKVTFEDSKVHAEQVLNDKESHIKTLTERLLKMKDWAAMLGEDITDDDNLELEMNSESENGAYLDNPPKGALKKLIHAAKLNASLKTLEGERNQIYIQLSEVDKTKEELTEHIKNLQTEQASLQSENTHFENENQKLQQKLKVMTELYQENEMKLHRKLTVEENYRLEKEEKLSKVDEKISHATEELETYRKRAKDLEEELERTIHSYQGQIISHEKKAHDNWLAARNAERNLNDLRKENAHNRQKLTETELKFELLEKDPYALDVPNTAFGREHSPYGPSPLGWPSSETRAFLSPPTLLEGPLRLSPLLPGGGGRGSRGPGNPLDHQITNERGESSCDRLTDPHRAPSDTGSLSPPWDQDRRMMFPPPGQSYPDSALPPQRQDRFCSNSGRLSGPAELRSFNMPSLDKMDGSMPSEMESSRNDTKDDLGNLNVPDSSLPAENEATGPGFVPPPLAPIRGPLFPVDARGPFLRRGPPFPPPPPGAMFGASRDYFPPGDFPGPPPAPFAMRNVYPPRGFPPYLPPRPGFFPPPPHSEGRSEFPSGLIPPSNEPATEHPEPQQET

SEQ ID NO: 30786 - protein, 539 aa, Homo sapiens
MYLSRFLSIHALWVTVSSVMQPYPLVWGHYDLCKTQIYTEEGKVWDYMACQPESTDMTKYLKVKLDPPDITCGDPPETFCAMGNPYMCNNECDASTPELAHPPELMFDFEGRHPSTFWQSATWKEYPKPLQVNITLSWSKTIELTDNIVITFESGRPDQMILEKSLDYGRTWQPYQYYATDCLDAFHMDPKSVKDLSQHTVLEIICTEEYSTGYTTNSKIIHFEIKDRFAFFAGPRLRNMASLYGQLDTTKKLRDFFTVTDLRIRLLRPAVGEIFVDELHLARYFYAISDIKVRGRCKCNLHATVCVYDNSKLTCECEHNTTGPDCGKCKKNYQGRPWSPGSYLPIPKGTANTCIPSISSIGNCECFGHSNRCSYIDLLNTVICVSCKHNTRGQHCELCRLGYFRNASAQLDDENVCIECYCNPLGSIHDRCNGSGFCECKTGTTGPKCDECLPGNSWHYGCQPNVCDNELLHCQNGGTCHNNVRCLCPAAYTGILCEKLRCEEAGSCGSDSGQGAPPHGSPALLLLTTLLGTASPLVF

SEQ ID NO: 30787 - protein, 364 aa, Homo sapiens
MYLSRFLSIHALWVTVSSVMQPYPLVWGHYDLCKTQIYTEEGKVWDYMACQPESTDMTKYLKVKLDPPDITCGDPPETFCAMGNPYMCNNECDASTPELAHPPELMFDFEGRHPSTFWQSATWKEYPKPLQVNITLSWSKTIELTDNIVITFESGRPDQMILEKSLDYGRTWQPYQYYATDCLDAFHMDPKSVKDLSQHTVLEIICTEEYSTGYTTNSKIIHFEIKDRFAFFAGPRLRNMASLYGQLDTTKKLRDFFTVTDLRIRLLRPAVGEIFVDELHLARYFYAISDIKVRGRCKCNLHATVCVYDNSKLTCECEHNTTGPDCGKCKKNYQGRPWSPGSYLPIPKGTANTCIPSISSIGSK

SEQ ID NO: 30788 - protein, 438 aa, Homo sapiens
MYLSRFLSIHALWVTVSSVMQPYPLVWGHYDLCKTQIYTEEGKVWDYMACQPESTDMTKYLKVKLDPPDITCGDPPETFCAMGNPYMCNNECDASTPELAHPPELMFDFEGRHPSTFWQSATWKEYPKPLQVNITLSWSKTIELTDNIVITFESGRPDQMILEKSLDYGRTWQPYQYYATDCLDAFHMDPKSVKDLSQHTVLEIICTEEYSTGYTTNSKIIHFEIKDRFAFFAGPRLRNMASLYGQLDTTKKLRDFFTVTDLRIRLLRPAVGEIFVDELHLARYFYAISDIKVRGRCKCNLHATVCVYDNSKLTCECEHNTTGPDCGKCKKNYQGRPWSPGSYLPIPKGTANTCIPSISSIGTNVCDNELLHCQNGGTCHNNVRCLCPAAYTGILCEKLRCEEAGSCGSDSGQGAPPHGSPALLLLTTLLGTASPLVF

SEQ ID NO: 30789 - protein, 480 aa, Homo sapiens
MYLSRFLSIHALWVTVSSVMQPYPLVWGHYDLCKTQIYTEEGKVWDYMACQPESTDMTKYLKVKLDPPDITCGDPPETFCAMGNPYMCNNECDASTPELAHPPELMFDFEGRHPSTFWQSATWKEYPKPLQVNITLSWSKTIELTDNIVITFESGRPDQMILEKSLDYGRTWQPYQYYATDCLDAFHMDPKSVKDLSQHTVLEIICTEEYSTGYTTNSKIIHFEIKDRFAFFAGPRLRNMASLYGQLDTTKKLRDFFTVTDLRIRLLRPAVGEIFVDELHLARYFYAISDIKVRGRCKCNLHATVCVYDNSKLTCECEHNTTGPDCGKCKKNYQGRPWSPGSYLPIPKGTANTCIPSISSIGNPPKFNRIWPNISSLEVSNPKQVAPKLALSTVSSVQVANHKRANVCDNELLHCQNGGTCHNNVRCLCPAAYTGILCEKLRCEEAGSCGSDSGQGAPPHGSPALLLLTTLLGTASPLVF

SEQ ID NO: 30790 - protein, 460 aa, Homo sapiens
MYLSRFLSIHALWVTVSSVMQPYPLVWGHYDLCKTQIYTEEGKVWDYMACQPESTDMTKYLKVKLDPPDITCGDPPETFCAMGNPYMCNNECDASTPELAHPPELMFDFEGRHPSTFWQSATWKEYPKPLQVNITLSWSKTIELTDNIVITFESGRPDQMILEKSLDYGRTWQPYQYYATDCLDAFHMDPKSVKDLSQHTVLEIICTEEYSTGYTTNSKIIHFEIKDRFAFFAGPRLRNMASLYGQLDTTKKLRDFFTVTDLRIRLLRPAVGEIFVDELHLARYFYAISDIKVRGRCKCNLHATVCVYDNSKLTCECEHNTTGPDCGKCKKNYQGRPWSPGSYLPIPKGTANTCIPSISSIGNPPKFNRIWPNISSLEVSNPKQANVCDNELLHCQNGGTCHNNVRCLCPAAYTGILCEKLRCEEAGSCGSDSGQGAPPHGSPALLLLTTLLGTASPLVF

SEQ ID NO: 30791 - protein, 494 aa, Homo sapiens
MYLSRFLSIHALWVTVSSVMQPYPLVWGHYDLCKTQIYTEEGKVWDYMACQPESTDMTKYLKVKLDPPDITCGDPPETFCAMGNPYMCNNECDASTPELAHPPELMFDFEGRHPSTFWQSATWKEYPKPLQVNITLSWSKTIELTDNIVITFESGRPDQMILEKSLDYGRTWQPYQYYATDCLDAFHMDPKSVKDLSQHTVLEIICTEEYSTGYTTNSKIIHFEIKDRFAFFAGPRLRNMASLYGQLDTTKKLRDFFTVTDLRIRLLRPAVGEIFVDELHLARYFYAISDIKVRGRCKCNLHATVCVYDNSKLTCECEHNTTGPDCGKCKKNYQGRPWSPGSYLPIPKGTANTCIPSISSIGNCECFGHSNRCSYIDLLNTVICVSCKHNTRGQHCELCRLGYFRNASAQLDDENVCIANVCDNELLHCQNGGTCHNNVRCLCPAAYTGILCEKLRCEEAGSCGSDSGQGAPPHGSPALLLLTTLLGTASPLVF

SEQ ID NO: 30792 - protein, 155 aa, Homo sapiens
MVDLTQVMDDEVFMAFASYATIILSKMMLMSTATAFYRLTRKVFANPEDCVAFGKGENAKKYLRTDDRVERVRRAHLNDLENIIPFLGIGLLYSLSGPDPSTAILHFRLFVGARIYHTIAYLTPLPQPNRALSFFVGYGVTLSMAYRLLKSKLYL

SEQ ID NO: 30793 - protein, 87 aa, Homo sapiens
MVDLTQVMDDEVFMAFASYATIILSKMMLMSTATAFYRLTRKVFANPEDCVAFGKGENAKKYLRTDDRVERVRRIKQTLSIYLASSI

SEQ ID NO: 30794 - protein, 360 aa, Homo sapiens
MSQERPTFYRQELNKTIWEVPERYQNLSPVGSGAYGSVCAAFDTKTGLRVAVKKLSRPFQSIIHAKRTYRELRLLKHMKHENVIGLLDVFTPARSLEEFNDVYLVTHLMGADLNNIVKCQKLTDDHVQFLIYQILRGLKYIHSADIIHRDLKPSNLAVNEDCELKILDFGLARHTDDEMTGYVATRWYRAPEIMLNWMHYNQTVDIWSVGCIMAELLTGRTLFPGTDHIDQLKLILRLVGTPGAELLKKISSESARNYIQSLTQMPKMNFANVFIGANPLAVDLLEKMLVLDSDKRITAAQALAHAYFAQYHDPDDEPVADPYDQSFESRDLLIDEWKSLTYDEVISFVPPPLDQEEMES

SEQ ID NO: 30795 - protein, 360 aa, Homo sapiens
MSQERPTFYRQELNKTIWEVPERYQNLSPVGSGAYGSVCAAFDTKTGLRVAVKKLSRPFQSIIHAKRTYRELRLLKHMKHENVIGLLDVFTPARSLEEFNDVYLVTHLMGADLNNIVKCQKLTDDHVQFLIYQILRGLKYIHSADIIHRDLKPSNLAVNEDCELKILDFGLARHTDDEMTGYVATRWYRAPEIMLNWMHYNQTVDIWSVGCIMAELLTGRTLFPGTDHINQLQQIMRLTGTPPAYLINRMPSHEARNYIQSLTQMPKMNFANVFIGANPLAVDLLEKMLVLDSDKRITAAQALAHAYFAQYHDPDDEPVADPYDQSFESRDLLIDEWKSLTYDEVISFVPPPLDQEEMES

SEQ ID NO: 30796 - protein, 297 aa, Homo sapiens
MSQERPTFYRQELNKTIWEVPERYQNLSPVGSGAYGSVCAAFDTKTGLRVAVKKLSRPFQSIIHAKRTYRELRLLKHMKHENVIGLLDVFTPARSLEEFNDVYLVTHLMGADLNNIVKCQKLTDDHVQFLIYQILRGLKYIHSADIIHRDLKPSNLAVNEDCELKILDFGLARHTDDEMTGYVATRWYRAPEIMLNWMHYNQTVDIWSVGCIMAELLTGRTLFPGTDHIDQLKLILRLVGTPGAELLKKISSESARNYIQSLTQMPKMNFANVFIGANPLGKLTIYPHLMDIELVMI

SEQ ID NO: 30797 - protein, 307 aa, Homo sapiens
MSQERPTFYRQELNKTIWEVPERYQNLSPVGSGAYGSVCAAFDTKTGLRVAVKKLSRPFQSIIHAKRTYRELRLLKHMKHENVIGLLDVFTPARSLEEFNDVYLVTHLMGADLNNIVKCQKLTDDHVQFLIYQILRGLKYIHSADIIHRDLKPSNLAVNEDCELKILDFGLARHTDDEMTGYVATRWYRAPEIMLNWMHYNQTVDIWSVGCIMAELLTGRTLFPGTDHIDQLKLILRLVGTPGAELLKKISSESLSTCWRRCLYWTQIRELQRPKPLHMPTLLSTTILMMNQWPILMISPLKAGTSL

SEQ ID NO: 30798 - protein, 256 aa, Homo sapiens
MSQERPTFYRQELNKTIWEVPERYQNLSPVGSGAYGSVCAAFDTKTGLRVAVKKLSRPFQSIIHAKRTYRELRLLKHMKHENVIGLLDVFTPARSLEEFNDVYLVTHLMGADLNNIVKCQKLTDDHVQFLIYQILRGLKYIHSADIIHRDLKPSNLAVNEDCELKILDFGLARHTDDEMTGYVATRWYRAPEIMLNWMHYNQTVDIWSVGCIMAELLTGRTLFPGTDHIDQLKLILRLVGTPGAELLKKISSESVS

SEQ ID NO: 30799 - protein, 439 aa, Homo sapiens
MSVPSALMKQPPIQSTAGAVPVRNEKGEISMEKVKVKRYVSGKRPDYAPMESSDEEDEEFQFIKKAKEQEAEPEEQEEDSSSDPRLRRLQNRISEDVEERLARHRKIVEPEVVGESDSEVEGDAWRMEREDSSEEEEEEIDDEEIERRRGMMRQRAQERKNEEMEVMEVEDEGRSGEESESESEYEEYTDSEDEMEPRLKPVFIRKKDRVTVQEREAEALKQKELEQEAKRMAEERRKYTLKIVEEETKKELEENKRSLAALDALNTDDENDEEEYEAWKVRELKRIKRDREDREALEKEKAEIERMRNLTEEERRAELRANGKVITNKAVKGKYKFLQKYYHRGAFFMDEDEEVYKRDFSAPTLEDHFNKTILPKVMQVKNFGRSGRTKYTHLVDQDTTSFDSAWGQESAQNTKFFKQKAAGVRDVFERPSAKKRKTT

SEQ ID NO: 30800 - protein, 514 aa, Homo sapiens
MGCDGRVSGLLRRNLQPTLTYWSVFFSFGLCIAFLGPTLLDLRCQTHSSLPQISWVFFSQQLCLLLGSALGGVFKRTLAQSLWALFTSSLAISLVFAVIPFCRDVKVLASVMALAGLAMGCIDTVANMQLVRMYQKDSAVFLQVLHFFVGFGALLSPLIADPFLSEANCLPANSTANTTSRGHLFHVSRVLGQHHVDAKPWSNQTFPGLTPKDGAGTRVSYAFWIMALINLPVPMAVLMLLSKERLLTCCPQRRPLLLSADELALETQPPEKEDASSLPPKFQSHLGHEDLFSCCQRKNLRGAPYSFFAIHITGALVLFMTDGLTGAYSAFVYSYAVEKPLSVGHKVAGYLPSLFWGFITLGRLLSIPISSRMKPATMVFINVVGVVVTFLVLLIFSYNVVFLFVGTASLGLFLSSTFPSMLAYTEDSLQYKGCATTVLVTGAGVGEMVLQMLVGSIFQAQGSYSFLVCGVIFGCLAFTFYILLLFFHRMHPGLPSVPTQDRSIGMENSECYQR

SEQ ID NO: 30801 - protein, 427 aa, Homo sapiens
MGCDGRVSGLLRRNLQPTLTYWSVFFSFGLCIAFLGPTLLDLRCQTHSSLPQISWVFFSQQLCLLLGSALGGVFKRTLAQSLWALFTSSLAISLVFAVIPFCRDVKVLASVMALAGLAMGCIDTVANMQLVRMYQKDSAVFLQLPVPMAVLMLLSKERLLTCCPQRRPLLLSADELALETQPPEKEDASSLPPKFQSHLGHEDLFSCCQRKNLRGAPYSFFAIHITGALVLFMTDGLTGAYSAFVYSYAVEKPLSVGHKVAGYLPSLFWGFITLGRLLSIPISSRMKPATMVFINVVGVVVTFLVLLIFSYNVVFLFVGTASLGLFLSSTFPSMLAYTEDSLQYKGCATTVLVTGAGVGEMVLQMLVGSIFQAQGSYSFLVCGVIFGCLAFTFYILLLFFHRMHPGLPSVPTQDRSIGMENSECYQR

SEQ ID NO: 30802 - protein, 410 aa, Homo sapiens
METRPTALMSSTVAAAAPAAGAASRKESPGRWGLGEDPTGVSPSLQCRVCGDSSSGKHYGIYACNGCSGFFKRSVRRRLIYRCQVGAGMCPVDKAHRNQCQACRLKKCLQAGMNQDAVQNERQPRSTAQVHLDSMESNTESRPESLVAPPAPAGRSPRGPTPMSAARALGHHFMASLITAETCAKLEPEDADENIDVTSNDPEFPSSPYSSSSPCGLDSIHETSARLLFMAVKWAKNLPVFSSLPFRDQVILLEEAWSELFLLGAIQWSLPLDSCPLLAPPEASAAGGAQGRLTLASMETRVLQETISRFRALAVDPTEFACMKALVLFKPETRGLKDPEHVEALQDQSQVMLSQHSKAHHPSQPVRFGKLLLLLPSLRFITAERIELLFFRKTIGNTPMEKLLCDMFKN

SEQ ID NO: 30803 - protein, 367 aa, Homo sapiens
METRPTALMSSTVAAAAPAAGAASRKESPGRWGLGEDPTGVSPSLQCRVCGDSSSGKHYGIYACNGCSGFFKRSVRRRLIYRCQVGAGMCPVDKAHRNQCQACRLKKCLQAGMNQDAVQNERQPRSTAQVHLDSMESNTESRPESLVAPPAPAGRSPRGPTPMSAARALGHHFMASLITAETCAKLEPEDADENIDVTSNDPEFPSSPYSSSSPCGLDSIHETSARLLFMAVKWAKNLPVFSSLPFRDQVILLEEAWSELFLLGAIQWSLPLDSCPLLAPPEASAAGGAQGRLTLASMETRVLQETISRFRALAVDPTEFACMKALVLFKPETRGLKDPEHVEALQDQSQVMLSQHSKAHHPSQPVR

SEQ ID NO: 30804 - protein, 2696 aa, Homo sapiens
MDQTCELPRRNCLLPFSNPVNLDAPEDKDSPFGNGQSNFSEPLNGCTMQLSTVSGTSQNAYGQDSPSCYIPLRRLQDLASMINVEYLNGSADGSESFQDPEKSDSRAQTPIVCTSLSPGGPTALAMKQEPSCNNSPELQVKVTKTIKNGFLHFENFTCVDDADVDSEMDPEQPVTEDESIEEIFEETQTNATCNYETKSENGVKVAMGSEQDSTPESRHGAVKSPFLPLAPQTETQKNKQRNEVDGSNEKAALLPAPFSLGDTNITIEEQLNSINLSFQDDPDSSTSTLGNMLELPGTSSSSTSQELPFCQPKKKSTPLKYEVGDLIWAKFKRRPWWPCRICSDPLINTHSKMKVSNRRPYRQYYVEAFGDPSERAWVAGKAIVMFEGRHQFEELPVLRRRGKQKEKGYRHKVPQKILSKWEASVGLAEQYDVPKGSKNRKCIPGSIKLDSEEDMPFEDCTNDPESEHDLLLNGCLKSLAFDSEHSADEKEKPCAKSRARKSSDNPKRTSVKKGHIQFEAHKDERRGKIPENLGLNFISGDISDTQASNELSRIANSLTGSNTAPGSFLFSSCGKNTAKKEFETSNGDSLLGLPEGALISKCSREKNKPQRSLVCGSKVKLCYIGAGDEEKRSDSISICTTSDDGSSDLDPIEHSSESDNSVLEIPDAFDRTENMLSMQKNEKIKYSRFAATNTRVKAKQKPLISNSHTDHLMGCTKSAEPGTETSQVNLSDLKASTLVHKPQSDFTNDALSPKFNLSSSISSENSLIKGGAANQALLHSKSKQPKFRSIKCKHKENPVMAEPPVINEECSLKCCSSDTKGSPLASISKSGKVDGLKLLNNMHEKTRDSSDIETAVVKHVLSELKELSYRSLGEDVSDSGTSKPSKPLLFSSASSQNHIPIEPDYKFSTLLMMLKDMHDSKTKEQRLMTAQNLVSYRSPGRGDCSTNSPVGVSKVLVSGGSTHNSEKKGDGTQNSANPSPSGGDSALSGELSASLPGLLSDKRDLPASGKSRSDCVTRRNCGRSKPSSKLRDAFSAQMVKNTVNRKALKTERKRKLNQLPSVTLDAVLQGDRERGGSLRGGAEDPSKEDPLQIMGHLTSEDGDHFSDVHFDSKVKQSDPGKISEKGLSFENGKGPELDSVMNSENDELNGVNQVVPKKRWQRLNQRRTKPRKRMNRFKEKENSECAFRVLLPSDPVQEGRDEFPEHRTPSASILEEPLTEQNHADCLDSAGPRLNVCDKSSASIGDMEKEPGIPSLTPQAELPEPAVRSEKKRLRKPSKWLLEYTEEYDQIFAPKKKQKKVQEQVHKVSSRCEEESLLARGRSSAQNKQVDENSLISTKEEPPVLEREAPFLEGPLAQSELGGGHAELPQLTLSVPVAPEVSPRPALESEELLVKTPGNYESKRQRKPTKKLLESNDLDPGFMPKKGDLGLSKKCYEAGHLENGITESCATSYSKDFGGGTTKIFDKPRKRKRQRHAAAKMQCKKVKNDDSSKEIPGSEGELMPHRTATSPKETVEEGVEHDPGMPASKKMQGERGGGAALKENVCQNCEKLGELLLCEAQCCGAFHLECLGLTEMPRGKFICNECRTGIHTCFVCKQSGEDVKRCLLPLCGKFYHEECVQKYPPTVMQNKGFRCSLHICITCHAANPANVSASKGRLMRCVRCPVAYHANDFCLAAGSKILASNSIICPNHFTPRRGCRNHEHVNVSWCFVCSEGGSLLCCDSCPAAFHRECLNIDIPEGNWYCNDCKAGKKPHYREIVWVKVGRYRWWPAEICHPRAVPSNIDKMRHDVGEFPVLFFGSNDYLWTHQARVFPYMEGDVSSKDKMGKGVDGTYKKALQEAAARFEELKAQKELRQLQEDRKNDKKPPPYKHIKVNRPIGRVQIFTADLSEIPRCNCKATDENPCGIDSECINRMLLYECHPTVCPAGGRCQNQCFSKRQYPEVEIFRTLQRGWGLRTKTDIKKGEFVNEYVGELIDEEECRARIRYAQEHDITNFYMLTLDKDRIIDAGPKGNYARFMNHCCQPNCETQKWSVNGDTRVGLFALSDIKAGTELTFNYNLECLGNGKTVCKCGAPNCSGFLGVRPKNQPIATEEKSKKFKKKQQGKRRTQGEITKEREDECFSCGDAGQLVSCKKPGCPKVYHADCLNLTKRPAGKWECPWHQCDICGKEAASFCEMCPSSFCKQHREGMLFISKLDGRLSCTEHDPCGPNPLEPGEIREYVPPPVPLPPGPSTHLAEQSTGMAAQAPKMSDKPPADTNQMLSLSKKALAGTCQRPLLPERPLERTDSRPQPLDKVRDLAGSGTKSQSLVSSQRPLDRPPAVAGPRPQLSDKPSPVTSPSSSPSVRSQPLERPLGTADPRLDKSIGAASPRPQSLEKTSVPTGLRLPPPDRLLITSSPKPQTSDRPTDKPHASLSQRLPPPEKVLSAVVQTLVAKEKALRPVDQNTQSKNRAALVMDLIDLTPRQKERAASPHQVTPQADEKMPVLESSSWPASKGLGHMPRAVEKGCVSDPLQTSGKAAAPSEDPWQAVKSLTQARLLSQPPAKAFLYEPTTQASGRASAGAEQTPGPLSQSPGLVKQAKQMVGGQQLPALAAKSGQSFRSLGKAPASLPTEEKKLVTTEQSPWALGKASSRAGLWPIVAGQTLAQSCWSAGSTQTLAQTCWSLGRGQDPKPEQNTLPALNQAPSSHKCAESEQK

SEQ ID NO: 30805 - protein, 2427 aa, Homo sapiens
MPLKTRTALSDDPDSSTSTLGNMLELPGTSSSSTSQELPFCQPKKKSTPLKYEVGDLIWAKFKRRPWWPCRICSDPLINTHSKMKVSNRRPYRQYYVEAFGDPSERAWVAGKAIVMFEGRHQFEELPVLRRRGKQKEKGYRHKVPQKILSKWEASVGLAEQYDVPKGSKNRKCIPGSIKLDSEEDMPFEDCTNDPESEHDLLLNGCLKSLAFDSEHSADEKEKPCAKSRARKSSDNPKRTSVKKGHIQFEAHKDERRGKIPENLGLNFISGDISDTQASNELSRIANSLTGSNTAPGSFLFSSCGKNTAKKEFETSNGDSLLGLPEGALISKCSREKNKPQRSLVCGSKVKLCYIGAGDEEKRSDSISICTTSDDGSSDLDPIEHSSESDNSVLEIPDAFDRTENMLSMQKNEKIKYSRFAATNTRVKAKQKPLISNSHTDHLMGCTKSAEPGTETSQVNLSDLKASTLVHKPQSDFTNDALSPKFNLSSSISSENSLIKGGAANQALLHSKSKQPKFRSIKCKHKENPVMAEPPVINEECSLKCCSSDTKGSPLASISKSGKVDGLKLLNNMHEKTRDSSDIETAVVKHVLSELKELSYRSLGEDVSDSGTSKPSKPLLFSSASSQNHIPIEPDYKFSTLLMMLKDMHDSKTKEQRLMTAQNLVSYRSPGRGDCSTNSPVGVSKVLVSGGSTHNSEKKGDGTQNSANPSPSGGDSALSGELSASLPGLLSDKRDLPASGKSRSDCVTRRNCGRSKPSSKLRDAFSAQMVKNTVNRKALKTERKRKLNQLPSVTLDAVLQGDRERGGSLRGGAEDPSKEDPLQIMGHLTSEDGDHFSDVHFDSKVKQSDPGKISEKGLSFENGKGPELDSVMNSENDELNGVNQVVPKKRWQRLNQRRTKPRKRMNRFKEKENSECAFRVLLPSDPVQEGRDEFPEHRTPSASILEEPLTEQNHADCLDSAGPRLNVCDKSSASIGDMEKEPGIPSLTPQAELPEPAVRSEKKRLRKPSKWLLEYTEEYDQIFAPKKKQKKVQEQVHKVSSRCEEESLLARGRSSAQNKQVDENSLISTKEEPPVLEREAPFLEGPLAQSELGGGHAELPQLTLSVPVAPEVSPRPALESEELLVKTPGNYESKRQRKPTKKLLESNDLDPGFMPKKGDLGLSKKCYEAGHLENGITESCATSYSKDFGGGTTKIFDKPRKRKRQRHAAAKMQCKKVKNDDSSKEIPGSEGELMPHRTATSPKETVEEGVEHDPGMPASKKMQGERGGGAALKENVCQNCEKLGELLLCEAQCCGAFHLECLGLTEMPRGKFICNECRTGIHTCFVCKQSGEDVKRCLLPLCGKFYHEECVQKYPPTVMQNKGFRCSLHICITCHAANPANVSASKGRLMRCVRCPVAYHANDFCLAAGSKILASNSIICPNHFTPRRGCRNHEHVNVSWCFVCSEGGSLLCCDSCPAAFHRECLNIDIPEGNWYCNDCKAGKKPHYREIVWVKVGRYRWWPAEICHPRAVPSNIDKMRHDVGEFPVLFFGSNDYLWTHQARVFPYMEGDVSSKDKMGKGVDGTYKKALQEAAARFEELKAQKELRQLQEDRKNDKKPPPYKHIKVNRPIGRVQIFTADLSEIPRCNCKATDENPCGIDSECINRMLLYECHPTVCPAGGRCQNQCFSKRQYPEVEIFRTLQRGWGLRTKTDIKKGEFVNEYVGELIDEEECRARIRYAQEHDITNFYMLTLDKDRIIDAGPKGNYARFMNHCCQPNCETQKWSVNGDTRVGLFALSDIKAGTELTFNYNLECLGNGKTVCKCGAPNCSGFLGVRPKNQPIATEEKSKKFKKKQQGKRRTQGEITKEREDECFSCGDAGQLVSCKKPGCPKVYHADCLNLTKRPAGKWECPWHQCDICGKEAASFCEMCPSSFCKQHREGMLFISKLDGRLSCTEHDPCGPNPLEPGEIREYVPPPVPLPPGPSTHLAEQSTGMAAQAPKMSDKPPADTNQMLSLSKKALAGTCQRPLLPERPLERTDSRPQPLDKVRDLAGSGTKSQSLVSSQRPLDRPPAVAGPRPQLSDKPSPVTSPSSSPSVRSQPLERPLGTADPRLDKSIGAASPRPQSLEKTSVPTGLRLPPPDRLLITSSPKPQTSDRPTDKPHASLSQRLPPPEKVLSAVVQTLVAKEKALRPVDQNTQSKNRAALVMDLIDLTPRQKERAASPHQVTPQADEKMPVLESSSWPASKGLGHMPRAVEKGCVSDPLQTSGKAAAPSEDPWQAVKSLTQARLLSQPPAKAFLYEPTTQASGRASAGAEQTPGPLSQSPGLVKQAKQMVGGQQLPALAAKSGQSFRSLGKAPASLPTEEKKLVTTEQSPWALGKASSRAGLWPIVAGQTLAQSCWSAGSTQTLAQTCWSLGRGQDPKPEQNTLPALNQAPSSHKCAESEQK

SEQ ID NO: 30806 - protein, 2593 aa, Homo sapiens
MDQTCELPRRNCLLPFSNPVNLDAPEDKDSPFGNGQSNFSEPLNGCTMQLSTVSGTSQNAYGQDSPSCYIPLRRLQDLASMINVEYLNGSADGSESFQDPEKSDSRAQTPIVCTSLSPGGPTALAMKQEPSCNNSPELQVKVTKTIKNGFLHFENFTCVDDADVDSEMDPEQPVTEDESIEEIFEETQTNATCNYETKSENGVKVAMGSEQDSTPESRHGAVKSPFLPLAPQTETQKNKQRNEVDGSNEKAALLPAPFSLGDTNITIEEQLNSINLSFQDDPDSSTSTLGNMLELPGTSSSSTSQELPFVPQKILSKWEASVGLAEQYDVPKGSKNRKCIPGSIKLDSEEDMPFEDCTNDPESEHDLLLNGCLKSLAFDSEHSADEKEKPCAKSRARKSSDNPKRTSVKKGHIQFEAHKDERRGKIPENLGLNFISGDISDTQASNELSRIANSLTGSNTAPGSFLFSSCGKNTAKKEFETSNGDSLLGLPEGALISKCSREKNKPQRSLVCGSKVKLCYIGAGDEEKRSDSISICTTSDDGSSDLDPIEHSSESDNSVLEIPDAFDRTENMLSMQKNEKIKYSRFAATNTRVKAKQKPLISNSHTDHLMGCTKSAEPGTETSQVNLSDLKASTLVHKPQSDFTNDALSPKFNLSSSISSENSLIKGGAANQALLHSKSKQPKFRSIKCKHKENPVMAEPPVINEECSLKCCSSDTKGSPLASISKSGKVDGLKLLNNMHEKTRDSSDIETAVVKHVLSELKELSYRSLGEDVSDSGTSKPSKPLLFSSASSQNHIPIEPDYKFSTLLMMLKDMHDSKTKEQRLMTAQNLVSYRSPGRGDCSTNSPVGVSKVLVSGGSTHNSEKKGDGTQNSANPSPSGGDSALSGELSASLPGLLSDKRDLPASGKSRSDCVTRRNCGRSKPSSKLRDAFSAQMVKNTVNRKALKTERKRKLNQLPSVTLDAVLQGDRERGGSLRGGAEDPSKEDPLQIMGHLTSEDGDHFSDVHFDSKVKQSDPGKISEKGLSFENGKGPELDSVMNSENDELNGVNQVVPKKRWQRLNQRRTKPRKRMNRFKEKENSECAFRVLLPSDPVQEGRDEFPEHRTPSASILEEPLTEQNHADCLDSAGPRLNVCDKSSASIGDMEKEPGIPSLTPQAELPEPAVRSEKKRLRKPSKWLLEYTEEYDQIFAPKKKQKKVQEQVHKVSSRCEEESLLARGRSSAQNKQVDENSLISTKEEPPVLEREAPFLEGPLAQSELGGGHAELPQLTLSVPVAPEVSPRPALESEELLVKTPGNYESKRQRKPTKKLLESNDLDPGFMPKKGDLGLSKKCYEAGHLENGITESCATSYSKDFGGGTTKIFDKPRKRKRQRHAAAKMQCKKVKNDDSSKEIPGSEGELMPHRTATSPKETVEEGVEHDPGMPASKKMQGERGGGAALKENVCQNCEKLGELLLCEAQCCGAFHLECLGLTEMPRGKFICNECRTGIHTCFVCKQSGEDVKRCLLPLCGKFYHEECVQKYPPTVMQNKGFRCSLHICITCHAANPANVSASKGRLMRCVRCPVAYHANDFCLAAGSKILASNSIICPNHFTPRRGCRNHEHVNVSWCFVCSEGGSLLCCDSCPAAFHRECLNIDIPEGNWYCNDCKAGKKPHYREIVWVKVGRYRWWPAEICHPRAVPSNIDKMRHDVGEFPVLFFGSNDYLWTHQARVFPYMEGDVSSKDKMGKGVDGTYKKALQEAAARFEELKAQKELRQLQEDRKNDKKPPPYKHIKVNRPIGRVQIFTADLSEIPRCNCKATDENPCGIDSECINRMLLYECHPTVCPAGGRCQNQCFSKRQYPEVEIFRTLQRGWGLRTKTDIKKGEFVNEYVGELIDEEECRARIRYAQEHDITNFYMLTLDKDRIIDAGPKGNYARFMNHCCQPNCETQKWSVNGDTRVGLFALSDIKAGTELTFNYNLECLGNGKTVCKCGAPNCSGFLGVRPKNQPIATEEKSKKFKKKQQGKRRTQGEITKEREDECFSCGDAGQLVSCKKPGCPKVYHADCLNLTKRPAGKWECPWHQCDICGKEAASFCEMCPSSFCKQHREGMLFISKLDGRLSCTEHDPCGPNPLEPGEIREYVPPPVPLPPGPSTHLAEQSTGMAAQAPKMSDKPPADTNQMLSLSKKALAGTCQRPLLPERPLERTDSRPQPLDKVRDLAGSGTKSQSLVSSQRPLDRPPAVAGPRPQLSDKPSPVTSPSSSPSVRSQPLERPLGTADPRLDKSIGAASPRPQSLEKTSVPTGLRLPPPDRLLITSSPKPQTSDRPTDKPHASLSQRLPPPEKVLSAVVQTLVAKEKALRPVDQNTQSKNRAALVMDLIDLTPRQKERAASPHQVTPQADEKMPVLESSSWPASKGLGHMPRAVEKGCVSDPLQTSGKAAAPSEDPWQAVKSLTQARLLSQPPAKAFLYEPTTQASGRASAGAEQTPGPLSQSPGLVKQAKQMVGGQQLPALAAKSGQSFRSLGKAPASLPTEEKKLVTTEQSPWALGKASSRAGLWPIVAGQTLAQSCWSAGSTQTLAQTCWSLGRGQDPKPEQNTLPALNQAPSSHKCAESEQK

SEQ ID NO: 30807 - protein, 404 aa, Homo sapiens
MAMVTGGWGGPGGDTNGVDKAGGYPRAAEDDSASPPGAASDAEPGDEERPGLQVDCVVCGDKSSGKHYGVFTCEGCKSFFKRSIRRNLSYTCRSNRDCQIDQHHRNQCQYCRLKKCFRVGMRKEAVQRGRIPHSLPGAVAASSGSPPGSALAAVASGGDLFPGQPVSELIAQLLRAEPYPAAAGRFGAGGGAAGAVLGIDNVCELAARLLFSTVEWARHAPFFPELPVADQVALLRLSWSELFVLNAAQAALPLHTAPLLAAAGLHAAPMAAERAVAFMDQVRAFQEQVDKLGRLQVDSAEYGCLKAIALFTPDACGLSDPAHVESLQEKAQVALTEYVRAQYPSQPQRFGRLLLRLPALRAVPASLISQLFFMRLVGKTPIETLIRDMLLSGSTFNWPYGSGQ

SEQ ID NO: 30808 - protein, 598 aa, Homo sapiens; identical to SEQ ID NO: 182

SEQ ID NO: 30809 - protein, 611 aa, Homo sapiens; identical to SEQ ID NO: 183

SEQ ID NO: 30810 - protein, 325 aa, Homo sapiens; identical to SEQ ID NO: 184

SEQ ID NO: 30811 - protein, 495 aa, Homo sapiens
MAEPTSDFETPIGWHASPELTPTLGPLSDTAPPRDSWMFWAMLPPPPPPLTSSLPAAGSKPSSESQPPMEAQSLPGAPPPFDAQILPGAQPPFDAQSPLDSQPQPSGQPWNFHASTSWYWRQSSDRFPRHQKSFNPAVKNSYYPRKYDAKFTDFSLPPSRKQKKKKRKEPVFHFFCDTCDRGFKNQEKYDKHMSEHTKCPELDCSFTAHEKIVQFHWRNMHAPGMKKIKLDTPEEIARWREERRKNYPTLANIERKKKLKLEKEKRGAVLTTTQYGKMKGMSRHSQMAKIRSPGKNHKWKNDNSRQRAVTGSGSHLCDLKLEGPPEANADPLGVLINSDSESDKEEKPQHSVIPKEVTPALCSLMSSYGSLSGSESEPEETPIKTEADVLAENQVLDSSAPKSPSQDVKATVRNFSEAKSENRKKSFEKTNPKRKKDYHNYQTLFEPRTHHPYLLEMLLAPDIRHERNVILQCVRYIIKKDFFGLDTNSAKSKDV

SEQ ID NO: 30812 - protein, 373 aa, Homo sapiens
MEPAVSEPMRDQVARTHLTEDTPKVNADIEKVNQNQAKRCTVIGGSGFLGQHMVEQLLARGYAVNVFDIQQGFDNPQVRFFLGDLCSRQDLYPALKGVNTVFHCASPPPSSNNKELFYRVNYIGTKNVIETCKEAGVQKLILTSSASVIFEGVDIKNGTEDLPYAMKPIDYYTETKILQERAVLGANDPEKNFLTTAIRPHGIFGPRDPQLVPILIEAARNGKMKFVIGNGKNLVDFTFVENVVHGHILAAEQLSRDSTLGGKAFHITNDEPIPFWTFLSRILTGLNYEAPKYHIPYWVAYYLALLLSLLVMVISPVIQLQPTFTPMRVALAGTFHYYSCERAKKAMGYQPLVTMDDAMERTVQSFRHLRRVK

SEQ ID NO: 30813 - protein, 583 aa, Homo sapiens
MEVAANCSLRVKRPLLDPRFEGYKLSLEPLPCYQLELDAAVAEVKLRDDQYTLEHMHAFGMYNYLHCDSWYQDSVYYIDTLGRIMNLTVMLDTALGKPREVFRLPTDLTACDNRLCASIHFSSSTWVTLSDGTGRLYVIGTGERGNSASEKWEIMFNEELGDPFIIIHSISLLNAEEHSIATLLLRIEKEELDMKGSGFYVSLEWVTISKKNQDNKKYEIIKRDILRGKSVPHYAAIEPDGNGLMIVSYKSLTFVQAGQDLEENMDEDISEKIKEPLYYWQQTEDDLTVTIRLPEDSTKEDIQIQFLPDHINIVLKDHQFLEGKLYSSIDHESSTWIIKESNSLEISLIKKNEGLTWPELVIGDKQGELIRDSAQCAAIAERLMHLTSEELNPNPDKEKPPCNAQELEECDIFFEESSSLCRFDGNTLKTTHVVNLGSNQYLFSVIVDPKEMPCFCLRHDVDALLWQPHSSKQDDMWEHIATFNALGYVQASKRDKKFFACAPNYSYAALCECLRRVFIYRQPAPMSTVLYNRKEGRQVGQVAKQQVASLETNDPILGFQATNERLFVLTTKNLFLIKVNTEN

SEQ ID NO: 30814 - protein, 554 aa, Homo sapiens
MLYLQGWSMPAVAEVKLRDDQYTLEHMHAFGMYNYLHCDSWYQDSVYYIDTLGRIMNLTVMLDTALGKPREVFRLPTDLTACDNRLCASIHFSSSTWVTLSDGTGRLYVIGTGERGNSASEKWEIMFNEELGDPFIIIHSISLLNAEEHSIATLLLRIEKEELDMKGSGFYVSLEWVTISKKNQDNKKYEIIKRDILRGKSVPHYAAIEPDGNGLMIVSYKSLTFVQAGQDLEENMDEDISEKIKEPLYYWQQTEDDLTVTIRLPEDSTKEDIQIQFLPDHINIVLKDHQFLEGKLYSSIDHESSTWIIKESNSLEISLIKKNEGLTWPELVIGDKQGELIRDSAQCAAIAERLMHLTSEELNPNPDKEKPPCNAQELEECDIFFEESSSLCRFDGNTLKTTHVVNLGSNQYLFSVIVDPKEMPCFCLRHDVDALLWQPHSSKQDDMWEHIATFNALGYVQASKRDKKFFACAPNYSYAALCECLRRVFIYRQPAPMSTVLYNRKEGRQVGQVAKQQVASLETNDPILGFQATNERLFVLTTKNLFLIKVNTEN

SEQ ID NO: 30815 - protein, 496 aa, Homo sapiens
MYNQDTALGKPREVFRLPTDLTACDNRLCASIHFSSSTWVTLSDGTGRLYVIGTGERGNSASEKWEIMFNEELGDPFIIIHSISLLNAEEHSIATLLLRIEKEELDMKGSGFYVSLEWVTISKKNQDNKKYEIIKRDILRGKSVPHYAAIEPDGNGLMIVSYKSLTFVQAGQDLEENMDEDISEKIKEPLYYWQQTEDDLTVTIRLPEDSTKEDIQIQFLPDHINIVLKDHQFLEGKLYSSIDHESSTWIIKESNSLEISLIKKNEGLTWPELVIGDKQGELIRDSAQCAAIAERLMHLTSEELNPNPDKEKPPCNAQELEECDIFFEESSSLCRFDGNTLKTTHVVNLGSNQYLFSVIVDPKEMPCFCLRHDVDALLWQPHSSKQDDMWEHIATFNALGYVQASKRDKKFFACAPNYSYAALCECLRRVFIYRQPAPMSTVLYNRKEGRQVGQVAKQQVASLETNDPILGFQATNERLFVLTTKNLFLIKVNTEN

SEQ ID NO: 30816 - protein, 456 aa, Homo sapiens
MAAALKCLLTLGRWCPGLGVAPQARALAALVPGVTQVDNKSGFLQKRPHRQHPGILKLPHVRLPQALANGAQLLLLGSAGPTMENQVQTLTSYLWSRHLPVEPEELQRRARHLEKKFLENPDLSQTEEKLRGAVLHALRKTTYHWQELSYTEGLSLVYMAARLDGGFAAVSRAFHEIRARNPAFQPQTLMDFGSGTGSVTWAAHSIWGQSLREYMCVDRSAAMLVLAEKLLKGGSESGEPYIPGVFFRQFLPVSPKVQFDVVVSAFSLSELPSKADRTEVVQTLWRKTGHFLVLVENGTKAGHSLLMDARDLVLKGKEKSPLDPRPGFVFAPCPHELPCPQLTNLACSFSQAYHPIPFSWNKKPKEEKFSMVILARGSPEEAHRWPRITQPVLKRPRHVHCHLCCPDGHMQHAVLTARRHGRDLYRCARVSSWGDLLPVLTPSAFPPSTAQDPSES

SEQ ID NO: 30817 - protein, 447 aa, Homo sapiens
MAAALKCLLTLGRWCPGLGVAPQARALAALVPGVTQVDNKSGFLQKRPHRQHPGILKLPHVRLPQALANGAQLLLLGSAGPTMENQVQTLTSYLWSRHLPVEPEELQRRARHLEKKFLENPDLSQTEEKLRGAVLHALRKTTYHWQELSYTEGLSLVYMAARLDGGFAAVSRAFHEIRARNPAFQPQTLMDFGSGTGSVTWAAHSIWGQSLREYMCVDRSAAMLVLAEKLLKGGSESGEPYIPGVFFRQFLPVSPKVQFDVVVSAFSLSELPSKADRTEVVQTLWRKTGHFLVLVENGTKAGHSLLMDARDLVLKGKEKSPLDPRPGFVFAPCPHELPCPQLTNLACSFSQAYHPIPFSWNKKPKEEKFSMVILARGSPEEAHRWPRITQPVLKRPRHVHCHLCCPDGHMQHAVLTARRHGSSWGDLLPVLTPSAFPPSTAQDPSES

SEQ ID NO: 30818 - protein, 478 aa, Homo sapiens
MAAALKCLLTLGRWCPGLGVAPQARALAALVPGVTQVDNKSGFLQKRPHRQHPGILKLPHVRLPQALANGAQLLLLGSAGPTMENQVQTLTSYLWSRHLPVEPEELQRRARHLEKKFLENPDLSQTEEKLRGAVLHALRKTTYHWQELSYTEGLSLVYMAARLDGGFAAVSRAFHEIRARNPAFQPQTLMDFGSGTGSVTWAAHSIWGQSLREYMCVDRSAAMLVLAEKLLKGGSESGEPYIPGVFFRQFLPVSPKVQFDVVVSAFSLSELPSKADRTEVVQTLWRKTGHFLVLVENGTKAGHSLLMDARDLVLKGKEKSPLDPRPGFVFAPCPHELPCPQLTNLACSFSQAYHPIPFSWNKKPKEEKFSMVILARGSPEEAHRWPRITQPVLKRPRHVHCHLCCPDGHMQHAVLTARRHGRYGGCDQNQWDVAGSCSPRQHLFPQGFVSLCPCQLLGRSFTCAYSVCVSSIYGSGSL

SEQ ID NO: 30819 - protein, 788 aa, Homo sapiens
MDVSGQETDWRSTAFRQKLVSQIEDAMRKAGVAHSKSSKDMESHVFLKAKTRDEYLSLVARLIIHFRDIHNKKSQASVSDPMNALQSLTGGPAAGAAGIGMPPRGPGQSLGGMGSLGAMGQPMSLSGQPPPGTSGMAPHSMAVVSTATPQTQLQLQQVALQQQQQQQQFQQQQQAALQQQQQQQQQQQFQAQQSAMQQQFQAVVQQQQQLQQQQQQQQHLIKLHHQNQQQIQQQQQQLQRIAQLQLQQQQQQQQQQQQQQQQALQAQPPIQQPPMQQPQPPPSQALPQQLQQMHHTQHHQPPPQPQQPPVAQNQPSQLPPQSQTQPLVSQAQALPGQMLYTQPPLKFVRAPMVVQQPPVQPQVQQQQTAVQTAQAAQMVAPGVQMITEALAQGGMHIRARFPPTTAVSAIPSSSIPLGRQPMAQVSQSSLPMLSSPSPGQQVQTPQSMPPPPQPSPQPGQPSSQPNSNVSSGPAPSPSSFLPSPSPQPSQSPVTARTPQNFSVPSPGPLNTPVNPSSVMSPAGSSQAEEQQYLDKLKQLSKYIEPLRRMINKIDKNEDRKKDLSKMKSLLDILTDPSKRCPLKTLQKCEIALEKLKNDMAVPTPPPPPVPPTKQQYLCQPLLDAVLANIRSPVFNHSLYRTFVPAMTAIHGPPITAPVVCTRKRRLEDDERQSIPSVLQGEVARLDPKFLVNLDPSHCSNNGTVHLICKLDDKDLPSVPPLELSVPADYPAQSPLWIDRQWQYDANPFLQSVHRCMTSRLLQLPDKHSVTALLNTWAQSVHQACLSAA

SEQ ID NO: 30820 - protein, 748 aa, Homo sapiens
MDVSGQETDWRSTAFRQKLVSQIEDAMRKAGVAHSKSSKDMESHVFLKAKTRDEYLSLVARLIIHFRDIHNKKSQASVSDPMNALQSLTGGPAAGAAGIGMPPRGPGQSLGGMGSLGAMGQPMSLSGQPPPGTSGMAPHSMAVVSTATPQTQLQLQQVALQQQQQQQQFQQQQQAALQQQQQQQQQQQFQAQQSAMQQQFQAVVQQQQQLQQQQQQQQHLIKLHHQNQQQIQQQQQQLQRIAQLQLQQQQQQQQQQQQQQQQALQAQPPIQQPPMQQPQPPPSQALPQQLQQMHHTQHHQPPPQPQQPPVAQNQPSQLPPQSQTQPLVSQAQALPGQMLYTQPPLKFVRAPMVVQQPPVQPQVQQQQTAVQTAQAAQMVAPGVQVSQSSLPMLSSPSPGQQVQTPQSMPPPPQPSPQPGQPSSQPNSNVSSGPAPSPSSFLPSPSPQPSQSPVTARTPQNFSVPSPGPLNTPVNPSSVMSPAGSSQAEEQQYLDKLKQLSKYIEPLRRMINKIDKNEDRKKDLSKMKSLLDILTDPSKRCPLKTLQKCEIALEKLKNDMAVPTPPPPPVPPTKQQYLCQPLLDAVLANIRSPVFNHSLYRTFVPAMTAIHGPPITAPVVCTRKRRLEDDERQSIPSVLQGEVARLDPKFLVNLDPSHCSNNGTVHLICKLDDKDLPSVPPLELSVPADYPAQSPLWIDRQWQYDANPFLQSVHRCMTSRLLQLPDKHSVTALLNTWAQSVHQACLSAA

SEQ ID NO: 30821 - protein, 677 aa, Homo sapiens
MDVSGQETDWRSTAFRQKLVSQIEDAMRKAGVAHSKSSKDMESHVFLKAKTRDEYLSLVARLIIHFRDIHNKKSQASVSAQLQLQQVALQQQQQQQQFQQQQQAALQQQQQQQQQQQFQAQQSAMQQQFQAVVQQQQQLQQQQQQQQHLIKLHHQNQQQIQQQQQQLQRIAQLQLQQQQQQQQQQQQQQQQALQAQPPIQQPPMQQPQPPPSQALPQQLQQMHHTQHHQPPPQPQQPPVAQNQPSQLPPQSQTQPLVSQAQALPGQMLYTQPPLKFVRAPMVVQQPPVQPQVQQQQTAVQTAQAAQMVAPGVQVSQSSLPMLSSPSPGQQVQTPQSMPPPPQPSPQPGQPSSQPNSNVSSGPAPSPSSFLPSPSPQPSQSPVTARTPQNFSVPSPGPLNTPVNPSSVMSPAGSSQAEEQQYLDKLKQLSKYIEPLRRMINKIDKNEDRKKDLSKMKSLLDILTDPSKRCPLKTLQKCEIALEKLKNDMAVPTPPPPPVPPTKQQYLCQPLLDAVLANIRSPVFNHSLYRTFVPAMTAIHGPPITAPVVCTRKRRLEDDERQSIPSVLQGEVARLDPKFLVNLDPSHCSNNGTVHLICKLDDKDLPSVPPLELSVPADYPAQSPLWIDRQWQYDANPFLQSVHRCMTSRLLQLPDKHSVTALLNTWAQSVHQACLSAA

SEQ ID NO: 30822 - protein, 178 aa, Homo sapiens
MAAPLGGMFSGQPPGPPQAPPGLPGQASLLQAAPGAPRPSSSTLVDELESSFEACFASLVSQDYVNGTDQEEIRTGVDQCIQKFLDIARQTECFFLQKRLQLSVQKPEQVIKEDVSELRNELQRKDALVQKHLTKLRHWQQVLEDINVQHKKPADIPQGSLAYLEQASANIPAPLKPT

SEQ ID NO: 30823 - protein, 618 aa, Homo sapiens
MKKDVRILLVGEPRVGKTSLIMSLVSEEFPEEVPPRAEEITIPADVTPERVPTHIVDYSEAEQSDEQLHQEISQANVICIVYAVNNKHSIDKVTSRWIPLINERTDKDSRLPLILVGNKSDLVEYSSMETILPIMNQYTEIETCVECSAKNLKNISELFYYAQKAVLHPTGPLYCPEEKEMKPACIKALTRIFKISDQDNDGTLNDAELNFFQRICFNTPLAPQALEDVKNVVRKHISDGVADSGLTLKGFLFLHTLFIQRGRHETTWTVLRRFGYDDDLDLTPEYLFPLLKIPPDCTTELNHHAYLFLQSTFDKHDLDRDCALSPDELKDLFKVFPYIPWGPDVNNTVCTNERGWITYQGFLSQWTLTTYLDVQRCLEYLGYLGYSILTEQESQASAVTVTRDKKIDLQKKQTQRNVFRCNVIGVKNCGKSGVLQALLGRNLMRQKKIREDHKSYYAINTVYVYGQEKYLLLHDISESEFLTEAEIICDVVCLVYDVSNPKSFEYCARIFKQHFMDSRIPCLIVAAKSDLHEVKQEYSISPTDFCRKHKMPPPQAFTCNTADAPSKDIFVKLTTMAMYPHVTQADLKSSTFWLRASFGATVFAVLGFAMYKALLKQR

SEQ ID NO: 30824 - protein, 650 aa, Homo sapiens
MKKDVRILLVGEPRVGKTSLIMSLVSEEFPEEVPPRAEEITIPADVTPERVPTHIVDYSEAEQSDEQLHQEISQANVICIVYAVNNKHSIDKVTSRWIPLINERTDKDSRLPLILVGNKSDLVEYSSMETILPIMNQYTEIETCVECSAKNLKNISELFYYAQKAVLHPTGPLYCPEEKEMKPACIKALTRIFKISDQDNDGTLNDAELNFFQRICFNTPLAPQALEDVKNVVRKHISDGVADSGLTLKGFLFLHTLFIQRGRHETTWTVLRRFGYDDDLDLTPEYLFPLLKIPPDCTTELNHHAYLFLQSTFDKHDLDRDCALSPDELKDLFKVFPYIPWGPDVNNTVCTNERGWITYQGFLSQWTLTTYLDVQRCLEYLGYLGYSILTEQESQASAVTVTRDKKIDLQKKQTQRNVFRCNVIGVKNCGKSGVLQALLGRNLMRQKKIREDHKSYYAINTVYVYGQEKYLLLHDISESEFLTEAEIICDVVCLVYDVSNPKSFEYCARIFKQHFMDSRIPCLIVAAKSDLHEVKQEYSISPTDFCRKHKMPPPQAFTCNTADAPSKDIFVKLTTMAMYPEDHYRDRLSRDMGHTDRIENLRKIWVFLKTALHVTQADLKSSTFWLRASFGATVFAVLGFAMYKALLKQR

SEQ ID NO: 30825 - protein, 691 aa, Homo sapiens
MKKDVRILLVGEPRVGKTSLIMSLVSEEFPEEVPPRAEEITIPADVTPERVPTHIVDYSEAEQSDEQLHQEISQANVICIVYAVNNKHSIDKVTSRWIPLINERTDKDSRLPLILVGNKSDLVEYSSMETILPIMNQYTEIETCVECSAKNLKNISELFYYAQKAVLHPTGPLYCPEEKEMKPACIKALTRIFKISDQDNDGTLNDAELNFFQRICFNTPLAPQALEDVKNVVRKHISDGVADSGLTLKGFLFLHTLFIQRGRHETTWTVLRRFGYDDDLDLTPEYLFPLLKIPPDCTTELNHHAYLFLQSTFDKHDLDRDCALSPDELKDLFKVFPYIPWGPDVNNTVCTNERGWITYQGFLSQWTLTTYLDVQRCLEYLGYLGYSILTEQESQASAVTVTRDKKIDLQKKQTQRNVFRCNVIGVKNCGKSGVLQALLGRNLMRQKKIREDHKSYYAINTVYVYGQEKYLLLHDISESEFLTEAEIICDVVCLVYDVSNPKSFEYCARIFKQHFMDSRIPCLIVAAKSDLHEVKQEYSISPTDFCRKHKMPPPQAFTCNTADAPSKDIFVKLTTMAMYPEDHYRDRLSRDMGHTDRIENLRKIWVFLKTAFHARLRCMCTCNRCTFCICQNFLNSDLLQSVKNKIFTAVLNRHVTQADLKSSTFWLRASFGATVFAVLGFAMYKALLKQR

SEQ ID NO: 30826 - protein, 580 aa, Homo sapiens
MKKDVRILLVGEPRVGKTSLIMSLVSEEFPEEVPPRAEEITIPADVTPERVPTHIVDYSEAEQSDEQLHQEISQANVICIVYAVNNKHSIDKVTSRWIPLINERTDKDSRLPLILVGNKSDLVEYSSMETILPIMNQYTEIETCVECSAKNLKNISELFYYAQKAVLHPTGPLYCPEEKEMKPACIKALTRIFKISDQDNDGTLNDAELNFFQRICFNTPLAPQALEDVKNVVRKHISDGVADSGLTLKGFLFLHTLFIQRGRHETTWTVLRRFGYDDDLDLTPEYLFPLLKIPPDCTTELNHHAYLFLQSTFDKHDLDRDCALSPDELKDLFKVFPYIPWGPDVNNTVCTNERGWITYQGFLSQWTLTTYLDVQRCLEYLGYLGYSILTEQESQASAVTVTRDKKIDLQKKQTQRNVFRCNVIGVKNCGKSGVLQALLGRNLMRQKKIREDHKSYYAINTVYVYGQEKYLLLHDISESEFLTEAEIICDVVCLVYDVSNPKSFEYCARIFKQHFMDSRIPCLIVAAKSDLHEVKQEYSISPTDFCRKHKMPPPQAFTCNTADAPSKDIFVKLTTMAMYP

SEQ ID NO: 30827 - protein, 625 aa, Homo sapiens
MKKDVRILLVGEPRVGKTSLIMSLVSEEFPEEVPPRAEEITIPADVTPERVPTHIVDYSEAEQSDEQLHQEISQANVICIVYAVNNKHSIDKVTSRWIPLINERTDKDSRLPLILVGNKSDLVEYSSMETILPIMNQYTEIETCVECSAKNLKNISELFYYAQKAVLHPTGPLYCPEEKEMKPACIKALTRIFKISDQDNDGTLNDAELNFFQRICFNTPLAPQALEDVKNVVRKHISDGVADSGLTLKGFLFLHTLFIQRGRHETTWTVLRRFGYDDDLDLTPEYLFPLLKIPPDCTTELNHHAYLFLQSTFDKHDLDRDCALSPDELKDLFKVFPYIPWGPDVNNTVCTNERGWITYQGFLSQWTLTTYLDVQRCLEYLGYLGYSILTEQESQASAVTVTRDKKIDLQKKQTQRNVFRCNVIGVKNCGKSGVLQALLGRNLMRQKKIREDHKSYYAINTVYVYGQEKYLLLHDISESEFLTEAEIICDVVCLVYDVSNPKSFEYCARIFKQHFMDSRIPCLIVAAKSDLHEVKQEYSISPTDFCRKHKMPPPQAFTCNTADAPSKDIFVKLTTMAMYPHARLRCMCTCNRCTFCICQNFLNSDLLQSVKNKIFTAVLNRIISA

SEQ ID NO: 30828 - protein, 247 aa, Homo sapiens
MKKDVRILLVGEPRVGKTSLIMSLVSEEFPEEVPPRAEEITIPADVTPERVPTHIVDYSEAEQSDEQLHQEISQANVICIVYAVNNKHSIDKVTSRWIPLINERTDKDSRLPLILVGNKSDLVEYSSMETILPIMNQYTEIETCVECSAKNLKNISELFYYAQKAVLHPTGPLYCPEEKEMKPACIKALTRIFKISDQDNDGTLNDAELNFFQRICFNTPLAPRFGFEQVLVLLFLQFWALLCTKHY

SEQ ID NO: 30829 - protein, 659 aa, Homo sapiens
MKKDVRILLVGEPRVGKTSLIMSLVSEEFPEEVPPRAEEITIPADVTPERVPTHIVDYSEAEQSDEQLHQEISQANVICIVYAVNNKHSIDKVTSRWIPLINERTDKDSRLPLILVGNKSDLVEYSSMETILPIMNQYTEIETCVECSAKNLKNISELFYYAQKAVLHPTGPLYCPEEKEMKPACIKALTRIFKISDQDNDGTLNDAELNFFQRICFNTPLAPQALEDVKNVVRKHISDGVADSGLTLKGFLFLHTLFIQRGRHETTWTVLRRFGYDDDLDLTPEYLFPLLKIPPDCTTELNHHAYLFLQSTFDKHDLDRDCALSPDELKDLFKVFPYIPWGPDVNNTVCTNERGWITYQGFLSQWTLTTYLDVQRCLEYLGYLGYSILTEQESQASAVTVTRDKKIDLQKKQTQRNVFRCNVIGVKNCGKSGVLQALLGRNLMRQKKIREDHKSYYAINTVYVYGQEKYLLLHDISESEFLTEAEIICDVVCLVYDVSNPKSFEYCARIFKQHFMDSRIPCLIVAAKSDLHEVKQEYSISPTDFCRKHKMPPPQAFTCNTADAPSKDIFVKLTTMAMYPHARLRCMCTCNRCTFCICQNFLNSDLLQSVKNKIFTAVLNRHVTQADLKSSTFWLRASFGATVFAVLGFAMYKALLKQR

SEQ ID NO: 30830 - protein, 178 aa, Homo sapiens
MSTPPLAASGMAPGPFAGPQAQQAAREVNTASLCRIGQETVQDIVYRTMEIFQLLRNMQLPNGVTYHTGTYQDRLTKLQDNLRQLSVLFRKLRLVYDKCNENCGGMDPIPVEQLIPYVEEDGSKNDDRAGPPRFASEERREIAEVNKKLKQKNQQLKQIMDQLRNLIWDINAMLAMRN

SEQ ID NO: 30831 - protein, 143 aa, Homo sapiens
MSTPPLAASGMAPGPFAGPQAQQAAREVNTASLCRIGQETVQDIVYRTMEIFQLLRNMQLPNGVTYHTGTYQDRLTKLQDNLRQLSVLFRKLRLVYDKCNENCGGMDPIPVEKLKQKNQQLKQIMDQLRNLIWDINAMLAMRN

SEQ ID NO: 30832 - protein, 246 aa, Homo sapiens
MAAVDIRDNLLGISWVDSSWIPILNSGSVLDYFSERSNPFYDRTCNNEVVKMQRLTLEHLNQMVGIEYILLHAQEPILFIIRKQQRQSPAQVIPLADYYIIAGVIYQAPDLGSVINSRVLTAVHGIQSAFDEAMSYCRYHPSKGYWWHFKDHEEQDKVRPKAKRKEEPSSIFQRQRVDALLLDLRQKFPPKFVQLKPGEKPVPVDQTKKEAEPIPETVKPEEKETTKNVQQTVSAKGPPEKRMRLQ

SEQ ID NO: 30833 - protein, 253 aa, Homo sapiens
MAAVDIRDNLLGISWVDSSWIPILNSGSVLDYFSERSNPFYDRTCNNEVVKMQRLTLEHLNQMVGIEYILLHAQEPILFIIRKQQRQSPAQVIPLADYYIIAGVIYQAPDLGSVINSRVSLFSFYKLTAVHGIQSAFDEAMSYCRYHPSKGYWWHFKDHEEQDKVRPKAKRKEEPSSIFQRQRVDALLLDLRQKFPPKFVQLKPGEKPVPVDQTKKEAEPIPETVKPEEKETTKNVQQTVSAKGPPEKRMRLQ

SEQ ID NO: 30834 - protein, 181 aa, Homo sapiens
MAAVDIRDNLLGISWVDSSWIPILNSGSVLDYFSERSNPFYDRTCNNEVVKMQRLTLEHLNQMVGIEYILLHAQEPILFIIRKQQRQSPAQVIPLADYYIIAGVIYQAPDLGSVINSRVLTAVHGIQSAFDEAMSYCRYHPSKGYWWHFKDHEEQAKAWRKACSSGSNKERGRTYTRNCKT

SEQ ID NO: 30835 - protein, 146 aa, Homo sapiens
MASAGVAAGRQAEDVLPPTSDQPLPDTKPLPPPQPPPVPAPQPQQSPAPRPQSPARAREEENYSFLPLVHNIIKCMDKDSPEVHQDLNALKSKFQEMRKLISTMPGIHLSPEQQQQQLQSLREQVRTKNELLQKYKSLCMFEIPKE

SEQ ID NO: 30836 - protein, 411 aa, Homo sapiens
MMGRSPGFAMQHIVGVPHVLVRRGLLGRDLFMTRTLCSPGPSQPGEKRPEEVALGLHHRLPALGRALGHSIQQRATSTAKTWWDRYEEFVGLNEVREAQGKVTEAEKVFMVARGLVREAREDLEVHQAKLKEVRDRLDRVSREDSQYLELATLEHRMLQEEKRLRTAYLRAEDSEREKFSLFSAAVRESHEKERTRAERTKNWSLIGSVLGALIGVAGSTYVNRVRLQELKALLLEAQKGPVSLQEAIREQASSYSRQQRDLHNLMVDLRGLVHAAGPGQDSGSQAGSPPTRDRDVDVLSAALKEQLSHSRQVHSCLEGLREQLDGLEKTCSQMAGVVQLVKSAAHPGLVEPADGAMPSFLLEQGSMILALSDTEQRLEAQVNRNTIYSTLVTCVTFVATLPVLYMLFKAS

SEQ ID NO: 30837 - protein, 302 aa, Homo sapiens
MVARGLVREAREDLEVHQAKLKEVRDRLDRVSREDSQYLELATLEHRMLQEEKRLRTAYLRAEDSEREKFSLFSAAVRESHEKERTRAERTKNWSLIGSVLGALIGVAGSTYVNRVRLQELKALLLEAQKGPVSLQEAIREQASSYSRQQRDLHNLMVDLRGLVHAAGPGQDSGSQAGSPPTRDRDVDVLSAALKEQLSHSRQVHSCLEGLREQLDGLEKTCSQMAGVVQLVKSAAHPGLVEPADGAMPSFLLEQGSMILALSDTEQRLEAQVNRNTIYSTLVTCVTFVATLPVLYMLFKAS

SEQ ID NO: 30838 - protein, 208 aa, Homo sapiens [sequence omitted]

SEQ ID NO: 30839 - protein, 2491 aa, Homo sapiens
MGAAAGRSPHLGPAPARRPQRSLLLLQLLLLVAAPGSTQAQAAPFPELCSYTWEAVDTKNNVLYKINICGSVDIVQCGPSSAVCMHDLKTRTYHSVGDSVLRSATRSLLEFNTTVSCDQQGTNHRVQSSIAFLCGKTLGTPEFVTATECVHYFEWRTTAACKKDIFKANKEVPCYVFDEELRKHDLNPLIKLSGAYLVDDSDPDTSLFINVCRDIDTLRDPGSQLRACPPGTAACLVRGHQAFDVGQPRDGLKLVRKDRLVLSYVREEAGKLDFCDGHSPAVTITFVCPSERREGTIPKLTAKSNCRYEIEWITEYACHRDYLESKTCSLSGEQQDVSIDLTPLAQSGGSSYISDGKEYLFYLNVCGETEIQFCNKKQAAVCQVKKSDTSQVKAAGRYHNQTLRYSDGDLTLIYFGGDECSSGFQRMSVINFECNKTAGNDGKGTPVFTGEVDCTYFFTWDTEYACVKEKEDLLCGATDGKKRYDLSALVRHAEPEQNWEAVDGSQTETEKKHFFINICHRVLQEGKARGCPEDAAVCAVDKNGSKNLGKFISSPMKEKGNIQLSYSDGDDCGHGKKIKTNITLVCKPGDLESAPVLRTSGEGGCFYEFEWHTAAACVLSKTEGENCTVFDSQAGFSFDLSPLTKKNGAYKVETKKYDFYINVCGPVSVSPCQPDSGACQVAKSDEKTWNLGLSNAKLSYYDGMIQLNYRGGTPYNNERHTPRATLITFLCDRDAGVGFPEYQEEDNSTYNFRWYTSYACPEEPLECVVTDPSTLEQYDLSSLAKSEGGLGGNWYAMDNSGEHVTWRKYYINVCRPLNPVPGCNRYASACQMKYEKDQGSFTEVVSISNLGMAKTGPVVEDSGSLLLEYVNGSACTTSDGRQTTYTTRIHLVCSRGRLNSHPIFSLNWECVVSFLWNTEAACPIQTTTDTDQACSIRDPNSGFVFNLNPLNSSQGYNVSGIGKIFMFNVCGTMPVCGTILGKPASGCEAETQTEELKNWKPARPVGIEKSLQLSTEGFITLTYKGPLSAKGTADAFIVRFVCNDDVYSGPLKFLHQDIDSGQGIRNTYFEFETALACVPSPVDCQVTDLAGNEYDLTGLSTVRKPWTAVDTSVDGRKRTFYLSVCNPLPYIPGCQGSAVGSCLVSEGNSWNLGVVQMSPQAAANGSLSIMYVNGDKCGNQRFSTRITFECAQISGSPAFQLQDGCEYVFIWRTVEACPVVRVEGDNCEVKDPRHGNLYDLKPLGLNDTIVSAGEYTYYFRVCGKLSSDVCPTSDKSKVVSSCQEKREPQGFHKVAGLLTQKLTYENGLLKMNFTGGDTCHKVYQRSTAIFFYCDRGTQRPVFLKETSDCSYLFEWRTQYACPPFDLTECSFKDGAGNSFDLSSLSRYSDNWEAITGTGDPEHYLINVCKSLAPQAGTEPCPPEAAACLLGGSKPVNLGRVRDGPQWRDGIIVLKYVDGDLCPDGIRKKSTTIRFTCSESQVNSRPMFISAVEDCEYTFAWPTATACPMKSNEHDDCQVTNPSTGHLFDLSSLSGRAGFTAAYSEKGLVYMSICGENENCPPGVGACFGQTRISVGKANKRLRYVDQVLQLVYKDGSPCPSKSGLSYKSVISFVCRPEARPTNRPMLISLDKQTCTLFFSWHTPLACEQATECSVRNGSSIVDLSPLIHRTGGYEAYDESEDDASDTNPDFYINICQPLNPMHGVPCPAGAAVCKVPIDGPPIDIGRVAGPPILNPIANEIYLNFESSTPCLADKHFNYTSLIAFHCKRGVSMGTPKLLRTSECDFVFEWETPVVCPDEVRMDGCTLTDEQLLYSFNLSSLSTSTFKVTRDSRTYSVGVCTFAVGPEQGGCKDGGVCLLSGTKGASFGRLQSMKLDYRHQDEAVVLSYVNGDRCPPETDDGVPCVFPFIFNGKSYEECIIESRAKLWCSTTADYDRDHEWGFCRHSNSYRTSSIIFKCDEDEDIGRPQVFSEVRGCDVTFEWKTKVVCPPKKLECKFVQKHKTYDLRLLSSLTGSWSLVHNGVSYYINLCQKIYKGPLGCSERASICRRTTTGDVQVLGLVHTQKLGVIGDKVVVTYSKGYPCGGNKTASSVIELTCTKTVGRPAFKRFDIDSCTYYFSWDSRAACAVKPQEVQMVNGTITNPINGKSFSLGDIYFKLFRASGDMRTNGDNYLYEIQLSSITSSRNPACSGANICQVKPNDQHFSRKVGTSDKTKYYLQDGDLDVVFASSSKCGKDKTKSVSSTIFFHCDPLVEDGIPEFSHETADCQYLFSWYTSAVCPLGVGFDSENPGDDGQMHKGLSERSQAVGAVLSLLLVALTCCLLALLLYKKERRETVISKLTTCCRRSSNVSYKYSKVNKEEETDENETEWLMEEIQLPPPRQGKEGQENGHITTKSVKALSSLHGDDQDSEDEVLTIPEVKVHSGRGAGAESSHPVRNAQSNALQEREDDRVGLVRGEKARKGKSSSAQQKTVSSTKLVSFHDDSDEDLLHI

SEQ ID NO: 30840 - protein, 701 aa, Homo sapiens
MDLWNLSWFLFLDALLVISGLATPENFDVDGGMDQDIFDINEGLGLDLFEGDIRLDRAQIRNSIIGEKYRWPHTIPYVLEDSLEMNAKGVILNAFERYRLKTCIDFKPWAGETNYISVFKGSGCWSSVGNRRVGKQELSIGANCDRIATVQHEFLHALGFWHEQSRSDRDDYVRIMWDRILSGREHNFNTYSDDISDSLNVPYDYTSVMHYSKTAFQNGTEPTIVTRISDFEDVIGQRMDFSDSDLLKLNQLYNCSSSLSFMDSCSFELENVCGMIQSSGDNADWQRVSQVPRGPESDHSNMGQCQGSGFFMHFDSSSVNVGATAVLESRTLYPKRGFQCLQFYLYNSGSESDQLNIYIREYSADNVDGNLTLVEEIKEIPTGSWQLYHVTLKVTKKFRVVFEGRKGSGASLGGLSIDDINLSETRCPHHIWHIRNFTQFIGSPNGTLYSPPFYSSKGYAFQIYLNLAHVTNAGIYFHLISGANDDQLQWPCPWQQATMTLLDQNPDIRQRMSNQRSITTDPFMTTDNGNYFWDRPSKVGTVALFSNGTQFRRGGGYGTSAFITHERLKSRDFIKGDDVYILLTVEDISHLNSTQIQLTPAPSVQDLCSKTTCKNDGVCTVRDGKAECRCQSGEDWWYMGERCEKRGSTRDTIVIAVSSTVAVFALMLIITLVSVYCTRKKYRERMSSNRPNLTPQNQHAF

SEQ ID NO: 30841 - protein, 939 aa, Homo sapiens
MAAQPPRGIRLSALCPKFLHTNSTSHTWPFSAVAELIDNAYDPDVNAKQIWIDKTVINDHICLTFTDNGNGMTSDKLHKMLSFGFSDKVTMNGHVPVGLYGNGFKSGSMRLGKDAIVFTKNGESMSVGLLSQTYLEVIKAEHVVVPIVAFNKHRQMINLAESKASLAAILEHSLFSTEQKLLAELDAIIGKKGTRIIIWNLRSYKNATEFDFEKDKYDIRIPEDLDEITGKKGYKKQERMDQIAPESDYSLRAYCSILYLKPRMQIILRGQKVKTQLVSKSLAYIERDVYRPKFLSKTVRITFGFNCRNKDHYGIMMYHRNRLIKAYEKVGCQLRANNMGVGVVGIIECNFLKPTHNKQDFDYTNEYRLTITALGEKLNDYWNEMKVKKNTEYPLNLPVEDIQKRPDQTWVQCDACLKWRKLPDGMDQLPEKWYCSNNPDPQFRNCEVPEEPEDEDLVHPTYEKTYKKTNKEKFRIRQPEMIPRINAELLFRPTALSTPSFSSPKESVPRRHLSEGTNSYATRLLNNHQVPPQSEPESNSLKRRLSTRSSILNAKNRRLSSQFENSVYKGDDDDEDVIILEENSTPKPAVDHDIDMKSEQSHVEQGGVQVEFVGDSEPCGQTGSTSTSSSRCDQGNTAATQTEVPSLVVKKEETVEDEIDVRNDAVILPSCVEAEAKIHETQETTDKSADDAGCQLQELRNQLLLVTEEKENYKRQCHMFTDQIKVLQQRILEMNDKYVKKETCHQSTETDAVFLLESINGKSESPDHMVSQYQQALEEIERLKKQCSALQHVKAECSQCSNNESKSEMDEMAVQLDDVFRQLDKCSIERDQYKSEVELLEMEKSQIRSQCEELKTEVEQLKSTNQQTATDVSTSSNIEESVNHMDGESLKLRSLRVNVGQLLAMIVPDLDLQQVNYDVDVVDEILGQVVEQMSEISST

SEQ ID NO: 30842 - protein, 651 aa, Homo sapiens
MKDYDELLKYYELHETIGTGGFAKVKLACHILTGEMVAIKIMDKNTLGSDLPRIKTEIEALKNLRHQHICQLYHVLETANKIFMVLEYCPGGELFDYIISQDRLSEEETRVVFRQIVSAVAYVHSQGYAHRDLKPENLLFDEYHKLKLIDFGLCAKPKGNKDYHLQTCCGSLAYAAPELIQGKSYLGSEADVWSMGILLYVLMCGFLPFDDDNVMALYKKIMRGKYDVPKWLSPSSILLLQQMLQVDPKKRISMKNLLNHPWIMQDYNYPVEWQSKNPFIHLDDDCVTELSVHHRNNRQTMEDLISLWQYDHLTATYLLLLAKKARGKPVRLRLSSFSCGQASATPFTDIKSNNWSLEDVTASDKNYVAGLIDYDWCEDDLSTGAATPRTSQFTKYWTESNGVESKSLTPALCRTPANKLKNKENVYTPKSAVKNEEYFMFPEPKTPVNKNQHKREILTTPNRYTTPSKARNQCLKETPIKIPVNSTGTDKLMTGVISPERRCRSVELDLNQAHMEETPKRKGAKVFGSLERGLDKVITVLTRSKRKGSARDGPRRLKLHYNVTTTRLVNPDQLLNEIMSILPKKHVDFVQKGYTLKCQTQSDFGKVTMQFELEVCQLQKPDVVGIRRQRLKGDAWVYKRLVEDILSSCKV

SEQ ID NO: 30843 - protein, 580 aa, Homo sapiens
MKDYDELLKYYELHETIGTGGFAKVKLACHILTGEMVAIKIMDKNTLGSDLPRIKTEIEALKNLRHQHICQLYHVLETANKIFMVLEGNKDYHLQTCCGSLAYAAPELIQGKSYLGSEADVWSMGILLYVLMCGFLPFDDDNVMALYKKIMRGKYDVPKWLSPSSILLLQQMLQVDPKKRISMKNLLNHPWIMQDYNYPVEWQSKNPFIHLDDDCVTELSVHHRNNRQTMEDLISLWQYDHLTATYLLLLAKKARGKPVRLRLSSFSCGQASATPFTDIKSNNWSLEDVTASDKNYVAGLIDYDWCEDDLSTGAATPRTSQFTKYWTESNGVESKSLTPALCRTPANKLKNKENVYTPKSAVKNEEYFMFPEPKTPVNKNQHKREILTTPNRYTTPSKARNQCLKETPIKIPVNSTGTDKLMTGVISPERRCRSVELDLNQAHMEETPKRKGAKVFGSLERGLDKVITVLTRSKRKGSARDGPRRLKLHYNVTTTRLVNPDQLLNEIMSILPKKHVDFVQKGYTLKCQTQSDFGKVTMQFELEVCQLQKPDVVGIRRQRLKGDAWVYKRLVEDILSSCKV

SEQ ID NO: 30844 - protein, 457 aa, Homo sapiens
MGILLYVLMCGFLPFDDDNVMALYKKIMRGKYDVPKWLSPSSILLLQQMLQVDPKKRISMKNLLNHPWIMQDYNYPVEWQSKNPFIHLDDDCVTELSVHHRNNRQTMEDLISLWQYDHLTATYLLLLAKKARGKPVRLRLSSFSCGQASATPFTDIKSNNWSLEDVTASDKNYVAGLIDYDWCEDDLSTGAATPRTSQFTKYWTESNGVESKSLTPALCRTPANKLKNKENVYTPKSAVKNEEYFMFPEPKTPVNKNQHKREILTTPNRYTTPSKARNQCLKETPIKIPVNSTGTDKLMTGVISPERRCRSVELDLNQAHMEETPKRKGAKVFGSLERGLDKVITVLTRSKRKGSARDGPRRLKLHYNVTTTRLVNPDQLLNEIMSILPKKHVDFVQKGYTLKCQTQSDFGKVTMQFELEVCQLQKPDVVGIRRQRLKGDAWVYKRLVEDILSSCKV

SEQ ID NO: 30845 - protein, 520 aa, Homo sapiens
MVLEENLLFDEYHKLKLIDFGLCAKPKGNKDYHLQTCCGSLAYAAPELIQGKSYLGSEADVWSMGILLYVLMCGFLPFDDDNVMALYKKIMRGKYDVPKWLSPSSILLLQQMLQVDPKKRISMKNLLNHPWIMQDYNYPVEWQSKNPFIHLDDDCVTELSVHHRNNRQTMEDLISLWQYDHLTATYLLLLAKKARGKPVRLRLSSFSCGQASATPFTDIKSNNWSLEDVTASDKNYVAGLIDYDWCEDDLSTGAATPRTSQFTKYWTESNGVESKSLTPALCRTPANKLKNKENVYTPKSAVKNEEYFMFPEPKTPVNKNQHKREILTTPNRYTTPSKARNQCLKETPIKIPVNSTGTDKLMTGVISPERRCRSVELDLNQAHMEETPKRKGAKVFGSLERGLDKVITVLTRSKRKGSARDGPRRLKLHYNVTTTRLVNPDQLLNEIMSILPKKHVDFVQKGYTLKCQTQSDFGKVTMQFELEVCQLQKPDVVGIRRQRLKGDAWVYKRLVEDILSSCKV

SEQ ID NO: 30846 - protein, 580 aa, Homo sapiens
MMNFSNIMNYMKLLGQYCPGGELFDYIISQDRLSEEETRVVFRQIVSAVAYVHSQGYAHRDLKPENLLFDEYHKLKLIDFGLCAKPKGNKDYHLQTCCGSLAYAAPELIQGKSYLGSEADVWSMGILLYVLMCGFLPFDDDNVMALYKKIMRGKYDVPKWLSPSSILLLQQMLQVDPKKRISMKNLLNHPWIMQDYNYPVEWQSKNPFIHLDDDCVTELSVHHRNNRQTMEDLISLWQYDHLTATYLLLLAKKARGKPVRLRLSSFSCGQASATPFTDIKSNNWSLEDVTASDKNYVAGLIDYDWCEDDLSTGAATPRTSQFTKYWTESNGVESKSLTPALCRTPANKLKNKENVYTPKSAVKNEEYFMFPEPKTPVNKNQHKREILTTPNRYTTPSKARNQCLKETPIKIPVNSTGTDKLMTGVISPERRCRSVELDLNQAHMEETPKRKGAKVFGSLERGLDKVITVLTRSKRKGSARDGPRRLKLHYNVTTTRLVNPDQLLNEIMSILPKKHVDFVQKGYTLKCQTQSDFGKVTMQFELEVCQLQKPDVVGIRRQRLKGDAWVYKRLVEDILSSCKV

SEQ ID NO: 30847 - protein, 619 aa, Homo sapiens
MMNFSNIMNYMKLLGQSDLPRIKTEIEALKNLRHQHICQLYHVLETANKIFMVLEYCPGGELFDYIISQDRLSEEETRVVFRQIVSAVAYVHSQGYAHRDLKPENLLFDEYHKLKLIDFGLCAKPKGNKDYHLQTCCGSLAYAAPELIQGKSYLGSEADVWSMGILLYVLMCGFLPFDDDNVMALYKKIMRGKYDVPKWLSPSSILLLQQMLQVDPKKRISMKNLLNHPWIMQDYNYPVEWQSKNPFIHLDDDCVTELSVHHRNNRQTMEDLISLWQYDHLTATYLLLLAKKARGKPVRLRLSSFSCGQASATPFTDIKSNNWSLEDVTASDKNYVAGLIDYDWCEDDLSTGAATPRTSQFTKYWTESNGVESKSLTPALCRTPANKLKNKENVYTPKSAVKNEEYFMFPEPKTPVNKNQHKREILTTPNRYTTPSKARNQCLKETPIKIPVNSTGTDKLMTGVISPERRCRSVELDLNQAHMEETPKRKGAKVFGSLERGLDKVITVLTRSKRKGSARDGPRRLKLHYNVTTTRLVNPDQLLNEIMSILPKKHVDFVQKGYTLKCQTQSDFGKVTMQFELEVCQLQKPDVVGIRRQRLKGDAWVYKRLVEDILSSCKV

SEQ ID NO: 30848 - protein, 610 aa, Homo sapiens
MKDYDELLKYYELHETIGTGGFAKVKLACHILTGEMVAIKIMDKNTLGSDLPRIKTEIEALKNLRHQHICQLYHVLETANKIFMVLEYCPGGELFDYIISQDRLSEEETRVVFRQIVSAVAYVHSQGYAHRDLKPENLLFDEYHKLKLIDFGLCAKPKGNKDYHLQTCCGSLAYAAPELIQGKSYLGSEADVWSMGILLYVLMCGFLPFDDDNVMALYKKIMRGKYDVPKWLSPSSILLLQQMLQVDPKKRISMKNLLNHPWIMQDYNYPVEWQSKNPFIHLDDDCVTELSVHHRNNRQTMEDLISLWQYDHLTATYLLLLAKKARGKPVRLRLSSFSCGQASATPFTDIKFTKYWTESNGVESKSLTPALCRTPANKLKNKENVYTPKSAVKNEEYFMFPEPKTPVNKNQHKREILTTPNRYTTPSKARNQCLKETPIKIPVNSTGTDKLMTGVISPERRCRSVELDLNQAHMEETPKRKGAKVFGSLERGLDKVITVLTRSKRKGSARDGPRRLKLHYNVTTTRLVNPDQLLNEIMSILPKKHVDFVQKGYTLKCQTQSDFGKVTMQFELEVCQLQKPDVVGIRRQRLKGDAWVYKRLVEDILSSCKV

SEQ ID NO: 30849 - protein, 603 aa, Homo sapiens
MKDYDELLKYYELHETIGTGGFAKVKLACHILTGEMVAIKIMDKNTLGSDLPRIKTEIEALKNLRHQHICQLYHVLETANKIFMVLEENLLFDEYHKLKLIDFGLCAKPKGNKDYHLQTCCGSLAYAAPELIQGKSYLGSEADVWSMGILLYVLMCGFLPFDDDNVMALYKKIMRGKYDVPKWLSPSSILLLQQMLQVDPKKRISMKNLLNHPWIMQDYNYPVEWQSKNPFIHLDDDCVTELSVHHRNNRQTMEDLISLWQYDHLTATYLLLLAKKARGKPVRLRLSSFSCGQASATPFTDIKSNNWSLEDVTASDKNYVAGLIDYDWCEDDLSTGAATPRTSQFTKYWTESNGVESKSLTPALCRTPANKLKNKENVYTPKSAVKNEEYFMFPEPKTPVNKNQHKREILTTPNRYTTPSKARNQCLKETPIKIPVNSTGTDKLMTGVISPERRCRSVELDLNQAHMEETPKRKGAKVFGSLERGLDKVITVLTRSKRKGSARDGPRRLKLHYNVTTTRLVNPDQLLNEIMSILPKKHVDFVQKGYTLKCQTQSDFGKVTMQFELEVCQLQKPDVVGIRRQRLKGDAWVYKRLVEDILSSCKV

SEQ ID NO: 30850 - protein, 442 aa, Homo sapiens
MANSFAARIFTTLSDLQTNMANLKVIGIVIGKTDVKGFPDRKNIGSERYTFSFTIRDSPAHFVNAASWGNEDYIKSLSDSFRVGDCVIIENPLIQRKEIEREEKFSPATPSNCKLLLSENHSTVKVCSSYEVDTKLLSLIHLPVKESHDYYSLGDIVANGHSLNGRIINVLAAVKSVGEPKYFTTSDRRKGQRCEVRLYDETESSFAMTCWDNESILLAQSWMPRETVIFASDVRINFDKFRNCMTATVISKTIITTNPDIPEANILLNFIRENKETNVLDDEIDSYFKESINLSTIVDVYTVEQLKGKALKNEGKADPSYGILYAYISTLNIDDETTKVVRNRCSSCGYIVNEASNMCTTCNKNSLDFKSVFLSFHVLIDLTDHTGTLHSCSLTGSVAEETLGCTFVLSHRARSGLKISVLSCKLADPTEASRNLSGQKHV

SEQ ID NO: 30851 - protein, 471 aa, Homo sapiens
MANSFAARIFTTLSDLQTNMANLKVIGIVIGKTDVKGFPDRKNIGSERYTFSFTIRDSPAHFVNAASWGNEDYIKSLSDSFRVGDCVIIENPLIQRKEIEREEKFSPATPSNCKLLLSENHSTVKVCSSYEVDTKLLSLIHLPVKESHDYYSLGDIVANGHSLNGRIINVLAAVKSVGEPKYFTTSDRRKGQRCEVRLYDETESSFAMTCWDNESILLAQSWMPRETVIFASDVRINFDKFRNCMTATVISKTIITTNPDIPEANILLNFIRENKETNVLDDEIDSYFKESINLSTIVDVYTVEQLKGKALKNEGKADPSYGILYAYISTLNIDDETTKVVRNRCSSCGYIVNEASNMCTTCNKNSLDFKSVFLSFHVLIDLTDHTGTLHSCSLTGSVAEETLGCTVHEFLAMTDEQKTALKWQFLLERSKIYLKFVLSHRARSGLKISVLSCKLADPTEASRNLSGQKHV

SEQ ID NO: 30852 - protein, 984 aa, Homo sapiens
MDDRYPALQRAQLRLDFIHANSTTHSFLFGALAELLDNARDAGAERLDVFSVDNEKLQGGFMLCFLDDGCGMSPEEASDIIYFGRSKKRLSTLKFIGQYGNGLKSGSMRIGKDFILFTKKEETMTCVFFSQTFCEEESLSEVVVPMPSWLIRTRESVTDDPQKFAMELSIIYKYSPFKTEAELMQQFDVIYGKCGTLLVIYNLKLLLNGEPELDVKTDKEDILMAGALEDFPARWSFRAYTSVLYFNPWMRIFIQAKRVKTKHLCYCLYRPRKYLYVTSSFKGAFKDEVKKAEEAVKIAESILKEAQIKVNQCDRTSLSSAKDVLQRALEDVEAKQKNLKEKQRELKTARTLSLFYGVNVENRSQAGMFIYSNNRLIKMHEKVGSQLKLKSLLGAGVVGIVNIPLEVMEPSHNKQEFLNVQEYNHLLKVMGQYLVQYCKDTGINNRNLTLFCNEFGYQNDIDVEKPLNSFQYQRRQAMGIPFIIQCDLCLKWRVLPSSTNYQEKEFFDIWICANNPNRLENSCHQVECLPSIPLGTMSTISPSKNEKEKQLRESVIKYQNRLAEQQPQPQFIPVDEITVTSTCLTSAHKENTKTQKIRLLGDDLKHESLSSFELSASRRGQKRNIEETDSDVEYISETKIMKKSMEEKMNSQQQRIPVALPENVKLAERSQRSQIANITTVWRAQPTEGCLKNAQAASWEMKRKQSLNFVEECKVLTEDENTSDSDIILVSDKSNTDVSLKQEKKEIPLLNQEKQELCNDVLAMKRSSSLPSWKSLLNVPMEDVNLSSGHIARVSVSGSCKVASSPASSQSTPVKETVRKLKSKLREILLYFFPEHQLPSELEEPALSCELEQCPEQMNKKLKMCFNQIQNTYMVQYEKKIKRKLQSIIYDSNTRGIHNEISLGQCENKRKISEDKLKNLRIKLALLLQKLQLGGPEGDLEQTDTYLEALLKEDNLLFQNNLNKVTIDARHRLPLEKNEKTSEN

SEQ ID NO: 30853 - protein, 963 aa, Homo sapiens
MDDRYPALQRAQLRLDFIHANSTTHSFLFGALAELLDNARDAGAERLDVFSVDNEKLQGGFMLCFLDDGCGMSPEEASDIIYFGRSKKRLSTLKFIGQYGNGLKSGSMRIGKDFILFTKKEETMTCVFFSQTFCEEESLSEVVVPMPSWLIRTRESVTDDPQKFAMELSIIYKYSPFKTEAELMQQFDVIYGKCGTLLVIYNLKLLLNGEPELDVKTDKEDILMAGALEDFPARWSFRAYTSVLYFNPWMRIFIQAKRVKTKHLCYCLYRPRKYLYVTSSFKGAFKDEVKKAEEAVKIAESILKEAQIKVNQCDRTSLSSAKDVLQRALEDVEAKQKNLKEKQRELKTARTLSLFYGVNVENRSQAGMFIYSNNRLIKMHEKVGSQLKLKSLLGAGVVGIVNIPLEVMEPSHNKQEFLNVQEYNHLLKVMGQYLVQYCKDTGINNRNLTLFCNEFGYQNDIDVEKPLNSFQYQRRQAMGIPFIIQCDLCLKWRVLPSSTNYQEKEFFDIWICANNPNRLENSCHQVECLPSIPLGTMSTISPSKNEKEKQLRESVIKYQNRLAEQQPQENTKTQKIRLLGDDLKHESLSSFELSASRRGQKRNIEETDSDVEYISETKIMKKSMEEKMNSQQQRIPVALPENVKLAERSQRSQIANITTVWRAQPTEGCLKNAQAASWEMKRKQSLNFVEECKVLTEDENTSDSDIILVSDKSNTDVSLKQEKKEIPLLNQEKQELCNDVLAMKRSSSLPSWKSLLNVPMEDVNLSSGHIARVSVSGSCKVASSPASSQSTPVKETVRKLKSKLREILLYFFPEHQLPSELEEPALSCELEQCPEQMNKKLKMCFNQIQNTYMVQYEKKIKRKLQSIIYDSNTRGIHNEISLGQCENKRKISEDKLKNLRIKLALLLQKLQLGGPEGDLEQTDTYLEALLKEDNLLFQNNLNKVTIDARHRLPLEKNEKTSEN

SEQ ID NO: 30854 - protein, 460 aa, Homo sapiens
MASREEVLALQAEVAQREEELNSLKQKLASALLAEQEPQPERLVPVSPLPPKAALSRDEILRYSRQLVLPELGVHGQLRLGTACVLIVGCGGLGCPLAQYLAAAGVGRLGLVDYDVVEMSNLARQVLHGEALAGQAKAFSAAASLRRLNSAVECVPYTQALTPATALDLVRRYDVVADCSDNVPTRYLVNDACVLAGRPLVSASALRFEGQITVYHYDGGPCYRCIFPQPPPAETVTNCADGGVLGVVTGVLGCLQALEVLKIAAGLGPSYSGSLLLFDALRGHFRSIRLRSRRLDCAACGERPTVTDLLDYEAFCGSSATDKCRSLQLLSPEERVSVTDYKRLLDSGAFHLLLDVRPQVEVDICRLPHALHIPLKHLERRDAESLKLLKEAIWEEKQGTQEGAAVPIYVICKLGNDSQKAVKILQSLSAAQELDPLTVRDVVGGLMAWAAKIDGTFPQY

SEQ ID NO: 30855 - protein, 471 aa, Homo sapiens
MAAPEPLSPAGGAGEEAPEEDEDEAEAEDPERPNAGAGGGRSGGGGSSVSGGGGGGGAGAGGCGGPGGALTRRAVTLRVLLKDALLEPGAGVLSIYYLGKKFLGDLQPDGRIMWQETGQTFNSPSAWATHCKKLVNPAKKSGCGWASVKYKGQKLDKYKATWLRLHQLHTPATAADESPASEGEEEELLMEEEEEDVLAGVSAEDKSRRPLGKSPSEPAHPEATTPGKRVDSKIRVPVRYCMLGSRDLARNPHTLVEVTSFAAINKFQPFNVAVSSNVLFLLDFHSHLTRSEVVGYLGGRWDVNSQMLTVLRAFPCRSRLGDAETAAAIEEEIYQSLFLRGLSLVGWYHSHPHSPALPSLQDIDAQMDYQLRLQGSSNGFQPCLALLCSPYYSGNPGPESKISPFWVMPPPEMLLVEFYKGSPDLVRLQEPWSQEHTYLDKLKISLASRTPKDQSLCHVLEQVCGVLKQGS

SEQ ID NO: 30856 - protein, 451 aa, Homo sapiens
MAAPEPLSPAGGAGEEAPEEDEDEAEAEDPERPNAGAGGGRSGGGGSSVSGGGGGGGAGAGGCGGPGGALTRRAVTLRVLLKDALLEPGAGVLSIYYLGKKFLGDLQPDGRIMWQETGQTFNSPSAWATHCKKLVNPAKKSGCGWASVKYKGQKLDKYKATWLRLHQLHTPATAADESPASEGEEEELLMEEEEEDVLAGVSAEDKSRRPLGKSPSEPAHPEATTPGKRVDSKIRVPVRYCMLGSRDLARNPHTLVEVTSFAAINKFQPFNVAVSSNVLFLLIYQSLFLRGLSLVGWYHSHPHSPALPSLQDIDAQMDYQLRLQGSSNGFQPCLALLCSPYYSGNPGPESKISPFWVMPPPEQRPSDYGIPMDVEMAYVQDSFLTNDILHEMMLLVEFYKGSPDLVRLQEPWSQEHTYLDKLKISLASRTPKDQSLCHVLEQVCGVLKQGS

SEQ ID NO: 30857 - protein, 322 aa, Homo sapiens
MDSTIPVLGTELTPINGREETPCYKQTLSFTGLTCIVSLVALTGNAVVLWLLGCRMRRNAVSIYILNLVAADFLFLSGHIICSPLRLINIRHPISKILSPVMTFPYFIGLSMLSAISTERCLSILWPIWYHCRRPRYLSSVMCVLLWALSLLRSILEWMFCDFLFSGANSVWCETSDFITIAWLVFLCVVLCGSSLVLLVRILCGSRKMPLTRLYVTILLTVLVFLLCGLPFGIQWALFSRIHLDWKVLFCHVHLVSIFLSALNSSANPIIYFFVGSFRQRQNRQNLKLVLQRALQDTPEVDEGGGWLPQETLELSGSRLEQ

SEQ ID NO: 30858 - protein, 353 aa, Homo sapiens
MALLSTVRGATWGRLVTRHFSHAARHGERPGGEELSRLLLDDLVPTSRLELLFGMTPCLLALQAARRSVARLLLQAGKAGLQGKRAELLRMAEARDIPVLRPRRQKLDTMCRYQVHQGVCMEVSPLRPRPWREAGEASPGDDPQQLWLVLDGIQDPRNFGAVLRSAHFLGVDKVITSRRNSCPLTPVVSKSSAGAMEVMDVFSTDDLTGFLQTKAQQGWLVAGTVGCPSTEDPQSSEIPIMSCLEFLWERPTLLVLGNEGSGLSQEVQASCQLLLTILPRRQLPPGLESLNVSVAAGILLHSICSQRKGFPTEGERRQLLQDPQEPSARSEGLSMAQHPGLSSGPEKERQNEG

SEQ ID NO: 30859 - protein, 155 aa, Homo sapiens
MDVFSTDDLTGFLQTKAQQGWLVAGTVGCPSTEDPQSSEIPIMSCLEFLWERPTLLVLGNEGSGLSQEVQASCQLLLTILPRRQLPPGLESLNVSVAAGILLHSICSQRKGFPTEGERRQLLQDPQEPSARSEGLSMAQHPGLSSGPEKERQNEG

SEQ ID NO: 30860 - protein, 90 aa, Homo sapiens
MKFLAVLVLLGVSIFLVSAQNPTTAAPADTYPATGPADDEAPDAETTAAATTATTAAPTTATTAASTTARKDIPVLPKWVGDLPNGRVCP

SEQ ID NO: 30861 - protein, 1868 aa, Homo sapiens
MARLADYFVLVAFGPHPRGSGEGQGQILQRFPEKDWEDNPFPQGIELFCQPSGWQLCPERNPPTFFVAVLTDINSERHYCACLTFWEPAEPSQQETTRVEDATEREEEGDEGGQTHLSPTAPAPSAQLFAPKTLVLVSRLDHTEVFRNSLGLIYAIHVEGLNVCLENVIGNLLTCTVPLAGGSQRTISLGAGDRQVIQTPLADSLPVSRCSVALLFRQLGITNVLSLFCAALTEHKVLFLSRSYQRLADACRGLLALLFPLRYSFTYVPILPAQLLEVLSTPTPFIIGVNAAFQAETQELLDVIVADLDGGTVTIPECVHIPPLPEPLQSQTHSVLSMVLDPELELADLAFPPPTTSTSSLKMQDKELRAVFLRLFAQLLQGYRWCLHVVRIHPEPVIRFHKAAFLGQRGLVEDDFLMKVLEGMAFAGFVSERGVPYRPTDLFDELVAHEVARMRADENHPQRVLRHVQELAEQLYKNENPYPAVAMHKVQRPGESSHLRRVPRPFPRLDEGTVQWIVDQAAAKMQGAPPAVKAERRTTVPSGPPMTAILERCSGLHVNSARRLEVVRNCISYVFEGKMLEAKKLLPAVLRALKGRAARRCLAQELHLHVQQNRAVLDHQQFDFVVRMMNCCLQDCTSLDEHGIAAALLPLVTAFCRKLSPGVTQFAYSCVQEHVVWSTPQFWEAMFYGDVQTHIRALYLEPTEDLAPAQEVGEAPSQEDERSALDVASEQRRLWPTLSREKQQELVQKEESTVFSQAIHYANRMSYLLLPLDSSKSRLLRERAGLGDLESASNSLVTNSMAGSVAESYDTESGFEDAETCDVAGAVVRFINRFVDKVCTESGVTSDHLKGLHVMVPDIVQMHIETLEAVQRESRRLPPIQKPKLLRPRLLPGEECVLDGLRVYLLPDGREEGAGGSAGGPALLPAEGAVFLTTYRVIFTGMPTDPLVGEQVVVRSFPVAALTKEKRISVQTPVDQLLQDGLQLRSCTFQLLKMAFDEEVGSDSAELFRKQLHKLRYPPDIRATFAFTLGSAHTPGRPPRVTKDKGPSLRTLSRNLVKNAKKTIGRQHVTRKKYNPPSWEHRGQPPPEDQEDEISVSEELEPSTLTPSSALKPSDRMTMSSLVERACCRDYQRLGLGTLSSSLSRAKSEPFRISPVNRMYAICRSYPGLLIVPQSVQDNALQRVSRCYRQNRFPVVCWRSGRSKAVLLRSGGLHGKGVVGLFKAQNAPSPGQSQADSSSLEQEKYLQAVVSSMPRYADASGRNTLSGFSSAHMGSHGKWGSVRTSGRSSGLGTDVGSRLAGRDALAPPQANGGPPDPGFLRPQRAALYILGDKAQLKGVRSDPLQQWELVPIEVFEARQVKASFKKLLKACVPGCPAAEPSPASFLRSLEDSEWLIQIHKLLQVSVLVVELLDSGSSVLVGLEDGWDITTQVVSLVQLLSDPFYRTLEGFRLLVEKEWLSFGHRFSHRGAHTLAGQSSGFTPVFLQFLDCVHQVHLQFPMEFEFSQFYLKFLGYHHVSRRFRTFLLDSDYERIELGLLYEEKGERRGQVPCRSVWEYVDRLSKRTPVFHNYMYAPEDAEVLRPYSNVSNLKVWDFYTEETLAEGPPYDWELAQGPPEPPEEERSDGGAPQSRRRVVWPCYDSCPRAQPDAISRLLEELQRLETELGQPAERWKDTWDRVKAAQRLEGRPDGRGTPSSLLVSTAPHHRRSLGVYLQEGPVGSTLSLSLDSDQSSGSTTSGSRQAARRSTSTLYSQFQTAESENRSYEGTLYKKGAFMKPWKARWFVLDKTKHQLRYYDHRVDTECKGVIDLAEVEAVAPGTPTMGAPKTVDEKAFFDVKTTRRVYNFCAQDVPSAQQWVDRIQSCLSDA

SEQ ID NO: 30862 - protein, 1894 aa, Homo sapiens
MARLADYFVLVAFGPHPRGSGEGQGQILQRFPEKDWEDNPFPQGIELFCQPSGWQLCPERNPPTFFVAVLTDINSERHYCACLTFWEPAEPSQQETTRVEDATEREEEGDEGGQTHLSPTAPAPSAQLFAPKTLVLVSRLDHTEVFRNSLGLIYAIHVEGLNVCLENVIGNLLTCTVPLAGGSQRTISLGAGDRQVIQTPLADSLPVSRCSVALLFRQLGITNVLSLFCAALTEHKVLFLSRSYQRLADACRGLLALLFPLRYSFTYVPILPAQLLEVLSTPTPFIIGVNAAFQAETQELLDVIVADLDGGTVTIPECVHIPPLPEPLQSQTHSVLSMVLDPELELADLAFPPPTTSTSSLKMQDKELRAVFLRLFAQLLQGYRWCLHVVRIHPEPVIRFHKAAFLGQRGLVEDDFLMKVLEGMAFAGFVSERGVPYRPTDLFDELVAHEVARMRADENHPQRVLRHVQELAEQLYKNENPYPAVAMHKVQRPGESSHLRRVPRPFPRLDEGTVQWIVDQAAAKMQGAPPAVKAERRTTVPSGPPMTAILERCSGLHVNSARRLEVVRNCISYVFEGKMLEAKKLLPAVLRALKGRAARRCLAQELHLHVQQNRAVLDHQQFDFVVRMMNCCLQDCTSLDEHGIAAALLPLVTAFCRKLSPGVTQFAYSCVQEHVVWSTPQFWEAMFYGDVQTHIRALYLEPTEDLAPAQEVGEAPSQEDERSALDVASEQRRLWPTLSREKQQELVQKEESTVFSQAIHYANRMSYLLLPLDSSKSRLLRERAGLGDLESASNSLVTNSMAGSVAESYDTESGFEDAETCDVAGAVVRFINRFVDKVCTESGVTSDHLKGLHVMVPDIVQMHIETLEAVQRESRRLPPIQKPKLLRPRLLPGEECVLDGLRVYLLPDGREEGAGGSAGGPALLPAEGAVFLTTYRVIFTGMPTDPLVGEQVVVRSFPVAALTKEKRISVQTPVDQLLQDGLQLRSCTFQLLKMAFDEEVGSDSAELFRKQLHKLRYPPDIRATFAFTLGSAHTPGRPPRVTKDKGPSLRTLSRNLVKNAKKTIGRQHVTRKKYNPPSWEHRGQPPPEDQEDEISVSEELEPSTLTPSSALKPSDRMTMSSLVERACCRDYQRLGLGTLSSSLSRAKSEPFRISPVNRMYAICRSYPGLLIVPQSVQDNALQRVSRCYRQNRFPVVCWRSGRSKAVLLRSGGLHGKGVVGLFKAQNAPSPGQSQADSSSLEQEKYLQAVVSSMPRYADASGRNTLSGFSSAHMGSHVPSPRARVTTLSNPMAASASRRTAPRGKWGSVRTSGRSSGLGTDVGSRLAGRDALAPPQANGGPPDPGFLRPQRAALYILGDKAQLKGVRSDPLQQWELVPIEVFEARQVKASFKKLLKACVPGCPAAEPSPASFLRSLEDSEWLIQIHKLLQVSVLVVELLDSGSSVLVGLEDGWDITTQVVSLVQLLSDPFYRTLEGFRLLVEKEWLSFGHRFSHRGAHTLAGQSSGFTPVFLQFLDCVHQVHLQFPMEFEFSQFYLKFLGYHHVSRRFRTFLLDSDYERIELGLLYEEKGERRGQVPCRSVWEYVDRLSKRTPVFHNYMYAPEDAEVLRPYSNVSNLKVWDFYTEETLAEGPPYDWELAQGPPEPPEEERSDGGAPQSRRRVVWPCYDSCPRAQPDAISRLLEELQRLETELGQPAERWKDTWDRVKAAQRLEGRPDGRGTPSSLLVSTAPHHRRSLGVYLQEGPVGSTLSLSLDSDQSSGSTTSGSRQAARRSTSTLYSQFQTAESENRSYEGTLYKKGAFMKPWKARWFVLDKTKHQLRYYDHRVDTECKGVIDLAEVEAVAPGTPTMGAPKTVDEKAFFDVKTTRRVYNFCAQDVPSAQQWVDRIQSCLSDA

SEQ ID NO: 30863 - protein, 1893 aa, Homo sapiens
MARLADYFVLVAFGPHPRGSGEGQGQILQRFPEKDWEDNPFPQGIELFCQPSGWQLCPERNPPTFFVAVLTDINSERHYCACLTFWEPAEPSQETTRVEDATEREEEGDEGGQTHLSPTAPAPSAQLFAPKTLVLVSRLDHTEVFRNSLGLIYAIHVEGLNVCLENVIGNLLTCTVPLAGGSQRTISLGAGDRQVIQTPLADSLPVSRCSVALLFRQLGITNVLSLFCAALTEHKVLFLSRSYQRLADACRGLLALLFPLRYSFTYVPILPAQLLEVLSTPTPFIIGVNAAFQAETQELLDVIVADLDGGTVTIPECVHIPPLPEPLQSQTHSVLSMVLDPELELADLAFPPPTTSTSSLKMQDKELRAVFLRLFAQLLQGYRWCLHVVRIHPEPVIRFHKAAFLGQRGLVEDDFLMKVLEGMAFAGFVSERGVPYRPTDLFDELVAHEVARMRADENHPQRVLRHVQELAEQLYKNENPYPAVAMHKVQRPGESSHLRRVPRPFPRLDEGTVQWIVDQAAAKMQGAPPAVKAERRTTVPSGPPMTAILERCSGLHVNSARRLEVVRNCISYVFEGKMLEAKKLLPAVLRALKGRAARRCLAQELHLHVQQNRAVLDHQQFDFVVRMMNCCLQDCTSLDEHGIAAALLPLVTAFCRKLSPGVTQFAYSCVQEHVVWSTPQFWEAMFYGDVQTHIRALYLEPTEDLAPAQEVGEAPSQEDERSALDVASEQRRLWPTLSREKQQELVQKEESTVFSQAIHYANRMSYLLLPLDSSKSRLLRERAGLGDLESASNSLVTNSMAGSVAESYDTESGFEDAETCDVAGAVVRFINRFVDKVCTESGVTSDHLKGLHVMVPDIVQMHIETLEAVQRESRRLPPIQKPKLLRPRLLPGEECVLDGLRVYLLPDGREEGAGGSAGGPALLPAEGAVFLTTYRVIFTGMPTDPLVGEQVVVRSFPVAALTKEKRISVQTPVDQLLQDGLQLRSCTFQLLKMAFDEEVGSDSAELFRKQLHKLRYPPDIRATFAFTLGSAHTPGRPPRVTKDKGPSLRTLSRNLVKNAKKTIGRQHVTRKKYNPPSWEHRGQPPPEDQEDEISVSEELEPSTLTPSSALKPSDRMTMSSLVERACCRDYQRLGLGTLSSSLSRAKSEPFRISPVNRMYAICRSYPGLLIVPQSVQDNALQRVSRCYRQNRFPVVCWRSGRSKAVLLRSGGLHGKGVVGLFKAQNAPSPGQSQADSSSLEQEKYLQAVVSSMPRYADASGRNTLSGFSSAHMGSHVPSPRARVTTLSNPMAASASRRTAPRGKWGSVRTSGRSSGLGTDVGSRLAGRDALAPPQANGGPPDPGFLRPQRAALYILGDKAQLKGVRSDPLQQWELVPIEVFEARQVKASFKKLLKACVPGCPAAEPSPASFLRSLEDSEWLIQIHKLLQVSVLVVELLDSGSSVLVGLEDGWDITTQVVSLVQLLSDPFYRTLEGFRLLVEKEWLSFGHRFSHRGAHTLAGQSSGFTPVFLQFLDCVHQVHLQFPMEFEFSQFYLKFLGYHHVSRRFRTFLLDSDYERIELGLLYEEKGERRGQVPCRSVWEYVDRLSKRTPVFHNYMYAPEDAEVLRPYSNVSNLKVWDFYTEETLAEGPPYDWELAQGPPEPPEEERSDGGAPQSRRRVVWPCYDSCPRAQPDAISRLLEELQRLETELGQPAERWKDTWDRVKAAQRLEGRPDGRGTPSSLLVSTAPHHRRSLGVYLQEGPVGSTLSLSLDSDQSSGSTTSGSRQAARRSTSTLYSQFQTAESENRSYEGTLYKKGAFMKPWKARWFVLDKTKHQLRYYDHRVDTECKGVIDLAEVEAVAPGTPTMGAPKTVDEKAFFDVKTTRRVYNFCAQDVPSAQQWVDRIQSCLSDA

SEQ ID NO: 30864 - protein, 559 aa, Homo sapiens
MAAPCGSELPANSPLKIPKMEVLSPASPGGLSDGNPSLSDPSTPRGASPLGPGSAAGSGAAASGGLGLGLGGRSAASSSVSFSPGGGGGGAAAAAAAACRGMSWTPAETNALIAVWGNERLVEARYQQLEGAGTVFGSKAPGPAMYERVSRALAELGYERTPSQCRERIKTLRRCYSRVKEHGVGKRKSSYTFEQLEQVFGQGGWDAQPCQPVLINSSGLYQELESDGSTMEDYSQEDWGNHSQDLHGYPTDQELDEIPVTKRTLKIKQESSEEAQKRDIMQNIVQILESVQLKWELFQSWTDFSRLHLSNKLAIFGIGYNTRWKEDIRYHYAEISSQVPLGKRLREYFNSEKPEGRIIMTRVQKMNWKNVYYKFLEITISEARCLELHMEIDWIPIAHSKPTGGNVVQYLLPGGIPKSPGLYAIGYEECIERPLSPHMEQSSLDPGKEGRVDLETLSAQASLQVEIEPTRIIYCYLGIAEVRTLQQCLFLHFQANTKTFSKDWVGINGFLSQNCIVDPGVSPKSIYIKFVEVERDFLSAGSLVECLEKAIGYPLKFNN

SEQ ID NO: 30865 - protein, 329 aa, Homo sapiens
MEDYSQEDWGNHSQDLHGYPTDQELDEIPVTKRTLKIKQESSEEAQKRDIMQNIVQILESVQLKWELFQSWTDFSRLHLSNKLAIFGIGYNTRWKEDIRYHYAEISSQVPLGKRLREYFNSEKPEGRIIMTRVQKMNWKNVYYKFLEITISEARCLELHMEIDWIPIAHSKPTGGNVVQYLLPGGIPKSPGLYAIGYEECIERPLSPHMEQSSLDPGKEGRVDLETLSAQASLQVEIEPTRIIYCYLGIAEVRTLQQCLFLHFQANTKTFSKDWVGINGFLSQNCIVDPGVSPKSIYIKFVEVERDFLSAGSLVECLEKAIGYPLKFNN

SEQ ID NO: 30866 - protein, 507 aa, Homo sapiens
MAAPCGSELPANSPLKIPKMEVLSPASPGGLSDGNPSLSDPSTPRGASPLGPGSAAGSGAAASGGLGLGLGGRSAASSSVSFSPGGGGGGAAAAAAAACRGMSWTPAETNALIAVWGNERLVEARYQQLEGAGTVFGSKAPGPAMYERVSRALAELGYERTPSQCRERIKELESDGSTMEDYSQEDWGNHSQDLHGYPTDQELDEIPVTKRTLKIKQESSEEAQKRDIMQNIVQILESVQLKWELFQSWTDFSRLHLSNKLAIFGIGYNTRWKEDIRYHYAEISSQVPLGKRLREYFNSEKPEGRIIMTRVQKMNWKNVYYKFLEITISEARCLELHMEIDWIPIAHSKPTGGNVVQYLLPGGIPKSPGLYAIGYEECIERPLSPHMEQSSLDPGKEGRVDLETLSAQASLQVEIEPTRIIYCYLGIAEVRTLQQCLFLHFQANTKTFSKDWVGINGFLSQNCIVDPGVSPKSIYIKFVEVERDFLSAGSLVECLEKAIGYPLKFNN

SEQ ID NO: 30867 - protein, 717 aa, Homo sapiens
MFYFRGCGRWVAVSFTKQQFPLARLSSDSAAPRTPHFDVIVIGGGHAGTEAATAAARCGSRTLLLTHRVDTIGQMSCNPSFGGIGKGHLMREVDALDGLCSRICDQSGVHYKVLNRRKGPAVWGLRAQIDRKLYKQNMQKEILNTPLLTVQEGAVEDLILTEPEPEHTGKCRVSGVVLVDGSTVYAESVILTTGTFLRGMIVIGLETHPAGRLGDQPSIGLAQTLEKLGFVVGRLKTGTPPRIAKESINFSILNKHIPDNPSIPFSFTNETVWIKPEDQLPCYLTHTNPRVDEIVLKNLHLNSHVKETTRGPRYCPSIESKVLRFPNRLHQVWLEPEGMDSDLIYPQGLSMTLPAELQEKMITCIRGLEKAKVIQPDGVLLLLPRMECNGAISAHHNLPLPGYGVQYDYLDPRQITPSLETHLVQRLFFAGQINGTTGYEEAAAQGVIAGINASLRVSRKPPFVVSRTEGYIGVLIDDLTTLGTSEPYRMFTSRVEFRLSLRPDNADSRLTLRGYKDAGCVSQQRYERACWMKSSLEEGISVLKSIEFLSSKWKKLIPEASISTSRSLPVRALDVLKYEEVDMDSLAKAVPEPLKKYTKCRELAERLKIEATYESVLFHQLQEIKGVQQDEALQLPKDLDYLTIRDVSLSHEVREKLHFSRPQTIGAASRIPGVTPAAIINLLRFVKTTQRRQSAMNESSKTDQYLCDADRLQEREL

SEQ ID NO: 30868 - protein, 595 aa, Homo sapiens
MFYFRGCGRWVAVSFTKQQFPLARLSSDSAAPRTPHFDVIVIGGGHAGTEAATAAARCGSRTLLLTHRVDTIGQMSCNPSFGGIGKGHLMREVDALDGLCSRICDQSGVHYKVLNRRKGPAVWGLRAQIDRKLYKQNMQKEILNTPLLTVQEGAVEDLILTEPEPEHTGKCRVSGVVLPEDQLPCYLTHTNPRVDEIVLKNLHLNSHVKETTRGPRYCPSIESKVLRFPNRLHQVWLEPEGMDSDLIYPQGLSMTLPAELQEKMITCIRGLEKAKVIQPGYGVQYDYLDPRQITPSLETHLVQRLFFAGQINGTTGYEEAAAQGVIAGINASLRVSRKPPFVVSRTEGYIGVLIDDLTTLGTSEPYRMFTSRVEFRLSLRPDNADSRLTLRGYKDAGCVSQQRYERACWMKSSLEEGISVLKSIEFLSSKWKKLIPEASISTSRSLPVRALDVLKYEEVDMDSLAKAVPEPLKKYTKCRELAERLKIEATYESVLFHQLQEIKGVQQDEALQLPKDLDYLTIRDVSLSHEVREKLHFSRPQTIGAASRIPGVTPAAIINLLRFVKTTQRRQSAMNESSKTDQYLCDADRLQEREL

SEQ ID NO: 30869 - protein, 313 aa, Homo sapiens
MFYFRGCGRWVAVSFTKQQFPLARLSSDSAAPRTPHFDVIVIGGGHAGTEAATAAARCGSRTLLLTHRVDTIGQMSCNPSFGGIGKGHLMREVDALDGLCSRICDQSGVHYKVLNRRKGPAVWGLRAQIDRKLYKQNMQKEILNTPLLTVQEGAVEDLILTEPEPEHTGKCRVSGVVLVDGSTVYAESVILTTGTFLRGMIVIGLETHPAGRLGDQPSIGLAQTLEKLGFVVGRLKTGTPPRIAKESINFSILNKHIPDNPSIPFSFTNETVWIKPEDQLPCYLTHTNPRVDEIVLKNLHLNSHVKETTRGPR

SEQ ID NO: 30870 - protein, 692 aa, Homo sapiens
MFYFRGCGRWVAVSFTKQQFPLARLSSDSAAPRTPHFDVIVIGGGHAGTEAATAAARCGSRTLLLTHRVDTIGQMSCNPSFGGIGKGHLMREVDALDGLCSRICDQSGVHYKVLNRRKGPAVWGLRAQIDRKLYKQNMQKEILNTPLLTVQEGAVEDLILTEPEPEHTGKCRVSGVVLVDGSTVYAESVILTTGTFLRGMIVIGLETHPAGRLGDQPSIGLAQTLEKLGFVVGRLKTGTPPRIAKESINFSILNKHIPDNPSIPFSFTNETVWIKPEDQLPCYLTHTNPRVDEIVLKNLHLNSHVKETTRGPRYCPSIESKVLRFPNRLHQVWLEPEGMDSDLIYPQGLSMTLPAELQEKMITCIRGLEKAKVIQPGYGVQYDYLDPRQITPSLETHLVQRLFFAGQINGTTGYEEAAAQGVIAGINASLRVSRKPPFVVSRTEGYIGVLIDDLTTLGTSEPYRMFTSRVEFRLSLRPDNADSRLTLRGYKDAGCVSQQRYERACWMKSSLEEGISVLKSIEFLSSKWKKLIPEASISTSRSLPVRALDVLKYEEVDMDSLAKAVPEPLKKYTKCRELAERLKIEATYESVLFHQLQEIKGVQQDEALQLPKDLDYLTIRDVSLSHEVREKLHFSRPQTIGAASRIPGVTPAAIINLLRFVKTTQRRQSAMNESSKTDQYLCDADRLQEREL

SEQ ID NO: 30871 - protein, 643 aa, Homo sapiens
MSCNPSFGGIGKGHLMREVDALDGLCSRICDQSGVHYKVLNRRKGPAVWGLRAQIDRKLYKQNMQKEILNTPLLTVQEGAVEDLILTEPEPEHTGKCRVSGVVLVDGSTVYAESVILTTGTFLRGMIVIGLETHPAGRLGDQPSIGLAQTLEKLGFVVGRLKTGTPPRIAKESINFSILNKHIPDNPSIPFSFTNETVWIKPEDQLPCYLTHTNPRVDEIVLKNLHLNSHVKETTRGPRYCPSIESKVLRFPNRLHQVWLEPEGMDSDLIYPQGLSMTLPAELQEKMITCIRGLEKAKVIQPDGVLLLLPRMECNGAISAHHNLPLPGYGVQYDYLDPRQITPSLETHLVQRLFFAGQINGTTGYEEAAAQGVIAGINASLRVSRKPPFVVSRTEGYIGVLIDDLTTLGTSEPYRMFTSRVEFRLSLRPDNADSRLTLRGYKDAGCVSQQRYERACWMKSSLEEGISVLKSIEFLSSKWKKLIPEASISTSRSLPVRALDVLKYEEVDMDSLAKAVPEPLKKYTKCRELAERLKIEATYESVLFHQLQEIKGVQQDEALQLPKDLDYLTIRDVSLSHEVREKLHFSRPQTIGAASRIPGVTPAAIINLLRFVKTTQRRQSAMNESSKTDQYLCDADRLQEREL

SEQ ID NO: 30872 - protein, 732 aa, Homo sapiens
MFYFRGCGRWVAVSFTKQQFPLARLSSDSAAPRTPHFDVIVIGGGHAGTEAATAAARCGSRTLLLTHRVDTIGQMSCNPSFGGIGKGHLMREVDALDGLCSRICDQSGVHYKVLNRRKGPAVWGLRAQIDRKLYKQNMQKEILNTPLLTVQEGAVEDLILTEPEPEHTGKCRVSGVVLVDGSTVYAESVILTTGTFLRGMIVIGLETHPAGRLGDQPSIGLAQTLEKLGFVVGRLKTGTPPRIAKESINFSILNKHIPDNPSIPFSFTNETVWIKPEDQLPCYLTHTNPRVDEIVLKNLHLNSHVKETTRGPRYCPSIESKVLRFPNRLHQVWLEPEGMDSDLIYPQGLSMTLPAELQEKMITCIRGLEKAKVIQPGYGVQYDYLDPRQITPSLETHLVQRLFFAGQINGTTGYEEAAAQTECCSVARLECSDMISQLQAILLPQPSLVAGTAGMHHNTQGVIAGINASLRVSRKPPFVVSRTEGYIGVLIDDLTTLGTSEPYRMFTSRVEFRLSLRPDNADSRLTLRGYKDAGCVSQQRYERACWMKSSLEEGISVLKSIEFLSSKWKKLIPEASISTSRSLPVRALDVLKYEEVDMDSLAKAVPEPLKKYTKCRELAERLKIEATYESVLFHQLQEIKGVQQDEALQLPKDLDYLTIRDVSLSHEVREKLHFSRPQTIGAASRIPGVTPAAIINLLRFVKTTQRRQSAMNESSKTDQYLCDADRLQEREL

SEQ ID NO: 30873 - protein, 1195 aa, Homo sapiens
MGEEGPPSLEYIQAKDLFPPKELVKEEENLQVPFTVLQGEGVEFLGRAADALIAISNYRLHIKFKDSVINVPLRMIDSVESRDMFQLHISCKDSKVVRCHFSTFKQCQEWLSRLSRATARPAKPEDLFAFAYHAWCLGLTEEDQHTHLCQPGEHIRCRQEAELARMGFDLQNVWRVSHINSNYKLCPSYPQKLLVPVWITDKELENVASFRSWKRIPVVVYRHLRNGAAIARCSQPEISWWGWRNADDEYLVTSIAKACALDPGTRATGGSLSTGNNDTSEACDADFDSSLTACSGVESTAAPQKLLILDARSYTAAVANRAKGGGCECEEYYPNCEVVFMGMANIHAIRNSFQYLRAVCSQMPDPSNWLSALESTKWLQHLSVMLKAAVLVANTVDREGRPVLVHCSDGWDRTPQIVALAKILLDPYYRTLEGFQVLVESDWLDFGHKFGDRCGHQENVEDQNEQCPVFLQWLDSVHQLLKQFPCLFEFNEAFLVKLVQHTYSCLYGTFLANNPCEREKRNIYKRTCSVWALLRAGNKNFHNFLYTPSSDMVLHPVCHVRALHLWTAVYLPASSPCTLGEENMDLYLSPVAQSQEFSGRSLDRLPKTRSMDDLLSACDTSSPLTRTSSDPNLNNHCQEVRVGLEPWHSNPEGSETSFVDSGVGGPQQTVGEVGLPPPLPSSQKDYLSNKPFKSHKSCSPSYKLLNTAVPREMKSNTSDPEIKVLEETKGPAPDPSAQDELGRTLDGIGEPPEHCPETEAVSALSKVISNKCDGVCNFPESSQNSPTGTPQQAQPDSMLGVPSKCVLDHSLSTVCNPPSAACQTPLDPSTDFLNQDPSGSVASISHQEQLSSVPDLTHGEEDIGKRGNNRNGQLLENPRFGKMPLELVRKPISQSQISEFSFLGSNWDSFQGMVTSFPSGEATPRRLLSYGCCSKRPNSKQMRATGPCFGGQWAQREGVKSPVCSSHSNGHCTGPGGKNQMWLSSHPKQVSSTKPVPLNCPSPVPPLYLDDDGLPFPTDVIQHRLRQIEAGYKQEVEQLRRQVRELQMRLDIRHCCAPPAEPPMDYEDDFTCLKESDGSDTEDFGSDHSEDCLSEASWEPVDKKETEVTRWVPDHMASHCYNCDCEFWLAKRRHHCRNCGNVFCAGCCHLKLPIPDQQLYDPVLVCNSCYEHIQVSRARELMSQQLKKPIATASS

SEQ ID NO: 30874 - protein, 460 aa, Homo sapiens
MAPRSRRRRHKKPPSSVAPIIMAPTTIVTPVPLTPSKPGPSIDTLGFFSLDDNVPGLSQLILQKLNMKSYEEYKLVVDGGTPVSGFGFRCPQEMFQRMEDTFRFCAHCRALPSGLSDSKVLRHCKRCRNVYYCGPECQKSDWPAHRRVCQELRLVAVDRLMEWLLVTGDFVLPSGPWPWPPEAVQDWDSWFSMKGLHLDATLDAVLVSHAVTTLWASVGRPRPDPDVLQGSLKRLLTDVLSRPLTLGLGLRALGIDVRRTGGSTVHVVGASHVETFLTRPGDYDELGYMFPGHLGLRVVMVGVDVATGFSQSTSTSPLEPGTIQLSAHRGLYHDFWEEQVETGQTHHPDLVAAFHPGFHSSPDLMEAWLPTLLLLRDYKIPTLITVYSHQELVSSLQILVELDTHITAFGSNPFMSLKPEQVYSSPNKQPVYCSAYYIMFLGSSCQLDNRQLEEKVDGGI

SEQ ID NO: 30875 - protein, 239 aa, Homo sapiens
MGVPPYQALDFDVLKKCSRGWKTHFDSVLTVEHSLVGFQTPRFSGTVRGAEMSITVVQSARSQTGPHTGGFVKSFVLWLWTVSWNGFWSQSTSTSPLEPGTIQLSAHRGLYHDFWEEQVETGQTHHPDLVAAFHPGFHSSPDLMEAWLPTLLLLRDYKIPTLITVYSHQELVSSLQILVELDTHITAFGSNPFMSLKPEQVYSSPNKQPVYCSAYYIMFLGSSCQLDNRQLEEKVDGGI

SEQ ID NO: 30876 - protein, 95 aa, Homo sapiens
MGVPPYQALDFDVLKKCSRGWKTHFDSVLTVEHSLVGFQTPRFSGTVRGAEMSITVVQSARSQTGPHTGGFVKSFVLWLWTVSWNGFWSQVEWWC

SEQ ID NO: 30877 - protein, 1360 aa, Homo sapiens
MSRQSTLYSFFPKSPALSDANKASARASREGGRAAAAPGASPSPGGDAAWSEAGPGPRPLARSASPPKAKNLNGGLRRSVAPAAPTSCDFSPGDLVWAKMEGYPWWPCLVYNHPFDGTFIREKGKSVRVHVQFFDDSPTRGWVSKRLLKPYTGSKSKEAQKGGHFYSAKPEILRAMQRADEALNKDKIKRLELAVCDEPSEPEEEEEMEVGTTYVTDKSEEDNEIESEEEVQPKTQGSRRSSRQIKKRRVISDSESDIGGSDVEFKPDTKEEGSSDEISSGVGDSESEGLNSPVKVARKRKRMVTGNGSLKRKSSRKETPSATKQATSISSETKNTLRAFSAPQNSESQAHVSGGGDDSSRPTVWYHETLEWLKEEKRRDEHRRRPDHPDFDASTLYVPEDFLNSCTPGMRKWWQIKSQNFDLVICYKVGKFYELYHMDALIGVSELGLVFMKGNWAHSGFPEIAFGRYSDSLVQKGYKVARVEQTETPEMMEARCRKMAHISKYDRVVRREICRIITKGTQTYSVLEGDPSENYSKYLLSLKEKEEDSSGHTRAYGVCFVDTSLGKFFIGQFSDDRHCSRFRTLVAHYPPVQVLFEKGNLSKETKTILKSSLSCSLQEGLIPGSQFWDASKTLRTLLEEEYFREKLSDGIGVMLPQVLKGMTSESDSIGLTPGEKSELALSALGGCVFYLKKCLIDQELLSMANFEEYIPLDSDTVSTTRSGAIFTKAYQRMVLDAVTLNNLEIFLNGTNGSTEGTLLERVDTCHTPFGKRLLKQWLCAPLCNHYAINDRLDAIEDLMVVPDKISEVVELLKKLPDLERLLSKIHNVGSPLKSQNHPDSRAIMYEETTYSKKKIIDFLSALEGFKVMCKIIGIMEEVADGFKSKILKQVISLQTKNPEGRFPDLTVELNRWDTAFDHEKARKTGLITPKAGFDSDYDQALADIRENEQSLLEYLEKQRNRIGCRTIVYWGIGRNRYQLEIPENFTTRNLPEEYELKSTKKGCKRYWTKTIEKKLANLINAEERRDVSLKDCMRRLFYNFDKNYKDWQSAVECIAVLDVLLCLANYSRGGDGPMCRPVILLPEDTPPFLELKGSRHPCITKTFFGDDFIPNDILIGCEEEEQENGKAYCVLVTGPNMGGKSTLMRQAGLLAVMAQMGCYVPAEVCRLTPIDRVFTRLGASDRIMSGESTFFVELSETASILMHATAHSLVLVDELGRGTATFDGTAIANAVVKELAETIKCRTLFSTHYHSLVEDYSQNVAVRLGHMACMVENECEDPSQETITFLYKFIKGACPKSYGFNAARLANLPEEVIQKGHRKAREFEKMNQSLRLFREVCLASERSTVDAEAVHKLLTLIKEL

SEQ ID NO: 30878 - protein, 1068 aa, Homo sapiens
MSRQSTLYSFFPKSPALSDANKASARASREGGRAAAAPGASPSPGGDAAWSEAGPGPRPLARSASPPKAKNLNGGLRRSVAPAAPTSCDFSPGDLVWAKMEGYPWWPCLVYNHPFDGTFIREKGKSVRVHVQFFDDSPTRGWVSKRLLKPYTGSKSKEAQKGGHFYSAKPEILRAMQRADEALNKDKIKRLELAVCDEPSEPEEEEEMEVGTTYVTDKSEEDNEIESEEEVQPKTQGSRRSSRQIKKRRVISDSESDIGGSDVEFKPDTKEEGSSDEISSGVGDSESEGLNSPVKVARKRKRMVTGNGSLKRKSSRKETPSATKQATSISSETKNTLRAFSAPQNSESQAHVSGGGDDSSRPTVWYHETLEWLKEEKRRDEHRRRPDHPDFDASTLYVPEDFLNSCTPGMRKWWQIKSQNFDLVICYKVGKFYELYHMDALIGVSELGLVFMKGNWAHSGFPEIAFGRYSDSLVQKGYKVARVEQTETPEMMEARCRKMAHISKYDRVVRREICRIITKGTQTYSVLEGDPSENYSKYLLSLKEKEEDSSGHTRAYGVCFVDTSLGKFFIGQFSDDRHCSRFRTLVAHYPPVQVLFEKGNLSKETKTILKSSLSCSLQEGLIPGSQFWDASKTLRTLLEEEYFREKLSDGIGVMLPQVLKGMTSESDSIGLTPGEKSELALSALGGCVFYLKKCLIDQELLSMANFEEYIPLDSDTVSTTRSGAIFTKAYQRMVLDAVTLNNLEIFLNGTNGSTEGTLLERVDTCHTPFGKRLLKQWLCAPLCNHYAINDRLDAIEDLMVVPDKISEVVELLKKLPDLERLLSKIHNVGSPLKSQNHPDSRAIMYEETTYSKKKIIDFLSALEGFKVMCKIIGIMEEVADGFKSKILKQVISLQTKNPEGRFPDLTVELNRWDTAFDHEKARKTGLITPKAGFDSDYDQALADIRENEQSLLEYLEKQRNRIGCRTIVYWGIGRNRYQLEIPENFTTRNLPEEYELKSTKKGCKRYWTKTIEKKLANLINAEERRDVSLKDCMRRLFYNFDKNYKDWQSAVECIAVLGKTLNKLVLRL

SEQ ID NO: 30879 - protein, 1230 aa, Homo sapiens
MSRQSTLYSFFPKSPALSDANKASARASREGGRAAAAPGASPSPGGDAAWSEAGPGPRPLARSASPPKAKNLNGGLRRSVGTTYVTDKSEEDNEIESEEEVQPKTQGSRRSSRQIKKRRVISDSESDIGGSDVEFKPDTKEEGSSDEISSGVGDSESEGLNSPVKVARKRKRMVTGNGSLKRKSSRKETPSATKQATSISSETKNTLRAFSAPQNSESQAHVSGGGDDSSRPTVWYHETLEWLKEEKRRDEHRRRPDHPDFDASTLYVPEDFLNSCTPGMRKWWQIKSQNFDLVICYKVGKFYELYHMDALIGVSELGLVFMKGNWAHSGFPEIAFGRYSDSLVQKGYKVARVEQTETPEMMEARCRKMAHISKYDRVVRREICRIITKGTQTYSVLEGDPSENYSKYLLSLKEKEEDSSGHTRAYGVCFVDTSLGKFFIGQFSDDRHCSRFRTLVAHYPPVQVLFEKGNLSKETKTILKSSLSCSLQEGLIPGSQFWDASKTLRTLLEEEYFREKLSDGIGVMLPQVLKGMTSESDSIGLTPGEKSELALSALGGCVFYLKKCLIDQELLSMANFEEYIPLDSDTVSTTRSGAIFTKAYQRMVLDAVTLNNLEIFLNGTNGSTEGTLLERVDTCHTPFGKRLLKQWLCAPLCNHYAINDRLDAIEDLMVVPDKISEVVELLKKLPDLERLLSKIHNVGSPLKSQNHPDSRAIMYEETTYSKKKIIDFLSALEGFKVMCKIIGIMEEVADGFKSKILKQVISLQTKNPEGRFPDLTVELNRWDTAFDHEKARKTGLITPKAGFDSDYDQALADIRENEQSLLEYLEKQRNRIGCRTIVYWGIGRNRYQLEIPENFTTRNLPEEYELKSTKKGCKRYWTKTIEKKLANLINAEERRDVSLKDCMRRLFYNFDKNYKDWQSAVECIAVLDVLLCLANYSRGGDGPMCRPVILLPEDTPPFLELKGSRHPCITKTFFGDDFIPNDILIGCEEEEQENGKAYCVLVTGPNMGGKSTLMRQAGLLAVMAQMGCYVPAEVCRLTPIDRVFTRLGASDRIMSGESTFFVELSETASILMHATAHSLVLVDELGRGTATFDGTAIANAVVKELAETIKCRTLFSTHYHSLVEDYSQNVAVRLGHMACMVENECEDPSQETITFLYKFIKGACPKSYGFNAARLANLPEEVIQKGHRKAREFEKMNQSLRLFREVCLASERSTVDAEAVHKLLTLIKEL

SEQ ID NO: 30880 - protein, 1058 aa, Homo sapiens
MVTGNGSLKRKSSRKETPSATKQATSISSETKNTLRAFSAPQNSESQAHVSGGGDDSSRPTVWYHETLEWLKEEKRRDEHRRRPDHPDFDASTLYVPEDFLNSCTPGMRKWWQIKSQNFDLVICYKVGKFYELYHMDALIGVSELGLVFMKGNWAHSGFPEIAFGRYSDSLVQKGYKVARVEQTETPEMMEARCRKMAHISKYDRVVRREICRIITKGTQTYSVLEGDPSENYSKYLLSLKEKEEDSSGHTRAYGVCFVDTSLGKFFIGQFSDDRHCSRFRTLVAHYPPVQVLFEKGNLSKETKTILKSSLSCSLQEGLIPGSQFWDASKTLRTLLEEEYFREKLSDGIGVMLPQVLKGMTSESDSIGLTPGEKSELALSALGGCVFYLKKCLIDQELLSMANFEEYIPLDSDTVSTTRSGAIFTKAYQRMVLDAVTLNNLEIFLNGTNGSTEGTLLERVDTCHTPFGKRLLKQWLCAPLCNHYAINDRLDAIEDLMVVPDKISEVVELLKKLPDLERLLSKIHNVGSPLKSQNHPDSRAIMYEETTYSKKKIIDFLSALEGFKVMCKIIGIMEEVADGFKSKILKQVISLQTKNPEGRFPDLTVELNRWDTAFDHEKARKTGLITPKAGFDSDYDQALADIRENEQSLLEYLEKQRNRIGCRTIVYWGIGRNRYQLEIPENFTTRNLPEEYELKSTKKGCKRYWTKTIEKKLANLINAEERRDVSLKDCMRRLFYNFDKNYKDWQSAVECIAVLDVLLCLANYSRGGDGPMCRPVILLPEDTPPFLELKGSRHPCITKTFFGDDFIPNDILIGCEEEEQENGKAYCVLVTGPNMGGKSTLMRQAGLLAVMAQMGCYVPAEVCRLTPIDRVFTRLGASDRIMSGESTFFVELSETASILMHATAHSLVLVDELGRGTATFDGTAIANAVVKELAETIKCRTLFSTHYHSLVEDYSQNVAVRLGHMACMVENECEDPSQETITFLYKFIKGACPKSYGFNAARLANLPEEVIQKGHRKAREFEKMNQSLRLFREVCLASERSTVDAEAVHKLLTLIKEL

SEQ ID NO: 30881 - protein, 411 aa, Homo sapiens
MLLKTVLLLGHVAQVLMLDNGLLQTPPMGWLAWERFRCNINCDEDPKNCISEQLFMEMADRMAQDGWRDMGYTYLNIDDCWIGGRDASGRLMPDPKRFPHGIPFLADYVHSLGLKLGIYADMGNFTCMGYPGTTLDKVVQDAQTFAEWKVDMLKLDGCFSTPEERAQGYPKMAAALNATGRPIAFSCSWPAYEGGLPPRVNYSLLADICNLWRNYDDIQDSWWSVLSILNWFVEHQDILQPVAGPGHWNDPDMLLIGNFGLSLEQSRAQMALWTVLAAPLLMSTDLRTISAQNMDILQNPLMIKINQDPLGIQGRRIHKEKSLIEVYMRPLSNKASALVFFSCRTDMPYRYHSSLGQLNFTGSVIYEAQDVYSGDIISGLRDETNFTVIINPSGVVMWYLYPIKNLEMSQQ

SEQ ID NO: 30882 - protein, 213 aa, Homo sapiens
MHQQKRQPELVEGNLPVFVFPTELIFYADDQSTHKQVLTLYNPYEFALKFKVLCTTPNKYVVVDAAGAVKPQCCVDIVIRHRDVRSCHYGVIDKFRLQVSEQSQRKALGRKEVVATLLPSAKEQQKEEEEKRLKEHLTESLFFEQSFQPENRAVSSGPSLLTVFLGVVCIAALMLPTLGDVESLVPLYLHLSVNQKLVAAYILGLITMAILRT

SEQ ID NO: 30883 - protein, 159 aa, Homo sapiens
MHQQKRQPELVEGNLPVFVFPTELIFYADDQSTHKQVLTLYNPYEFALKFKVLCTTPNKYVVVDAAGAVKPQCCVDIVIRHRDVRSCHYGVIDKFRLQVSEQSQRKALGRKEVVATLLPSAKEQQKEEEEKRLKEHLTESLFFEQSFQPGLITMAILRT

SEQ ID NO: 30884 - protein, 214 aa, Homo sapiens
MHQQKRQPELVEGNLPVFVFPTELIFYADDQSTHKQVLTLYNPYEFALKFKVLCTTPNKYVVVDAAGAVKPQCCVDIVIRHRDVRSCHYGVIDKFRLQVSEQSQRKALGRKEVVATLLPSAKEQQKEEEEKRLKEHLTESLFFEQSFQPGKNRAVSSGPSLLTVFLGVVCIAALMLPTLGDVESLVPLYLHLSVNQKLVAAYILGLITMAILRT

SEQ ID NO: 30885 - protein, 1770 aa, Homo sapiens
MPRRRKNLGGNPFRKTANPKEVVVSSVASREEPTTTLPSMGETKVDQEELFTSISEIFSDLDPDVVYLMLSECDFKVENAMDCLLELSATDTKIEESSSQSFVASENQVGAAESKIMEKRPEEESEDSKMDSFLDMQLTEDLDSLIQNAFEKLNSSPDDQVYSFLPSQDVNSFNDSSEFINPDSSNMTPIFSTQNMNLNGENLENSGSTLSLNPLPSHSVLNESKCFIKDNTLALESNYPEDSLLSSSLNVASDSIAGCSSLNQKQKELLESECVEAQFSEAPVDLDASEPQACLNLPGLDLPGTGGDQKSTRVSDVFLPSEGFNFKPHKHPELPTKGKDVSYCPVLAPLPLLLPPPPPPPMWNPMIPAFDLFQGNHGFVAPVVTTAAHWRSVNYTFPPSVISHTSPTKVWRNKDGTSAYQVQETPVSQVVRKKTSYVGLVLVLLRGLPGSGKSFLARTLQEDNPSGVILSTDDYFYINGQYQFDVKYLGEAHEWNQNRAKEAFEKKISPIIIDNTNLQAWEMKPYVALSQKHKYKVLFREPDTWWKFKPKELARRNIHGVSKEKITRMLEHYQRFVSVPIIMSSSVPEKIERIELCAYSCEDRSTSPRDDEDIISEKEENILSLSLKHLEFTEEKNLDVTKETMLPENVAYLSNADLNKRRKEISDMNPSIQSALILETPHMYFSDSESKLQATDKSENEQIEMVAVKGYSKTDTDSSMERVSPSTCCSENNQEDCDLANSGPLQNEKSSPGEIVEERATVTKKAFGKQKSKSTLEKFPRHELSNFVGDWPVDKTIGQRTKRNRKTEKTSSVQSDKKYNYPQSHKLVNSVSVNTDCVQQRGSPHESVEDGRKSQCDDASEPLNSYKYDAYKNIDKNSFNIMGDWPSSDSLAQREHRSRMPKTGLSEPNLEIGTNDKMNEISLSTAHEACWGTSSQKLKTLGSSNLGSSEMLLSEMTCESQTCLSKKSHGQHTSLPLTFTNSAPTVSGVVEPQTLAECQEQMPKRDPGKEVGMCTQTEPQDFALLWKIEKNKISISDSIKVLTGRLDGFKPKVFNINTKSDVQEAIPYRVMYDKSTFVEESELTSADESENLNILCKLFGSFSLEALKDLYERCNKDIIWATSLLLDSETKLCEDTEFENFQKSCDGSQIGPFSLGLNLKEIISQRGTLENSNSPVPEFSHGIGISNADSQSTCDAERGNSEQAEMRAVTPENHESMTSIFPSAAVGLKNNNDILPNSQEELLYSSKQSFPGILKATTPKDMSETEKNLVVTETGDNIHSPSHFSDIFNFVSSTSNLELNEEIYFTDSLEIKRNENFPKDYVKFSDEEEFMNEDEKEMKEILMAGSSLSAGVSGEDKTEILNPTPAMAKSLTIDCLELALPPELAFQLNELFGPVGIDSGSLTVEDCVVHIDLNLAKVIHEKWKESVMERQRQEEVSCGKFMQDPSLVGHTGLDNPEQKSSQRTGKKLLKTLTASEMLPLLDHWNTQTKKVSLREIMSEEIALQEKHNLKRETLMFEKDCATKLKEKQLFKIFPAINQNFLVDIFKDHNYSLEHTVQFLNCVLEGDPVKTVVAQEFVHQNENVTSHTGQKSKEKKPKKLKETEETPSELSFQDFEYPDYDDYRAEAFLHQQKRMECYSKAKEAYRIGKKNVATFYAQQGTLHEQKMKEANHLAAIEIFEKVNASLLPQNVLDLHGLHVDEALEHLMRVLEKKTEEFKQNGGKPYLSVITGRGNHSQGGVARIKPAVIKYLISHSFRFSEIKPGCLKVMLK

SEQ ID NO: 30886 - protein, 1753 aa, Homo sapiens
MPRRRKNLGGNPFRKTANPKEVVVSSVASREEPTTTLPSMGETKVDQEELFTSISEIFSDLDPDVVYLMLSECDFKVENAMDCLLELSATDTKIEESSSQSFVASENQVGAAESKIMEKRPEEESEDSKMDSFLDMQLTEDLDSLIQNAFEKLNSSPDDQVYSFLPSQDVNSFNDSSEFINPDSSNMTPIFSTQNMNLNGENLENSGSTLSLNPLPSHSVLNESKCFIKDNTLALESNYPEDSLLSSSLNVASDSIAGCSSLNQKQKELLESECVEAQFSEAPVDLDASEPQACLNLPGLDLPGTGGDQKSTRVSDVFLPSEGFNFKPHKHPELPTKGKDVSYCPVLAPLPLLLPPPPPPPMWNPMIPAFDLFQGNHGFVAPVVTTAAHWRSVNYTFPPSVISHTSPTKVWRNKDGTSAYQVQETPVSQVVRKKTSYVGLVLVLLRGLPGSGKSFLARTLQEDNPSGVILSTDDYFYINGQYQFDVKYLGEAHEWNQNRAKEAFEKKISPIIIDNTNLQAWEMKPYVALSQKHKYKVLFREPDTWWKFKPKELARRNIHGVSKEKITRMLEHYQRFVSVPIIMSSSVPEKIERIELCAYSCEDRSTSPRDDEDIISEKEENILSLSLKHLEFTEEKNLDVTKETMLPENVAYLSNADLNKRRKEISDMNPSIQSALILETPHMYFSDSESKLQATDKSENEQIEMVAVKGYSKTDTDSSMERVSPSTCCSENNQEDCDLANSGPLQNEKSSPGEIVEERATVTKKAFGKQKSKSTLEKFPRHELSNFVGDWPVDKTIGQRTKRNRKTEKTSSVQSDKKYNYPQSHKLVNSVSVNTDCVQQRGSPHESVEDGRKSQCDDASEPLNSYKYDAYKNIDKNSFNIMGDWPSSDSLAQREHRSRMPKTGLSEPNLEIGTNDKMNEISLSTAHEACWGTSSQKLKTLGSSNLGSSEMLLSEMTCESQTCLSKKSHGQHTSLPLTFTNSAPTVSGVVEPQTLAECQEQMPKRDPGKEVGMCTQTEPQDFALLWKIEKNKISISDSIKVLTGRLDGFKPKVFNINTKSDVQEAIPYRVMYDKSTFVEESELTSADESENLNILCKLFGSFSLEALKDLYERCNKDIIWATSLLLDSETKLCEDTEFENFQKSCDGSQIGPFSLGLNLKEIISQRGTLENSNSPVPEFSHGIGISNADSQSTCDAERGNSEQAEMRAVTPENHESMTSIFPSAAVGLKNNNDILPNSQEELLYSSKQSFPGILKATTPKDMSETEKNLVVTETGDNIHSPSHFSDIFNFVSSTSNLELNEEIYFTDSLEIKRNENFPKDYVKFSDEEEFMNEDEKEMKEILMAGSSLSAGVSGEDKTEILNPTPAMAKSLTIDCLELALPPELAFQLNELFGPVGIDSGSLTVEDCVVHIDLNLAKVIHEKWKESVMERQRQEEVSCGKFMQDPSLVGHTGLDNPEQKSSQRTGKKLLKTLTASEMLPLLDHWNTQTKKVSLREIMSEEIALQEKHNLKRETLMFEKDCATKLKEKQLFKIFPAINQNFLVDIFKDHNYSLEHTVQFLNCVLEGDPVKTVVAQEFVHQNENVTSHTGQKSKEKKDFEYPDYDDYRAEAFLHQQKRMECYSKAKEAYRIGKKNVATFYAQQGTLHEQKMKEANHLAAIEIFEKVNASLLPQNVLDLHGLHVDEALEHLMRVLEKKTEEFKQNGGKPYLSVITGRGNHSQGGVARIKPAVIKYLISHSFRFSEIKPGCLKVMLK

SEQ ID NO: 30887 - protein, 194 aa, Homo sapiens
MAPKKDVKKPVAAAAAAPAPAPAPAPAPAPAKPKEEKIDLSAIKIEFSKEQQDEFKEAFLLFDRTGDSKITLSQVGDVLRALGTNPTNAEVRKVLGNPSNEELNAKKIEFEQFLPMMQAISNNKDQATYEDFVEGLRVFDKEGNGTVMGAELRHVLATLGEKMKEEEVEALMAGQEDSNGCINYEAFVKHIMSI

SEQ ID NO: 30888 - protein, 150 aa, Homo sapiens
MSFSADQIAEFKEAFLLFDRTGDSKITLSQVGDVLRALGTNPTNAEVRKVLGNPSNEELNAKKIEFEQFLPMMQAISNNKDQATYEDFVEGLRVFDKEGNGTVMGAELRHVLATLGEKMKEEEVEALMAGQEDSNGCINYEAFVKHIMSI

SEQ ID NO: 30889 - protein, 2385 aa, Homo sapiens
MPVLGVASKLRQPAVGSKPVHTALPIPNLGTTGSQHCSSRPLELTETESSMLSCQLALKSTCEFGEKKPLQGKAKEKEDSKIYTDWANHYLAKSGHKRLIKDLQQDIADGVLLAEIIQIIANEKVEDINGCPRSQSQMIENVDVCLSFLAARGVNVQGLSAEEIRNGNLKAILGLFFSLSRYKQQQHHQQQYYQSLVELQQRVTHASPPSEASQAKTQQDMQSSLAARYATQSNHSGIATSQKKPTRLPGPSRVPAAGSSSKVQGASNLNRRSQSFNSIDKNKPPNYANGNEKDSSKGPQSSSGVNGNVQPPSTAGQPPASAIPSPSASKPWRSKSMNVKHSATSTMLTVKQSSTATSPTPSSDRLKPPVSEGVKTAPSGQKSMLEKFKLVNARTALRPPQPPSSGPSDGGKDDDAFSESGEMEGFNSGLNSGGSTNSSPKVSPKLAPPKAGSKNLSNKKSLLQPKEKEEKNRDKNKVCTEKPVKEEKDQVTEMAPKKTSKIASLIPKGSKTTAAKKESLIPSSSGIPKPGSKVPTVKQTISPGSTASKESEKFRTTKGSPSQSLSKPITMEKASASSCPAPLEGREAGQASPSGSCTMTVAQSSGQSTGNGAVQLPQQQQHSHPNTATVAPFIYRAHSENEGTALPSADSCTSPTKMDLSYSKTAKQCLEEISGEDPETRRMRTVKNIADLRQNLEETMSSLRGTQISHSTLETTFDSTVTTEVNGRTIPNLTSRPTPMTWRLGQACPRLQAGDAPSLGAGYPRSGTSRFIHTDPSRFMYTTPLRRAAVSRLGNMSQIDMSEKASSDLDMSSEVDVGGYMSDGDILGKSLRTDDINSGYMTDGGLNLYTRSLNRIPDTATSRDIIQRGVHDVTVDADSWDDSSSVSSGLSDTLDNISTDDLNTTSSVSSYSNITVPSRKNTQLRTDSEKRSTTDETWDSPEELKKPEEDFDSHGDAGGKWKTVSSGLPEDPEKAGQKASLSVSQTGSWRRGMSAQGGAPSRQKAGTSALKTPGKTDDAKASEKGKAPLKGSSLQRSPSDAGKSSGDEGKKPPSGIGRSTATSSFGFKKPSGVGSSAMITSSGATITSGSATLGKIPKSAAIGGKSNAGRKTSLDGSQNQDDVVLHVSSKTTLQYRSLPRPSKSSTSGIPGRGGHRSSTSSIDSNVSSKSAGATTSKLREPTKIGSGRSSPVTVNQTDKEKEKVAVSDSESVSLSGSPKSSPTSASACGAQGLRQPGSKYPDIASPTFRRLFGAKAGGKSASAPNTEGVKSSSVMPSPSTTLARQGSLESPSSGTGSMGSAGGLSGSSSPLFNKPSDLTTDVISLSHSLASSPASVHSFTSGGLVWAANMSSSSAGSKDTPSYQSMTSLHTSSESIDLPLSHHGSLSGLTTGTHEVQSLLMRTGSVRSTLSESMQLDRNTLPKKGLRYTPSSRQANQEEGKEWLRSHSTGGLQDTGNQSPLVSPSAMSSSAAGKYHFSNLVSPTNLSQFNLPGPSMMRSNSIPAQDSSFDLYDDSQLCGSATSLEERPRAISHSGSFRDSMEEVHGSSLSLVSSTSSLYSTAEEKAHSEQIHKLRRELVASQEKVATLTSQLSANAHLVAAFEKSLGNMTGRLQSLTMTAEQKESELIELRETIEMLKAQNSAAQAAIQGALNGPDHPPKDLRIRRQHSSESVSSINSATSHSSIGSGNDADSKKKKKKNWVNSRGSELRSSFKQAFGKKKSTKPPSSHSDIEELTDSSLPASPKLPHNAGDCGSASMKPSQSASASPLVWPPKKRQNGPVIYKHRSRICECTEAEAEIILQLKSELREKELKLTDIRLEALSSAHHLDQIREAMNRMQNEIEILKAENDRLKAETGNTAKPTRPPSESSSSTSSSSSRQSLGLSLNNLNITEAVSSDILLDDAGDATGHKDGRSVKIIVSISKGYGRAKDQKSQAYLIGSIGVSGKTKWDVLDGVIRRLFKEYVFRIDTSTSLGLSSDCIASYCIGDLIRSHNLEVPELLPCGYLVGDNNIITVNLKGVEENSLDSFVFDTLIPKPITQRYFNLLMEHHRIILSGPSGTGKTYLANKLAEYVITKSGRKKTEDAIATFNVDHKSSKELQQYLANLAEQCSADNNGVELPVVIILDNLHHVGSLSDIFNGFLNCKYNKCPYIIGTMNQGVSSSPNLELHHNFRWVLCANHTEPVKGFLGRYLRRKLIEIEIERNIRNNDLVKIIDWIPKTWHHLNSFLETHSSSDVTIGPRLFLPCPMDVEGSRVWFMDLWNYSLVPYILEAVREGLQMYGKRTPWEDPSKWVLDTYPWSSATLPQESPALLQLRPEDVGYESCTSTKEATTSKHIPQTDTEGDPLMNMLMKLQEAANYSSTQSCDSESTSHHEDILDSSLESTL

SEQ ID NO: 30890 - protein, 2363 aa, Homo sapiens
MPVLGVASKLRQPAVGSKPVHTALPIPNLGTTGSQHCSSRPLELTETESSMLSCQLALKSTCEFGEKKPLQGKAKEKEDSKIYTDWANHYLAKSGHKRLIKDLQQDIADGVLLAEIIQIIANEKVEDINGCPRSQSQMIENVDVCLSFLAARGVNVQGLSAEEIRNGNLKAILGLFFSLSRYKQQQHHQQQYYQSLVELQQRVTHASPPSEASQAKTQQDMQSSLAARYATQSNHSGIATSQKKPTRLPGPSRVPAAGSSSKVQGASNLNRRSQSFNSIDKNKPPNYANGNEKDSSKGPQSSSGVNGNVQPPSTAGQPPASAIPSPSASKPWRSKSMNVKHSATSTMLTVKQSSTATSPTPSSDRLKPPVSEGVKTAPSGQKSMLEKFKLVNARTALRPPQPPSSGPSDGGKDDDAFSESGEMEGFNSGLNSGGSTNSSPKVSPKLAPPKAGSKNLSNKKSLLQPKEKEEKNRDKNKVCTEKPVKEEKDQVTEMAPKKTSKIASLIPKGSKTTAAKKESLIPSSSGIPKPGSKVPTVKQTISPGSTASKESEKFRTTKGSPSQSLSKPITMEKASASSCPAPLEGREAGQASPSGSCTMTVAQSSGQSTGNGAVQLPQQQQHSHPNTATVAPFIYRAHSENEGTALPSADSCTSPTKMDLSYSKTAKQCLEEISGEDPETRRMRTVKNIADLRQNLEETMSSLRGTQISHSTLETTFDSTVTTEVNGRTIPNLTSRPTPMTWRLGQACPRLQAGDAPSLGAGYPRSGTSRFIHTDPSRFMYTTPLRRAAVSRLGNMSQIDMSEKASSDLDMSSEVDVGGYMSDGDILGKSLRTDDINSGYMTDGGLNLYTRSLNRIPDTATSRDIIQRGVHDVTVDADSWDDSSSVSSGLSDTLDNISTDDLNTTSSVSSYSNITVPSRKNTQLRTDSEKRSTTDETWDSPEELKKPEEDFDSHGDAGGKWKTVSSGLPEDPEKAGQKASLSVSQTGSWRRGMSAQGGAPSRQKAGTSALKTPGKTDDAKASEKGKAPLKGSSLQRSPSDAGKSSGDEGKKPPSGIGRSTATSSFGFKKPSGVGSSAMITSSGATITSGSATLGKIPKSAAIGGKSNAGRKTSLDGSQNQDDVVLHVSSKTTLQYRSLPRPSKSSTSGIPGRGGHRSSTSSIDSNVSSKSAGATTSKLREPTKIGSGRSSPVTVNQTDKEKEKVAVSDSESVSLSGSPKSSPTSASACGAQGLRQPGSKYPDIASPTFRRLFGAKAGGKSASAPNTEGVKSSSVMPSPSTTLARQGSLESPSSGTGSMGSAGGLSGSSSPLFNKPSDLTTDVISLSHSLASSPASVHSFTSGGLVWAANMSSSSAGSKDTPSYQSMTSLHTSSESIDLPLSHHGSLSGLTTGTHEVQSLLMRTGSVRSTLSESMQLDRNTLPKKGLRYTPSSRQANQEEGKEWLRSHSTGGLQDTGNQSPLVSPSAMSSSAAGKYHFSNLVSPTNLSQFNLPGPSMMRSNSIPAQDSSFDLYDDSQLCGSATSLEERPRAISHSGSFRDSMEEVHGSSLSLVSSTSSLYSTAEEKAHSEQIHKLRRELVASQEKVATLTSQLSANAHLVAAFEKSLGNMTGRLQSLTMTAEQKESELIELRETIEMLKAQNSAAQAAIQGALNGPDHPPKDLRIRRQHSSESVSSINSATSHSSIGSGNDADSKKKKKKNWVNSRGSELRSSFKQAFGKKKSTKPPSSHSDIEELTDSSLPASPKLPHNAGDCGSASMKPSQSASAICECTEAEAEIILQLKSELREKELKLTDIRLEALSSAHHLDQIREAMNRMQNEIEILKAENDRLKAETGNTAKPTRPPSESSSSTSSSSSRQSLGLSLNNLNITEAVSSDILLDDAGDATGHKDGRSVKIIVSISKGYGRAKDQKSQAYLIGSIGVSGKTKWDVLDGVIRRLFKEYVFRIDTSTSLGLSSDCIASYCIGDLIRSHNLEVPELLPCGYLVGDNNIITVNLKGVEENSLDSFVFDTLIPKPITQRYFNLLMEHHRIILSGPSGTGKTYLANKLAEYVITKSGRKKTEDAIATFNVDHKSSKELQQYLANLAEQCSADNNGVELPVVIILDNLHHVGSLSDIFNGFLNCKYNKCPYIIGTMNQGVSSSPNLELHHNFRWVLCANHTEPVKGFLGRYLRRKLIEIEIERNIRNNDLVKIIDWIPKTWHHLNSFLETHSSSDVTIGPRLFLPCPMDVEGSRVWFMDLWNYSLVPYILEAVREGLQMYGKRTPWEDPSKWVLDTYPWSSATLPQESPALLQLRPEDVGYESCTSTKEATTSKHIPQTDTEGDPLMNMLMKLQEAANYSSTQSCDSESTSHHEDILDSSLESTL

SEQ ID NO: 30891 - protein, 2186 aa, Homo sapiens
MPVLGVASKLRQPAVGSKPVHTALPIPNLGTTGSQHCSSRPLELTETESSMLSCQLALKSTCEFGEKKPLQGKAKEKEDSKIYTDWANHYLAKSGHKRLIKDLQQDIADGVLLAEIIQIIANEKVEDINGCPRSQSQMIENVDVCLSFLAARGVNVQGLSAEEIRNGNLKAILGLFFSLSRYKQQQHHQQQYYQSLVELQQRVTHASPPSEASQAKTQQDMQSSLAARYATQSNHSGIATSQKKPTRLPGPSRVPAAGSSSKVQGASNLNRRSQSFNSIDKNKPPNYANGNEKDSSKGPQSSSGVNGNVQPPSTAGQPPASAIPSPSASKPWRSKSMNVKHSATSTMLTVKQSSTATSPTPSSDRLKPPVSEGVKTAPSGQKSMLEKFKLVNARTALRPPQPPSSGPSDGGKDDDAFSESGEMEGFNSGLNSGGSTNSSPKVSPKLAPPKAGSKNLSNKKSLLQPKEKEEKNRDKNKVCTEKPVKEEKDQVTEMAPKKTSKIASLIPKGSKTTAAKKESLIPSSSGIPKPGSKVPTVKQTISPGSTASKESEKFRTTKGSPSQSLSKPITMEKASASSCPAPLEGREAGQASPSGSCTMTVAQSSGQSTGNGAVQLPQQQQHSHPNTATVAPFIYRAHSENEGTALPSADSCTSPTKMDLSYSKTAKQCLEEISGEDPETRRMRTVKNIADLRQNLEETMSSLRGTQISHSTLETTFDSTVTTEVNGRTIPNLTSRPTPMTWRLGQACPRLQAGDAPSLGAGYPRSGTSRFIHTDPSRFMYTTPLRRAAVSRLGNMSQIDMSEKASSDLDMSSEVDVGGYMSDGDILGKSLRTDDINSGYMTDGGLNLYTRSLNRIPDTATSRDIIQRGVHDVTVDADSWDDSSSVSSGLSDTLDNISTDDLNTTSSVSSYSNITVPSRKNTQLRTDSEKRSTTDETWDSPEELKKPEEDFDSHGDAGGKWKTVSSGLPEDPEKAGQKASLSVSQTGSWRRGMSAQGGAPSRQKAGTSALKTPGKTDDAKASEKGKAPLKGSSLQRSPSDAGKSSGDEGKKPPSGIGRSTATSSFGFKKPSGVGSSAMITSSGATITSGSATLGKIPKSAAIGGKSNAGRKTSLDGSQNQDDVVLHVSSKTTLQYRSLPRPSKSSTSGIPGRGGHRSSTSSIDSNVSSKSAGATTSKLREPTKIGSGRSSPVTVNQTDKEKEKVAVSDSESVSLSGSPKSSPTSASACGAQGLRQPGSKYPDIASPTFRRYTPSSRQANQEEGKEWLRSHSTGGLQDTGNQSPLVSPSAMSSSAAGKYHFSNLVSPTNLSQFNLPGPSMMRSNSIPAQDSSFDLYDDSQLCGSATSLEERPRAISHSGSFRDSMEEVHGSSLSLVSSTSSLYSTAEEKAHSEQIHKLRRELVASQEKVATLTSQLSANAHLVAAFEKSLGNMTGRLQSLTMTAEQKESELIELRETIEMLKAQNSAAQAAIQGALNGPDHPPKDLRIRRQHSSESVSSINSATSHSSIGSGNDADSKKKKKKNWVNSRGSELRSSFKQAFGKKKSTKPPSSHSDIEELTDSSLPASPKLPHNAGDCGSASMKPSQSASAICECTEAEAEIILQLKSELREKELKLTDIRLEALSSAHHLDQIREAMNRMQNEIEILKAENDRLKAETGNTAKPTRPPSESSSSTSSSSSRQSLGLSLNNLNITEAVSSDILLDDAGDATGHKDGRSVKIIVSISKGYGRAKDQKSQAYLIGSIGVSGKTKWDVLDGVIRRLFKEYVFRIDTSTSLGLSSDCIASYCIGDLIRSHNLEVPELLPCGYLVGDNNIITVNLKGVEENSLDSFVFDTLIPKPITQRYFNLLMEHHRIILSGPSGTGKTYLANKLAEYVITKSGRKKTEDAIATFNVDHKSSKELQQYLANLAEQCSADNNGVELPVVIILDNLHHVGSLSDIFNGFLNCKYNKCPYIIGTMNQGVSSSPNLELHHNFRWVLCANHTEPVKGFLGRYLRRKLIEIEIERNIRNNDLVKIIDWIPKTWHHLNSFLETHSSSDVTIGPRLFLPCPMDVEGSRVWFMDLWNYSLVPYILEAVREGLQMYGKRTPWEDPSKWVLDTYPWSSATLPQESPALLQLRPEDVGYESCTSTKEATTSKHIPQTDTEGDPLMNMLMKLQEAANYSSTQSCDSESTSHHEDILDSSLESTL

SEQ ID NO: 30892 - protein, 1976 aa, Homo sapiens
MAQRTGLEDPERYLFVDRAVIYNPATQADWTAKKLVWIPSERHGFEAASIKEERGDEVMVELAENGKKAMVNKDDIQKMNPPKFSKVEDMAELTCLNEASVLHNLKDRYYSGLIYTYSGLFCVVINPYKNLPIYSENIIEMYRGKKRHEMPPHIYAISESAYRCMLQDREDQSILCTGESGAGKTENTKKVIQYLAHVASSHKGRKDHNIPGELERQLLQANPILESFGNAKTVKNDNSSRFGKFIRINFDVTGYIVGANIETYLLEKSRAVRQAKDERTFHIFYQLLSGAGEHLKSDLLLEGFNNYRFLSNGYIPIPGQQDKDNFQETMEAMHIMGFSHEEILSMLKVVSSVLQFGNISFKKERNTDQASMPENTVAQKLCHLLGMNVMEFTRAILTPRIKVGRDYVQKAQTKEQADFAVEALAKATYERLFRWLVHRINKALDRTKRQGASFIGILDIAGFEIFELNSFEQLCINYTNEKLQQLFNHTMFILEQEEYQREGIEWNFIDFGLDLQPCIDLIERPANPPGVLALLDEECWFPKATDKTFVEKLVQEQGSHSKFQKPRQLKDKADFCIIHYAGKVDYKADEWLMKNMDPLNDNVATLLHQSSDRFVAELWKDVDRIVGLDQVTGMTETAFGSAYKTKKGMFRTVGQLYKESLTKLMATLRNTNPNFVRCIIPNHEKRAGKLDPHLVLDQLRCNGVLEGIRICRQGFPNRIVFQEFRQRYEILTPNAIPKGFMDGKQACERMIRALELDPNLYRIGQSKIFFRAGVLAHLEEERDLKITDIIIFFQAVCRGYLARKAFAKKQQQLSALKVLQRNCAAYLKLRHWQWWRVFTKVKPLLQVTRQEEELQAKDEELLKVKEKQTKVEGELEEMERKHQQLLEEKNILAEQLQAETELFAEAEEMRARLAAKKQELEEILHDLESRVEEEEERNQILQNEKKKMQAHIQDLEEQLDEEEGARQKLQLEKVTAEAKIKKMEEEILLLEDQNSKFIKEKKLMEDRIAECSSQLAEEEEKAKNLAKIRNKQEVMISDLEERLKKEEKTRQELEKAKRKLDGETTDLQDQIAELQAQIDELKLQLAKKEEELQGALARGDDETLHKNNALKVVRELQAQIAELQEDFESEKASRNKAEKQKRDLSEELEALKTELEDTLDTTAAQQELRTKREQEVAELKKALEEETKNHEAQIQDMRQRHATALEELSEQLEQAKRFKANLEKNKQGLETDNKELACEVKVLQQVKAESEHKRKKLDAQVQELHAKVSEGDRLRVELAEKASKLQNELDNVSTLLEEAEKKGIKFAKDAASLESQLQDTQELLQEETRQKLNLSSRIRQLEEEKNSLQEQQEEEEEARKNLEKQVLALQSQLADTKKKVDDDLGTIESLEEAKKKLLKDAEALSQRLEEKALAYDKLEKTKNRLQQELDDLTVDLDHQRQVASNLEKKQKKFDQLLAEEKSISARYAEERDRAEAEAREKETKALSLARALEEALEAKEEFERQNKQLRADMEDLMSSKDDVGKNVHELEKSKRALEQQVEEMRTQLEELEDELQATEDAKLRLEVNMQAMKAQFERDLQTRDEQNEEKKRLLIKQVRELEAELEDERKQRALAVASKKKMEIDLKDLEAQIEAANKARDEVIKQLRKLQAQMKDYQRELEEARASRDEIFAQSKESEKKLKSLEAEILQLQEELASSERARRHAEQERDELADEITNSASGKSALLDEKRRLEARIAQLEEELEEEQSNMELLNDRFRKTTLQVDTLNAELAAERSAAQKSDNARQQLERQNKELKAKLQELEGAVKSKFKATISALEAKIGQLEEQLEQEAKERAAANKLVRRTEKKLKEIFMQVEDERRHADQYKEQMEKANARMKQLKRQLEEAEEEATRANASRRKLQRELDDATEANEGLSREVSTLKNRLRRGGPISFSSSRSGRRQLHLEGASLELSDDDTESKTSDVNETQPPQSE

SEQ ID NO: 30893 - protein, 1992 aa, Homo sapiens
MAQRTGLEDPERYLFVDRAVIYNPATQADWTAKKLVWIPSERHGFEAASIKEERGDEVMVELAENGKKAMVNKDDIQKMNPPKFSKVEDMAELTCLNEASVLHNLKDRYYSGLIYTYSGLFCVVINPYKNLPIYSENIIEMYRGKKRHEMPPHIYAISESAYRCMLQDREDQSILCTGESGAGKTENTKKVIQYLAHVASSHKGRKDHNIPQESPKPVKHQSGSLLYGELERQLLQANPILESFGNAKTVKNDNSSRFGKFIRINFDVTGYIVGANIETYLLEKSRAVRQAKDERTFHIFYQLLSGAGEHLKSDLLLEGFNNYRFLSNGYIPIPGQQDKDNFQETMEAMHIMGFSHEEILSMLKVVSSVLQFGNISFKKERNTDQASMPENTVAQKLCHLLGMNVMEFTRAILTPRIKVGRDYVQKAQTKEQADFAVEALAKATYERLFRWLVHRINKALDRTKRQGASFIGILDIAGFEIFELNSFEQLCINYTNEKLQQLFNHTMFILEQEEYQREGIEWNFIDFGLDLQPCIDLIERPANPPGVLALLDEECWFPKATDKTFVEKLVQEQGSHSKFQKPRQLKDKADFCIIHYAGKVDYKADEWLMKNMDPLNDNVATLLHQSSDRFVAELWKDVDRIVGLDQVTGMTETAFGSAYKTKKGMFRTVGQLYKESLTKLMATLRNTNPNFVRCIIPNHEKRAGKLDPHLVLDQLRCNGVLEGIRICRQGFPNRIVFQEFRQRYEILTPNAIPKGFMDGKQACERMIRALELDPNLYRIGQSKIFFRAGVLAHLEEERDLKITDIIIFFQAVCRGYLARKAFAKKQQQLSALKVLQRNCAAYLKLRHWQWWRVFTKVKPLLQVTRQEEELQAKDEELLKVKEKQTKVEGELEEMERKHQQLLEEKNILAEQLQAETELFAEAEEMRARLAAKKQELEEILHDLESRVEEEEERNQILQNEKKKMQAHIQDLEEQLDEEEGARQKLQLEKVTAEAKIKKMEEEILLLEDQNSKFIKEKKLMEDRIAECSSQLAEEEEKAKNLAKIRNKQEVMISDLEERLKKEEKTRQELEKAKRKLDGETTDLQDQIAELQAQIDELKLQLAKKEEELQGALARGDDETLHKNNALKVVRELQAQIAELQEDFESEKASRNKAEKQKRDLSEELEALKTELEDTLDTTAAQQELRTKREQEVAELKKALEEETKNHEAQIQDMRQRHATALEELSEQLEQAKRFKANLEKNKQGLETDNKELACEVKVLQQVKAESEHKRKKLDAQVQELHAKVSEGDRLRVELAEKASKLQNELDNVSTLLEEAEKKGIKFAKDAASLESQLQDTQELLQEETRQKLNLSSRIRQLEEEKNSLQEQQEEEEEARKNLEKQVLALQSQLADTKKKVDDDLGTIESLEEAKKKLLKDAEALSQRLEEKALAYDKLEKTKNRLQQELDDLTVDLDHQRQVASNLEKKQKKFDQLLAEEKSISARYAEERDRAEAEAREKETKALSLARALEEALEAKEEFERQNKQLRADMEDLMSSKDDVGKNVHELEKSKRALEQQVEEMRTQLEELEDELQATEDAKLRLEVNMQAMKAQFERDLQTRDEQNEEKKRLLIKQVRELEAELEDERKQRALAVASKKKMEIDLKDLEAQIEAANKARDEVIKQLRKLQAQMKDYQRELEEARASRDEIFAQSKESEKKLKSLEAEILQLQEELASSERARRHAEQERDELADEITNSASGKSALLDEKRRLEARIAQLEEELEEEQSNMELLNDRFRKTTLQVDTLNAELAAERSAAQKSDNARQQLERQNKELKAKLQELEGAVKSKFKATISALEAKIGQLEEQLEQEAKERAAANKLVRRTEKKLKEIFMQVEDERRHADQYKEQMEKANARMKQLKRQLEEAEEEATRANASRRKLQRELDDATEANEGLSREVSTLKNRLRRGGPISFSSSRSGRRQLHLEGASLELSDDDTESKTSDVNETQPPQSE

SEQ ID NO: 30894 - protein, 1997 aa, Homo sapiens
MAQRTGLEDPERYLFVDRAVIYNPATQADWTAKKLVWIPSERHGFEAASIKEERGDEVMVELAENGKKAMVNKDDIQKMNPPKFSKVEDMAELTCLNEASVLHNLKDRYYSGLIYTYSGLFCVVINPYKNLPIYSENIIEMYRGKKRHEMPPHIYAISESAYRCMLQDREDQSILCTGESGAGKTENTKKVIQYLAHVASSHKGRKDHNIPGELERQLLQANPILESFGNAKTVKNDNSSRFGKFIRINFDVTGYIVGANIETYLLEKSRAVRQAKDERTFHIFYQLLSGAGEHLKSDLLLEGFNNYRFLSNGYIPIPGQQDKDNFQETMEAMHIMGFSHEEILSMLKVVSSVLQFGNISFKKERNTDQASMPENTVAQKLCHLLGMNVMEFTRAILTPRIKVGRDYVQKAQTKEQADFAVEALAKATYERLFRWLVHRINKALDRTKRQGASFIGILDIAGFEIFELNSFEQLCINYTNEKLQQLFNHTMFILEQEEYQREGIEWNFIDFGLDLQPCIDLIERPANPPGVLALLDEECWFPKATDKTFVEKLVQEQGSHSKFQKPRQLKDKADFCIIHYAGKVDYKADEWLMKNMDPLNDNVATLLHQSSDRFVAELWKDEIQNIQRASFYDSVSGLHEPPVDRIVGLDQVTGMTETAFGSAYKTKKGMFRTVGQLYKESLTKLMATLRNTNPNFVRCIIPNHEKRAGKLDPHLVLDQLRCNGVLEGIRICRQGFPNRIVFQEFRQRYEILTPNAIPKGFMDGKQACERMIRALELDPNLYRIGQSKIFFRAGVLAHLEEERDLKITDIIIFFQAVCRGYLARKAFAKKQQQLSALKVLQRNCAAYLKLRHWQWWRVFTKVKPLLQVTRQEEELQAKDEELLKVKEKQTKVEGELEEMERKHQQLLEEKNILAEQLQAETELFAEAEEMRARLAAKKQELEEILHDLESRVEEEEERNQILQNEKKKMQAHIQDLEEQLDEEEGARQKLQLEKVTAEAKIKKMEEEILLLEDQNSKFIKEKKLMEDRIAECSSQLAEEEEKAKNLAKIRNKQEVMISDLEERLKKEEKTRQELEKAKRKLDGETTDLQDQIAELQAQIDELKLQLAKKEEELQGALARGDDETLHKNNALKVVRELQAQIAELQEDFESEKASRNKAEKQKRDLSEELEALKTELEDTLDTTAAQQELRTKREQEVAELKKALEEETKNHEAQIQDMRQRHATALEELSEQLEQAKRFKANLEKNKQGLETDNKELACEVKVLQQVKAESEHKRKKLDAQVQELHAKVSEGDRLRVELAEKASKLQNELDNVSTLLEEAEKKGIKFAKDAASLESQLQDTQELLQEETRQKLNLSSRIRQLEEEKNSLQEQQEEEEEARKNLEKQVLALQSQLADTKKKVDDDLGTIESLEEAKKKLLKDAEALSQRLEEKALAYDKLEKTKNRLQQELDDLTVDLDHQRQVASNLEKKQKKFDQLLAEEKSISARYAEERDRAEAEAREKETKALSLARALEEALEAKEEFERQNKQLRADMEDLMSSKDDVGKNVHELEKSKRALEQQVEEMRTQLEELEDELQATEDAKLRLEVNMQAMKAQFERDLQTRDEQNEEKKRLLIKQVRELEAELEDERKQRALAVASKKKMEIDLKDLEAQIEAANKARDEVIKQLRKLQAQMKDYQRELEEARASRDEIFAQSKESEKKLKSLEAEILQLQEELASSERARRHAEQERDELADEITNSASGKSALLDEKRRLEARIAQLEEELEEEQSNMELLNDRFRKTTLQVDTLNAELAAERSAAQKSDNARQQLERQNKELKAKLQELEGAVKSKFKATISALEAKIGQLEEQLEQEAKERAAANKLVRRTEKKLKEIFMQVEDERRHADQYKEQMEKANARMKQLKRQLEEAEEEATRANASRRKLQRELDDATEANEGLSREVSTLKNRLRRGGPISFSSSRSGRRQLHLEGASLELSDDDTESKTSDVNETQPPQSE

SEQ ID NO: 30895 - protein, 2007 aa, Homo sapiens
MAQRTGLEDPERYLFVDRAVIYNPATQADWTAKKLVWIPSERHGFEAASIKEERGDEVMVELAENGKKAMVNKDDIQKMNPPKFSKVEDMAELTCLNEASVLHNLKDRYYSGLIYTYSGLFCVVINPYKNLPIYSENIIEMYRGKKRHEMPPHIYAISESAYRCMLQDREDQSILCTGESGAGKTENTKKVIQYLAHVASSHKGRKDHNIPQESPKPVKHQGELERQLLQANPILESFGNAKTVKNDNSSRFGKFIRINFDVTGYIVGANIETYLLEKSRAVRQAKDERTFHIFYQLLSGAGEHLKSDLLLEGFNNYRFLSNGYIPIPGQQDKDNFQETMEAMHIMGFSHEEILSMLKVVSSVLQFGNISFKKERNTDQASMPENTVAQKLCHLLGMNVMEFTRAILTPRIKVGRDYVQKAQTKEQADFAVEALAKATYERLFRWLVHRINKALDRTKRQGASFIGILDIAGFEIFELNSFEQLCINYTNEKLQQLFNHTMFILEQEEYQREGIEWNFIDFGLDLQPCIDLIERPANPPGVLALLDEECWFPKATDKTFVEKLVQEQGSHSKFQKPRQLKDKADFCIIHYAGKVDYKADEWLMKNMDPLNDNVATLLHQSSDRFVAELWKDEIQNIQRASFYDSVSGLHEPPVDRIVGLDQVTGMTETAFGSAYKTKKGMFRTVGQLYKESLTKLMATLRNTNPNFVRCIIPNHEKRAGKLDPHLVLDQLRCNGVLEGIRICRQGFPNRIVFQEFRQRYEILTPNAIPKGFMDGKQACERMIRALELDPNLYRIGQSKIFFRAGVLAHLEEERDLKITDIIIFFQAVCRGYLARKAFAKKQQQLSALKVLQRNCAAYLKLRHWQWWRVFTKVKPLLQVTRQEEELQAKDEELLKVKEKQTKVEGELEEMERKHQQLLEEKNILAEQLQAETELFAEAEEMRARLAAKKQELEEILHDLESRVEEEEERNQILQNEKKKMQAHIQDLEEQLDEEEGARQKLQLEKVTAEAKIKKMEEEILLLEDQNSKFIKEKKLMEDRIAECSSQLAEEEEKAKNLAKIRNKQEVMISDLEERLKKEEKTRQELEKAKRKLDGETTDLQDQIAELQAQIDELKLQLAKKEEELQGALARGDDETLHKNNALKVVRELQAQIAELQEDFESEKASRNKAEKQKRDLSEELEALKTELEDTLDTTAAQQELRTKREQEVAELKKALEEETKNHEAQIQDMRQRHATALEELSEQLEQAKRFKANLEKNKQGLETDNKELACEVKVLQQVKAESEHKRKKLDAQVQELHAKVSEGDRLRVELAEKASKLQNELDNVSTLLEEAEKKGIKFAKDAASLESQLQDTQELLQEETRQKLNLSSRIRQLEEEKNSLQEQQEEEEEARKNLEKQVLALQSQLADTKKKVDDDLGTIESLEEAKKKLLKDAEALSQRLEEKALAYDKLEKTKNRLQQELDDLTVDLDHQRQVASNLEKKQKKFDQLLAEEKSISARYAEERDRAEAEAREKETKALSLARALEEALEAKEEFERQNKQLRADMEDLMSSKDDVGKNVHELEKSKRALEQQVEEMRTQLEELEDELQATEDAKLRLEVNMQAMKAQFERDLQTRDEQNEEKKRLLIKQVRELEAELEDERKQRALAVASKKKMEIDLKDLEAQIEAANKARDEVIKQLRKLQAQMKDYQRELEEARASRDEIFAQSKESEKKLKSLEAEILQLQEELASSERARRHAEQERDELADEITNSASGKSALLDEKRRLEARIAQLEEELEEEQSNMELLNDRFRKTTLQVDTLNAELAAERSAAQKSDNARQQLERQNKELKAKLQELEGAVKSKFKATISALEAKIGQLEEQLEQEAKERAAANKLVRRTEKKLKEIFMQVEDERRHADQYKEQMEKANARMKQLKRQLEEAEEEATRANASRRKLQRELDDATEANEGLSREVSTLKNRLRRGGPISFSSSRSGRRQLHLEGASLELSDDDTESKTSDVNETQPPQSE

SEQ ID NO: 30896 - protein, 1985 aa, Homo sapiens
MAQRTGLEDPERYLFVDRAVIYNPATQADWTAKKLVWIPSERHGFEAASIKEERGDEVMVELAENGKKAMVNKDDIQKMNPPKFSKVEDMAELTCLNEASVLHNLKDRYYSGLIYTYSGLFCVVINPYKNLPIYSENIIEMYRGKKRHEMPPHIYAISESAYRCMLQDREDQSILCTGESGAGKTENTKKVIQYLAHVASSHKGRKDHNIPESPKPVKHQGELERQLLQANPILESFGNAKTVKNDNSSRFGKFIRINFDVTGYIVGANIETYLLEKSRAVRQAKDERTFHIFYQLLSGAGEHLKSDLLLEGFNNYRFLSNGYIPIPGQQDKDNFQETMEAMHIMGFSHEEILSMLKVVSSVLQFGNISFKKERNTDQASMPENTVAQKLCHLLGMNVMEFTRAILTPRIKVGRDYVQKAQTKEQADFAVEALAKATYERLFRWLVHRINKALDRTKRQGASFIGILDIAGFEIFELNSFEQLCINYTNEKLQQLFNHTMFILEQEEYQREGIEWNFIDFGLDLQPCIDLIERPANPPGVLALLDEECWFPKATDKTFVEKLVQEQGSHSKFQKPRQLKDKADFCIIHYAGKVDYKADEWLMKNMDPLNDNVATLLHQSSDRFVAELWKDVDRIVGLDQVTGMTETAFGSAYKTKKGMFRTVGQLYKESLTKLMATLRNTNPNFVRCIIPNHEKRAGKLDPHLVLDQLRCNGVLEGIRICRQGFPNRIVFQEFRQRYEILTPNAIPKGFMDGKQACERMIRALELDPNLYRIGQSKIFFRAGVLAHLEEERDLKITDIIIFFQAVCRGYLARKAFAKKQQQLSALKVLQRNCAAYLKLRHWQWWRVFTKVKPLLQVTRQEEELQAKDEELLKVKEKQTKVEGELEEMERKHQQLLEEKNILAEQLQAETELFAEAEEMRARLAAKKQELEEILHDLESRVEEEEERNQILQNEKKKMQAHIQDLEEQLDEEEGARQKLQLEKVTAEAKIKKMEEEILLLEDQNSKFIKEKKLMEDRIAECSSQLAEEEEKAKNLAKIRNKQEVMISDLEERLKKEEKTRQELEKAKRKLDGETTDLQDQIAELQAQIDELKLQLAKKEEELQGALARGDDETLHKNNALKVVRELQAQIAELQEDFESEKASRNKAEKQKRDLSEELEALKTELEDTLDTTAAQQELRTKREQEVAELKKALEEETKNHEAQIQDMRQRHATALEELSEQLEQAKRFKANLEKNKQGLETDNKELACEVKVLQQVKAESEHKRKKLDAQVQELHAKVSEGDRLRVELAEKASKLQNELDNVSTLLEEAEKKGIKFAKDAASLESQLQDTQELLQEETRQKLNLSSRIRQLEEEKNSLQEQQEEEEEARKNLEKQVLALQSQLADTKKKVDDDLGTIESLEEAKKKLLKDAEALSQRLEEKALAYDKLEKTKNRLQQELDDLTVDLDHQRQVASNLEKKQKKFDQLLAEEKSISARYAEERDRAEAEAREKETKALSLARALEEALEAKEEFERQNKQLRADMEDLMSSKDDVGKNVHELEKSKRALEQQVEEMRTQLEELEDELQATEDAKLRLEVNMQAMKAQFERDLQTRDEQNEEKKRLLIKQVRELEAELEDERKQRALAVASKKKMEIDLKDLEAQIEAANKARDEVIKQLRKLQAQMKDYQRELEEARASRDEIFAQSKESEKKLKSLEAEILQLQEELASSERARRHAEQERDELADEITNSASGKSALLDEKRRLEARIAQLEEELEEEQSNMELLNDRFRKTTLQVDTLNAELAAERSAAQKSDNARQQLERQNKELKAKLQELEGAVKSKFKATISALEAKIGQLEEQLEQEAKERAAANKLVRRTEKKLKEIFMQVEDERRHADQYKEQMEKANARMKQLKRQLEEAEEEATRANASRRKLQRELDDATEANEGLSREVSTLKNRLRRGGPISFSSSRSGRRQLHLEGASLELSDDDTESKTSDVNETQPPQSE

SEQ ID NO: 30897 - protein, 521 aa, Homo sapiens
MLNVPSQSFPAPRSQQRVASGGRSKVPLKQGRSLMDWIRLTKSGKDLTGLKGRLIEVTEEELKKHNKKDDCWICIRGFVYNVSPYMEYHPGGEDELMRAAGSDGTELFDQVHRWVNYESMLKECLVGRMAIKPAVLKDYREEEKKVLNGMLPKSQVTDTLAKEGPSYPSYDWFQTDSLVTIAIYTKQKDINLDSIIVDHQNDSFRAETIIKDCLYLIHIGLSHEVQEDFSVRVVESVGKIEIVLQKKENTSWDFLGHPLKNHNSLIPRKDTGLYYRKCQLISKEDVTHDTRLFCLMLPPSTHLQVPIGQHVYLKLPITGTEIVKPYTPVSGSLLSEFKEPVLPNNKYIYFLIKIYPTGLFTPELDRLQIGDFVSVSSPEGNFKISKFQELEDLFLLAAGTGFTPMVKILNYALTDIPSLRKVKLMFFNKTEDDIIWRSQLEKLAFKDKRLDVEFVLSAPISEWNGKQGHISPALLSEFLKRNLDKSKVLVCICGPVPFTEQGVRLLHDLNFSKNEIHSFTA

SEQ ID NO: 30898 - protein, 1465 aa, Homo sapiens
MSLVTVPFYQKRHRHFDQSYRNIQTRYLLDEYASKKRASTQASSQKSLSQRSSSQRASSQTSLGGTICRVCAKRVSTQEDEEQENRSRYQSLVAAYGEAKRQRFLSELAHLEEDVHLARSQARDKLDKYAIQQMMEDKLAWERHTFEERISRAPEILVRLRSHTVWERMSVKLCFTVQGFPTPVVQWYKDGSLICQAAEPGKYRIESNYGVHTLEINRADFDDTATYSAVATNAHGQVSTNAAVVVRRFRGDEEPFRSVGLPIGLPLSSMIPYTHFDVQFLEKFGVTFRREGETVTLKCTMLVTPDLKRVQPRAEWYRDDVLLKESKWTKMFFGEGQASLSFSHLHKDDEGLYTLRIVSRGGVSDHSAFLFVRDADPLVTGAPGAPMDLQCHDANRDYVIVTWKPPNTTTESPVMGYFVDRCEVGTNNWVQCNDAPVKICKYPVTGLFEGRSYIFRVRAVNSAGISRPSRVSDAVAALDPLDLRRLQAVHLEGEKEIAIYQDDLEGDAQVPGPPTGVHASEISRNYVVLSWEPPTPRGKDPLMYFIEKSVVGSGSWQRVNAQTAVRSPRYAVFDLMEGKSYVFRVLSANRHGLSEPSEITSPIQAQDVTVVPSAPGRVLASRNTKTSVVVQWDRPKHEEDLLGYYVDCCVAGTNLWEPCNHKPIGYNRFVVHGLTTGEQYIFRVKAVNAVGMSENSQESDVIKVQAALTVPSHPYGITLLNCDGHSMTLGWKVPKFSGGSPILGYYLDKREVHHKNWHEVNSSPSKPTILTVDGLTEGSLYEFKIAAVNLAGIGEPSDPSEHFKCEAWTMPEPGPAYDLTFCEVRDTSLVMLWKAPVYSGSSPVSGYFVDFREEDAGEWITVNQTTTANRYLKVSDLQQGKTYVFRVRAVNANGVGKPSDTSEPVLVEARPGTKEISAGVDEQGNIYLGFDCQEMTDASQFTWCKSYEEISDDERFKIETVGDHSKLYLKNPDKEDLGTYSVSVSDTDGVSSSFVLDPEELERLMALSNEIKNPTIPLKSELAYEIFDKGRVRFWLQAEHLSPDASYRFIINDREVSDSEIHRIKCDKATGIIEMVMDRFSIENEGTYTVQIHDGKAKSQSSLVLIGDAFKTVLEEAEFQRKEFLRKQGPHFAEYLHWDVTEECEVRLVCKVANTKKETVFKWLKDDVLYETETLPNLERGICELLIPKLSKKDHGEYKATLKDDRGQDVSILEIAGKVYDDMILAMSRVCGKSASPLKVLCTPEGIRLQCFMKYFTDEMKVNWCHKDAKISSSEHMRIGGSEEMAWLQICEPTEKDKGKYTFEIFDGKDNHQRSLDLSGQAFDEAFAEFQQFKAAAFAEKNRGRLIGGLPDVVTIMEGKTLNLTCTVFGNPDPEVIWFKNDQDIQLSEHFSVKVEQAKYVSMTIKGVTSEDSGKYSINIKNKYGGEKIDVTVSVYKHGEKIPDMAPPQQAKPKLIPASASAAGQ

SEQ ID NO: 30899 - protein, 1858 aa, Homo sapiens
MEIDQCLLESLPLGQRQRLVKRMRCEQIKAYYEREKAFQKQEGFLKRLKHAKNPKVHFNLTDMLQDAIIHHNDKEVLRLLKEGADPHTLVSSGGSLLHLCARYDNAFIAEILIDRGVNVNHQDEDFWTPMHIACACDNPDIVLLLVLAGANVLLQDVNGNIPLDYAVEGTESSSILLTYLDENGVDLTSLRQMKLQRPMSMLTDVKHFLSSGGNVNEKNDEGVTLLHMACASGYKEVVSLILEHGGDLNIVDDQYWTPLHLAAKYGQTNLVKLLLMHQANPHLVNCNEEKASDIAASEFIEEMLLKAEIAWEEKMKEPLSASTLAQEEPYEEIIHDLPVLSSKLSPLVLPIAKQDSLLEKDIMFKDATKGLCKQQSQDSIPENPMMSGSTKPEQVKLMPPAPNDDLATLSELNDGSLLYEIQKRFGNNQIYTFIGDILLLVNPYKELPIYSSMVSQLYFSSSGKLCSSLPPHLFSCVERAFHQLFREQRPQCFILSGERGSGKSEASKQIIRHLTCRAGASRATLDSRFKHVVCILEAFGHAKTTLNDLSSCFIKYFELQFCERKQQLTGARIYTYLLEKSRLVSQPLGQSNFLIFYLLMDGLSAEEKYGLHLNNLCAHRYLNQTIQDDASTGERSLNREKLAVLKRALNVVGFSSLEVENLFVILAAILHLGDIRFTALNEGNSAFVSDLQLLEQVAGMLQVSTDELASALTTDIQYFKGDMIIRRHTIQIAEFFRDLLAKSLYSRLFSFLVNTMNSCLHSQDEQKSMQTLDIGILDIFGFEEFQKNEFEQLCVNMTNEKMHHYINEVLFLHEQVECVQEGVTMETAYSPGNQNGVLDFFFQKPSGFLTLLDEESQMIWSVESNFPKKLQSLLESSNTNAVYSPMKDGNGNVALKDHGTAFTIMHYAGRVMYDVVGAIEKNKDSLSQNLLFVMKTSENVVINHLFQSKLSQTGSLVSAYPSFKFRGHKSALLSKKMTASSIIGENKNYLELSKLLKKKGTSTFLQRLERGDPVTIASQLRKSLMDIIGKLQKCTPHFIHCIRPNNSKLPDTFDNFYVSAQLQYIGVLEMVKIFRYGYPVRLSFSDFLSRYKPLADTFLREKKEQSAAERCRLVLQQCKLQGWQMGVRKVFLKYWHADQLNDLCLQLQRKIITCQKVIRGFLARQHLLQRISIRQQEVTSINSFLQNTEDMGLKTYDALVIQNASDIARENDRLRSEMNAPYHKEKLEVRNMQEEGSKRTDDKSGPRHFHPSSMSVCAAVDGLGQCLVGPSIWSPSLHSVFSMDDSSSLPSPRKQPPPKPKRDPNTRLSASYEAVSACLSAAREAANEALARPRPHSDDYSTMKKIPPRKPKRSPNTKLSGSYEEISGSRPGDARPAGAPGAAARVLTPGTPQCALPPAAPPGDEDDSEPVYIEMLGHAARPDSPDPGESVYEEMKCCLPDDGGPGAGSFLLHGASPPLLHRAPEDEAAGPPGDACDIPPPFPNLLPHRPPLLVFPPTPVTCSPASDESPLTPLEVKKLPVLETNLKYPVQPEGSSPLSPQYSKSQKGDGDRPASPGLALFNGSGRASPPSTPPPPPPPPGPPPAPYRPCAHLAFPPEPAPVNAGKAGPSAEAPKVHPKPNSAPVAGPCSSFPKIPYSPVKATRADARKAGSSASPPAPYSPPSSRPLSSPLDELASLFNSGRSVLRKSAAGRKIREAEGFETNMNISSRDDPSTSEITSETQDRNANNHGIQLSNSLSSAITAENGNSISNGLPEEDGYSRLSISGTGTSTFQRHRDSHTTQVIHQLRLSENESVALQELLDWRRKLCEEGQDWQQILHHAEPRVPPPPPCKKPSLLKKPEGASCNRLPSELWDTTI

SEQ ID NO: 30900 - protein, 1090 aa, Homo sapiens
MEIDQCLLESLPLGQRQRLVKRMRCEQIKAYYEREKAFQKQEGFLKRLKHAKNPKVHFNLTDMLQDAIIHHNDKEVLRLLKEGADPHTLVSSGGSLLHLCARYDNAFIAEILIDRGVNVNHQDEDFWTPMHIACACDNPDIVLLLVLAGANVLLQDVNGNIPLDYAVEGTESSSILLTYLDENGVDLTSLRQMKLQRPMSMLTDVKHFLSSGGNVNEKNDEGVTLLHMACASGYKEVVSLILEHGGDLNIVDDQYWTPLHLAAKYGQTNLVKLLLMHQANPHLVNCNEEKASDIAASEFIEEMLLKAEIAWEEKMKEPLSASTLAQEEPYEEIIHDLPVLSSKLSPLVLPIAKQDSLLEKDIMFKDATKGLCKQQSQDSIPENPMMSGSTKPEQVKLMPPAPNDDLATLSELNDGSLLYEIQKRFGNNQIYTFIGDILLLVNPYKELPIYSSMVSQLYFSSSGKLCSSLPPHLFSCVERAFHQLFREQRPQCFILSGERGSGKSEASKQIIRHLTCRAGASRATLDSRFKHVVCILEAFGHAKTTLNDLSSCFIKYFELQFCERKQQLTGARIYTYLLEKSRLVSQPLGQSNFLIFYLLMDGLSAEEKYGLHLNNLCAHRYLNQTIQDDASTGERSLNREKLAVLKRALNVVGFSSLEVENLFVILAAILHLGDIRFTALNEGNSAFVSDLQLLEQVAGMLQVSTDELASALTTDIQYFKGDMIIRRHTIQIAEFFRDLLAKSLYSRLFSFLVNTMNSCLHSQDEQKSMQTLDIGILDIFGFEEFQKNEFEQLCVNMTNEKMHHYINEVLFLHEQVECVQEGVTMETAYSPGNQNGVLDFFFQKPSGFLTLLDEESQMIWSVESNFPKKLQSLLESSNTNAVYSPMKDGNGNVALKDHGTAFTIMHYAGRVMYDVVGAIEKNKDSLSQNLLFVMKTSENVVINHLFQSKLSQTGSLVSAYPSFKFRGHKSALLSKKMTASSIIGENKNYLELSKLLKKKGTSTFLQRLERGDPVTIASQLRKSLMDIIGKLQKCTPHFIHCIRPNNSKLPDTFDNFYVSAQLQYIGVLEMVKIFRYGYPVRLSFSDFLSR

SEQ ID NO: 30901 - protein, 940 aa, Homo sapiens
MEIDQCLLESLPLGQRQRLVKRMRCEQIKAYYEREKAFQKQEGFLKRLKHAKNPKVHFNLTDMLQDAIIHHNDKEVLRLLKEGADPHTLVSSGGSLLHLCARYDNAFIAEILIDRGVNVNHQDEDFWTPMHIACACDNPDIVLLLVLAGANVLLQDVNGNIPLDYAVEGTESSSILLTYLDENGVDLTSLRQMKLQRPMSMLTDVKHFLSSGGNVNEKNDEGVTLLHMACASGYKEVVSLILEHGGDLNIVDDQYWTPLHLAAKYGQTNLVKLLLMHQANPHLVNCNEEKASDIAASEFIEEMLLKAEIAWEEKMKEPLSASTLAQEEPYEEIIHDLPVLSSKLSPLVLPIAKQDSLLEKDIMFKDATKGLCKQQSQDSIPENPMMSGSTKPEQVKLMPPAPNDDLATLSELNDGSLLYEIQKRFGNNQIYTFIGDILLLVNPYKELPIYSSMVSQLYFSSSGKLCSSLPPHLFSCVERAFHQLFREQRPQCFILSGERGSGKSEASKQIIRHLTCRAGASRATLDSRFKHVVCILEAFGHAKTTLNDLSSCFIKYFELQFCERKQQLTGARIYTYLLEKSRLVSQPLGQSNFLIFYLLMDGLSAEEKYGLHLNNLCAHRYLNQTIQDDASTGERSLNREKLAVLKRALNVVGFSSLEVENLFVILAAILHLGDIRFTALNEGNSAFVSDLQLLEQVAGMLQVSTDELASALTTDIQYFKGDMIIRRHTIQIAEFFRDLLAKSLYSRLFSFLVNTMNSCLHSQDEQKSMQTLDIGILDIFGFEEFQKNEFEQLCVNMTNEKMHHYINEVLFLHEQVECVQEGVTMETAYSPGNQNGVLDFFFQKPSGFLTLLDEESQMIWSVESNFPKKLQSLLESSNTNAVYSPMKDGNGNVALKDHGTAFTIMHYAGRVMYDVVGAIEKNKDSLSQNLLFVMKRGRCF

SEQ ID NO: 30902 - protein, 728 aa, Homo sapiens
MKLQRPMSMLTDVLHMACASGYKEVVSLILEHGGDLNIVDDQYWTPLHLAAKYGQTNLVKLLLMHQANPHLVNCNEEKASDIAASEFIEEMLLKAEIAWEEKMKEPLSASTLAQEEPYEEIIHDLPVLSSKLSPLVLPIAKQDSLLEKDIMFKDATKGLCKQQSQDSIPENPMMSGSTKPEQVKLMPPAPNDDLATLSELNDGSLLYEIQKRFGNNQIYTFIGDILLLVNPYKELPIYSSMVSQLYFSSSGKLCSSLPPHLFSCVERAFHQLFREQRPQCFILSGERGSGKSEASKQIIRHLTCRAGASRATLDSRFKHVVCILEAFGHAKTTLNDLSSCFIKYFELQFCERKQQLTGARIYTYLLEKSRLVSQPLGQSNFLIFYLLMDGLSAEEKYGLHLNNLCAHRYLNQTIQDDASTGERSLNREKLAVLKRALNVVGFSSLEVENLFVILAAILHLGDIRFTALNEGNSAFVSDLQLLEQVAGMLQVSTDELASALTTDIQYFKGDMIIRRHTIQIAEFFRDLLAKSLYSRLFSFLVNTMNSCLHSQDEQKSMQTLDIGILDIFGFEEFQKNEFEQLCVNMTNEKMHHYINEVLFLHEQVECVQEGVTMETAYSPGNQNGVLDFFFQKPSGFLTLLDEESQMIWSVESNFPKKLQSLLESSNTNAVYSPMKDGNGNVALKDHGTAFTIMHYAGRVMYDVVGAIEKNKDSLSQNLLFVMKRGRCF

SEQ ID NO: 30903 - protein, 970 aa, Homo sapiens
MLQQVNGHNPGSDGQAREYLREDLQEFLGGEVLLYKLDDLTRVNPVTLETVLRCLQARYMADTFYTNAGCTLVALNPFKPVPQLYSPELMREYHAAPQPQKLKPHVFTVGEQTYRNVKSLIEPVNQSIVVSGESGAGKTWTSRCLMKFYAVVATSPASWESHKIAERIEQRILNSNPVMEAFGNACTLRNNNSSRFGKFIQLQLNRAQQMTGAAVQTYLLEKTRVACQASSERNFHIFYQICKGASEDERLQWHLPEGAAFSWLPNPERSLEEDCFEVTREAMLHLGIDTPTQNNIFKVLAGLLHLGNIQFAASEDEAQPCQPMDDAKYSVRTAASLLGLPEDVLLEMVQIRTIRAGRQQQVFRKPCARAECDTRRDCLAKLIYARLFDWLVSVINSSICADTDSWTTFIGLLDVYGFESFPDNSLEQLCINYANEKLQQHFVAHYLRAQQEEYAVEGLEWSFINYQDNQPCLDLIEGSPISICSLINEECRLNRPSSAAQLQTRIETALAGSPCLGHNKLSREPSFIVVHYAGPVRYHTAGLVEKNKDPIPPELTRLLQQSQDPLLMGLFPTNPKEKTQEEPPGQSRAPVLTVVSKFKASLEQLLQVLHSTTPHYIRCIKPNSQGQAQTFLQEEVLSQLEACGLVETIHISAAGFPIRVSHRNFVERYKLLRRLHPCTSSGPDSPYPAKGLPEWCPHSEEATLEPLIQDILHTLPVLTQAAAITGDSAEAMPAPMHCGRTKVFMTDSMLELLECGRARVLEQCARCIQGGWRRHRHREQERQWRAVMLIQAAIRSWLTRKHIQRLHAAATVIKRAWQKWRIRMACLAAKELDGVEEKHFSQAPCSLSTSPLQTRLLEAIIRLWPLGLVLANTAMGVGSFQRKLVVWACLQLPRGSPSSYTVQTAQDQAGVTSIRALPQGSIKFHCRKSPLRYADICPEPSPYSITGFNQILLERHRLIHVTSSAFTGLG

SEQ ID NO: 30904 - protein, 317 aa, Homo sapiens
MLQQVNGHNPGSDGQAREYLREDLQEFLGGEVLLYKLDDLTRVNPVTLETVLRCLQARYMADTFYTNAGCTLVALNPFKPVPQLYSPELMREYHAAPQPQKLKPHVFTVGEQTYRNVKSLIEPVNQSIVVSGESGAGKTWTSRCLMKFYAVVATSPASWESHKIAERIEQRILNSNPVMEAFGNACTLRNNNSSRFGKFIQLQLNRAQQMTGAAVQTYLLEKTRVACQASSERNFHIFYQICKGASEDERLQWHLPEGAAFSWLPNPERSLEEDCFEVTREAMLHLGIDTPTQNNIFKVRRKATPLKFGRDDGQPFA

SEQ ID NO: 30905 - protein, 636 aa, Homo sapiens
MLQQVNGHNPGSDGQAREYLREDLQEFLGGEVLLYKLDDLTRVNPVTLETVLRCLQARYMADTFYTNAGCTLVALNPFKPVPQLYSPELMREYHAAPQPQKLKPHVFTVGEQTYRNVKSLIEPVNQSIVVSGESGAGKTWTSRCLMKFYAVVATSPASWESHKIAERIEQRILNSNPVMEAFGNACTLRNNNSSRFGKFIQLQLNRAQQMTGAAVQTYLLEKTRVACQASSERNFHIFYQICKGASEDERLQWHLPEGAAFSWLPNPERSLEEDCFEVTREAMLHLGIDTPTQNNIFKVLAGLLHLGNIQFAASEDEAQPCQPMDDAKYSVRTAASLLGLPEDVLLEMVQIRTIRAGRQQQVFRKPCARAECDTRRDCLAKLIYARLFDWLVSVINSSICADTDSWTTFIGLLDVYGFESFPDNSLEQLCINYANEKLQQHFVAHYLRAQQEEYAVEGLEWSFINYQDNQPCLDLIEGSPISICSLINEECRLNRPSSAAQLQTRIETALAGSPCLGHNKLSREPSFIVVHYAGPVRYHTAGLVEKNKDPIPPELTRLLQQSQDPLLMGLFPTNPKEKTQEEPPGQSRAPVLTVVSKFKASLEQLLQVLHSTTPHYIRCIKPNSQGQAQTFLQEEA

SEQ ID NO: 30906 - protein, 770 aa, Homo sapiens
MLQQVNGHNPGSDGQAREYLREDLQEFLGGEVLLYKLDDLTRVNPVTLETVLRCLQARYMADTFYTNAGCTLVALNPFKPVPQLYSPELMREYHAAPQPQKLKPHVFTVGEQTYRNVKSLIEPVNQSIVVSGESGAGKTWTSRCLMKFYAVVATSPASWESHKIAERIEQRILNSNPVMEAFGNACTLRNNNSSRFGKFIQLQLNRAQQMTGAAVQTYLLEKTRVACQASSERNFHIFYQICKGASEDERLQWHLPEGAAFSWLPNPERSLEEDCFEVTREAMLHLGIDTPTQNNIFKVLAGLLHLGNIQFAASEDEAQPCQPMDDAKYSVRTAASLLGLPEDVLLEMVQIRTIRAGRQQQVFRKPCARAECDTRRDCLAKLIYARLFDWLVSVINSSICADTDSWTTFIGLLDVYGFESFPDNSLEQLCINYANEKLQLEACGLVETIHISAAGFPIRVSHRNFVERYKLLRRLHPCTSSGPDSPYPAKGLPEWCPHSEEATLEPLIQDILHTLPVLTQAAAITGDSAEAMPAPMHCGRTKVFMTDSMLELLECGRARVLEQCARCIQGGWRRHRHREQERQWRAVMLIQAAIRSWLTRKHIQRLHAAATVIKRAWQKWRIRMACLAAKELDGVEEKHFSQAPCSLSTSPLQTRLLEAIIRLWPLGLVLANTAMGVGSFQRKLVVWACLQLPRGSPSSYTVQTAQDQAGVTSIRALPQGSIKFHCRKSPLRYADICPEPSPYSITGFNQILLERHRLIHVTSSAFTGLG

SEQ ID NO: 30907 - protein, 1685 aa, Homo sapiens
MSLPFYQRCHQHYDLSYRNKDVRSTVSHYQREKKRSAVYTQGSTAYSSRSSAAHRRESEAFRRASASSSQQQASQHALSSEVSRKAASAYDYGSSHGLTDSSLLLDDYSSKLSPKPKRAKHSLLSGEEKENLPSDYMVPIFSGRQKHVSGITDTEEERIKEAAAYIAQRNLLASEEGITTSKQSTASKQTTASKQSTASKQSTASKQSTASRQSTASRQSVVSKQATSALQQEETSEKKSRKVVIREKAERLSLRKTLEETETYHAKLNEDHLLHAPEFIIKPRSHTVWEKENVKLHCSIAGWPEPRVTWYKNQVPINVHANPGKYIIESRYGMHTLEINGCDFEDTAQYRASAMNVKGELSAYASVVVKRYKGEFDETRFHAGASTMPLSFGVTPYGYASRFEIHFDDKFDVSFGREGETMSLGCRVVITPEIKHFQPEIQWYRNGVPLSPSKWVQTLWSGERATLTFSHLNKEDEGLYTIRVRMGEYYEQYSAYVFVRDADAEIEGAPAAPLDVKCLEANKDYIIISWKQPAVDGGSPILGYFIDKCEVGTDSWSQCNDTPVKFARFPVTGLIEGRSYIFRVRAVNKMGIGFPSRVSEPVAALDPAEKARLKSRPSAPWTGQIIVTEEEPSEGIVPGPPTDLSVTEATRSYVVLSWKPPGQRGHEGIMYFVEKCEAGTENWQRVNTELPVKSPRFALFDLAEGKSYCFRVRCSNSAGVGEPSEATEVTVVGDKLDIPKAPGKIIPSRNTDTSVVVSWEESKDAKELVGYYIEASVAGSGKWEPCNNNPVKGSRFTCHGLVTGQSYIFRVRAVNAAGLSEYSQDSEAIEVKAAIGGGVSPDVCPALSDEPGGLTASRGRVHEASPPTFQKDALLGSKPNKPSLPSSSQNLGQTEVSKVSETVQEELTPPPQKAAPQGKSKSDPLKKKTDRAPPSPPCDITCLESFRDSMVLGWKQPDKIGGAEITGYYVNYREVIDGVPGKWREANVKAVSEEAYKISNLKENMVYQFQVAAMNMAGLGAPSAVSECFKCEEWTIAVPGPPHSLKCSEVRKDSLVLQWKPPVHSGRTPVTGYFVDLKEAKAKEDQWRGLNEAAIKNVYLKVRGLKEGVSYVFRVRAINQAGVGKPSDLAGPVVAETRPGTKEVVVNVDDDGVISLNFECDKMTPKSEFSWSKDYVSTEDSPRLEVESKGNKTKMTFKDLGMDDLGIYSCDVTDTDGIASSYLIDEEELKRLLALSHEHKFPTVPVKSELAVEILEKGQVRFWMQAEKLSGNAKVNYIFNEKEIFEGPKYKMHIDRNTGIIEMFMEKLQDEDEGTYTFQLQDGKATNHSTVVLVGDVFKKLQKEAEFQRQEWIRKQGPHFVEYLSWEVTGECNVLLKCKVANIKKETHIVWYKDEREISVDEKHDFKDGICTLLITEFSKKDAGIYEVILKDDRGKDKSRLKLVDEAFKELMMEVCKKIALSATDLKIQSTAEGIQLYSFVTYYVEDLKVNWSHNGSAIRYSDRVKTGVTGEQIWLQINEPTPNDKGKYVMELFDGKTGHQKTVDLSGQAYDEAYAEFQRLKQAAIAEKNRARVLGGLPDVVTIQEGKALNLTCNVWGDPPPEVSWLKNEKALASDDHCNLKFEAGRTAYFTINGVSTADSGKYGLVVKNKYGSETSDFTVSVFIPEEEARMAALESLKGGKKAK

SEQ ID NO: 30908 - protein, 1589 aa, Homo sapiens
MSLPFYQRCHQHYDLSYRNKDVRSTVSHYQREKKRSAVYTQGSTAYSSRSSAAHRRESEAFRRASASSSQQQASQHALSSEVSRKAASAYDYGSSHGLTDSSLLLDDYSSKLSPKPKRAKHSLLSGEEKENLPSDYMVPIFSGRQKHVSGITDTEEERIKEAAAYIAQRNLLASEEGITTSKQSTASKQTTASKQSTASKQSTASKQSTASRQSTASRQSVVSKQATSALQQEETSEKKSRKVVIREKAERLSLRKTLEETETYHAKLNEDHLLHAPEFIIKPRSHTVWEKENVKLHCSIAGWPEPRVTWYKNQVPINVHANPGKYIIESRYGMHTLEINGCDFEDTAQYRASAMNVKGELSAYASVVVKRYKGEFDETRFHAGASTMPLSFGVTPYGYASRFEIHFDDKFDVSFGREGETMSLGCRVVITPEIKHFQPEIQWYRNGVPLSPSKWVQTLWSGERATLTFSHLNKEDEGLYTIRVRMGEYYEQYSAYVFVRDADAEIEGAPAAPLDVKCLEANKDYIIISWKQPAVDGGSPILGYFIDKCEVGTDSWSQCNDTPVKFARFPVTGLIEGRSYIFRVRAVNKMGIGFPSRVSEPVAALDPAEKARLKSRPSAPWTGQIIVTEEEPSEGIVPGPPTDLSVTEATRSYVVLSWKPPGQRGHEGIMYFVEKCEAGTENWQRVNTELPVKSPRFALFDLAEGKSYCFRVRCSNSAGVGEPSEATEVTVVGDKLDIPKAPGKIIPSRNTDTSVVVSWEESKDAKELVGYYIEASVAGSGKWEPCNNNPVKGSRFTCHGLVTGQSYIFRVRAVNAAGLSEYSQDSEAIEVKAAIAPPSPPCDITCLESFRDSMVLGWKQPDKIGGAEITGYYVNYREVIDGVPGKWREANVKAVSEEAYKISNLKENMVYQFQVAAMNMAGLGAPSAVSECFKCEEWTIAVPGPPHSLKCSEVRKDSLVLQWKPPVHSGRTPVTGYFVDLKEAKAKEDQWRGLNEAAIKNVYLKVRGLKEGVSYVFRVRAINQAGVGKPSDLAGPVVAETRPGTKEVVVNVDDDGVISLNFECDKMTPKSEFSWSKDYVSTEDSPRLEVESKGNKTKMTFKDLGMDDLGIYSCDVTDTDGIASSYLIDEEELKRLLALSHEHKFPTVPVKSELAVEILEKGQVRFWMQAEKLSGNAKVNYIFNEKEIFEGPKYKMHIDRNTGIIEMFMEKLQDEDEGTYTFQLQDGKATNHSTVVLVGDVFKKLQKEAEFQRQEWIRKQGPHFVEYLSWEVTGECNVLLKCKVANIKKETHIVWYKDEREISVDEKHDFKDGICTLLITEFSKKDAGIYEVILKDDRGKDKSRLKLVDEAFKELMMEVCKKIALSATDLKIQSTAEGIQLYSFVTYYVEDLKVNWSHNGSAIRYSDRVKTGVTGEQIWLQINEPTPNDKGKYVMELFDGKTGHQKTVDLSGQAYDEAYAEFQRLKQAAIAEKNRARVLGGLPDVVTIQEGKALNLTCNVWGDPPPEVSWLKNEKALASDDHCNLKFEAGRTAYFTINGVSTADSGKYGLVVKNKYGSETSDFTVSVFIPEEEARMAALESLKGGKKAK

SEQ ID NO: 30909 - protein, 1457 aa, Homo sapiens
MVVSAGPWSSEKAEMNILEINEKLRPQLAENKQQFRNLKERCFLTQLAGFLANRQKKYKYEECKDLIKFMLRNERQFKEEKLAEQLKQAEELRQYKVLVHSQERELTQLREKLREGRDASRSLNEHLQALLTPDEPDKSQGQDLQEQLAEGCRLAQQLVQKLSPENDEDEDEDVQVEEDEKVLESSAPREVQKAEESKVPEDSLEECAITCSNSHGPCDSIQPHKNIKITFEEDKVNSTVVVDRKSSHDECQDALNILPVPGPTSSATNVSMVVSAGPLSSEKAEMNILEINEKLRPQLAEKKQQFRSLKEKCFVTQLAGFLAKQQNKYKYEECKDLIKSMLRNELQFKEEKLAEQLKQAEELRQYKVLVHSQERELTQLREKLREGRDASRSLNEHLQALLTPDEPDKSQGQDLQEQLAEGCRLAQHLVQKLSPENDEDEDEDVQVEEDEKVLESSSPREMQKAEESKVPEDSLEECAITCSNSHGPCDSNQPHKNIKITFEEDKVNSSLVVDRESSHDECQDALNILPVPGPTSSATNVSMVVSAGPLSSEKAEMNILEINEKLRPQLAEKKQQFRSLKEKCFVTQVACFLAKQQNKYKYEECKDLLKSMLRNELQFKEEKLAEQLKQAEELRQYKVLVHSQERELTQLREKLREGRDASRSLNEHLQALLTPDEPDKSQGQDLQEQLAEGCRLAQHLVQKLSPENDNDDDEDVQVEVAEKVQKSSSPREMQKAEEKEVPEDSLEECAITCSNSHGPYDSNQPHRKTKITFEEDKVDSTLIGSSSHVEWEDAVHIIPENESDDEEEEEKGPVSPRNLQESEEEEVPQESWDEGYSTLSIPPERLASYQSYSSTFHSLEEQQVCMAVDIGRHRWDQVKKEDQEATGPRLSRELLAEKEPEVLQDSLDRCYSTPSVYLGLTDSCQPYRSAFYVLEQQRVGLAVDMDEIEKYQEVEEDQDPSCPRLSRELLAEKEPEVLQDSLDRCYSTPSGYLELPDLGQPYRSAVYSLEEQYLGLALDVDRIKKDQEEEEDQGPPCPRLSRELLEVVEPEVLQDSLDRCYSTPSSCLEQPDSCQPYRSSFYALEEKHVGFSLDVGEIEKKGKGKKRRGRRSKKKRRRGRKEGEEDQNPPCPRLSRELLAEKEPEVLQDSLDRWYSTPSVYLGLTDPCQPYRSAFYVLEQQRVGLAVDMDEIEKYQEVEEDQDPSCPRLSRELLAEKEPEVLQDSLDRCYSTPSGYLELPDLGQPYRSAVYSLEEQYLGLALDVDRIKKDQEEEEDQGPPCPRLSRELLEVVEPEVLQDSLDRCYSTPSSCLEQPDSCQPYRSSFYALEEKHVGFSLDVGEIEKKGKGKKRRGRRSKKKRRRGRKEGEEDQNPPCPRLNSVLMEVEEPEVLQDSLDRCYSTPSMYFELPDSFQHYRSVFYSFEEQHITFALDMDNSFFTLTVTSLHLVFQMGVIFPQ

SEQ ID NO: 30910 - protein, 299 aa, Homo sapiens
MPLSGTPAPNKKRKSSKLIMELTGGGQESSGLNLGKKISVPRDVMLEELSLLTNRGSKMFKLRQMRVEKFIYENHPDVFSDSSMDHFQKFLPTVGGQLGTAGQGFSYSKSNGRGGSQAGGSGSAGQYGSDQQHHLGSGSGAGGTGGPAGQAGRGGAAGTAGVGETGSGDQAGGEGKHITVFKTYISPWERAMGVDPQQKMELGIDLLAYGAKAELPKYKSFNRTAMPYGGYEKASKRMTFQMPKFDLGPLLSEPLVLYNQNLSNRPSFNRTPIPWLSSGEPVDYNVDIGIPLDGETEEL

SEQ ID NO: 30911 - protein, 3843 aa, Homo sapiens
MVVSAGPWSSEKAEMNILEINETLRPQLAEKKQQFRNLKEKCFLTQLAGFLANRQKKYKYEECKDLIKFMLRNERQFKEEKLAEQLKQAEELRQYKVLFHSQERELTQLREKLREGRDASRSLNEHLQALLTPDEPDKSQGQDLQEQLAEGCRLAQHLVQKLSPENDNDDDEDVQVEVAEKVQKSSAPREMQKAEEKEVPEDSLEECAITYSNSHGPYDSNQPHRKTKITFEEDKVDSTLIGSSSHVEWEDAVHIIPENESDDEEEEEKGPVSPRNLQESEEEEVPQESWDEGYSTLSIPPEMLASYQSYSSTFHSLEEQQVCMAVDIGRHRWDQVKKEDQEATGPRLSRELLDEKGPEVLQDSLDRCYSTPSGCLELTDSCQPYRSAFYVLEQQRVGLAIDMDEIEKYQEVEEDQDPSCPRLSRELLDEKEPEVLQDSLDRCYSIPSGYLELPDLGQPYSSAVYSLEEQYLGLALDVDRIKKDQEEEEDQDPPCPRLSRELVEVVEPEVLQDSLDRCYSTPSSCLEQPDSCQPYGSSFYALEEKHVGFSLDVGEIEKKGKGKKRRGRRSKKERRRGRKEGEEDQNPPCPRLSRELLDEKGPEVLQDSLDRCYSTPSGCLELTDSCQPYRSAFYILEQQCVGLAVDMDEIEKYQEVEEDQDPSCPRLSRELLDEKEPEVLQDSLDRCYSIPSGYLELPDLGQPYSSAVYSLEEQYLGLALDVDRIKKDQEEEEDQDPPCPRLSRELVEVVEPEVLQDSLDRCYSTPSSCLEQPDSCQPYGSSFYALEEKHVGFSLDVGEIEKKGKGKKRRGRRSKKERRRGRKEGEEDQNPPCPRLSRELLDEKGPEVLQDSLDRCYSTPSGCLELTDSCQPYRSAFYILEQQCVGLAIDMDEIEKYQEVEEDQDPSCPRLSRELLDEKEPEVLQDSLDRCYSIPSGYLELPDLGQPYSSAVYSLEEQYLGLALDVDRIKKDQEEEEDQDPPCPRLSRELVEVVEPEVLQDSLDRCYSTPSSCLEQPDSCQPYGSSFYALEEKHVGFSLDVGEIEKKGKGKKRRGRRSKKERRRGRKEGEEDQNPPCPRLSRELLDEKGPEVLQDSLDRCYSTPSGCLELTDSCQPYRSAFYILEQQCVGLAVDMDEIEKYQEVEEDQDPSCPRLSRELLDEKEPEVLQDSLDRCYSIPSGYLELPDLGQPYSSAVYSLEEQYLGLALDVDRIKKDQEEEEDQDPPCPRLSRELVEVVEPEVLQDSLDRCYSTPSSCLEQPDSCQPYGSSFYALEEKHVGFSLDVGEIEKKGKGKKRRGRRSKKERRRGRKEGEEDQNPPCPRLSRELLDEKGPEVLQDSLDRCYSTPSGCLELTDSCQPYRSAFYILEQQCVGLAVDMDEIEKYQEVEEDQDPSCPRLSRELLDEKEPEVLQDSLDRCYSIPSGYLELPDLGQPYSSAVYSLEEQYLGLALDVDRIKKDQEEEEDQDPPCPRLSRELVEVVEPEVLQDSLDRCYSTPSSCLEQPDSCQPYGSSFYALEEKHVGFSLDVGEIEKKGKGKKRRGRRSKKERRRGRKEGEEDQNPPCPRLSRELLDEKGPEVLQDSLDRCYSTPSGCLELTDSCQPYRSAFYILEQQCVGLAVDMDEIEKYQEVEEDQDPSCPRLSRELLDEKEPEVLQDSLDRCYSIPSGYLELPDLGQPYSSAVYSLEEQYLGLALDVDRIKKDQEEEEDQDPPCPRLSRELLEVVEPEVLQDSLDRCYSTPSSCLEQPDSCQPYGSSFYALEEKHVGFSLDVGEIEKKGKGKKRRGRRSKKERRRGRKEGEEDQNPPCPRLSRELLDEKGPEVLQDSLDRCYSTPSGCLELTDSCQPYRSAFYILEQQCVGLAVDMDEIEKYQEVEEDQDPSCPRLSRELLDEKEPEVLQDSLDRCYSTPSGYLELPDLGQPYSSAVYSLEEQYLGLALDVDRIKKDQEEEEDQGPPCPRLSRELLEVVEPEVLQDSLDRCYSTPSSCLEQPDSCQPYGSSFYALEEKHVGFSLDVGEIEKKGKGKKRRGRRSKKERRRGRKEGEEDQNPPCPRLSRELLDEKGPEVLQDSLDRCYSTPSGCLELTDSCQPYRSAFYILEQQCVGLAVDMDEIEKYQEVEEDQDPSCPRLSRELLDEKEPEVLQDSLDRCYSTPSGYLELPDLGQPYSSAVYSLEEQYLGLALDVDRIKKDQEEEEDQGPPCPRLSRELLEVVEPEVLQDSLDRCYSTPSSCLEQPDSCQPYGSSFYALEEKHVGFSLDVGEIEKKGKGKKRRGRRSKKERRRGRKEGEEDQNPPCPRLSRELLDEKGPEVLQDSLDRCYSTPSGCLELTDSCQPYRSAFYILEQQCVGLAVDMDEIEKYQEVEEDQDPSCPRLSRELLDEKEPEVLQDSLDRCYSTPSGYLELPDLGQPYSSAVYSLEEQYLGLALDVDRIKKDQEEEEDQGPPCPRLSRELLEVVEPEVLQDSLDRCYSTPSSCLEQPDSCQPYGSSFYALEEKHVGFSLDVGEIEKKGKGKKRRGRRSKKERRRGRKEGEEDQNPPCPRLSRELLDEKGPEVLQDSLDRCYSTPSGCLELTDSCQPYRSAFYILEQQCVGLAVDMDEIEKYQEVEEDQDPSCPRLSRELLDEKEPEVLQDSLDRCYSTPSGYLELPDLGQPYSSAVYSLEEQYLGLALDVDRIKKDQEEEEDQGPPCPRLSRELLEVVEPEVLQDSLDRCYSTPSSCLEQPDSCQPYGSSFYALEEKHVGFSLDVGEIEKKGKGKKRRGRRSKKERRRGRKEGEEDQNPPCPRLSRELLDEKGPEVLQDSLDRCYSTPSGCLELTDSCQPYRSAFYILEQQCVGLAVDMDEIEKYQEVEEDQDPSCPRLSRELLDEKEPEVLQDSLDRCYSTPSGYLELPDLGQPYSSAVYSLEEQYLGLALDVDRIKKDQEEEEDQGPPCPRLSRELLEVVEPEVLQDSLDRCYSTPSSCLEQPDSCQPYGSSFYALEEKHVGFSLDVGEIEKKGKGKKRRGRRSKKERRRGRKEGEEDQNPPCPRLSRELLDEKGPEVLQDSLDRCYSTPSGCLELTDSCQPYRSAFYILEQQCVGLAVDMDEIEKYQEVEEDQDPSCPRLSRELLAEKEPEVLQDPLDRCYSTPSGYLELPDLGQPYSSAVYSLEEQYLGLALDVDRIKKDQEEEEDQGPPCPRLSRELLEVVEPEVLQDSLDRCYSTPSSCLEQPDSCQPYGSSFYALEEKHVGFSLDVGEIEKKGKGKKRRGRRSKKERRRGRKEGEEDQNPPCPRLSRELLDEKGPEVLQDSLDRCYSTPSGCLELTDSCQPYRSAFYILEQQCVGLAVDMDEIEKYQEVEEDQDPSCPRLSRELLAEKEPEVLQDPLDRCYSTPSGYLELPDLGQPYSSAVYSLEEQYLGLALDVDRIKKDQEEEEDQGPPCPRLSRELLEVVEPEVLQDSLDRCYSTPSSCLEQPDSCQPYGSSFYALEEKHVGFSLDVGEIEKKGKGKKRRGRRSKKERRRGRKEGEEDQNPPCPRLSRELLDEKGPEVLQDSLDRCYSTPSGCLELTDSCQPYRSAFYILEQQCVGLAVDMDEIEKYQEVEEDQDPSCPRLSRELLAEKEPEVLQDPLDRCYSTPSGYLELPDLGQPYSSAVYSLEEQYLGLALDVDRIKKDQEEEEDQGPPCPRLSRELLEVVEPEVLQDSLDRCYSTPSSCLEQPDSCQPYGSSFYALEEKHVGFSLDVGEIEKKGKGKKRRGRRSKKERRRGRKEGEEDQNPPCPRLNSVLMEVEEPEVLQDSLDGCYSTPSMYFELPDSFQHYRSVFYSFEEEHISFALYLDNRFFTLTVTSLHLVFQMLVIFPQ

SEQ ID NO: 30912 - protein, 406 aa, Homo sapiens
MTLDVGPEDELPDWAAAKEFYQKYDPKDVIGRGVSSVVRRCVHRATGHEFAVKIMEVTAERLSPEQLEEVREATRRETHILRQVAGHPHIITLIDSYESSSFMFLVFDLMRKGELFDYLTEKVALSEKETRSIMRSLLEAVSFLHANNIVHRDLKPENILLDDNMQIRLSDFGFSCHLEPGEKLRELCGTPGYLAPEILKCSMDETHPGYGKEVDLWACGVILFTLLAGSPPFWHRRQILMLRMIMEGQYQFSSPEWDDRSSTVKDLISRLLQVDPEARLTAEQALQHPFFERCEGSQPWNLTPRQRFRVAVWTVLAAGRVALSTHRVRPLTKNALLRDPYALRSVRHLIDNCAFRLYGHWVKKGEQQNRAALFQHRPPGPFPIMGPEEEGDSAAITEDEAVLVLG

SEQ ID NO: 30913 - protein, 374 aa, Homo sapiens
MTLDVGPEDELPDWAAAKEFYQKYDPKDVIGRGVSSVVRRCVHRATGHEFAVKIMEVTAERLSPEQLEEVREATRRETHILRQVAGHPHIITLIDSYESSSFMFLVFDLMRKGELFDYLTEKVALSEKETRSIMRSLLEAVSFLHANNIVHRDLKPENILLDDNMQIRLSDFGFSCHLEPGEKLRELCGTPGYLAPEILKCSMDETHPGYGKEVDLWACGVILFTLLAGSPPFWHRRQILMLRMIMEGQYQFSSPEWDDRSSTVKDLISRLLQVDPEARLTAEQALQHPFFERCEGSQPWNLTPRQRFRVAVWTVLAAGRVALSTHRVRPLTKNALLRDPYALRSVRHLIDNCAFRLYGHWIRKQWIGKLMACV

SEQ ID NO: 30914 - protein, 1108 aa, Homo sapiens
MGSKGVYQYHWQSHNVKHSGVDDMVLLSKITENSIVENLKKRYMDDYIFTYIGSVLISVNPFKQMPYFGEKEIEMYQGAAQYENPPHIYALADNMYRNMIIDRENQCVIISGESGAGKTVAAKYIMSYISRVSGGGTKVQHVKDIILQSNPLLEAFGNAKTVRNNNSSRFGKYFEIQFSPGGEPDGGKISNFLLEKSRVVMRNPGERSFHIFYQLIEGASAEQKHSLGITSMDYYYYLSLSGSYKVDDIDDRREFQETLHAMNVIGIFAEEQTLVLQIVAGILHLGNISFKEVGNYAAVESEEFLAFPAYLLGINQDRLKEKLTSRQMDSKWGGKSESIHVTLNVEQACYTRDALAKALHARVFDFLVDSINKAMEKDHEEYNIGVLDIYGFEIFQKNGFEQFCINFVNEKLQQIFIELTLKAEQEEYVQEGIRWTPIEYFNNKIVCDLIENKVNPPGIMSILDDVCATMHAVGEGADQTLLQKLQMQIGSHEHFNSWNQGFIIHHYAGKVSYDMDGFCERNRDVLFMDLIELMQSSELPFIKSLFPENLQADKKGRPTTAGSKIKKQANDLVSTLMKCTPHYIRCIKPNETKKPRDWEESRVKHQVEYLGLKENIRVRRAGYAYRRIFQKFLQRYAILTKATWPSWQGEEKQGVLHLLQSVNMDSDQFQLGRSKVFIKAPESLFLLEEMRERKYDGYARVIQKSWRKFVARKKYVQMREEASDLLLNKKERRRNSINRNFIGDYIGMEEHPELQQFVGKREKIDFADTVTKYDRRFKGVKRDLLLTPKCLYLIGREKVKQGPDKGLVKEVLKRKIEIERILSVSLSTMQDDIFILHEQEYDSLLESVFKTEFLSLLAKRYEEKTQKQLPLKFSNTLELKLKKENWGPWSAGGSRQVQFHQGFGDLAVLKPSNKVLQVSIGPGLPKNSRPTRRNTTQNTGYSSGTQNANYPVRAAPPPPGYHQNGVIRNQYVPYPHAPGSQRSNQKSLYTSMARPPLPRQQSTSSDRVSQTPESLDFLKVPDQGAAGVRRQTTSRPPPAGGRPKPQPKPKPQVPQCKALYAYDAQDTDELSFNANDIIDIIKEDPSGWWTGRLRGKQGLFPNNYVTKI

SEQ ID NO: 30915 - protein, 1032 aa, Homo sapiens
MEGALTARDKVGVQDFVLLDAYTSESAFVDNLRKRFSENLIYTYIGTLLVSVNPYQELGIYTVSQMELYQGVNFFELPPHVYAIADNAYRMMCAELNNHFILISGESGAGKTEASKKILEYFAVTCPMTQSLQIARDRLLFSNPVLEAFGNARTLRNDNSSRFGKYMDIQFDFQGIPVGGHIISYLIEKSRVVYQNEGERNFHIFYQLLAGGEEERLSYLGLERDPQLYKYLSQGHCAKESSISDKNDWKTVSNAFSVIDFTEADLENLFGIIASVLHLGNIGFEEDDQGCATIPDTHEIKWIAKLLGVHPSVLLEALTHRKIEAKTEEVICPLTLELSVYARDAMAKAVYGRTFTWLVNKINSSLVNKVGQRILDPLLLLTWKTVIGLLDIYGFEVFDKNGFEQFCINYCNEKLQQLLIERTLKAEQAEYEMEGIEWEPIKYFNNKIICDLVEERHKGIISILDEECIRPGPATDLSFLEKLEEKVGKHAHFETRKLAGPKGRKRIGWMEFRLLHYAGEVTYCTKGFLEKNNDLLYRHLKEVLCKSKNIILRECFLLAELENRRRPPTVGTQFKNSLSSLLETLISKEPSYIRCIKPNDRKEPSKFDDFLIRHQIKYLGLMEHLRVRRAGFAYRRKYEHFLQRYKSLCPDTWPHWHGPPAEGVERLIKYIGYKPEEYKLGKTKIFIRFPRTLFATEDAFEFSKHQLVARIQATYKRCLGRREYVKKRQAAIKLEAHWRGALARKAIQRRKWAVRIIRKFIKGFISRNKPLCPDNEEFIVFVRKNYILNLRYHLPKTVLDKSWLRPPGILENASDLLRKMCVRNLVQKYCRGITAERKAMMQQKVVTSEIFRGRKDGYTESLNQPFVNSRIDEGDINPKVLQLISHEKIQYGVPVIKYDRKGFKARQRQLILTQKAAYVVELAKIKQKIEYSALKGVSTSNLSDGILVIHVSPEDSKQKGDAVLQCGHVFEAVTKLVMLVKKENIVNVVQGSLQFFISPGKEGTIVFDTGLEEQVYKNKNGQLTVVSVRRKS

SEQ ID NO: 30916 - protein, 127 aa, Homo sapiens
MCVRNLVQKYCRGITAERKAMMQQKVVTSEIFRGRKDGYTESLNQPFVNSRIDEGDINPKVLQLISHEKIQYGVPVIKYDRKGFKARQRQLILTQKAAYVVELAKIKQKIEYSALKGKKWAIFKTMH

SEQ ID NO: 30917 - protein, 1022 aa, Homo sapiens
MEGALTARDKVGVQDFVLLDAYTSESAFVDNLRKRFSENLIYTYIGTLLVSVNPYQELGIYTVSQMELYQGVNFFELPPHVYAIADNAYRMMCAELNNHFILISGESGAGKTEASKKILEYFAVTCPMTQSLQIARDRLLFSNPVLEAFGNARTLRNDNSSRFGKYMDIQFDFQGIPVGGHIISYLIEKSRVVYQNEGERNFHIFYQLLAGGEEERLSYLGLERDPQLYKYLSQGHCAKESSISDKNDWKTVSNAFSVIDFTEADLENLFGIIASVLHLGNIGFEEDDQGCATIPDTHEIKWIAKLLGVHPSVLLEALTHRKIEAKTEEVICPLTLELSVYARDAMAKAVYGRTFTWLVNKINSSLVNKDFTRKTVIGLLDIYGFEVFDKNGFEQFCINYCNEKLQQLLIERTLKAEQAEYEMEGIEWEPIKYFNNKIICDLVEERHKGIISILDEECIRPGPATDLSFLEKLEEKVGKHAHFETRKLAGPKGRKRIGWMEFRLLHYAGEVTYCTKGFLEKNNDLLYRHLKEVLCKSKNIILRECFLLAELENRRRPPTVGTQFKNSLSSLLETLISKEPSYIRCIKPNDRKEPSKFDDFLIRHQIKYLGLMEHLRVRRAGFAYRRKYEHFLQRYKSLCPDTWPHWHGPPAEGVERLIKYIGYKPEEYKLGKTKIFIRFPRTLFATEDAFEFSKHQLVARIQATYKRCLGRREYVKKRQAAIKLEAHWRGALARKAIQRRKWAVRIIRKFIKGFISRNKPLCPDNEEFIVFVRKNYILNLRYHLPKTVLDKSWLRPPGILENASDLLRKMCVRNLVQKYCRGITAERKAMMQQKVVTSEIFRGRKDGYTESLNQPFVNSRIDEGDINPKVLQLISHEKIQYGVPVIKYDRKGFKARQRQLILTQKAAYVVELAKIKQKIEYSALKGVSTSNLSDGILVIHVSPEDSKQKGDAVLQCGHVFEAVTKLVMLVKKENIVNVVQGSLQFFISPGKEGTIVFDTGLEEQVYKNKNGQLTVVSVRRKS

SEQ ID NO: 30918 - protein, 546 aa, Homo sapiens
MTPLVSRLSRLWAIMRKPRAAVGSGHRKQAASQEGRQKHAKNNSQAKPSACDGMIAECPGAPAGLARQPEEVVLQASVSSYHLFRDVAEVTAFRGSLLSWYDQEKRDLPWRRRAEDEMDLDRRAYAVWVSEVMLQQTQVATVINYYTGWMQKWPTLQDLASASLEEVNQLWAGLGYYSRGRRLQEGARKVVEELGGHMPRTAETLQQLLPGVGRYTAGAIASIAFGQATGVVDGNVARVLCRVRAIGADPSSTLVSQQLWGLAQQLVDPARPGDFNQAAMELGATVCTPQRPLCSQCPVESLCRARQRVEQEQLLASGSLSGSPDVEECAPNTGQCHLCLPPSEPWDQTLGVVNFPRKASRKPPREESSATCVLEQPGALGAQILLVQRPNSGLLAGLWEFPSVTWEPSEQLQRKALLQELQRWAGPLPATHLRHLGEVVHTFSHIKLTYQVYGLALEGQTPVTTVPPGARWLTQEEFHTAAVSTAMKKVFRVYQGQQPGTCMGSKRSQVSSPCSRKKPRMGQQVLDNFFRSHISTDAHSLNSAAQ

SEQ ID NO: 30919 - protein, 536 aa, Homo sapiens
MTPLVSRLSRLWAIMRKPRAAVGSGHRKQAASQEGRQKHAKNNSQAKPSACDAGLARQPEEVVLQASVSSYHLFRDVAEVTAFRGSLLSWYDQEKRDLPWRRRAEDEMDLDRRAYAVWVSEVMLQQTQVATVINYYTGWMQKWPTLQDLASASLEEVNQLWAGLGYYSRGRRLQEGARKVVEELGGHMPRTAETLQQLLPGVGRYTAGAIASIAFGQATGVVDGNVARVLCRVRAIGADPSSTLVSQQLWGLAQQLVDPARPGDFNQAAMELGATVCTPQRPLCSQCPVESLCRARQRVEQEQLLASGSLSGSPDVEECAPNTGQCHLCLPPSEPWDQTLGVVNFPRKASRKPPREESSATCVLEQPGALGAQILLVQRPNSGLLAGLWEFPSVTWEPSEQLQRKALLQELQRWAGPLPATHLRHLGEVVHTFSHIKLTYQVYGLALEGQTPVTTVPPGARWLTQEEFHTAAVSTAMKKVFRVYQGQQPGTCMGSKRSQVSSPCSRKKPRMGQQVLDNFFRSHISTDAHSLNSAAQ

SEQ ID NO: 30920 - protein, 535 aa, Homo sapiens
MTPLVSRLSRLWAIMRKPRAAVGSGHRKQAASQEGRQKHAKNNSQAKPSACDGLARQPEEVVLQASVSSYHLFRDVAEVTAFRGSLLSWYDQEKRDLPWRRRAEDEMDLDRRAYAVWVSEVMLQQTQVATVINYYTGWMQKWPTLQDLASASLEEVNQLWAGLGYYSRGRRLQEGARKVVEELGGHMPRTAETLQQLLPGVGRYTAGAIASIAFGQATGVVDGNVARVLCRVRAIGADPSSTLVSQQLWGLAQQLVDPARPGDFNQAAMELGATVCTPQRPLCSQCPVESLCRARQRVEQEQLLASGSLSGSPDVEECAPNTGQCHLCLPPSEPWDQTLGVVNFPRKASRKPPREESSATCVLEQPGALGAQILLVQRPNSGLLAGLWEFPSVTWEPSEQLQRKALLQELQRWAGPLPATHLRHLGEVVHTFSHIKLTYQVYGLALEGQTPVTTVPPGARWLTQEEFHTAAVSTAMKKVFRVYQGQQPGTCMGSKRSQVSSPCSRKKPRMGQQVLDNFFRSHISTDAHSLNSAAQ

SEQ ID NO: 30921 - protein, 532 aa, Homo sapiens
MRKPRAAVGSGHRKQAASQEGRQKHAKNNSQAKPSACDGMIAECPGAPAGLARQPEEVVLQASVSSYHLFRDVAEVTAFRGSLLSWYDQEKRDLPWRRRAEDEMDLDRRAYAVWVSEVMLQQTQVATVINYYTGWMQKWPTLQDLASASLEEVNQLWAGLGYYSRGRRLQEGARKVVEELGGHMPRTAETLQQLLPGVGRYTAGAIASIAFGQATGVVDGNVARVLCRVRAIGADPSSTLVSQQLWGLAQQLVDPARPGDFNQAAMELGATVCTPQRPLCSQCPVESLCRARQRVEQEQLLASGSLSGSPDVEECAPNTGQCHLCLPPSEPWDQTLGVVNFPRKASRKPPREESSATCVLEQPGALGAQILLVQRPNSGLLAGLWEFPSVTWEPSEQLQRKALLQELQRWAGPLPATHLRHLGEVVHTFSHIKLTYQVYGLALEGQTPVTTVPPGARWLTQEEFHTAAVSTAMKKVFRVYQGQQPGTCMGSKRSQVSSPCSRKKPRMGQQVLDNFFRSHISTDAHSLNSAAQ

SEQ ID NO: 30922 - protein, 522 aa, Homo sapiens
MRKPRAAVGSGHRKQAASQEGRQKHAKNNSQAKPSACDAGLARQPEEVVLQASVSSYHLFRDVAEVTAFRGSLLSWYDQEKRDLPWRRRAEDEMDLDRRAYAVWVSEVMLQQTQVATVINYYTGWMQKWPTLQDLASASLEEVNQLWAGLGYYSRGRRLQEGARKVVEELGGHMPRTAETLQQLLPGVGRYTAGAIASIAFGQATGVVDGNVARVLCRVRAIGADPSSTLVSQQLWGLAQQLVDPARPGDFNQAAMELGATVCTPQRPLCSQCPVESLCRARQRVEQEQLLASGSLSGSPDVEECAPNTGQCHLCLPPSEPWDQTLGVVNFPRKASRKPPREESSATCVLEQPGALGAQILLVQRPNSGLLAGLWEFPSVTWEPSEQLQRKALLQELQRWAGPLPATHLRHLGEVVHTFSHIKLTYQVYGLALEGQTPVTTVPPGARWLTQEEFHTAAVSTAMKKVFRVYQGQQPGTCMGSKRSQVSSPCSRKKPRMGQQVLDNFFRSHISTDAHSLNSAAQ

SEQ ID NO: 30923 - protein, 521 aa, Homo sapiens
MRKPRAAVGSGHRKQAASQEGRQKHAKNNSQAKPSACDGLARQPEEVVLQASVSSYHLFRDVAEVTAFRGSLLSWYDQEKRDLPWRRRAEDEMDLDRRAYAVWVSEVMLQQTQVATVINYYTGWMQKWPTLQDLASASLEEVNQLWAGLGYYSRGRRLQEGARKVVEELGGHMPRTAETLQQLLPGVGRYTAGAIASIAFGQATGVVDGNVARVLCRVRAIGADPSSTLVSQQLWGLAQQLVDPARPGDFNQAAMELGATVCTPQRPLCSQCPVESLCRARQRVEQEQLLASGSLSGSPDVEECAPNTGQCHLCLPPSEPWDQTLGVVNFPRKASRKPPREESSATCVLEQPGALGAQILLVQRPNSGLLAGLWEFPSVTWEPSEQLQRKALLQELQRWAGPLPATHLRHLGEVVHTFSHIKLTYQVYGLALEGQTPVTTVPPGARWLTQEEFHTAAVSTAMKKVFRVYQGQQPGTCMGSKRSQVSSPCSRKKPRMGQQVLDNFFRSHISTDAHSLNSAAQ

SEQ ID NO: 30924 - protein, 662 aa, Homo sapiens
MVVSEVDIAKADPAAASHPLLLNGDATVAQKNPGSVAENNLCSQYEEKVRPCIDLIDSLRALGVEQDLALPAIAVIGDQSSGKSSVLEALSGVALPRGSGIVTRCPLVLKLKKLVNEDKWRGKVSYQDYEIEISDASEVEKEINKAQNAIAGEGMGISHELITLEISSRDVPDLTLIDLPGITRVAVGNQPADIGYKIKTLIKKYIQRQETISLVVVPSNVDIATTEALSMAQEVDPEGDRTIGILTKPDLVDKGTEDKVVDVVRNLVFHLKKGYMIVKCRGQQEIQDQLSLSEALQREKIFFENHPYFRDLLEEGKATVPCLAEKLTSELITHICKSLPLLENQIKETHQRITEELQKYGVDIPEDENEKMFFLIDKVNAFNQDITALMQGEETVGEEDIRLFTRLRHEFHKWSTIIENNFQEGHKILSRKIQKFENQYRGRELPGFVNYRTFETIVKQQIKALEEPAVDMLHTVTDMVRLAFTDVSIKNFEEFFNLHRTAKSKIEDIRAEQEREGEKLIRLHFQMEQIVYCQDQVYRGALQKVREKELEEEKKKKSWDFGAFQSSSATDSSMEEIFQHLMAYHQEASKRISSHIPLIIQFFMLQTYGQQLQKAMLQLLQDKDTYSWLLKERSDTSDKRKFLKERLARLTQARRRLAQFPG

SEQ ID NO: 30925 - protein, 508 aa, Homo sapiens
MVVSEVDIAKADPAAASHPLLLNGDATVAQKNPGSVAENNLCSQYEEKVRPCIDLIDSLRALGVEQDLALPAIAVIGDQSSGKSSVLEALSGVALPRGSGIVTRCPLVLKLKKLVNEDKWRGKVSYQDYEIEISDASEVEKEINKAQNAIAGEGMGISHELITLEISSRDVPDLTLIDLPGITRVAVGNQPADIGYKIKTLIKKYIQRQETISLVVVPSNVDIATTEALSMAQEVDPEGDRTIGILTKPDLVDKGTEDKVVDVVRNLVFHLKKGYMIVKCRGQQEIQDQLSLSEALQREKIFFENHPYFRDLLEEGKATVPCLAEKLTSELITHICKSLPLLENQIKETHQRITEELQKYGVDIPEDENEKMFFLIDKVNAFNQDITALMQGEETVGEEDIRLFTRLRHEFHKWSTIIENNFQEGGQQAHLQPHPFDHPVLHAPDVRPAASEGHAAAPAGQGHLQLAPEGAERHQRQAEVPEGAACTADAGSAPACPVPRLTTLCPAP

SEQ ID NO: 30926 - protein, 327 aa, Homo sapiens
MAVPAKKRKMNFSEREVEIIVEELELKKHLLVNHFNAGVPLAAKSAAWHGILRRVNAVATCRRELPEVKKKWSDLKTEVRRKVAQVRAAVEGGEAPGPTEEDGAGGPGTGGGSGGGGPAVAPVLLTPMQQRICNLLGEATIISLPSTTEIHPVALGPSATAAAATVTLTQIPTETTYHTLEEGVVEYCTAEAPPPLPPETPVDMMAQHADTSVKPQALKSRIALNSAKLIQEQRVTNLHVKEIAQHLEQQNDLLQMIRRSQEVQACAQERQAQAMEGTQAALSVLIQVLRPMIKDFRRYLQSNTANPAPASDPGQVAQNGQPDSIIQ

SEQ ID NO: 30927 - protein, 172 aa, Homo sapiens
MAVPAKKRKMNFSEREVEIIVEELELKKHLLVNHFNAGVPLAAKSAAWHGILRRVNAVATCRRELPEVKKKWSDLKTEVRRKVAQVRAAVEGGEAPGPTEEDGAGGPGTGGGSGGGGPAVAPVLLTPMQQRICNLLGEATIISLPSTTEIHPVALGPSATAAAATVTLTQSE

SEQ ID NO: 30928 - protein, 401 aa, Homo sapiens
MRRAPAAERLLELGFPPRCGRQEPPFPLGVTRGWGRWPIQKRREGARPVPFSERSQEDGRGPAARSSGTLWRIRTRLSLCRDPEPPPPLCLLRVSLLCALRAGGRGSRWGEDGARLLLLPPARAAGNGEAEPSGGPSYAGRMLESSGCKALKEGVLEKRSDGLLQLWKKKCCILTEEGLLLIPPKQLQHQQQQQQQQQQQQQQQPGQGPAEPSQPSGPAVASLEPPVKLKELHFSNMKTVDCVERKGKYMYFTVVMAEGKEIDFRCPQDQGWNAEITLQMVQYKNRQAILAVKSTRQKQQHLVQQQPPSQPQPQPQLQPQPQPQPQPQPQPQSQPQPQPQPKPQPQQLHPYPHPHPHPHSHPHSHPHPHPHPHPHQIPHPHPQPHSQPHGHRLLRSTSNSA

SEQ ID NO: 30929 - protein, 790 aa, Homo sapiens
MSRRRHSDENDGGQPHKRRKTSDANETEDHLESLICKVGEKSACSLESNLEGLAGVLEADLPNYKSKILRLLCTVARLLPEKLTIYTTLVGLLNARNYNFGGEFVEAMIRQLKESLKANNYNEAVYLVRFLSDLVNCHVIAAPSMVAMFENFVSVTQEEDVPQVRRDWYVYAFLSSLPWVGKELYEKKDAEMDRIFANTESYLKRRQKTHVPMLQVWTADKPHPQEEYLDCLWAQIQKLKKDRWQERHILRPYLAFDSILCEALQHNLPPFTPPPHTEDSVYPMPRVIFRMFDYTDDPEGPVMPGSHSVERFVIEENLHCIIKSHWKERKTCAAQLVSYPGKNKIPLNYHIVEVIFAELFQLPAPPHIDVMYTTLLIELCKLQPGSLPQVLAQATEMLYMRLDTMNTTCVDRFINWFSHHLSNFQFRWSWEDWSDCLSQDPESPKPKFVREVLEKCMRLSYHQRILDIVPPTFSALCPANPTCIYKYGDESSNSLPGHSVALCLAVAFKSKATNDEIFSILKDVPNPNQDDDDDEGFSFNPLKIEVFVQTLLHLAAKSFSHSFSALAKFHEVFKTLAESDEGKLHVLRVMFEVWRNHPQMIAVLVDKMIRTQIVDCAAVANWIFSSELSRDFTRLFVWEILHSTIRKMNKHVLKIQKELEEAKEKLARQHKRRSDDDDRSSDRKDGVLEEQIERLQEKVESAQSEQKNLFLVIFQRFIMILTEHLVRCETDGTSVLTPWYKNCIERLQQIFLQHHQIIQQYMVTLENLLFTAELDPHILAVFQQFCALQA

SEQ ID NO: 30930 - protein, 156 aa, Homo sapiens
MSGGLLKALRSDSYVELSQYRDQHFRGDNEEQEKLLKKSCTLYVGNLSFYTTEEQIYELFSKSGDIKKIIMGLDKMKKTACGFCFVEYYSRADAENAMRYINGTRLDDRIIRTDWDAGFKEGRQYGRGRSGGQVRDEYRQDYDAGRGGYGKLAQNQ

SEQ ID NO: 30931 - protein, 138 aa, Homo sapiens
MVLRKLYAGDNEEQEKLLKKSCTLYVGNLSFYTTEEQIYELFSKSGDIKKIIMGLDKMKKTACGFCFVEYYSRADAENAMRYINGTRLDDRIIRTDWDAGFKEGRQYGRGRSGGQVRDEYRQDYDAGRGGYGKLAQNQ

SEQ ID NO: 30932 - protein, 103 aa, Homo sapiens
MSGGLLKALRSDSYVELSQYRDQHFRGDNEEQEKLLKKSYAENAMRYINGTRLDDRIIRTDWDAGFKEGRQYGRGRSGGQVRDEYRQDYDAGRGGYGKLAQNQ

SEQ ID NO: 30933 - protein, 729 aa, Homo sapiens
MSCCDLAAAGQLGKASIMASDCEPALNQAEGRNPTLERYLGALREAKNDSEQFAALLLVTKAVKAGDIDAKTRRRIFDAVGFTFPNRLLTTKEAPDGCPDHVLRALGVALLACFCSDPELAAHPQVLNKIPILSTFLTARGDPDDAARRSMIDDTYQCLTAVAGTPRGPRHLIAGGTVSALCQAYLGHGYGFDQALALLVGLLAAAETQCWKEAEPDLLAVLRGLSEDFQKAEDASKFELCQLLPLFLPPTTVPPECYRDLQAGLARILGSKLSSWQRNPALKLAARLAHACGSDWIPAGSSGSKFLALLVNLACVEVRLALEETGTEVKEDVVTACYALMELGIQECTRCEQSLLKEPQKVQLVSVMKEAIGAVIHYLLQVGSEKQKEPFVFASVRILGAWLAEETSSLRKEVCQLLPFLVRYAKTLYEEAEEANDLSQQVANLAISPTTPGPTWPGDALRLLLPGWCHLTVEDGPREILIKEGAPSLLCKYFLQQWELTSPGHDTSVLPDSVEIGLQTCCHIFLNLVVTAPGLIKRDACFTSLMNTLMTSLPALVQQQGRLLLAANVATLGLLMARLLSTSPALQGTPASRGFFAAAILFLSQSHVARATPGSDQAVLALSPEYEGIWADLQELWFLGMQAFTGCVPLLPWLAPAALRSRWPQELLQLLGSVSPNSVKPEMVAAYQGVLVELARANRLCREAMRLQAGEETASHYRMAALEQCLSEP

SEQ ID NO: 30934 - protein, 712 aa, Homo sapiens
MASDCEPALNQAEGRNPTLERYLGALREAKNDSEQFAALLLVTKAVKAGDIDAKTRRRIFDAVGFTFPNRLLTTKEAPDGCPDHVLRALGVALLACFCSDPELAAHPQVLNKIPILSTFLTARGDPDDAARRSMIDDTYQCLTAVAGTPRGPRHLIAGGTVSALCQAYLGHGYGFDQALALLVGLLAAAETQCWKEAEPDLLAVLRGLSEDFQKAEDASKFELCQLLPLFLPPTTVPPECYRDLQAGLARILGSKLSSWQRNPALKLAARLAHACGSDWIPAGSSGSKFLALLVNLACVEVRLALEETGTEVKEDVVTACYALMELGIQECTRCEQSLLKEPQKVQLVSVMKEAIGAVIHYLLQVGSEKQKEPFVFASVRILGAWLAEETSSLRKEVCQLLPFLVRYAKTLYEEAEEANDLSQQVANLAISPTTPGPTWPGDALRLLLPGWCHLTVEDGPREILIKEGAPSLLCKYFLQQWELTSPGHDTSVLPDSVEIGLQTCCHIFLNLVVTAPGLIKRDACFTSLMNTLMTSLPALVQQQGRLLLAANVATLGLLMARLLSTSPALQGTPASRGFFAAAILFLSQSHVARATPGSDQAVLALSPEYEGIWADLQELWFLGMQAFTGCVPLLPWLAPAALRSRWPQELLQLLGSVSPNSVKPEMVAAYQGVLVELARANRLCREAMRLQAGEETASHYRMAALEQCLSEP

SEQ ID NO: 30935 - protein, 731 aa, Homo sapiens
ALGEDFAARGRSLLGKASIMASDCEPALNQAEGRNPTLERYLGALREAKNDSEQFAALLLVTKAVKAGDIDAKTRRRIFDAVGFTFPNRLLTTKEAPDGCPDHVLRALGVALLACFCSDPELAAHPQVLNKIPILSTFLTARGDPDDAARRSMIDDTYQCLTAVAGTPRGPRHLIAGGTVSALCQAYLGHGYGFDQALALLVGLLAAAETQCWKEAEPDLLAVLRGLSEDFQKAEDASKFELCQLLPLFLPPTTVPPECYRDLQAGLARILGSKLSSWQRNPALKLAARLAHACGSDWIPAGSSGSKFLALLVNLACVEVRLALEETGTEVKEDVVTACYALMELGIQECTRCEQSLLKEPQKVQLVSVMKEAIGAVIHYLLQVGSEKQKEPFVFASVRILGAWLAEETSSLRKEVCQLLPFLVRYAKTLYEEAEEANDLSQQVANLAISPTTPGPTWPGDALRLLLPGWCHLTVEDGPREILIKEGAPSLLCKYFLQQWELTSPGHDTSVLPDSVEIGLQTCCHIFLNLVVTAPGLIKRDACFTSLMNTLMTSLPALVQQQGRLLLAANVATLGLLMARLLSTSPALQGTPASRGFFAAAILFLSQSHVARATPGSDQAVLALSPEYEGIWADLQELWFLGMQAFTGCVPLLPWLAPAALRSRWPQELLQLLGSVSPNSVKPEMVAAYQGVLVELARANRLCREAMRLQAGEETASHYRMAALEQCLSEP

SEQ ID NO: 30936 - protein, 828 aa, Homo sapiens
MAAEEADVDIEGDVVAAAGAQPGSGENTASVLQKDHYLDSSWRTENGLIPWTLDNTISEENRAVIEKMLLEEEYYLSKKSQPEKVWLDQKEDDKKYMKSLQKTAKIMVHSPTKPASYSVKWTIEEKELFEQGLAKFGRRWTKISKLIGSRTVLQVKSYARQYFKNKVKCGLDKETPNQKTGHNLQVKNEDKGTKAWTPSCLRGRADPNLNAVKIEKLSDDEEVDITDEVDELSSQTPQKNSSSDLLLDFPNSKMHETNQGEFITSDSQEALFSKSSRGCLQNEKQDETLSSSEITLWTEKQSNGDKKSIELNDQKFNELIKNCNKHDGRGIIVDARQLPSPEPCEIQKNLNDNEMLFHSCQMVEESHEEEELKPPEQEIEIDRNIIQEEEKQAIPEFFEGRQAKTPERYLKIRNYILDQWEICKPKYLNKTSVRPGLKNCGDVNCIGRIHTYLELIGAINFGCEQAVYNRPQTVDKVRIRDRKDAVEAYQLAQRLQSMRTRRRRVRDPWGNWCDAKDLEGQTFEHLSAEELAKRREEEKGRPVKSLKVPRPTKSSFDPFQLIPCNFFSEEKQEPFQVKVASEALLIMDLHAHVSMAEVIGLLGGRYSEVDKVVEVCAAEPCNSLSTGLQCEMDPVSQTQASETLAVRGFSVIGWYHSHPAFDPNPSLRDIDTQAKYQSYFSRGGAKFIGMIVSPYNRNNPLPYSQITCLVISEEISPDGSYRLPYKFEVQQMLEEPQWGLVFEKTRWIIEKYRLSHSSVPMDKIFRRDSDLTCLQKLLECMRKTLSKVTNCFMAEEFLTEIENLFLSNYKSNQENGVTEENCTKELLM

SEQ ID NO: 30937 - protein, 575 aa, Homo sapiens
MHETNQGEFITSDSQEALFSKSSRGCLQNEKQDETLSSSEITLWTEKQSNGDKKSIELNDQKFNELIKNCNKHDGRGIIVDARQLPSPEPCEIQKNLNDNEMLFHSCQMVEESHEEEELKPPEQEIEIDRNIIQEEEKQAIPEFFEGRQAKTPERYLKIRNYILDQWEICKPKYLNKTSVRPGLKNCGDVNCIGRIHTYLELIGAINFGCEQAVYNRPQTVDKVRIRDRKDAVEAYQLAQRLQSMRTRRRRVRDPWGNWCDAKDLEGQTFEHLSAEELAKRREEEKGRPVKSLKVPRPTKSSFDPFQLIPCNFFSEEKQEPFQVKVASEALLIMDLHAHVSMAEVIGLLGGRYSEVDKVVEVCAAEPCNSLSTGLQCEMDPVSQTQASETLAVRGFSVIGWYHSHPAFDPNPSLRDIDTQAKYQSYFSRGGAKFIGMIVSPYNRNNPLPYSQITCLVISEEISPDGSYRLPYKFEVQQMLEEPQWGLVFEKTRWIIEKYRLSHSSVPMDKIFRRDSDLTCLQKLLECMRKTLSKVTNCFMAEEFLTEIENLFLSNYKSNQENGVTEENCTKELLM

SEQ ID NO: 30938 - protein, 234 aa, Homo sapiens
MAEVIGLLGGRYSEVDKVVEVCAAEPCNSLSTGLQCEMDPVSQTQASETLAVRGFSVIGWYHSHPAFDPNPSLRDIDTQAKYQSYFSRGGAKFIGMIVSPYNRNNPLPYSQITCLVISEEISPDGSYRLPYKFEVQQMLEEPQWGLVFEKTRWIIEKYRLSHSSVPMDKIFRRDSDLTCLQKLLECMRKTLSKVTNCFMAEEFLTEIENLFLSNYKSNQENGVTEENCTKELLM

SEQ ID NO: 30939 - protein, 408 aa, Homo sapiens
MRSSCVLLTALVALAAYYVYIPLPGSVSDPWKLMLLDATFRGAQQVSNLIHYLGLSHHLLALNFIIVSFGKKSAWSSAQVKVTDTDFDGVEVRVFEGPPKPEEPLKRSVVYIHGGGWALASAKIRYYDELCTAMAEELNAVIVSIEYRLVPKVYFPEQIHDVVRATKYFLKPEVLQKYMVDPGRICISGDSAGGNLAAALGQQFTQDASLKNKLKLQALIYPVLQALDFNTPSYQQNVNTPILPRYVMVKYWVDYFKGNYDFVQAMIVNNHTSLDVEEAAAVRARLNWTSLLPASFTKNYKPVVQTTGNARIVQELPQLLDARSAPLIADQAVLQLLPKTYILTCEHDVLRDDGIMYAKRLESAGVEVTLDHFEDGFHGCMIFTSWPTNFSVGIRTRNSYIKWLDQNL

SEQ ID NO: 30940 - protein, 416 aa, Homo sapiens
MRSSCVLLTALVALAAYYVYIPLPGSVSDPWKLMLLDATFRGAQQVSNLIHYLGLSHHLLALNFIIVSFGKKSAWSSAQVKVTDTDFDGVEVRVFEGPPKPEEPLKRSVVYIHGGGWALASASASWSPSDEIRYYDELCTAMAEELNAVIVSIEYRLVPKVYFPEQIHDVVRATKYFLKPEVLQKYMVDPGRICISGDSAGGNLAAALGQQFTQDASLKNKLKLQALIYPVLQALDFNTPSYQQNVNTPILPRYVMVKYWVDYFKGNYDFVQAMIVNNHTSLDVEEAAAVRARLNWTSLLPASFTKNYKPVVQTTGNARIVQELPQLLDARSAPLIADQAVLQLLPKTYILTCEHDVLRDDGIMYAKRLESAGVEVTLDHFEDGFHGCMIFTSWPTNFSVGIRTRNSYIKWLDQNL

SEQ ID NO: 30941 - protein, 275 aa, Homo sapiens
MAEELNAVIVSIEYRLVPKVYFPEQIHDVVRATKYFLKPEVLQKYMVDPGRICISGDSAGGNLAAALGQQFTQDASLKNKLKLQALIYPVLQALDFNTPSYQQNVNTPILPRYVMVKYWVDYFKGNYDFVQAMIVNNHTSLDVEEAAAVRARLNWTSLLPASFTKNYKPVVQTTGNARIVQELPQLLDARSAPLIADQAVLQLLPKTYILTCEHDVLRDDGIMYAKRLESAGVEVTLDHFEDGFHGCMIFTSWPTNFSVGIRTRNSYIKWLDQNL

SEQ ID NO: 30942 - protein, 366 aa, Homo sapiens
MYMFLVKWQDLSEKVVYRRFTEIYEFHKTLKEMFPIEAGAINPENRIIPHLPAPKWFDGQRAAENHQGTLTEYCSTLMSLPTKISRCPHLLDFFKVRPDDLKLPTDNQTKKPETYLMPKDGKSTATDITGPIILQTYRAIADYEKTSGSEMALSTGDVVEVVEKSESGWWFCQMKAKRGWIPASFLEPLDSPDETEDPEPNYAGEPYVAIKAYTAVEGDEVSLLEGEAVEVIHKLLDGWWVIRKDDVTGYFPSMYLQKSGQDVSQAQRQIKRGAPPRRSSIRNAHSIHQRSRKRLSQDAYRRNSVRFLQQRRRQARPGPQSPGSPLEEERQTQRSKPQPAVPPRPSADLILNRCSESTKRKLASAV

SEQ ID NO: 30943 - protein, 292 aa, Homo sapiens
MEAFPWAPRSPRRGRAPPPMALVPSARYVSAPGPAHPQPFSSWNDYLGLATLITKAVDGEPRFGCARGGNGGGGSPPSSSSSSCCSPHTGAGPGALGPALGPPDYDEDDDDDSDEPGSRGRYLGSALELRALELCAGPAEAGLLEERFAELSPFAGRAAAVLLGCAPAAAAAATTTSEATPREERAPAWAAEPRLHAASGAAAARLLKPELQVCVFCRNNKEAMALYTTHILKGPDGRVLCPVLRRYTCPLCGASGDNAHTIKYCPLSKVPPPPARPPPRSARDGPPGKKLR

SEQ ID NO: 30944 - protein, 339 aa, Homo sapiens
MAVAQQLRAESDFEQLPDDVAISANIADIEEKRGFTSHFVFVIEVKTKGGSKYLIYRRYRQFHALQSKLEERFGPDSKSSALACTLPTLPAKVYVGVKQEIAEMRIPALNAYMKSLLSLPVWVLMDEDVRIFFYQSPYDSEQVPQALRRLRPRTRKVKSVSPQGNSVDRMAAPRAEALFDFTGNSKLELNFKAGDVIFLLSRINKDWLEGTVRGATGIFPLSFVKILKDFPEEDDPTNWLRCYYYEDTISTIKDIAVEEDLSSTPLLKDLLELTRREFQREDIALNYRDAEGDLVRLLSDEDVALMVRQARGLPSQKRLFPWKLHITQKDNYRVYNTMP

SEQ ID NO: 30945 - protein, 348 aa, Homo sapiens
MAVAQQLRAESDFEQLPDDVAISANIADIEEKRGFTSHFVFVIEVKTKGGSKYLIYRRYRQFHALQSKLEERFGPDSKSSALACTLPTLPAKVYVGVKQEIAEMRIPALNAYMKSLLSLPVWVLMDEDVRIFFYQSPYDSEQVPQALRRLRPRTRKVKSVSPQGNSVDRMAAPRAEALFDFTGNSKLELNFKAGDVIFLLSRINKDWLEGTVRGATGIFPLSFVKILKDFPEEDDPTNWLRCYYYEDTISTIKSVAWEGGACPAFLPSLRPLPLTSPSHGSLSHSKAPSGSQMSHNAVTSHQRPGWPGQPHSPFPHPTPHFQPDASLLQPVTPLGTSRWRKISAALPY

SEQ ID NO: 30946 - protein, 1033 aa, Homo sapiens
MAESDSTDFDLLWYLENLSDKEFQSFKKYLARKILDFKLPQFPLIQMTKEELANVLPISYEGQYIWNMLFSIFSMMRKEDLCRKIIGRRNRNQEACKAVMRRKFMLQWESHTFGKFHYKFFRDVSSDVFYILQLAYDSTSYYSANNLNVFLMGERASGKTIVINLAVLRWIKGEMWQNMISYVVHLTAHEINQMTNSSLAELIAKDWPDGQAPIADILSDPKKLLFILEDLDNIRFELNVNESALCSNSTQKVPIPVLLVSLLKRKMAPGCWFLISSRPTRGNNVKTFLKEVDCCTTLQLSNGKREIYFNSFFKDRQRASAALQLVHEDEILVGLCRVAILCWITCTVLKRQMDKGRDFQLCCQTPTDLHAHFLADALTSEAGLTANQYHLGLLKRLCLLAAGGLFLSTLNFSGEDLRCVGFTEADVSVLQAANILLPSNTHKDRYKFIHLNVQEFCTAIAFLMAVPNYLIPSGSREYKEKREQYSDFNQVFTFIFGLLNANRRKILETSFGYQLPMVDSFKWYSVGYMKHLDRDPEKLTHHMPLFYCLYENREEEFVKTIVDALMEVTVYLQSDKDMMVSLYCLDYCCHLRTLKLSVQRIFQNKEPLIRPTASQMKSLVYWREICSLFYTMESLRELHIFDNDLNGISERILSKALEHSSCKLRTLKLSYVSTASGFEDLLKALARNRSLTYLSINCTSISLNMFSLLHDILHEPTCQISHLSLMKCDLRASECEEIASLLISGGSLRKLTLSSNPLRSDGMNILCDALLHPNCTLISLVLVFCCLTENCCSALGRVLLFSPTLRQLDLCVNRLKNYGVLHVTFPLLFPTCQLEELHLSGCFFSSDICQYIAIVIATNEKLRSLEIGSNKIEDAGMQLLCGGLRHPNCMLVNIGLEECMLTSACCRSLASVLTTNKTLERLNLLQNHLGNDGVAKLLESLISPDCVLKVVGLPLTGLNTQTQQLLMTVKERKPSLIFLSETWSLKEGREIGVTPASQPGSIIPNSNLDYMFFKFPRMSAAMRTSNTASRQPL

SEQ ID NO: 30947 - protein, 979 aa, Homo sapiens
MAESDSTDFDLLWYLENLSDKEFQSFKKYLARKILDFKLPQFPLIQMTKEELANVLPISYEGQYIWNMLFSIFSMMRKEDLCRKIIGRRNRNQEACKAVMRRKFMLQWESHTFGKFHYKFFRDVSSDVFYILQLAYDSTSYYSANNLNVFLMGERASGKTIVINLAVLRWIKGEMWQNMISYVVHLTAHEINQMTNSSLAELIAKDWPDGQAPIADILSDPKKLLFILEDLDNIRFELNVNESALCSNSTQKVPIPVLLVSLLKRKMAPGCWFLISSRPTRGNNVKTFLKEVDCCTTLQLSNGKREIYFNSFFKDRQRASAALQLVHEDEILVGLCRVAILCWITCTVLKRQMDKGRDFQLCCQTPTDLHAHFLADALTSEAGLTANQYHLGLLKRLCLLAAGGLFLSTLNFSGEDLRCVGFTEADVSVLQAANILLPSNTHKDRYKFIHLNVQEFCTAIAFLMAVPNYLIPSGSREYKEKREQYSDFNQVFTFIFGLLNANRRKILETSFGYQLPMVDSFKWYSVGYMKHLDRDPEKLTHHMPLFYCLYENREEEFVKTIVDALMEVTVYLQSDKDMMVSLYCLDYCCHLRTLKLSVQRIFQNKEPLIRPTARLSYVSTASGFEDLLKALARNRSLTYLSINCTSISLNMFSLLHDILHEPTCQISHLSLMKCDLRASECEEIASLLISGGSLRKLTLSSNPLRSDGMNILCDALLHPNCTLISLVLVFCCLTENCCSALGRVLLFSPTLRQLDLCVNRLKNYGVLHVTFPLLFPTCQLEELHLSGCFFSSDICQYIAIVIATNEKLRSLEIGSNKIEDAGMQLLCGGLRHPNCMLVNIGLEECMLTSACCRSLASVLTTNKTLERLNLLQNHLGNDGVAKLLESLISPDCVLKVVGLPLTGLNTQTQQLLMTVKERKPSLIFLSETWSLKEGREIGVTPASQPGSIIPNSNLDYMFFKFPRMSAAMRTSNTASRQPL

SEQ ID NO: 30948 - protein, 934 aa, Homo sapiens
MRRKFMLQWESHTFGKFHYKFFRDVSSDVFYILQLAYDSTSYYSANNLNVFLMGERASGKTIVINLAVLRWIKGEMWQNMISYVVHLTAHEINQMTNSSLAELIAKDWPDGQAPIADILSDPKKLLFILEDLDNIRFELNVNESALCSNSTQKVPIPVLLVSLLKRKMAPGCWFLISSRPTRGNNVKTFLKEVDCCTTLQLSNGKREIYFNSFFKDRQRASAALQLVHEDEILVGLCRVAILCWITCTVLKRQMDKGRDFQLCCQTPTDLHAHFLADALTSEAGLTANQYHLGLLKRLCLLAAGGLFLSTLNFSGEDLRCVGFTEADVSVLQAANILLPSNTHKDRYKFIHLNVQEFCTAIAFLMAVPNYLIPSGSREYKEKREQYSDFNQVFTFIFGLLNANRRKILETSFGYQLPMVDSFKWYSVGYMKHLDRDPEKLTHHMPLFYCLYENREEEFVKTIVDALMEVTVYLQSDKDMMVSLYCLDYCCHLRTLKLSVQRIFQNKEPLIRPTASQMKSLVYWREICSLFYTMESLRELHIFDNDLNGISERILSKALEHSSCKLRTLKLSYVSTASGFEDLLKALARNRSLTYLSINCTSISLNMFSLLHDILHEPTCQISHLSLMKCDLRASECEEIASLLISGGSLRKLTLSSNPLRSDGMNILCDALLHPNCTLISLVLVFCCLTENCCSALGRVLLFSPTLRQLDLCVNRLKNYGVLHVTFPLLFPTCQLEELHLSGCFFSSDICQYIAIVIATNEKLRSLEIGSNKIEDAGMQLLCGGLRHPNCMLVNIGLEECMLTSACCRSLASVLTTNKTLERLNLLQNHLGNDGVAKLLESLISPDCVLKVVGLPLTGLNTQTQQLLMTVKERKPSLIFLSETWSLKEGREIGVTPASQPGSIIPNSNLDYMFFKFPRMSAAMRTSNTASRQPL

SEQ ID NO: 30949 - protein, 456 aa, Homo sapiens
MKCEHCTRKECSKKTKTDDQENVSADAPSPAQENGEKGEFHKLADAKIFLSDCLACDSCMTAEEGVQLSQQNAKDFFRVLNLNKKCDTSKHKVLVVSVCPQSLPYFAAKFNLSVTDASRRLCGFLKSLGVHYVFDTTIAADFSILESQKEFVRRYRQHSEEERTLPMLTSACPGWVRYAERVLGRPITAHLCTAKSPQQVMGSLVKDYFARQQNLSPEKIFHVIVAPCYDKKLEALQESLPPALHGSRGADCVLTSGEIAQIMEQGDLSVRDAAVDTLFGDLKEDKVTRHDGASSDGHLAHIFRHAAKELFNEDVEEVTYRALRNKDFQEVTLEKNGEVVLRFAAAYGFRNIQNMILKLKKGKFPFHFVEVLACAGGCLNGRGQAQTPDGHADKALLRQMEGIYADIPVRRPESSAHVQELYQEWLEGINSPKAREVLHTTYQSQERGTHSLDIKW

SEQ ID NO: 30950 - protein, 502 aa, Homo sapiens
MKCEHCTRKECSKKTKTDDQENVSADAPSPAQENGEKGEFHKLADAKIFLSDCLACDSCMTAEEGVQLSQQNAKDFFRVLNLNKKCDTSKHKVLVVSVCPQSLPYFAAKFNLSVTDASRRLCGFLKSLGVHYVFDTTIAADFSILESQKEFVRRYRQHSEEERTLPMLTSACPGWVRYAERVLGRPITAHLCTAKSPQQVMGSLVKDYFARQQNLSPEKIFHVIVAPCYDKKLEALQESLPPALHGSRGADCVLTSEISQAWWCTPVITATREAAARESLEPGRQRLQRDKIAPLDSSLGGGGEIAQIMEQGDLSVRDAAVDTLFGDLKEDKVTRHDGASSDGHLAHIFRHAAKELFNEDVEEVTYRALRNKDFQEVTLEKNGEVVLRFAAAYGFRNIQNMILKLKKGKFPFHFVEVLACAGGCLNGRGQAQTPDGHADKALLRQMEGIYADIPVRRPESSAHVQELYQEWLEGINSPKAREVLHTTYQSQERGTHSLDIKW

SEQ ID NO: 30951 - protein, 408 aa, Homo sapiens
MKCEHCTRKECSKKTKTDDQENVSADAPSPAQENGEKCDTSKHKVLVVSVCPQSLPYFAAKFNLSVTDASRRLCGFLKSLGVHYVFDTTIAADFSILESQKEFVRRYRQHSEEERTLPMLTSACPGWVRYAERVLGRPITAHLCTAKSPQQVMGSLVKDYFARQQNLSPEKIFHVIVAPCYDKKLEALQESLPPALHGSRGADCVLTSGEIAQIMEQGDLSVRDAAVDTLFGDLKEDKVTRHDGASSDGHLAHIFRHAAKELFNEDVEEVTYRALRNKDFQEVTLEKNGEVVLRFAAAYGFRNIQNMILKLKKGKFPFHFVEVLACAGGCLNGRGQAQTPDGHADKALLRQMEGIYADIPVRRPESSAHVQELYQEWLEGINSPKAREVLHTTYQSQERGTHSLDIKW

SEQ ID NO: 30952 - protein, 397 aa, Homo sapiens
MTAEEGVQLSQQNAKDFFRVLNLNKKCDTSKHKVLVVSVCPQSLPYFAAKFNLSVTDASRRLCGFLKSLGVHYVFDTTIAADFSILESQKEFVRRYRQHSEEERTLPMLTSACPGWVRYAERVLGRPITAHLCTAKSPQQVMGSLVKDYFARQQNLSPEKIFHVIVAPCYDKKLEALQESLPPALHGSRGADCVLTSGEIAQIMEQGDLSVRDAAVDTLFGDLKEDKVTRHDGASSDGHLAHIFRHAAKELFNEDVEEVTYRALRNKDFQEVTLEKNGEVVLRFAAAYGFRNIQNMILKLKKGKFPFHFVEVLACAGGCLNGRGQAQTPDGHADKALLRQMEGIYADIPVRRPESSAHVQELYQEWLEGINSPKAREVLHTTYQSQERGTHSLDIKW

SEQ ID NO: 30953 - protein, 563 aa, Homo sapiens
MLEEAGEVLENMLKASCLPLGFIVFLPAVLLLVAPPLPAADAAHEFTVYRMQQYDLQGQPYGTRNAVLNTEARTMAAEVLSRRCVLMRLLDFSYEQYQKALRQSAGAVVIILPRAMAAVPQDVVRQFMEIEPEMLAMETAVPVYFAVEDEALLSIYKQTQAASASQGSASAAEVLLRTATANGFQMVTSGVQSKAVSDWLIASVEGRLTGLGGEDLPTIVIVAHYDAFGVAPWLSLGADSNGSGVSVLLELARLFSRLYTYKRTHAAYNLLFFASGGGKFNYQGTKRWLEDNLDHTDSSLLQDNVAFVLCLDTVGRGSSLHLHVSKPPREGTLQHAFLRELETVAAHQFPEVRFSMVHKRINLAEDVLAWEHERFAIRRLPAFTLSHLESHRDGQRSSIMDVRSRVDSKTLTRNTRIIAEALTRVIYNLTEKGTPPDMPVFTEQMQIQQEQLDSVMDWLTNQPRAAQLVDKDSTFLSTLEHHLSRYLKDVKQHHVKADKRDPEFVFYDQLKQVMNAYRVKPAVFDLLLAVGIAAYLGMAYVAVQHFSLLYKTVQRLLVKAKTQ

SEQ ID NO: 30954 - protein, 562 aa, Homo sapiens
MLEEAGEVLENMLKASCLPLGFIVFLPAVLLLVAPPLPAADAAHEFTVYRMQQYDLQGQPYGTRNAVLNTEARTMAAEVLSRRCVLMRLLDFSYEQYQKALRQSAGAVVIILPRAMAAVPQDVVRQFMEIEPEMLAMETAVPVYFAVEDEALLSIYKQTQAASASQGSASAAEVLLRTATANGFQMVTSGVQSKAVSDWLIASVEGRLTGLGGEDLPTIVIVAHYDAFGVAPWLSLGADSNGSGVSVLLELARLFSRLYTYKRTHAAYNLLFFASGGGKFNYQGTKRWLEDNLDHTDSSLLQDNVAFVLCLDTVGRGSSLHLHVSKPPREGTLQHAFLRELETVAAHQFPEVRFSMVHKRINLAEDVLAWEHERFAIRRLPAFTLSHLESHRDGQRSSIMDVRSRVDSKTLTRNTRIIAEALTRVIYNLTEKGTPPDMPVFTEQMIQQEQLDSVMDWLTNQPRAAQLVDKDSTFLSTLEHHLSRYLKDVKQHHVKADKRDPEFVFYDQLKQVMNAYRVKPAVFDLLLAVGIAAYLGMAYVAVQHFSLLYKTVQRLLVKAKTQ

SEQ ID NO: 30955 - protein, 153 aa, Homo sapiens
MSKDLKILCKDPALELSCYRDHQFSGRKFQQEKLLKESSTLNMGNLSFYTTEEKIHELFSRSDIRNIFMGLDKIKKTACGFCFVECHNRADAENAMRFLTGTCLDEWIICTDWDVGFREGQQYGRGKSGGQVRDEFREDFHSGRGGFGRQTQI

SEQ ID NO: 30956 - protein, 579 aa, Homo sapiens
MNTAPSRPSPTRRDPYGFGDSRDSRRDRSPIRGSPRREPRDGRNGRDARDSRDIRDPRDLRDHRHSRDLRDHRDSRSVRDVRDVRDLRDFRDLRDSRDFRDQRDPMYDRYRDMRDSRDPMYRREGSYDRYLRMDDYCRRKDDSYFDRYRDSFDGRGPPGPESQSRAKERLKREERRREELYRQYFEEIQRRFDAERPVDCSVIVVNKQTKDYAESVGRKVRDLGMVVDLIFLNTEVSLSQALEDVSRGGSPFAIVITQQHQIHRSCTVNIMFGTPQEHRNMPQADAMVLVARNYERYKNECREKEREEIARQAAKMADEAILQERERGGPEEGVRGGHPPAIQSLINLLADNRYLTAEETDKIINYLRERKERLMRSSTDSLPGPISRQPLGATSGASLKTQPSSQPLQSGQVLPSATPTPSAPPTSQQELQAKILSLFNSGTVTANSSSASPSVAAGNTPNQNFSTAANSQPQQRSQASGNQPPSILGQGGSAQNMGPRPGAPSQGLFGQPSSRLAPASNMTSQRPVSSTGINFDNPSVQKALDTLIQSGPALSHLVSQTTAQMGQPQAPMGSYQRHY

SEQ ID NO: 30957 - protein, 1424 aa, Homo sapiens
MSGLGENLDPLASDSRKRKLPCDTPGQGLTCSGEKRRREQESKYIEELAELISANLSDIDNFNVKPDKCAILKETVRQIRQIKEQGKTISNDDDVQKADVSSTGQGVIDKDSLGPLLLQALDGFLFVVNRDGNIVFVSENVTQYLQYKQEDLVNTSVYNILHEEDRKDFLKNLPKSTVNGVSWTNETQRQKSHTFNCRMLMKTPHDILEDINASPEMRQRYETMQCFALSQPRAMMEEGEDLQSCMICVARRITTGERTFPSNPESFITRHDLSGKVVNIDTNSLRSSMRPGFEDIIRRCIQRFFSLNDGQSWSQKRHYQEAYLNGHAETPVYRFSLADGTIVTAQTKSKLFRNPVTNDRHGFVSTHFLQREQNGYRPNPNPVGQGIRPPMAGCNSSVGGMSMSPNQGLQMPSSRAYGLADPSTTGQMSGARYGGSSNIASLTPGPGMQSPSSYQNNNYGLNMSSPPHGSPGLAPNQQNIMISPRNRGSPKIASHQFSPVAGVHSPMASSGNTGNHSFSSSSLSALQAISEGVGTSLLSTLSSPGPKLDNSPNMNITQPSKVSNQDSKSPLGFYCDQNPVESSMCQSNSRDHLSDKESKESSVEGAENQRGPLESKGHKKLLQLLTCSSDDRGHSSLTNSPLDSSCKESSVSVTSPSGVSSSTSGGVSSTSNMHGSLLQEKHRILHKLLQNGNSPAEVAKITAEATGKDTSSITSCGDGNVVKQEQLSPKKKENNALLRYLLDRDDPSDALSKELQPQVEGVDNKMSQCTSSTIPSSSQEKDPKIKTETSEEGSGDLDNLDAILGDLTSSDFYNNSISSNGSHLGTKQQVFQGTNSLGLKSSQSVQSIRPPYNRAVSLDSPVSVGSSPPVKNISAFPMLPKQPMLGGNPRMMDSQENYGSSMGGPNRNVTVTQTPSSGDWGLPNSKAGRMEPMNSNSMGRPGGDYNTSLPRPALGGSIPTLPLRSNSIPGARPVLQQQQQMLQMRPGEIPMGMGANPYGQAAASNQLGSWPDGMLSMEQVSHGTQNRPLLRNSLDDLVGPPSNLEGQSDERALLDQLHTLLSNTDATGLEEIDRALGIPELVNQGQALEPKQDAFQGQEAAVMMDQKAGLYGQTYPAQGPPMQGGFHLQGQSPSFNSMMNQMNQQGNFPLQGMHPRANIMRPRTNTPKQLRMQLQQRLQGQQFLNQSRQALELKMENPTAGGAAVMRPMMQPQVSSQQGFLNAQMVAQRSRELLSHHFRQQRVAMMMQQQQQQQQQQQQQQQQQQQQQQQQQQQQQTQAFSPPPNVTASPSMDGLLAGPTMPQAPPQQFPYQPNYGMGQQPDPAFGRVSSPPNAMMSSRMGPSQNPMMQHPQAASIYQSSEMKGWPSGNLARNSSFSQQQFAHQGNPAVYSMVHMNGSSGHMGQMNMNPMPMSGMPMGPDQKYC

SEQ ID NO: 30958 - protein, 1409 aa, Homo sapiens
MSGLGENLDPLASDSRKRKLPCDTPGQGLTCSGEKRRREQESKYIEELAELISANLSDIDNFNVKPDKCAILKETVRQIRQIKEQGKTISNDDDVQKADVSSTGQGVIDKDSLGPLLLQALDGFLFVVNRDGNIVFVSENVTQYLQYKQEDLVNTSVYNILHEEDRKDFLKNLPKSTVNGVSWTNETQRQKSHTFNCRMLMKTPHDILEDINASPEMRQRYETMQCFALSQPRAMMEEGEDLQSCMICVARRITTGERTFPSNPESFITRHDLSGKVVNIDTNSLRSSMRPGFEDIIRRCIQRFFSLNDGQSWSQKRHYQEAYLNGHAETPVYRFSLADGTIVTAQTKSKLFRNPVTNDRHGFVSTHFLQREQNGYRPNPNPVGQGIRPPMAGCNSSVGGMSMSPNQGLQMPSSRAYGLADPSTTGQMSGARYGGSSNIASLTPGPGMQSPSSYQNNNYGLNMSSPPHGSPGLAPNQQNIMISPRNRGSPKIASHQFSPVAGVHSPMASSGNTGNHSFSSSSLSALQAISEGVGTSLLSTLSSPGPKLDNSPNMNITQPSKVSNQDSKSPLGFYCDQNPVESSMCQSNSRDHLSDKESKESSVEGAENQRGPLESKGHKKLLQLLTCSSDDRGHSSLTNSPLDSSCKESSVSVTSPSGVSSSTSGGVSSTSNMHGSLLQEKHRILHKLLQNGNSPAEVAKITAEATGKDTSSITSCGDGNVVKQEQLSPKKKENNALLRYLLDRDDPSDALSKELQPQVEGVDNKMSQCTSSTIPSSSQEKDPKIKTETSEEGSGDLDNLDAILGDLTSSDFYNNSISSNGSHLGTKQQVFQGTNSLGLKSSQSVQSIRPPYNRAVSLDSPVSVGSSPPVKNISAFPMLPKQPMLGGNPRMMDSQENYGSSMGDWGLPNSKAGRMEPMNSNSMGRPGGDYNTSLPRPALGGSIPTLPLRSNSIPGARPVLQQQQQMLQMRPGEIPMGMGANPYGQAAASNQLGSWPDGMLSMEQVSHGTQNRPLLRNSLDDLVGPPSNLEGQSDERALLDQLHTLLSNTDATGLEEIDRALGIPELVNQGQALEPKQDAFQGQEAAVMMDQKAGLYGQTYPAQGPPMQGGFHLQGQSPSFNSMMNQMNQQGNFPLQGMHPRANIMRPRTNTPKQLRMQLQQRLQGQQFLNQSRQALELKMENPTAGGAAVMRPMMQPQVSSQQGFLNAQMVAQRSRELLSHHFRQQRVAMMMQQQQQQQQQQQQQQQQQQQQQQQQQQQQQTQAFSPPPNVTASPSMDGLLAGPTMPQAPPQQFPYQPNYGMGQQPDPAFGRVSSPPNAMMSSRMGPSQNPMMQHPQAASIYQSSEMKGWPSGNLARNSSFSQQQFAHQGNPAVYSMVHMNGSSGHMGQMNMNPMPMSGMPMGPDQKYC

SEQ ID NO: 30959 - protein, 1415 aa, Homo sapiens
MSGLGENLDPLASDSRKRKLPCDTPGQGLTCSGEKRRREQESKYIEELAELISANLSDIDNFNVKPDKCAILKETVRQIRQIKEQGKTISNDDDVQKADVSSTGQGVIDKDSLGPLLLQALDGFLFVVNRDGNIVFVSENVTQYLQYKQEDLVNTSVYNILHEEDRKDFLKNLPKSTVNGVSWTNETQRQKSHTFNCRMLMKTPHDILEDINASPEMRQRYETMQCFALSQPRAMMEEGEDLQSCMICVARRITTGERTFPSNPESFITRHDLSGKVVNIDTNSLRSSMRPGFEDIIRRCIQRFFSLNDGQSWSQKRHYQEVTSDGIFSPTAYLNGHAETPVYRFSLADGTIVTAQTKSKLFRNPVTNDRHGFVSTHFLQREQNGYRPNPNPVGQGIRPPMAGCNSSVGGMSMSPNQGLQMPSSRAYGLADPSTTGQMSGARYGGSSNIASLTPGPGMQSPSSYQNNNYGLNMSSPPHGSPGLAPNQQNIMISPRNRGSPKIASHQFSPVAGVHSPMASSGNTGNHSFSSSSLSALQAISEGVGTSLLSTLSSPGPKLDNSPNMNITQPSKVSNQDSKSPLGFYCDQNPVESSMCQSNSRDHLSDKESKESSVEGAENQRGPLESKGHKKLLQLLTCSSDDRGHSSLTNSPLDSSCKESSVSVTSPSGVSSSTSGGVSSTSNMHGSLLQEKHRILHKLLQNGNSPAEVAKITAEATGKDTSSITSCGDGNVVKQEQLSPKKKENNALLRYLLDRDDPSDALSKELQPQVEGVDNKMSQCTSSTIPSSSQEKDPKIKTETSEEGSGDLDNLDAILGDLTSSDFYNNSISSNGSHLGTKQQVFQGTNSLGLKSSQSVQSIRPPYNRAVSLDSPVSVGSSPPVKNISAFPMLPKQPMLGGNPRMMDSQENYGSSMGDWGLPNSKAGRMEPMNSNSMGRPGGDYNTSLPRPALGGSIPTLPLRSNSIPGARPVLQQQQQMLQMRPGEIPMGMGANPYGQAAASNQLGSWPDGMLSMEQVSHGTQNRPLLRNSLDDLVGPPSNLEGQSDERALLDQLHTLLSNTDATGLEEIDRALGIPELVNQGQALEPKQDAFQGQEAAVMMDQKAGLYGQTYPAQGPPMQGGFHLQGQSPSFNSMMNQMNQQGNFPLQGMHPRANIMRPRTNTPKQLRMQLQQRLQGQQFLNQSRQALELKMENPTAGGAAVMRPMMQPQQGFLNAQMVAQRSRELLSHHFRQQRVAMMMQQQQQQQQQQQQQQQQQQQQQQQQQQQQQTQAFSPPPNVTASPSMDGLLAGPTMPQAPPQQFPYQPNYGMGQQPDPAFGRVSSPPNAMMSSRMGPSQNPMMQHPQAASIYQSSEMKGWPSGNLARNSSFSQQQFAHQGNPAVYSMVHMNGSSGHMGQMNMNPMPMSGMPMGPDQKYC

SEQ ID NO: 30960 - protein, 1350 aa, Homo sapiens
MSGLGENLDPLASDSRKRKLPCDTPGQGLTCSGEKRRREQESKYIEELAELISANLSDIDNFNVKPDKCAILKETVRQIRQIKEQGKTISNDDDVQKADVSSTGQGVIDKDSLGPLLLQALDGFLFVVNRDGNIVFVSENVTQYLQYKQEDLVNTSVYNILHEEDRKDFLKNLPKSTVNGVSWTNETQRQKSHTFNCRMLMKTPHDILEDINASPEMRQRYETMQCFALSQPRAMMEEGEDLQSCMICVARRITTGERTFPSNPESFITRHDLSGKVVNIDTNSLRSSMRPGFEDIIRRCIQRFFSLNDGQSWSQKRHYQEVTSDGIFSPTAYLNGHAETPVYRFSLADGTIVTAQTKSKLFRNPVTNDRHGFVSTHFLQREQNGYRPNPNPVGQGIRPPMAGCNSSVGGMSMSPNQGLQMPSSRAYGLADPSTTGQMSGARYGGSSNIASLTPGPGMQSPSSYQNNNYGLNMSSPPHGSPGLAPNQQNIMISPRNRGSPKIASHQFSPVAGVHSPMASSGNTGNHSFSSSSLSALQAISEGVGTSLLSTLSSPGPKLDNSPNMNITQPSKVSNQDSKSPLGFYCDQNPVESSMCQSNSRDHLSDKESKESSVEGAENQRGPLESKGHKKLLQLLTCSSDDRGHSSLTNSPLDSSCKESSVSVTSPSGVSSSTSGGVSSTSNMHGSLLQEKHRILHKLLQNGNSPAEVAKITAEATGKDTSSITSCGDGNVVKQEQLSPKKKENNALLRYLLDRDDPSDALSKELQPQVEGVDNKMSQCTSSTIPSSSQEKDPKIKTETSEEGSGDLDNLDAILGDLTSSDFYNNSISSNGSHLGTKQQVFQGTNSMGDWGLPNSKAGRMEPMNSNSMGRPGGDYNTSLPRPALGGSIPTLPLRSNSIPGARPVLQQQQQMLQMRPGEIPMGMGANPYGQAAASNQLGSWPDGMLSMEQVSHGTQNRPLLRNSLDDLVGPPSNLEGQSDERALLDQLHTLLSNTDATGLEEIDRALGIPELVNQGQALEPKQDAFQGQEAAVMMDQKAGLYGQTYPAQGPPMQGGFHLQGQSPSFNSMMNQMNQQGNFPLQGMHPRANIMRPRTNTPKQLRMQLQQRLQGQQFLNQSRQALELKMENPTAGGAAVMRPMMQPQQGFLNAQMVAQRSRELLSHHFRQQRVAMMMQQQQQQQQQQQQQQQQQQQQQQQQQQQQQTQAFSPPPNVTASPSMDGLLAGPTMPQAPPQQFPYQPNYGMGQQPDPAFGRVSSPPNAMMSSRMGPSQNPMMQHPQAASIYQSSEMKGWPSGNLARNSSFSQQQFAHQGNPAVYSMVHMNGSSGHMGQMNMNPMPMSGMPMGPDQKYC

SEQ ID NO: 30961 - protein, 1420 aa, Homo sapiens
MSGLGENLDPLASDSRKRKLPCDTPGQGLTCSGEKRRREQESKYIEELAELISANLSDIDNFNVKPDKCAILKETVRQIRQIKEQGKTISNDDDVQKADVSSTGQGVIDKDSLGPLLLQALDGFLFVVNRDGNIVFVSENVTQYLQYKQEDLVNTSVYNILHEEDRKDFLKNLPKSTVNGVSWTNETQRQKSHTFNCRMLMKTPHDILEDINASPEMRQRYETMQCFALSQPRAMMEEGEDLQSCMICVARRITTGERTFPSNPESFITRHDLSGKVVNIDTNSLRSSMRPGFEDIIRRCIQRFFSLNDGQSWSQKRHYQEAYLNGHAETPVYRFSLADGTIVTAQTKSKLFRNPVTNDRHGFVSTHFLQREQNGYRPNPNPVGQGIRPPMAGCNSSVGGMSMSPNQGLQMPSSRAYGLADPSTTGQMSGARYGGSSNIASLTPGPGMQSPSSYQNNNYGLNMSSPPHGSPGLAPNQQNIMISPRNRGSPKIASHQFSPVAGVHSPMASSGNTGNHSFSSSSLSALQAISEGVGTSLLSTLSSPGPKLDNSPNMNITQPSKVSNQDSKSPLGFYCDQNPVESSMCQSNSRDHLSDKESKESSVEGAENQRGPLESKGHKKLLQLLTCSSDDRGHSSLTNSPLDSSCKESSVSVTSPSGVSSSTSGGVSSTSNMHGSLLQEKHRILHKLLQNGNSPAEVAKITAEATGKDTSSITSCGDGNVVKQEQLSPKKKENNALLRYLLDRDDPSDALSKELQPQVEGVDNKMSQCTSSTIPSSSQEKDPKIKTETSEEGSGDLDNLDAILGDLTSSDFYNNSISSNGSHLGTKQQVFQGTNSLGLKSSQSVQSIRPPYNRAVSLDSPVSVGSSPPVKNISAFPMLPKQPMLGGNPRMMDSQENYGSSMGGPNRNVTVTQTPSSGDWGLPNSKAGRMEPMNSNSMGRPGGDYNTSLPRPALGGSIPTLPLRSNSIPGARPVLQQQQQMLQMRPGEIPMGMGANPYGQAAASNQLGSWPDGMLSMEQVSHGTQNRPLLRNSLDDLVGPPSNLEGQSDERALLDQLHTLLSNTDATGLEEIDRALGIPELVNQGQALEPKQDAFQGQEAAVMMDQKAGLYGQTYPAQGPPMQGGFHLQGQSPSFNSMMNQMNQQGNFPLQGMHPRANIMRPRTNTPKQLRMQLQQRLQGQQFLNQSRQALELKMENPTAGGAAVMRPMMQPQQGFLNAQMVAQRSRELLSHHFRQQRVAMMMQQQQQQQQQQQQQQQQQQQQQQQQQQQQQTQAFSPPPNVTASPSMDGLLAGPTMPQAPPQQFPYQPNYGMGQQPDPAFGRVSSPPNAMMSSRMGPSQNPMMQHPQAASIYQSSEMKGWPSGNLARNSSFSQQQFAHQGNPAVYSMVHMNGSSGHMGQMNMNPMPMSGMPMGPDQKYC

SEQ ID NO: 30962 - protein, 942 aa, Homo sapiens
MDTKEEKKERKQSYFARLKKKKQAKQNAETASAVATRTHTGKEDNNTVVLEPDKCNIAVEEEYMTDEKKKRKSNQLKEIRRTELKRYYSIDDNQNKTHDKKEKKMVVQKPHGTMEYTAGNQDTLNSIALKFNITPNKLVELNKLFTHTIVPGQVLFVPDANSPSSTLRLSSSSPGATVSPSSSDAEYDKLPDADLARKALKPIERVLSSTSEEDEPGVVKFLKMNCRYFTDGKGVVGGVMIVTPNNIMFDPHKSDPLVIENGCEEYGLICPMEEVVSIALYNDISHMKIKDALPSDLPQDLCPLYRPGEWEDLASEKDINPFSKFKSINKEKRQQNGEKIMTSDSRPIVPLEKSTGHTPTKPSGSSVSEKLKKLDSSRETSHGSPTVTKLSKEPSDTSSAFESTAKENFLGEDDDFVDLEELSSQTGGGMHKKDTLKECLSLDPEERKKAESQINNSAVEMQVQSALAFLGTENDVELKGALDLETCEKQDIMPEVDKQSGSPESRVENTLNIHEDLDKVKLIEYYLTKNKEGPQVSENLQKTELSDGKSIEPGGIDITLSSSLSQAGDPITEGNKEPDKTWVKKGEPLPVKLNSSTEANVIKEALDSSLESTLDNSCQGAQMDNKSEVQLWLLKRIQVPIEDILPSKEEKSKTPPMFLCIKVGKPMRKSFATHTAAMVQQYGKRRKQPEYWFAVPRERVDHLYTFFVQWSPDVYGKDAKEQGFVVVEKEELNMIDNFFSEPTTKSWEIITVEEAKRRKSTCSYYEDEDEEVLPVLRPHSALLENMHIEQLARRLPARVQGYPWRLAYSTLEHGTSLKTLYRKSASLDSPVLLVIKDMDNQIFGAYATHPFKFSDHYYGTGETFLYTFSPHFKVFKWSGENSYFINGDISSLELGGGGGRFGLWLDADLYHGRSNSCSTFNNDILSKKEDFIVQDLEVWAFD

SEQ ID NO: 30963 - protein, 931 aa, Homo sapiens
MDTKEEKKERKQSYFARLKKKKQAKQNAETASAVATRTHTGKEDNNTVVLEPDKCNIAVEEEYMTDEKKKRKSNQLKEIRRTELKRYYSIDDNQNKTHDKKEKKMVVQKPHGTMEYTAGNQDTLNSIALKFNITPNKLVELNKLFTHTIVPGQVLFVPDANSPSSTLRLSSSSPGATVSPSSSDAEYDKLPDADLARKALKPIERVLSSTSEEDEPGVVKFLKMNCRYFTDGKGVVGGVMIVTPNNIMFDPHKSDPLVIENGCEEYGLICPMEEVVSIALYNDISHMKIKDALPSPGEWEDLASEKDINPFSKFKSINKEKRQQNGEKIMTSDSRPIVPLEKSTGHTPTKPSGSSVSEKLKKLDSSRETSHGSPTVTKLSKEPSDTSSAFESTAKENFLGEDDDFVDLEELSSQTGGGMHKKDTLKECLSLDPEERKKAESQINNSAVEMQVQSALAFLGTENDVELKGALDLETCEKQDIMPEVDKQSGSPESRVENTLNIHEDLDKVKLIEYYLTKNKEGPQVSENLQKTELSDGKSIEPGGIDITLSSSLSQAGDPITEGNKEPDKTWVKKGEPLPVKLNSSTEANVIKEALDSSLESTLDNSCQGAQMDNKSEVQLWLLKRIQVPIEDILPSKEEKSKTPPMFLCIKVGKPMRKSFATHTAAMVQQYGKRRKQPEYWFAVPRERVDHLYTFFVQWSPDVYGKDAKEQGFVVVEKEELNMIDNFFSEPTTKSWEIITVEEAKRRKSTCSYYEDEDEEVLPVLRPHSALLENMHIEQLARRLPARVQGYPWRLAYSTLEHGTSLKTLYRKSASLDSPVLLVIKDMDNQIFGAYATHPFKFSDHYYGTGETFLYTFSPHFKVFKWSGENSYFINGDISSLELGGGGGRFGLWLDADLYHGRSNSCSTFNNDILSKKEDFIVQDLEVWAFD

SEQ ID NO: 30964 - protein, 295 aa, Homo sapiens
MDTKEEKKERKQSYFARLKKKKQAKQNAETASAVATRTHTGKEDNNTVVLEPDKCNIAVEEEYMTDEKKKRKSNQLKEIRRTELKRYYSIDDNQNKTHDKKEKKMVVQKPHGTMEYTAGNQDTLNSIALKFNITPNKLVELNKLFTHTIVPGQVLFVPDANSPSSTLRLSSSSPGATVSPSSSDAEYDKLPDADLARKALKPIERVLSSTSEEDEPGVVKFLKMNCRYFTDGKGVVGGVMIVTPNNIMFDPHKSDPLVIENGCEEYGLICPMEEVVSIALYNDISHMKIKDALPS

SEQ ID NO: 30965 - protein, 249 aa, Homo sapiens
MDTKEEKKERKQSYFARLKKKKQAKQNAETASAVATRTHTGKEDNNTVVLEPDKCNIAVEEEYMTDEKKKRKSNQLKEIRRTELKRYYSIDDNQNKTHDKKEKKMVVQKPHGTMEYTAGNQDTLNSIALKFNITPNKLVELNKLFTHTIVPGQVLFVPDANSPSSTLRLSSSSPGATVSPSSSDAEYDKLPDADLARKALKPIERVLSSTSEEDEPGVVKFLKMNCRYFTDGKVYSNVICFLSLKSMKN

SEQ ID NO: 30966 - protein, 219 aa, Homo sapiens
MRGQRLPLDIQIFYCARPDEEPFVKIITVEEAKRRKSTCSYYEDEDEEVLPVLRPHSALLENMHIEQLARRLPARVQGYPWRLAYSTLEHGTSLKTLYRKSASLDSPVLLVIKDMDNQIFGAYATHPFKFSDHYYGTGETFLYTFSPHFKVFKWSGENSYFINGDISSLELGGGGGRFGLWLDADLYHGRSNSCSTFNNDILSKKEDFIVQDLEVWAFD

SEQ ID NO: 30967 - protein, 102 aa, Homo sapiens
MDTKEEKKERKQSYFARLKKKKQAKQNAETASAVATRTHTGKEDNNTVVLEPDKCNIAVEEEYMTDEKKKRKSNQLKEIRRTELKRYYSIGEYSWRYCSIFI

SEQ ID NO: 30968 - protein, 827 aa, Homo sapiens
MVVQKPHGTMEYTAGNQDTLNSIALKFNITPNKLVELNKLFTHTIVPGQVLFVPDANSPSSTLRLSSSSPGATVSPSSSDAEYDKLPDADLARKALKPIERVLSSTSEEDEPGVVKFLKMNCRYFTDGKGVVGGVMIVTPNNIMFDPHKSDPLVIENGCEEYGLICPMEEVVSIALYNDISHMKIKDALPSPGEWEDLASEKDINPFSKFKSINKEKRQQNGEKIMTSDSRPIVPLEKSTGHTPTKPSGSSVSEKLKKLDSSRETSHGSPTVTKLSKEPSDTSSAFESTAKENFLGEDDDFVDLEELSSQTGGGMHKKDTLKECLSLDPEERKKAESQINNSAVEMQVQSALAFLGTENDVELKGALDLETCEKQDIMPEVDKQSGSPESRVENTLNIHEDLDKVKLIEYYLTKNKEGPQVSENLQKTELSDGKSIEPGGIDITLSSSLSQAGDPITEGNKEPDKTWVKKGEPLPVKLNSSTEANVIKEALDSSLESTLDNSCQGAQMDNKSEVQLWLLKRIQVPIEDILPSKEEKSKTPPMFLCIKVGKPMRKSFATHTAAMVQQYGKRRKQPEYWFAVPRERVDHLYTFFVQWSPDVYGKDAKEQGFVVVEKEELNMIDNFFSEPTTKSWEIITVEEAKRRKSTCSYYEDEDEEVLPVLRPHSALLENMHIEQLARRLPARVQGYPWRLAYSTLEHGTSLKTLYRKSASLDSPVLLVIKDMDNQIFGAYATHPFKFSDHYYGTGETFLYTFSPHFKVFKWSGENSYFINGDISSLELGGGGGRFGLWLDADLYHGRSNSCSTFNNDILSKKEDFIVQDLEVWAFD

SEQ ID NO: 30969 - protein, 1025 aa, Homo sapiens
MHRKKVDNRIRILIENGVAERQRSLFVVVGDRGKDQVVILHHMLSKATVKARPSVLWCYKKELGFSSHRKKRMRQLQKKIKNGTLNIKQDDPFELFIAATNIRYCYYNETHKILGNTFGMCVLQDFEALTPNLLARTVETVEGGGLVVILLRTMNSLKQLYTVTMDVHSRYRTEAHQDVVGRFNERFILSLASCKKCLVIDDQLNILPISSHVATMEALPPQTPDESLGPSDLELRELKESLQDTQPVGVLVDCCKTLDQAKAVLKFIEGISEKTLRSTVALTAARGRGKSAALGLAIAGAVAFGYSNIFVTSPSPDNLHTLFEFVFKGFDALQYQEHLDYEIIQSLNPEFNKAVIRVNVFREHRQTIQYIHPADAVKLGQAELVVIDEAAAIPLPLVKSLLGPYLVFMASTINGYEGTGRSLSLKLIQQLRQQSAQSQVSTTAENKTTTTARLASARTLYEVSLQESIRYAPGDAVEKWLNDLLCLDCLNITRIVSGCPLPEACELYYVNRDTLFCYHKASEVFLQRLMALYVASHYKNSPNDLQMLSDAPAHHLFCLLPPVPPTQNALPEVLAVIQVCLEGEISRQSILNSLSRGKKASGDLIPWTVSEQFQDPDFGGLSGGRVVRIAVHPDYQGMGYGSRALQLLQMYYEGRFPCLEEKVLETPQEIHTVSSEAVSLLEEVITPRKDLPPLLLKLNERPAERLDYLGVSYGLTPRLLKFWKRAGFVPVYLRQTPNDLTGEHSCIMLKTLTDEDEADQGGWLAAFWKDFRRRFLALLSYQFSTFSPSLALNIIQNRNMGKPAQPALSREELEALFLPYDLKRLEMYSRNMVDYHLIMDMIPAISRIYFLNQLGDLALSAAQSALLLGIGLQHKSVDQLEKEIELPSGQLMGLFNRIIRKVVKLFNEVQEKAIEEQMVAAKDVVMEPTMKTLSDDLDEAAKEFQEKHKKEVGKLKSMDLSEYIIRGDDEEWNEVLNKAGPNASIISLKSDKKRKLEAKQEPKQSKKLKNRETKNKKDMKLKRKK

SEQ ID NO: 30970 - protein, 953 aa, Homo sapiens
MRQLQKKIKNGTLNIKQDDPFELFIAATNIRYCYYNETHKILGNTFGMCVLQDFEALTPNLLARTVETVEGGGLVVILLRTMNSLKQLYTVTMDVHSRYRTEAHQDVVGRFNERFILSLASCKKCLVIDDQLNILPISSHVATMEALPPQTPDESLGPSDLELRELKESLQDTQPVGVLVDCCKTLDQAKAVLKFIEGISEKTLRSTVALTAARGRGKSAALGLAIAGAVAFGYSNIFVTSPSPDNLHTLFEFVFKGFDALQYQEHLDYEIIQSLNPEFNKAVIRVNVFREHRQTIQYIHPADAVKLGQAELVVIDEAAAIPLPLVKSLLGPYLVFMASTINGYEGTGRSLSLKLIQQLRQQSAQSQVSTTAENKTTTTARLASARTLYEVSLQESIRYAPGDAVEKWLNDLLCLDCLNITRIVSGCPLPEACELYYVNRDTLFCYHKASEVFLQRLMALYVASHYKNSPNDLQMLSDAPAHHLFCLLPPVPPTQNALPEVLAVIQVCLEGEISRQSILNSLSRGKKASGDLIPWTVSEQFQDPDFGGLSGGRVVRIAVHPDYQGMGYGSRALQLLQMYYEGRFPCLEEKVLETPQEIHTVSSEAVSLLEEVITPRKDLPPLLLKLNERPAERLDYLGVSYGLTPRLLKFWKRAGFVPVYLRQTPNDLTGEHSCIMLKTLTDEDEADQGGWLAAFWKDFRRRFLALLSYQFSTFSPSLALNIIQNRNMGKPAQPALSREELEALFLPYDLKRLEMYSRNMVDYHLIMDMIPAISRIYFLNQLGDLALSAAQSALLLGIGLQHKSVDQLEKEIELPSGQLMGLFNRIIRKVVKLFNEVQEKAIEEQMVAAKDVVMEPTMKTLSDDLDEAAKEFQEKHKKEVGKLKSMDLSEYIIRGDDEEWNEVLNKAGPNASIISLKSDKKRKLEAKQEPKQSKKLKNRETKNKKDMKLKRKK

SEQ ID NO: 30971 - protein, 249 aa, Homo sapiens
MFFSAALRARAAGLTAHWGRHVRNLHKTVMQNGAGGALFVHRDTPENNPDTPFDFTPENYKRIEAIVKNYPEGHKAAAVLPVLDLAQRQNGWLPISAMNKVAEVLQVPPMRVYEVATFYTMYNRKPVGKYHIQVCTTTPCMLRNSDSILEAIQKKLGIKVGETTPDKLFTLIEVECLGACVNAPMVQINDNYYEDLTAKDIEEIIDELKAGKIPKPGPRSGRFSCEPAGGLTSLTEPPKGPGFGVQAGL

SEQ ID NO: 30972 - protein, 441 aa, Homo sapiens
MSVLLRSGLGPLCAVARAAIPFIWRGKYFSSGNEPAENPVTPMLRHLMYKIKSTGPITVAEYMKEVLTNPAKGYYVYRDMLGEKGDFITSPEISQIFGELLGIWFISEWMATGKSTAFQLVELGPGRGTLVGDILRVFTQLGSVLKNCDISVHLVEVSQKLSEIQALTLTKEKVPLERNAGSPVYMKGVTKSGIPISWYRDLHDVPKGYSFYLAHEFFDVLPVHKFQKTPQGWREVFVDIDPQVSDKLRFVLAPSATPAEAFIQHDETRDHVEVCPDAGVIIEELSQRIALTGGAALVADYGHDGTKTDTFRGFCDHKLHDVLIAPGTADLTADVDFSYLRRMAQGKVASLGPIKQHTFLKNMGIDVRLKVLLDKSNEPSVRQQLLQGYDMLMNPKKMGERFNFFALLPHQRLQGGRYQRNARQSKPFASVVAGFSELAWQ

SEQ ID NO: 30973 - protein, 343 aa, Homo sapiens
MSVLLRSGLGPLCAVARAAIPFIWRGKYFSSGNEPAENPVTPMLRHLMYKIKSTGPITVAEYMKEVLTNPAKLLGIWFISEWMATGKSTAFQLVELGPGRGTLVGDILRVFTQLGSVLKNCDISVHLVEKTPQGWREVFVDIDPQVSDKLRFVLAPSATPAEAFIQHDETRDHVEVCPDAGVIIEELSQRIALTGGAALVADYGHDGTKTDTFRGFCDHKLHDVLIAPGTADLTADVDFSYLRRMAQGKVASLGPIKQHTFLKNMGIDVRLKVLLDKSNEPSVRQQLLQGYDMLMNPKKMGERFNFFALLPHQRLQGGRYQRNARQSKPFASVVAGFSELAWQ

SEQ ID NO: 30974 - protein, 216 aa, Homo sapiens
MGWIRGRRSRHSWEMSEFHNYNLDLKKSDFSTRWQKQRCPVVKSKCRENASPFFFCCFIAVAMGIRFIIMVAIWSAVFLNSLFNQEVQIPLTESYCGPCPKNWICYKNNCYQFFDESKNWYESQASCMSQNASLLKVYSKEDQDLLKLVKSYHWMGLVHIPTNGSWQWEDGSILSPNLLTIIEMQKGDCALYASSFKGYIENCSTPNTYICMQRTV

SEQ ID NO: 30975 - protein, 275 aa, Homo sapiens
MATELEYESVLCVKPDVSVYRIPPRASNRGYRASDWKLDQPDWTGRLRITSKGKTAYIKLEDKVSGELFAQAPVEQYPGIAVETVTDSSRYFVIRIQDGTGRSAFIGIGFTDRGDAFDFNVSLQDHFKWVKQESEISKESQEMDARPKLDLGFKEGQTIKLCIGNITNKKGGASKPRTARGGGLSLLPPPPGGKVTIPPPSSSVAISNHVTPPPIPKSNHGGSDADILLDLDSPAPVTTPAPTPVSVSNDLWGDFSTASSSVPNQAPQPSNWVQF

SEQ ID NO: 30976 - protein, 102 aa, Homo sapiens
MATELEYESVLCVKPDVSVYRIPPRASNRGYRASDWKLDQPDWTGRLRITSKGKTAYIKLEDKVSGELFAQAPVEQYPGIAVETVTDSSRYFVIRIQDGTGG

SEQ ID NO: 30977 - protein, 254 aa, Homo sapiens
MAATARRGWGAAAVAAGLRRRFCHMLKNPYTIKKQPLHQFVQRPLFPLPAAFYHPVRYMFIQTQDTPNPNSLKFIPGKPVLETRTMDFPTPAAAFRSPLARQLFRIEGVKSVFFGPDFITVTKENEELDWNLLKPDIYATIMDFFASGLPLVTEETPSGEAGSEEDDEVVAMIKELLDTRIRPTVQEDGGDVIYKGFEDGIVQLKLQGSCTSCPSSIITLKNGIQNMLQFYIPEVEGVEQVMDDESDEKEANSP

SEQ ID NO: 30978 - protein, 113 aa, Homo sapiens
MDFFASGLPLVTEETPSGEAGSEEDDEVVAMIKELLDTRIRPTVQEDGGDVIYKGFEDGIVQLKLQGSCTSCPSSIITLKNGIQNMLQFYIPEVEGVEQVMDDESDEKEANSP

SEQ ID NO: 30979 - protein, 230 aa, Homo sapiens
MLKNPYTIKKQPLHQFVQRPLFPLPAAFYHPVRYMFIQTQDTPNPNSLKFIPGKPVLETRTMDFPTPAAAFRSPLARQLFRIEGVKSVFFGPDFITVTKENEELDWNLLKPDIYATIMDFFASGLPLVTEETPSGEAGSEEDDEVVAMIKELLDTRIRPTVQEDGGDVIYKGFEDGIVQLKLQGSCTSCPSSIITLKNGIQNMLQFYIPEVEGVEQVMDDESDEKEANSP

SEQ ID NO: 30980 - protein, 1319 aa, Homo sapiens
MAQSLRLHFAARRSNTYPLSETSGDDLDSHVHMCFKRPTRISTSNVVQMKLTPRQTALAPLIKENVQSQERSSVPSSENVNKKSSCLQISLQPTRYSGYLQSSNVLADSDDASFTCILKDGIYSSAVVDNELNAVNDGHLVSSPAICSGSLSNFSTSDNGSYSSNGSDFGSCASITSGGSYTNSVISDSSSYTFPPSDDTFLGGNLPSDSTSNRSVPNRNTTPCEIFSRSTSTDPFVQDDLEHGLEIMKLPVSRNTKIPLKRYSSLVIFPRSPSTTRPTSPTSLCTLLSKGSYQTSHQFIISPSEIAHNEDGTSAKGFLSTAVNGLRLSKTICTPGEVRDIRPLHRKGSLQKKIVLSNNTPRQTVCEKSSEGYSCVSVHFTQRKAATLDCETTNGDCKPEMSEIKLNSDSEYIKLMHRTSACLPSSQNVDCQININGELERPHSQMNKNHGILRRSISLGGAYPNISCLSSLKHNCSKGGPSQLLIKFASGNEGKVDNLSRDSNRDCTNELSNSCKTRDDFLGQVDVPLYPLPTENPRLERPYTFKDFVLHPRSHKSRVKGYLRLKMTYLPKTSGSEDDNAEQAEELEPGWVVLDQPDAACHLQQQQEPSPLPPGWEERQDILGRTYYVNHESRRTQWKRPTPQDNLTDAENGNIQLQAQRAFTTRRQISEETESVDNRESSENWEIIREDEATMYSNQAFPSPPPSSNLDVPTHLAEELNARLTIFGNSAVSQPASSSNHSSRRGSLQAYTFEEQPTLPVLLPTSSGLPPGWEEKQDERGRSYYVDHNSRTTTWTKPTVQATVETSQLTSSQSSAGPQSQASTSDSGQQVTQPSEIEQGFLPKGWEVRHAPNGRPFFIDHNTKTTTWEDPRLKIPAHLRGKTSLDTSNDLGPLPPGWEERTHTDGRIFYINHNIKRTQWEDPRLENVAITGPAVPYSRDYKRKYEFFRRKLKKQNDIPNKFEMKLRRATVLEDSYRRIMGVKRADFLKARLWIEFDGEKGLDYGGVAREWFFLISKEMFNPYYGLFEYSATDNYTLQINPNSGLCNEDHLSYFKFIGRVAGMAVYHGKLLDGFFIRPFYKMMLHKPITLHDMESVDSEYYNSLRWILENDPTELDLRFIIDEELFGQTHQHELKNGGSEIVVTNKNKKEYIYLVIQWRFVNRIQKQMAAFKEGFFELIPQDLIKIFDENELELLMCGLGDVDVNDWREHTKYKNGYSANHQVIQWFWKAVLMMDSEKRIRLLQFVTGTSRVPMNGFAELYGSNGPQSFTVEQWGTPEKLPRAHTCFNRLDLPPYESFEELWDKLQMAIENTQGFDGVD

SEQ ID NO: 30981 - protein, 1303 aa, Homo sapiens
MAQSLRLHFAARRSNTYPLSETSGDDLDSHVHMCFKRPTRISTSNVVQMKLTPRQTALAPLIKENVQSQERSSVPSSENVNKKSSCLQISLQPTRYSGYLQSSNVLADSDDASFTCILKDGIYSSAVVDNELNAVNDGHLVSSPAICSGSLSNFSTSDNGSYSSNGSDFGSCASITSGGSYTNSVISDSSSYTFPPSDDTFLGGNLPSDSTSNRSVPNRNTTPCEIFSRSTSTDPFVQDDLEHGLEIMKLPVSRNTKIPLKRYSSLVIFPRSPSTTRPTSPTSLCTLLSKGSYQTSHQFIISPSEIAHNEDGTSAKGFLSTAVNGLRLSKTICTPGEVRDIRPLHRKGSLQKKIVLSNNTPRQTVCEKSSEGYSCVSVHFTQRKAATLDCETTNGDCKPEMSEIKLNSDSEYIKLMHRTSACLPSSQNVDCQININGELERPHSQMNKNHGILRRSISLGGAYPNISCLSSLKHNCSKGGPSQLLIKFASGNEGKVDNLSRDSNRDCTNELSNSCKTRDDFLGQVDVPLYPLPTENPRLERPYTFKDFVLHPRSHKSRVKGYLRLKMTYLPKTSGSEDDNAEQAEELEQQQEPSPLPPGWEERQDILGRTYYVNHESRRTQWKRPTPQDNLTDAENGNIQLQAQRAFTTRRQISEETESVDNRESSENWEIIREDEATMYSNQAFPSPPPSSNLDVPTHLAEELNARLTIFGNSAVSQPASSSNHSSRRGSLQAYTFEEQPTLPVLLPTSSGLPPGWEEKQDERGRSYYVDHNSRTTTWTKPTVQATVETSQLTSSQSSAGPQSQASTSDSGQQVTQPSEIEQGFLPKGWEVRHAPNGRPFFIDHNTKTTTWEDPRLKIPAHLRGKTSLDTSNDLGPLPPGWEERTHTDGRIFYINHNIKRTQWEDPRLENVAITGPAVPYSRDYKRKYEFFRRKLKKQNDIPNKFEMKLRRATVLEDSYRRIMGVKRADFLKARLWIEFDGEKGLDYGGVAREWFFLISKEMFNPYYGLFEYSATDNYTLQINPNSGLCNEDHLSYFKFIGRVAGMAVYHGKLLDGFFIRPFYKMMLHKPITLHDMESVDSEYYNSLRWILENDPTELDLRFIIDEELFGQTHQHELKNGGSEIVVTNKNKKEYIYLVIQWRFVNRIQKQMAAFKEGFFELIPQDLIKIFDENELELLMCGLGDVDVNDWREHTKYKNGYSANHQVIQWFWKAVLMMDSEKRIRLLQFVTGTSRVPMNGFAELYGSNGPQSFTVEQWGTPEKLPRAHTCFNRLDLPPYESFEELWDKLQMAIENTQGFDGVD

SEQ ID NO: 30982 - protein, 1247 aa, Homo sapiens
MAQSLRLHFAARRSNTYPLSETSGDDLDSHVHMCFKRPTRISTSNVVQMKLTPRQTALAPLIKENVQSQERSSVPSSENVNKKSSCLQISLQPTRYSGYLQSSNVLADSDDASFTCILKDGIYSSAVVDNELNAVNDGHLVSSPAICSGSLSNFSTSDNGSYSSNGSDFGSCASITSGGSYTNSVISDSSSYTFPPSDDTFLGGNLPSDSTSNRSVPNRNTTPCEIFSRSTSTDPFVQDDLEHGLEIMKLPVSRNTKIPLKRYSSLVIFPRSPSTTRPTSPTSLCTLLSKGSYQTSHQFIISPSEIAHNEDGTSAKGFLSTAVNGLRLSKTICTPGEVRDIRPLHRKGSLQKKIVLSNNTPRQTVCEKSSEGYSCVSVHFTQRKAATLDCETTNGDCKPEMSEIKLNSDSEYIKLMHRTSACLPSSQNVDCQININGELERPHSQMNKNHGILRRSISLGGAYPNISCLSSLKHNCSKGGPSQLLIKFASGNEGKVDNLSRDSNRDCTNELSNSCKPGWVVLDQPDAACHLQQQQEPSPLPPGWEERQDILGRTYYVNHESRRTQWKRPTPQDNLTDAENGNIQLQAQRAFTTRRQISEETESVDNRESSENWEIIREDEATMYSNQAFPSPPPSSNLDVPTHLAEELNARLTIFGNSAVSQPASSSNHSSRRGSLQAYTFEEQPTLPVLLPTSSGLPPGWEEKQDERGRSYYVDHNSRTTTWTKPTVQATVETSQLTSSQSSAGPQSQASTSDSGQQVTQPSEIEQGFLPKGWEVRHAPNGRPFFIDHNTKTTTWEDPRLKIPAHLRGKTSLDTSNDLGPLPPGWEERTHTDGRIFYINHNIKRTQWEDPRLENVAITGPAVPYSRDYKRKYEFFRRKLKKQNDIPNKFEMKLRRATVLEDSYRRIMGVKRADFLKARLWIEFDGEKGLDYGGVAREWFFLISKEMFNPYYGLFEYSATDNYTLQINPNSGLCNEDHLSYFKFIGRVAGMAVYHGKLLDGFFIRPFYKMMLHKPITLHDMESVDSEYYNSLRWILENDPTELDLRFIIDEELFGQTHQHELKNGGSEIVVTNKNKKEYIYLVIQWRFVNRIQKQMAAFKEGFFELIPQDLIKIFDENELELLMCGLGDVDVNDWREHTKYKNGYSANHQVIQWFWKAVLMMDSEKRIRLLQFVTGTSRVPMNGFAELYGSNGPQSFTVEQWGTPEKLPRAHTCFNRLDLPPYESFEELWDKLQMAIENTQGFDGVD

SEQ ID NO: 30983 - protein, 900 aa, Homo sapiens
MATCAVEVFGLLEDEENSRIVRVRVIAGIGLAKKDILGASDPYVRVTLYDPMNGVLTSVQTKTIKKSLNPKWNEEILFRVHPQQHRLLFEVFDENRLTRDDFLGQVDVPLYPLPTENPRLERPYTFKDFVLHPRSHKSRVKGYLRLKMTYLPKTSGSEDDNAEQAEELEPGWVVLDQPDAACHLQQQQEPSPLPPGWEERQDILGRTYYVNHESRRTQWKRPTPQDNLTDAENGNIQLQAQRAFTTRRQISEETESVDNRESSENWEIIREDEATMYSNQAFPSPPPSSNLDVPTHLAEELNARLTIFGNSAVSQPASSSNHSSRRGSLQAYTFEEQPTLPVLLPTSSGLPPGWEEKQDERGRSYYVDHNSRTTTWTKPTVQATVETSQLTSSQSSAGPQSQASTSDSGQQVTQPSEIEQGFLPKGWEVRHAPNGRPFFIDHNTKTTTWEDPRLKIPAHLRGKTSLDTSNDLGPLPPGWEERTHTDGRIFYINHNIKRTQWEDPRLENVAITGPAVPYSRDYKRKYEFFRRKLKKQNDIPNKFEMKLRRATVLEDSYRRIMGVKRADFLKARLWIEFDGEKGLDYGGVAREWFFLISKEMFNPYYGLFEYSATDNYTLQINPNSGLCNEDHLSYFKFIGRVAGMAVYHGKLLDGFFIRPFYKMMLHKPITLHDMESVDSEYYNSLRWILENDPTELDLRFIIDEELFGQTHQHELKNGGSEIVVTNKNKKEYIYLVIQWRFVNRIQKQMAAFKEGFFELIPQDLIKIFDENELELLMCGLGDVDVNDWREHTKYKNGYSANHQVIQWFWKAVLMMDSEKRIRLLQFVTGTSRVPMNGFAELYGSNGPQSFTVEQWGTPEKLPRAHTCFNRLDLPPYESFEELWDKLQMAIENTQGFDGVD

SEQ ID NO: 30984 - protein, 466 aa, Homo sapiens
MPGDSSPGTLPLWDASLSPPLGPDPGGFSRASHAGDKSRPPAPELGSPGAVRPRVGSCAPGPMELRVSNTSCENGSLLHLYCSSQEVLCQIVNDLSPEVPSNATFHSWQERIRQNYGFYIGLGLAFLSSFLIGSSVILKKKGLLRLVATGATRAVDGGFGYLKDAMWWAGFLTMAAGEVANFGAYAFAPATVVTPLGALSVLISAILSSYFLRESLNLLGKLGCVICVAGSTVMVIHAPEEEKVTTIMEMASKMKDTGFIVFAVLLLVSCLILIFVIAPRYGQRNILIYIIICSVIGAFSVAAVKGLGITIKNFFQGLPVVRHPLPYILSLILALSLSTQVNFLNRALDIFNTSLVFPIYYVFFTTVVVTSSIILFKEWYSMSAVDIAGTLSGFVTIILGVFMLHAFKDLDISCASLPHMHKNPPPSPAPEPTVIRLEDKNVLVDNIELASTSSPEEKPKVFIIHS

SEQ ID NO: 30985 - protein, 447 aa, Homo sapiens
MPGDSSPGTLPLWDASLSPPLGPDPGGFSRASHAGDKSRPPAPELGSPGAVRPRVGSCAPGPMELRVSNTSCENGSLLHLYCSSQEVLCQIVNDLSPEVPSNATFHSWQERIRQNYGFYIGLGLAFLSSFLIGSSVILKKKGLLRLVATGATRAVAAGEVANFGAYAFAPATVVTPLGALSVLISAILSSYFLRESLNLLGKLGCVICVAGSTVMVIHAPEEEKVTTIMEMASKMKDTGFIVFAVLLLVSCLILIFVIAPRYGQRNILIYIIICSVIGAFSVAAVKGLGITIKNFFQGLPVVRHPLPYILSLILALSLSTQVNFLNRALDIFNTSLVFPIYYVFFTTVVVTSSIILFKEWYSMSAVDIAGTLSGFVTIILGVFMLHAFKDLDISCASLPHMHKNPPPSPAPEPTVIRLEDKNVLVDNIELASTSSPEEKPKVFIIHS

SEQ ID NO: 30986 - protein, 302 aa, Homo sapiens
MDEQSQGMQGPPVPQFQPQKALRPDMGYNTLANFRIEKKIGRGQFSEVYRAACLLDGVPVALKKVQIFDLMDAKARADCIKEIDLLKQLNHPNVIKYYASFIEDNELNIVLELADAGDLSRMIKHFKKQKRLIPERTVWKYFVQLCSALEHMHSRRVMHRDIKPANVFITATGVVKLGDLGLGRFFSSKTTAAHSLVGTPYYMSPERIHENGYNFKSDIWSLGCLLYEMAALQSPFYGDKMNLYSLCKKIEQCDYPPLPSDHYSEELRQLVNMCINPDPEKRPDVTYVYDVAKRMHACTASS

SEQ ID NO: 30987 - protein, 119 aa, Homo sapiens
MDEQSQGMQGPPVPQFQPQKALRPDMGYNTLANFRIEKKIGRGQFSEVYRAACLLDGVPVALKKVQVCLLPVWERRVCALNACYFLEIIKGSESLQYMATLTNLFENLPVSHHGSFAKK

SEQ ID NO: 30988 - protein, 2804 aa, Homo sapiens
MNGDMPHVPITTLAGIASLTDLLNQLPLPSPLPATTTKSLLFNARIAEEVNCLLACRDDNLVSQLVHSLNQVSTDHIELKDNLGSDDPEGDIPVLLQAVLARSPNVFREKSMQNRYVQSGMMMSQYKLSQNSMHSSPASSNYQQTTISHSPSSRFVPPQTSSGNRFMPQQNSPVPSPYAPQSPAGYMPYSHPSSYTTHPQMQQASVSSPIVAGGLRNIHDNKVSGPLSGNSANHHADNPRHGSSEDYLHMVHRLSSDDGDSSTMRNAASFPLRSPQPVCSPAGSEGTPKGSRPPLILQSQSLPCSSPRDVPPDILLDSPERKQKKQKKMKLGKDEKEQSEKAAMYDIISSPSKDSTKLTLRLSRVRSSDMDQQEDMISGVENSNVSENDIPFNVQYPGQTSKTPITPQDINRPLNAAQCLSQQEQTAFLPANQVPVLQQNTSVAAKQPQTSVVQNQQQISQQGPIYDEVELDALAEIERIERESAIERERFSKEVQDKDKPLKKRKQDSYPQEAGGATGGNRPASQETGSTGNGSRPALMVSIDLHQAGRVDSQASITQDSDSIKKPEEIKQCNDAPVSVLQEDIVGSLKSTPENHPETPKKKSDPELSKSEMKQSESRLAESKPNENRLVETKSSENKLETKVETQTEELKQNESRTTECKQNESTIVEPKQNENRLSDTKPNDNKQNNGRSETTKSRPETPKQKGESRPETPKQKSDGHPETPKQKGDGRPETPKQKGESRPETPKQKNEGRPETPKHRHDNRRDSGKPSTEKKPEVSKHKQDTKSDSPRLKSERAEALKQRPDGRSVSESLRRDHDNKQKSDDRGESERHRGDQSRVRRPETLRSSSRNEHGIKSDSSKTDKLERKHRHESGDSRERPSSGEQKSRPDSPRVKQGDSNKSRSDKLGFKSPTSKDDKRTEGNKSKVDTNKAHPDNKAEFPSYLLGGRSGALKNFVIPKIKRDKDGNVTQETKKMEMKGEPKDKVEKIGLVEDLNKGAKPVVVLQKLSLDDVQKLIKDREDKSRSSLKPIKNKPSKSNKGSIDQSVLKELPPELLAEIESTMPLCERVKMNKRKRSTVNEKPKYAEISSDEDNDSDEAFESSRKRHKKDDDKAWEYEERDRRSSGDHRRSGHSHEGRRSSGGGRYRNRSPSDSDMEDYSPPPSLSEVARKMKKKEKQKKRKAYEPKLTPEEMMDSSTFKRFTASIENILDNLEDMDFTAFGDDDEIPQELLLGKHQLNELGSESAKIKAMGIMDKLSTDKTVKVLNILEKNIQDGSKLSTLLNHNNDTEEEERLWRDLIMERVTKSADACLTTINIMTSPNMPKAVYIEDVIERVIQYTKFHLQNTLYPQYDPVYRLDPHGGGLLSSKAKRAKCSTHKQRVIVMLYNKVCDIVSSLSELLEIQLLTDTTILQVSSMGITPFFVENVSELQLCAIKLVTAVFSRYEKHRQLILEEIFTSLARLPTSKRSLRNFRLNSSDMDGEPMYIQMVTALVLQLIQCVVHLPSSEKDSNAEEDSNKKIDQDVVITNSYETAMRTAQNFLSIFLKKCGSKQGEEDYRPLFENFVQDLLSTVNKPEWPAAELLLSLLGRLLVHQFSNKSTEMALRVASLDYLGTVAARLRKDAVTSKMDQGSIERILKQVSGGEDEIQQLQKALLDYLDENTETDPSLVFSRKFYIAQWFRDTTLETEKAMKSQKDEESSEGTHHAKEIETTGQIMHRAENRKKFLRSIIKTTPSQFSTLKMNSDTVDYDDACLIVRYLASMRPFAQSFDIYLTQILRVLGENAIAVRTKAMKCLSEVVAVDPSILARLDMQRGVHGRLMDNSTSVREAAVELLGRFVLCRPQLAEQYYDMLIERILDTGISVRKRVIKILRDICIEQPTFPKITEMCVKMIRRVNDEEGIKKLVNETFQKLWFTPTPHNDKEAMTRKILNITDVVAACRDTGYDWFEQLLQNLLKSEEDSSYKPVKKACTQLVDNLVEHILKYEESLADSDNKGVNSGRLVACITTLFLFSKIRPQLMVKHAMTMQPYLTTKCSTQNDFMVICNVAKILELVVPLMEHPSETFLATIEEDLMKLIIKYGMTVVQHCVSCLGAVVNKVTQNFKFVWACFNRYYGAISKLKSQHQEDPNNTSLLTNKPALLRSLFTVGALCRHFDFDLEDFKGNSKVNIKDKVLELLMYFTKHSDEEVQTKAIIGLGFAFIQHPSLMFEQEVKNLYNNILSDKNSSVNLKIQVLKNLQTYLQEEDTRMQQADRDWKKVAKQEDLKEMGDVSSGMSSSIMQLYLKQVLEAFFHTQSSVRHFALNVIALTLNQGLIHPVQCVPYLIAMGTDPEPAMRNKADQQLVEIDKKYAGFIHMKAVAGMKMSYQVQQAINTCLKDPVRGFRQDESSSALCSHLYSMIRGNRQHRRAFLISLLNLFDDTAKTDVTMLLYIADNLACFPYQTQEEPLFIMHHIDITLSVSGSNLLQSFKESMVKDKRKERKSSPSKENESSDSEEEVSRPRKSRKRVDSDSDSDSEDDINSVMKCLPENSAPLIEFANVSQGILLLLMLKQHLKNLCGFSDSKIQKYSPSESAKVYDKAINRKTGVHFHPKQTLDFLRSDMANSKITEEVKRSIVKQYLDFKLLMEHLDPDEEEEEGEVSASTNARNKAITSLLGGGSPKNNTAAETEDDESDGEDRGGGTSGSLRRSKRNSDSTELAAQMNESVDVMDVIAICCPKYKDRPQIARVVQKTSSGFSVQWMAGSYSGSWTEAKRRDGRKLVPWVDTIKESDIIYKKIALTSANKLTNKVVQTLRSLYAAKDGTSS

SEQ ID NO: 30989 - protein, 2697 aa, Homo sapiens
MNGDMPHVPITTLAGIASLTDLLNQLPLPSPLPATTTKSLLFNARIAEEVNCLLACRDDNLVSQLVHSLNQVSTDHIELKDNLGSDDPEGDIPVLLQAVLARSPNVFREKSMQNRYVQSGMMMSQYKLSQNSMHSSPASSNYQQTTISHSPSSRFVPPQTSSGNRFMPQQNSPVPSPYAPQSPAGYMPYSHPSSYTTHPQMQQASVSSPIVAGGLRNIHDNKVSGPLSGNSANHHADNPRHGSSEDYLHMVHRLSSDDGDSSTMRNAASFPLRSPQPVCSPAGSEGTPKGSRPPLILQSQSLPCSSPRDVPPDILLDSPERKQKKQKKMKLGKDEKEQSEKAAMYDIISSPSKDSTKLTLRLSRVRSSDMDQQEDMISGVENSNVSENDIPFNVQYPGQTSKTPITPQDINRPLNAAQCLSQQEQTAFLPANQVPVLQQNTSVAAKQPQTSVVQNQQQISQQGPIYDEVELDALAEIERIERESAIERERFSKEVQDKDKPLKKRKQDSYPQEAGGATGGNRPASQETGSTGNGSRPALMVSIDLHQAGRVDSQASITQDSDSIKKPEEIKQCNDAPVSVLQEDIVGSLKSTPENHPETPKKKSDPELSKSEMKQSESRLAESKPNENRLVETKSSENKLETKVETQTEELKQNESRTTECKQNESTIVEPKQNENRLSDTKPNDNKQNNGRSETTKSRPETPKQKGESRPETPKQKSDGHPETPKQKGDGRPETPKQKGESRPETPKQKNEGRPETPKHRHDNRRDSGKPSTEKKPEVSKHKQDTKSDSPRLKSERAEALKQRPDGRSVSESLRRDHDNKQKSDDRGESERHRGDQSRVRRPETLRSSSRNEHGIKSDSSKTDKLERKHRHESGDSRERPSSGEQKSRPDSPRVKQGDSNKSRSDKLGFKSPTSKDDKRTEGNKSKVDTNKAHPDNKAEFPSYLLGGRSGALKNFVIPKIKRDKDGNVTQETKKMEMKGEPKDKVEKIGLVEDLNKGAKPVVVLQKLSLDDVQKLIKDREDKSRSSLKPIKNKPSKSNKGSIDQSVLKELPPELLAEIESTMPLCERVKMNKRKRSTVNEKPKYAEISSDEDNDSDEAFESSRKRHKKDDDKAWEYEERDRRSSGDHRRSGHSHEGRRSSGGGRYRNRSPSDSDMEDYSPPPSLSEVARKMKKKEKQKKRKAYEPKLTPEEMMDSSTFKRFTASIENILDNLEDMDFTAFGDDDEIPQELLLGKHQLNELGSESAKIKAMGIMDKLSTDKTVKVLNILEKNIQDGSKLSTLLNHNNDTEEEERLWRDLIMERVTKSADACLTTINIMTSPNMPKAVYIEDVIERVIQYTKFHLQNTLYPQYDPVYRLDPHGGGLLSSKAKRAKCSTHKQRVIVMLYNKVCDIVSSLSELLEIQLLTDTTILQVSSMGITPFFVENVSELQLCAIKLVTAVFSRYEKHRQLILEEIFTSLARLPTSKRSLRNFRLNSSDMDGEPMYIQMVTALVLQLIQCVVHLPSSEKDSNAEEDSNKKIDQDVVITNSYETAMRTAQNFLSIFLKKCGSKQGEEDYRPLFENFVQDLLSTVNKPEWPAAELLLSLLGRLLVHQFSNKSTEMALRVASLDYLGTVAARLRKDAVTSKMDQGSIERILKQVSGGEDEIQQLQKALLDYLDENTETDPSLVFSRKFYIAQWFRDTTLETEKAMKSQKDEESSEGTHHAKEIETTGQIMHRAENRKKFLRSIIKTTPSQFSTLKMNSDTVDYDDACLIVRYLASMRPFAQSFDIYLTQILRVLGENAIAVRTKAMKCLSEVVAVDPSILARLDMQRGVHGRLMDNSTSVREAAVELLGRFVLCRPQLAEQYYDMLIERILDTGISVRKRVIKILRDICIEQPTFPKITEMCVKMIRRVNDEEGIKKLVNETFQKLWFTPTPHNDKEAMTRKILNITDVVAACRDTGYDWFEQLLQNLLKSEEDSSYKPVKKACTQLVDNLVEHILKYEESLADSDNKGVNSGRLVACITTLFLFSKIRPQLMVKHAMTMQPYLTTKCSTQNDFMVICNVAKILELVVPLMEHPSETFLATIEEDLMKLIIKYGMTVVQHCVSCLGAVVNKVTQNFKFVWACFNRYYGAISKLKSQHQEDPNNTSLLTNKPALLRSLFTVGALCRHFDFDLEDFKGNSKVNIKDKVLELLMYFTKHSDEEVQTKAIIGLGFAFIQHPSLMFEQEVKNLYNNILSDKNSSVNLKIQVLKNLQTYLQEEDTRMQQADRDWKKVAKQEDLKEMGDVSSGMSSSIMQLYLKQVLEAFFHTQSSVRHFALNVIALTLNQGLIHPVQCVPYLIAMGTDPEPAMRNKADQQLVEIDKKYAGFIHMKAVAGMKMSYQVQQAINTCLKDPVRGFRQDESSSALCSHLYSMIRGNRQHRRAFLISLLNLFDDTAKTDVTMLLYIADNLACFPYQTQEEPLFIMHHIDITLSVSGSNLLQSFKESMVKDKRKERKSSPSKENESSDSEEEVSRPRKSRKRVDSDSDSDSEDDINSVMKCLPENSAPLIEFANVSQGILLLLMLKQHLKNLCGFSDSKIQKYSPSESAKVYDKAINRKTGVHFHPKQTLDFLRSDMANSKITEEVKRSIVKQYLDFKLLMEHLDPDEEEEEGEVSASTNARNKAITSLLGGGSPKNNTAAETEDDESDGEDRGGGTSGVRRRRSQRISQRIT

SEQ ID NO: 30990 - protein, 1101 aa, Homo sapiens
MNGDMPHVPITTLAGIASLTDLLNQLPLPSPLPATTTKSLLFNARIAEEVNCLLACRDDNLVSQLVHSLNQVSTDHIELKDNLGSDDPEGDIPVLLQAVLARSPNVFREKSMQNRYVQSGMMMSQYKLSQNSMHSSPASSNYQQTTISHSPSSRFVPPQTSSGNRFMPQQNSPVPSPYAPQSPAGYMPYSHPSSYTTHPQMQQASVSSPIVAGGLRNIHDNKVSGPLSGNSANHHADNPRHGSSEDYLHMVHRLSSDDGDSSTMRNAASFPLRSPQPVCSPAGSEGTPKGSRPPLILQSQSLPCSSPRDVPPDILLDSPERKQKKQKKMKLGKDEKEQSEKAAMYDIISSPSKDSTKLTLRLSRVRSSDMDQQEDMISGVENSNVSENDIPFNVQYPGQTSKTPITPQDINRPLNAAQCLSQQEQTAFLPANQVPVLQQNTSVAAKQPQTSVVQNQQQISQQGPIYDEVELDALAEIERIERESAIERERFSKEVQDKDKPLKKRKQDSYPQEAGGATGGNRPASQETGSTGNGSRPALMVSIDLHQAGRVDSQASITQDSDSIKKPEEIKQCNDAPVSVLQEDIVGSLKSTPENHPETPKKKSDPELSKSEMKQSESRLAESKPNENRLVETKSSENKLETKVETQTEELKQNESRTTECKQNESTIVEPKQNENRLSDTKPNDNKQNNGRSETTKSRPETPKQKGESRPETPKQKSDGHPETPKQKGDGRPETPKQKGESRPETPKQKNEGRPETPKHRHDNRRDSGKPSTEKKPEVSKHKQDTKSDSPRLKSERAEALKQRPDGRSVSESLRRDHDNKQKSDDRGESERHRGDQSRVRRPETLRSSSRNEHGIKSDSSKTDKLERKHRHESGDSRERPSSGEQKSRPDSPRVKQGDSNKSRSDKLGFKSPTSKDDKRTEGNKSKVDTNKAHPDNKAEFPSYLLGGRSGALKNFVIPKIKRDKDGNVTQETKKMEMKGEPKDKVEKIGLVEDLNKGAKPVVVLQKLSLDDVQKLIKDREDKSRSSLKPIKNKPSKSNKGSIDQSVLKELPPELLAEIESTMPLCERVKMNKRKRSTVNEKPKYAEISSDEDNDSDEAFE

SEQ ID NO: 30991 - protein, 698 aa, Homo sapiens
MLPARLPFRLLSLFLRGSAPTAARHGLREPLLERRCAAASSFQHSSSLGRELPYDPVDTEGFGEGGDMQERFLFPEYILDPEPQPTREKQLQELQQQQEEEERQRQQRREERRQQNLRARSREHPVVGHPDPALPPSGVNCSGCGAELHCQDAGVPGYLPREKFLRTAEADGGLARTVCQRCWLLSHHRRALRLQVSREQYLELVSAALRRPGPSLVLYMVDLLDLPDALLPDLPALVGPKQLIVLGNKVDLLPQDAPGYRQRLRERLWEDCARAGLLLAPGHQGPQRPVKDEPQDGENPNPPNWSRTVVRDVRLISAKTGYGVEELISALQRSWRYRGDVYLVGATNAGKSTLFNTLLESDYCTAKGSEAIDRATISPWPGTTLNLLKFPICNPTPYRMFKRHQRLKKDSTQAEEDLSEQEQNQLNVLKKHGYVVGRVGRTFLYSEEQKDNIPFEFDADSLAFDMENDPVMGTHKSTKQVELTAQDVKDAHWFYDTPGITKENCILNLLTEKEVNIVLPTQSIVPRTFVLKPGMVLFLGAIGRIDFLQGNQSAWFTVVASNILPVHITSLDRADALYQKHAGHTLLQIPMGGKERMAGFPPLVAEDIMLKEGLGASEAVADIKFSSAGWVSVTPNFKDRLHLRGYTPEGTVLTVRPPLLPYIVNIKGQRIKKSVAYKTKKPPSLMYNVRKKKGKINV

SEQ ID NO: 30992 - protein, 574 aa, Homo sapiens
MGNNFSSIPSLPRGNPSRAPRGHPQNLKDSIGGPFPVTSHRCHHKQKHCPAVLPSGGLPATPLLFHPHTKGSQILMDLSHKAVKRQASFCNAITFSNRPVLIYEQVRLKITKKQCCWSGALRLGFTSKDPSRIHPDSLPKYACPDLVSQSGFWAKALPEEFANEGNIIAFWVDKKGRVFHRINDSAVMLFFSGVRTADPLWALVDVYGLTRGVQLLDSELVLPDCLRPRSFTALRRPSLRREADDARLSVSLCDLNVPGADGDEAAPAAGCPIPQNSLNSQHSRALPAQLDGDLRFHALRAGAHVRILDEQTVARVEHGRDERALVFTSRPVRVAETIFVKVTRSGGARPGALSFGVTTCDPGTLRPADLPFSPEALVDRKEFWAVCRVPGPLHSGDILGLVVNADGELHLSHNGAAAGMQLCVDASQPLWMLFGLHGTITQIRILGSTILAERGIPSLPCSPASTPTSPSALGSRLSDPLLSTCSSGPLGSSAGGTAPNSPVSLPESPVTPGLGQWSDECTICYEHAVDTVIYTCGHMCLCYACGLRLKKALHACCPICRRPIKDIIKTYRSS

SEQ ID NO: 30993 - protein, 557 aa, Homo sapiens
MGGQITRSTLHDSIGGPFPVTSHRCHHKQKHCPAVLPSGGLPATPLLFHPHTKGSQILMDLSHKAVKRQASFCNAITFSNRPVLIYEQVRLKITKKQCCWSGALRLGFTSKDPSRIHPDSLPKYACPDLVSQSGFWAKALPEEFANEGNIIAFWVDKKGRVFHRINDSAVMLFFSGVRTADPLWALVDVYGLTRGVQLLDSELVLPDCLRPRSFTALRRPSLRREADDARLSVSLCDLNVPGADGDEAAPAAGCPIPQNSLNSQHSRALPAQLDGDLRFHALRAGAHVRILDEQTVARVEHGRDERALVFTSRPVRVAETIFVKVTRSGGARPGALSFGVTTCDPGTLRPADLPFSPEALVDRKEFWAVCRVPGPLHSGDILGLVVNADGELHLSHNGAAAGMQLCVDASQPLWMLFGLHGTITQIRILGSTILAERGIPSLPCSPASTPTSPSALGSRLSDPLLSTCSSGPLGSSAGGTAPNSPVSLPESPVTPGLGQWSDECTICYEHAVDTVIYTCGHMCLCYACGLRLKKALHACCPICRRPIKDIIKTYRSS

SEQ ID NO: 30994 - protein, 1139 aa, Homo sapiens
MQTPEVPAERSPRRRSISGTSTSEKPNSMDTANTSPFKVPGFFSKRLKGSIKRTKSQSKLDRNTSFRLPSLRSTDDRSRGLPKLKESRSHESLLSPCSTVECLDLGRGEPVSVKPLHSSILGQDFCFEVTYLSGSKCFSCNSASERDKWMENLRRTVQPNKDNCRRAENVLRLWIIEAKDLAPKKKYFCELCLDDTLFARTTSKTKADNIFWGEHFEFFSLPPLHSITVHIYKDVEKKKKKDKNNYVGLVNIPTASVTGRQFVEKWYPVSTPTPNKGKTGGPSIRIKSRFQTITILPMEQYKEFAEFVTSNYTMLCSVLEPVISVRNKEELACALVHILQSTGRAKDFLTDLVMSEVDRCGEHDVLIFRENTIATKSIEEYLKLVGQQYLHDALGEFIKALYESDENCEVDPSKCSSSELIDHQSNLKMCCELAFCKIINSYCVFPRELKEVFASWKQQCLNRGKQDISERLISASLFLRFLCPAIMSPSLFNLMQEYPDDRTSRTLTLIAKVIQNLANFAKFGNKEEYMAFMNDFLEHEWGGMKRFLLEISNPDTISNTPGFDGYIDLGRELSVLHSLLWEVVSQLDKGENSFLQATVAKLGPLPRVLADITKSLTNPTPIQQQLRRFTEHNSSPNVSGSLSSGLQKIFEDPTDSDLHKLKSPSQDNTDSYFRGKTLLLVQQASSQSMTYSEKDERESSLPNGRSVSLMDLQDTHAAQVEHASVMLDVPIRLTGSQLSITQVASIKQLRETQSTPQSAPQVRRPLHPALNQPGGLQPLSFQNPVYHLNNPIPAMPKASIDSSLENLSTASSRSQSNSEDFKLSGPSNSSMEDFTKRSTQSEDFSRRHTVPDRHIPLALPRQNSTGQAQIRKVDQGGLGARAKAPPSLPHSASLRSTGSMSVVSAALVAEPVQNGSRSRQQSSSSRESPVPKVRAIQRQQTQQVQSPVDSATMSPVERTAAWVLNNGQYEEDVEETEQNLDEAKHAEKYEQEITKLKERLRVSSRRLEEYERRLLVQEQQMQKLLLEYKARLEDSEERLRRQQEEKDSQMKSIISRLMAVEEELKKDHAEMQAVIDAKQKIIDAQEKRIVSLDSANTRLMSALTQVKERYSMQVRNGISPTNPTKLSITENGEFKNSSC

SEQ ID NO: 30995 - protein, 1280 aa, Homo sapiens
MELSPSSGGAAEALSWPEMFPALESDSPLPPEDLDAVVPVSGAVAGGMLDRILLESVCQQQSWVRVYDVKGPPTHRLSCGQSPYTETTTWERKYCILTDSQLVLLNKEKEIPVEGGQEQQTDSTKGRCLRRTVSVPSEGQFPEYPPEGATKLEVPAERSPRRRSISGTSTSEKPNSMDTANTSPFKVPGFFSKRLKGSIKRTKSQSKLDRNTSFRLPSLRSTDDRSRGLPKLKESRSHESLLSPCSTVECLDLGRGEPVSVKPLHSSILGQDFCFEVTYLSGSKCFSCNSASERDKWMENLRRTVQPNKDNCRRAENVLRLWIIEAKDLAPKKKYFCELCLDDTLFARTTSKTKADNIFWGEHFEFFSLPPLHSITVHIYKDVEKKKKKDKNNYVGLVNIPTASVTGRQFVEKWYPVSTPTPNKGKTGGPSIRIKSRFQTITILPMEQYKEFAEFVTSNYTMLCSVLEPVISVRNKEELACALVHILQSTGRAKDFLTDLVMSEVDRCGEHDVLIFRENTIATKSIEEYLKLVGQQYLHDALGEFIKALYESDENCEVDPSKCSSSELIDHQSNLKMCCELAFCKIINSYCVFPRELKEVFASWKQQCLNRGKQDISERLISASLFLRFLCPAIMSPSLFNLMQEYPDDRTSRTLTLIAKVIQNLANFAKFGNKEEYMAFMNDFLEHEWGGMKRFLLEISNPDTISNTPGFDGYIDLGRELSVLHSLLWEVVSQLDKATVAKLGPLPRVLADITKSLTNPTPIQQQLRRFTEHNSSPNVSGSLSSGLQKIFEDPTDSDLHKLKSPSQDNTDSYFRGKTLLLVQQASSQSMTYSEKDERESSLPNGRSVSLMDLQDTHAAQVEHASVMLDVPIRLTGSQLSITQVASIKQLRETQSTPQSAPQVRRPLHPALNQPGGLQPLSFQNPVYHLNNPIPAMPKASIDSSLENLSTASSRSQSNSEDFKLSGPSNSSMEDFTKRSTQSEDFSRRHTVPDRHIPLALPRQNSTGQAQIRKVDQGGLGARAKAPPSLPHSASLRSTGSMSVVSAALVAEPVQNGSRSRQQSSSSRESPVPKVRAIQRQQTQQVQSPVDSATMSPVERTAAWVLNNGQYEEDVEETEQNLDEAKHAEKYEQEITKLKERLRVSSRRLEEYERRLLVQEQQMQKLLLEYKARLEDSEERLRRQQEEKDSQMKSIISRLMAVEEELKKDHAEMQAVIDAKQKIIDAQEKRIVSLDSANTRLMSALTQVKERYSMQVRNGISPTNPTKLSITENGEFKNSSC

SEQ ID NO: 30996 - protein, 178 aa, Homo sapiens
MPKAKGKTRRQKFGYSVNRKRLNRNARRKAAPRIECSHIRHAWDHAKSVRQNLAEMGLAVDPNRAVPLRKRKVKAMEVDIEERPKELVRKPYVLNDLEAEASLPEKKGNTLSRDLIDYVRYMVENHGEDYKAMARDEKNYYQDTPKQIRSKINVYKRFYPAEWQDFLDSLQKRKMEVE

SEQ ID NO: 30997 - protein, 236 aa, Homo sapiens
MPKAKGKTRRQKFGYSVNRKRLNRNARRKAAPRIECSHIRHAWDHAKSVRQNLAEMGLAVDPNRAVPLRKRKVKAMEVDIEERPKELVRKPYVLNDLEAEASLPEKKGNTLSRDLIDYVRYMVENHGEDYKSGKTSSILCRRGRWRWSDWFTSQLPQAEASPGPVKLEPGCKARRCCVAPEELARSHGIRRLHTRAHSPLWGRNCSQRLQFIFIWGFTEKPEPAVFRVGDVNIVCT

SEQ ID NO: 30998 - protein, 232 aa, Homo sapiens
MPKAKGKTRRQKFGYSVNRKRLNRNARRKAAPRIECSHIRHAWDHAKSVRQNLAEMGLAVDPNRAVPLRKRKVKAMEVDIEERPKELVRKPYVLNDLEAEASLPEKKGNTLSRDLIDYVRYMVENHGEDYKQSGKTSSILCRRGRWRWSDWFTSQLPQAEASPGPVKLEPGCKARRCCVAPEELARSHGIRRLHTHVHTPRSGEGTVLRGSNLYSSGGSRKSQNLLFSGWVM

SEQ ID NO: 30999 - protein, 1247 aa, Homo sapiens
MLASSSRIRAAWTRALLLPLLLAGPVGCLSRQELFPFGPGQGDLELEDGDDFVSPALELSGALRFYDRSDIDAVYVTTNGIIATSEPPAKESHPGLFPPTFGAVAPFLADLDTTDGLGKVYYREDLSPSITQRAAECVHRGFPEISFQPSSAVVVTWESVAPYQGPSRDPDQKGKRNTFQAVLASSDSSSYAIFLYPEDGLQFHTTFSKKENNQVPAVVAFSQGSVGFLWKSNGAYNIFANDRESVENLAKSSNSGQQGVWVFEIGSPATTNGVVPADVILGTEDGAEYDDEDEDYDLATTRLGLEDVGTTPFSYKALRRGGADTYSVPSVLSPRRAATERPLGPPTERTRSFQLAVETFHQQHPQVIDVDEVEETGVVFSYNTDSRQTCANNRHQCSVHAECRDYATGFCCSCVAGYTGNGRQCVAEGSPQRVNGKVKGRIFVGSSQVPIVFENTDLHSYVVMNHGRSYTAISTIPETVGYSLLPLAPVGGIIGWMFAVEQDGFKNGFSITGGEFTRQAEVTFVGHPGNLVIKQRFSGIDEHGHLTIDTELEGRVPQIPFGSSVHIEPYTELYHYSTSVITSSSTREYTVTEPERDGASPSRIYTYQWRQTITFQECVHDDSRPALPSTQQLSVDSVFVLYNQEEKILRYALSNSIGPVREGSPDALQNPCYIGTHGCDTNAACRPGPRTQFTCECSIGFRGDGRTCYDIDECSEQPSVCGSHTICNNHPGTFRCECVEGYQFSDEGTCVAVVDQRPINYCETGLHNCDIPQRAQCIYTGGSSYTCSCLPGFSGDGQACQDVDECQPSRCHPDAFCYNTPGSFTCQCKPGYQGDGFRCVPGEVEKTRCQHEREHILGAAGATDPQRPIPPGLFVPECDAHGHYAPTQCHGSTGYCWCVDRDGREVEGTRTRPGMTPPCLSTVAPPIHQGPAVPTAVIPLPPGTHLLFAQTGKIERLPLEGNTMRKTEAKAFLHVPAKVIIGLAFDCVDKMVYWTDITEPSIGRASLHGGEPTTIIRQDLGSPEGIAVDHLGRNIFWTDSNLDRIEVAKLDGTQRRVLFETDLVNPRGIVTDSVRGNLYWTDWNRDNPKIETSYMDGTNRRILVQDDLGLPNGLTFDAFSSQLCWVDAGTNRAECLNPSQPSRRKALEGLQYPFAVTSYGKNLYFTDWKMNSVVALDLAISKETDAFQPHKQTRLYGITTALSQCPQGHNYCSVNNGGCTHLCLATPGSRTCRCPDNTLGVDCIEQK

SEQ ID NO: 31000 - protein, 1114 aa, Homo sapiens
MLASSSRIRAAWTRALLLPLLLAGPVGCLSRQELFPFGPGQGDLELEDGDDFVSPALELSGALRFYDRSDIDAVYVTTNGIIATSEPPAKESHPGLFPPTFGAVAPFLADLDTTDGLGKVYYREDLSPSITQRAAECVHRGFPEISFQPSSAVVVTWESVAPYQGPSRDPDQKGKRNTFQAVLASSDSSSYAIFLYPEDGLQFHTTFSKKENNQVPAVVAFSQGSVGFLWKSNGAYNIFANDRESVENLAKSSNSGQQGVWVFEIGSPATTNGVVPADVILGTEDGAEYDDEDEDYDLATTRLGLEDVGTTPFSYKALRRGGADTYSVPSVLSPRRAATERPLGPPTERTRSFQLAVETFHQQHPQVIDVDEVEETGVVFSYNTDSRQTCANNRHQCSVHAECRDYATGFCCSCVAGYTGNGRQCVAEGSPQRVNGKVKGRIFVGSSQVPIVFENTDLHSYVVMNHGRSYTAISTIPETVGYSLLPLAPVGGIIGWMFAVEQDGFKNGFSITGGEFTRQAEVTFVGHPGNLVIKQRFSGIDEHGHLTIDTELEGRVPQIPFGSSVHIEPYTELYHYSTSVITSSSTREYTVTEPERDGASPSRIYTYQWRQTITFQECVHDDSRPALPSTQQLSVDSVFVLYNQEEKILRYALSNSIGPVREGSPDALQNPCYIGTHGCDTNAACRPGPRTQFTCECSIGFRGDGRTCYEVEKTRCQHEREHILGAAGATDPQRPIPPGLFVPECDAHGHYAPTQCHGSTGYCWCVDRDGREVEGTRTRPGMTPPCLSTVAPPIHQGPAVPTAVIPLPPGTHLLFAQTGKIERLPLEGNTMRKTEAKAFLHVPAKVIIGLAFDCVDKMVYWTDITEPSIGRASLHGGEPTTIIRQDLGSPEGIAVDHLGRNIFWTDSNLDRIEVAKLDGTQRRVLFETDLVNPRGIVTDSVRGNLYWTDWNRDNPKIETSYMDGTNRRILVQDDLGLPNGLTFDAFSSQLCWVDAGTNRAECLNPSQPSRRKALEGLQYPFAVTSYGKNLYFTDWKMNSVVALDLAISKETDAFQPHKQTRLYGITTALSQCPQGHNYCSVNNGGCTHLCLATPGSRTCRCPDNTLGVDCIEQK

SEQ ID NO: 31001 - protein, 434 aa, Homo sapiens
MDSVEKGAATSVSNPRGRPSRGRPPKLQRNSRGGQGRGVEKPPHLAALILARGGSKGIPLKNIKHLAGVPLIGWVLRAALDSGAFQSVWVSTDHDEIENVAKQFGAQVHRRSSEVSKDSSTSLDAIIEFLNYHNEVDIVGNIQATSPCLHPTDLQKVAEMIREEGYDSVFSVVRRHQFRWSEIQKGVREVTEPLNLNPAKRPRRQDWDGELYENGSFYFAKRHLIEMGYLQGGKMAYYEMRAEHSVDIDVDIDWPIAEQRVLRYGYFGKEKLKEIKLLVCNIDGCLTNGHIYVSGDQKEIISYDVKDAIGISLLKKSGIEVRLISERACSKQTLSSLKLDCKMEVSVSDKLAVVDEWRKEMGLCWKEVAYLGNEVSDEECLKRVGLSGAPADACSTAQKAVGYICKCNGGRGAIREFAEHICLLMEKVNNSCQK

SEQ ID NO: 31002 - protein, 263 aa, Homo sapiens
MDSVEKGAATSVSNPRGRPSRGRPPKLQRNSRGGQGRGVEKPPHLAALILARGGSKGIPLKNIKHLAGVPLIGWVLRAALDSGAFQSVWVSTDHDEIENVAKQFGAQVHRRSSEVSKDSSTSLDAIIEFLNYHNEVDIVGNIQATSPCLHPTDLQKVAEMIREEGYDSVFSVVRRHQFRWSEIQKGVREVTEPLNLNPAKRPRRQDWDGELYENGSFYFAKRHLIEMGYLQGGKMAYYEMRAEHSVDIDVDIDWPIAEQRVLR

SEQ ID NO: 31003 - protein, 502 aa, Homo sapiens
MAAPCEGQAFAVGVEKNWGAVVRSPEGTPQKIRQLIDEGIAPEEGGVDAKDTSATSQSVNGSPQAEQPSLESTSKEAFFSRVETFSSLKWAGKPFELSPLVCAKYGWVTVECDMLKCSSCQAFLCASLQPAFDFDRYKQRCAELKKALCTAHEKFCFWPDSPSPDRFGMLPLDEPAILVSEFLDRFQSLCHLDLQLPSLRPEDLKTMCLTEDKISLLLHLLEDELDHRTDERKTTIKLGSDIQVHVTACILSVCGWACSSSLESMQLSLITCSQCMRKVGLWGFQQIESSMTDLDASFGLTSSPIPGLEGRPERLPLVPESPRRMMTRSQDATFSPGSEQAEKSPGPIVSRTRSWDSSSPVDRPEPEAASPTTRTRPVTRSMGTGDTPGLEVPSSPLRKAKRARLCSSSSSDTSSRSFFDPTSQHRDWCPWVNITLGKESRENGGTEPDASAPAEPGWKAVLTILLAHKQSSQPAETDSMSLSEKSRKVFRIFRQWESLCSC

SEQ ID NO: 31004 - protein, 481 aa, Homo sapiens
MRGLPRKREAWTQPHPLEALYESLRVLEKDTSATSQSVNGSPQAEQPSLESTSKEAFFSRVETFSSLKWAGKPFELSPLVCAKYGWVTVECDMLKCSSCQAFLCASLQPAFDFDRYKQRCAELKKALCTAHEKFCFWPDSPSPDRFGMLPLDEPAILVSEFLDRFQSLCHLDLQLPSLRPEDLKTMCLTEDKISLLLHLLEDELDHRTDERKTTIKLGSDIQVHVTACILSVCGWACSSSLESMQLSLITCSQCMRKVGLWGFQQIESSMTDLDASFGLTSSPIPGLEGRPERLPLVPESPRRMMTRSQDATFSPGSEQAEKSPGPIVSRTRSWDSSSPVDRPEPEAASPTTRTRPVTRSMGTGDTPGLEVPSSPLRKAKRARLCSSSSSDTSSRSFFDPTSQHRDWCPWVNITLGKESRENGGTEPDASAPAEPGWKAVLTILLAHKQSSQPAETDSMSLSEKSRKVFRIFRQWESLCSC

SEQ ID NO: 31005 - protein, 431 aa, Homo sapiens
MAAPCEGQAFAVGVEKNWGAVVRSPEGTPQKIRQLIDEGIAPEEGGVDAKDTSATSQSVNGSPQAEQPSLESTSKEAFFSRVETFSSLKWAGKPFELSPLVCAKYGWVTVECDMLKCSSCQAFLCASLQPAFDFDRYKQRCAELKKALCTAHEKFCFWPDSPSPDRFGMLPLDEPAILVSEFLDRFQSLCHLDLQLPSLRPEDLKTMCLTEDKISLLLHLLEDELDHRTDERKTTIKLGSDIQVHVTACILSVCGWACSSSLESMQLSLITCSQCMRKVGLWGFQQIESSMTDLDASFGLTSSPIPGLEGRPERLPLVPESPRRMMTRSQDATFSPGSEQDTSSRSFFDPTSQHRDWCPWVNITLGKESRENGGTEPDASAPAEPGWKAVLTILLAHKQSSQPAETDSMSLSEKSRKVFRIFRQWESLCSC

SEQ ID NO: 31006 - protein, 70 aa, Homo sapiens
MWFEILPGLSVMGVCLLIPGLATAYIHRFTNGGKEKRVAHFGYHWSLMERDRRISGVDRYYVSKGLENID

SEQ ID NO: 31007 - protein, 431 aa, Homo sapiens
MFHSPRRLCSALLQRDAPGLRRLPAPGLRRPLSPPAAVPRPASPRLLAAASAASGAARSCSRTVCSMGTGTSRLYSALAKTLNSSAASQHPEYLVSPDPEHLEPIDPKELLEECRAVLHTRPPRFQRDFVDLRTDCPSTHPPIRVMQWNILAQALGEGKDNFVQCPVEALKWEERKCLILEEILAYQPDILCLQEVDHYFDTFQPLLSRLGYQGTFFPKPWSPCLDVEHNNGPDGCALFFLQNRFKLVNSANIRLTAMTLKTNQVAIAQTLECKESGRQFCIAVTHLKARTGWERFRSAQGCDLLQNLQNITQGAKIPLIVCGDFNAEPTEEVYKHFASSSLNLNSAYKLLSADGQSEPPYTTWKIRTSGECRHTLDYIWYSKHALNVRSALDLLTEEQIGPNRLPSFNYPSDHLSLVCDFSFTEESDGLS

SEQ ID NO: 31008 - protein, 113 aa, Homo sapiens
MASATRLIQRLRNWASGHDLQGKLQLRYQEISKRTQPPPKLPVGPSHKLSNNYYCTRDGRRESVPPSIIMSSQKALVSGKPAESSAVAATEKKAVTPAPPIKRWELSSDQPYL

SEQ ID NO: 31009 - protein, 503 aa, Homo sapiens
MEYMAESTDRSPGHILCCECGVPISPNPANICVACLRSKVDISQGIPKQVSISFCKQCQRYFQPPGTWIQCALESRELLALCLKKIKAPLSKVRLVDAGFVWTEPHSKRLKVKLTIQKEVMNGAILQQVFVVDYVVQSQMCGDCHRVEAKDFWKAVIQVRQKTLHKKTFYYLEQLILKYGMHQNTLRIKEIHDGLDFYYSSKQHAQKMVEFLQCTVPCRYKASQRLISQDIHSNTYNYKSTFSVEIVPICKDNVVCLSPKLAQSLGNMNQICVCIRVTSAIHLIDPNTLQVADIDGSTFWSHPFNSLCHPKQLEEFIVMECSIVQDIKRAAGAGMISKKHTLGEVWVQKTSEMNTDKQYFCRTHLGHLLNPGDLVLGFDLANCNLNDEHVNKMNSDRVPDVVLIKKSYDRTKRQRRRNWKLKELARERENMDTDDERQYQDFLEDLEEDEAIRKNVNIYRDSAIPVESDTDDEGAPRISLAEMLEDLHISQDATGEEGASMLT

SEQ ID NO: 31010 - protein, 943 aa, Homo sapiens; identical to SEQ ID NO: 259

SEQ ID NO: 31011 - protein, 716 aa, Homo sapiens
MPSTSFPVPSKFPLGPAAAVFGRGETLGPAPRAGGTMKSAEEEHYGYASSNVSPALPLPTAHSTLPAPCHNLQTSTPGIIPPADHPSGYGAALDGGPAGYFLSSGHTRPDGAPALESPRIEITSCLGLYHNNNQFFHDVEVEDVLPSSKRSPSTATLSLPSLEAYRDPSCLSPASSLSSRSCNSEASSYESNYSYPYASPQTSPWQSPCVSPKTTDPEEGFPRGLGACTLLGSPRHSPSTSPRASVTEESWLGARSSRPASPCNKRKYSLNGRQPPYSPHHSPTPSPHGSPRVSVTDDSWLGNTTQYTSSAIVAAINALTTDSSLDLGDGVPVKSRKTTLEQPPSVALKVEPVGEDLGSPPPPADFAPEDYSSFQHIRKGGFCDQYLAVPQHPYQWAKPKPLSPTSYMSPTLPALDWQLPSHSGPYELRIEVQPKSHHRAHYETEGSRGAVKASAGGHPIVQLHGYLENEPLMLQLFIGTADDRLLRPHAFYQVHRITGKTVSTTSHEAILSNTKVLEIPLLPENSMRAVIDCAGILKLRNSDIELRKGETDIGRKNTRVRLVFRVHVPQPSGRTLSLQVASNPIECSQRSAQELPLVEKQSTDSYPVVGGKKMVLSGHNFLQDSKVIFVEKAPDGHHVWEMEAKTDRDLCKPNSLVVEIPPFRNQRITSPVHVSFYVCNGKRKRSQYQRFTYLPANGNAIFLTVSREHERVGCFF

SEQ ID NO: 31012 - protein, 703 aa, Homo sapiens
MTGLEDQEFDFEFLFEFNQRDEGAAAAAPEHYGYASSNVSPALPLPTAHSTLPAPCHNLQTSTPGIIPPADHPSGYGAALDGGPAGYFLSSGHTRPDGAPALESPRIEITSCLGLYHNNNQFFHDVEVEDVLPSSKRSPSTATLSLPSLEAYRDPSCLSPASSLSSRSCNSEASSYESNYSYPYASPQTSPWQSPCVSPKTTDPEEGFPRGLGACTLLGSPRHSPSTSPRASVTEESWLGARSSRPASPCNKRKYSLNGRQPPYSPHHSPTPSPHGSPRVSVTDDSWLGNTTQYTSSAIVAAINALTTDSSLDLGDGVPVKSRKTTLEQPPSVALKVEPVGEDLGSPPPPADFAPEDYSSFQHIRKGGFCDQYLAVPQHPYQWAKPKPLSPTSYMSPTLPALDWQLPSHSGPYELRIEVQPKSHHRAHYETEGSRGAVKASAGGHPIVQLHGYLENEPLMLQLFIGTADDRLLRPHAFYQVHRITGKTVSTTSHEAILSNTKVLEIPLLPENSMRAVIDCAGILKLRNSDIELRKGETDIGRKNTRVRLVFRVHVPQPSGRTLSLQVASNPIECSQRSAQELPLVEKQSTDSYPVVGGKKMVLSGHNFLQDSKVIFVEKAPDGHHVWEMEAKTDRDLCKPNSLVVEIPPFRNQRITSPVHVSFYVCNGKRKRSQYQRFTYLPANGNAIFLTVSREHERVGCFF

SEQ ID NO: 31013 - protein, 825 aa, Homo sapiens
MPSTSFPVPSKFPLGPAAAVFGRGETLGPAPRAGGTMKSAEEEHYGYASSNVSPALPLPTAHSTLPAPCHNLQTSTPGIIPPADHPSGYGAALDGGPAGYFLSSGHTRPDGAPALESPRIEITSCLGLYHNNNQFFHDVEVEDVLPSSKRSPSTATLSLPSLEAYRDPSCLSPASSLSSRSCNSEASSYESNYSYPYASPQTSPWQSPCVSPKTTDPEEGFPRGLGACTLLGSPRHSPSTSPRASVTEESWLGARSSRPASPCNKRKYSLNGRQPPYSPHHSPTPSPHGSPRVSVTDDSWLGNTTQYTSSAIVAAINALTTDSSLDLGDGVPVKSRKTTLEQPPSVALKVEPVGEDLGSPPPPADFAPEDYSSFQHIRKGGFCDQYLAVPQHPYQWAKPKPLSPTSYMSPTLPALDWQLPSHSGPYELRIEVQPKSHHRAHYETEGSRGAVKASAGGHPIVQLHGYLENEPLMLQLFIGTADDRLLRPHAFYQVHRITGKTVSTTSHEAILSNTKVLEIPLLPENSMRAVIDCAGILKLRNSDIELRKGETDIGRKNTRVRLVFRVHVPQPSGRTLSLQVASNPIECSQRSAQELPLVEKQSTDSYPVVGGKKMVLSGHNFLQDSKVIFVEKAPDGHHVWEMEAKTDRDLCKPNSLVVEIPPFRNQRITSPVHVSFYVCNGKRKRSQYQRFTYLPANVPIIKTEPTDDYEPAPTCGPVSQGLSPLPRPYYSQQLAMPPDPSSCLVAGFPPCPQRSTLMPAAPGVSPKLHDLSPAAYTKGVASPGHCHLGLPQPAGEAPAVQDVPRPVATHPGSPGQPPPALLPQQ

SEQ ID NO: 31014 - protein, 812 aa, Homo sapiens
MTGLEDQEFDFEFLFEFNQRDEGAAAAAPEHYGYASSNVSPALPLPTAHSTLPAPCHNLQTSTPGIIPPADHPSGYGAALDGGPAGYFLSSGHTRPDGAPALESPRIEITSCLGLYHNNNQFFHDVEVEDVLPSSKRSPSTATLSLPSLEAYRDPSCLSPASSLSSRSCNSEASSYESNYSYPYASPQTSPWQSPCVSPKTTDPEEGFPRGLGACTLLGSPRHSPSTSPRASVTEESWLGARSSRPASPCNKRKYSLNGRQPPYSPHHSPTPSPHGSPRVSVTDDSWLGNTTQYTSSAIVAAINALTTDSSLDLGDGVPVKSRKTTLEQPPSVALKVEPVGEDLGSPPPPADFAPEDYSSFQHIRKGGFCDQYLAVPQHPYQWAKPKPLSPTSYMSPTLPALDWQLPSHSGPYELRIEVQPKSHHRAHYETEGSRGAVKASAGGHPIVQLHGYLENEPLMLQLFIGTADDRLLRPHAFYQVHRITGKTVSTTSHEAILSNTKVLEIPLLPENSMRAVIDCAGILKLRNSDIELRKGETDIGRKNTRVRLVFRVHVPQPSGRTLSLQVASNPIECSQRSAQELPLVEKQSTDSYPVVGGKKMVLSGHNFLQDSKVIFVEKAPDGHHVWEMEAKTDRDLCKPNSLVVEIPPFRNQRITSPVHVSFYVCNGKRKRSQYQRFTYLPANVPIIKTEPTDDYEPAPTCGPVSQGLSPLPRPYYSQQLAMPPDPSSCLVAGFPPCPQRSTLMPAAPGVSPKLHDLSPAAYTKGVASPGHCHLGLPQPAGEAPAVQDVPRPVATHPGSPGQPPPALLPQQ

SEQ ID NO: 31015 - protein, 930 aa, Homo sapiens
MTGLEDQEFDFEFLFEFNQRDEGAAAAAPEHYGYASSNVSPALPLPTAHSTLPAPCHNLQTSTPGIIPPADHPSGYGAALDGGPAGYFLSSGHTRPDGAPALESPRIEITSCLGLYHNNNQFFHDVEVEDVLPSSKRSPSTATLSLPSLEAYRDPSCLSPASSLSSRSCNSEASSYESNYSYPYASPQTSPWQSPCVSPKTTDPEEGFPRGLGACTLLGSPRHSPSTSPRASVTEESWLGARSSRPASPCNKRKYSLNGRQPPYSPHHSPTPSPHGSPRVSVTDDSWLGNTTQYTSSAIVAAINALTTDSSLDLGDGVPVKSRKTTLEQPPSVALKVEPVGEDLGSPPPPADFAPEDYSSFQHIRKGGFCDQYLAVPQHPYQWAKPKPLSPTSYMSPTLPALDWQLPSHSGPYELRIEVQPKSHHRAHYETEGSRGAVKASAGGHPIVQLHGYLENEPLMLQLFIGTADDRLLRPHAFYQVHRITGKTVSTTSHEAILSNTKVLEIPLLPENSMRAVIDCAGILKLRNSDIELRKGETDIGRKNTRVRLVFRVHVPQPSGRTLSLQVASNPIECSQRSAQELPLVEKQSTDSYPVVGGKKMVLSGHNFLQDSKVIFVEKAPDGHHVWEMEAKTDRDLCKPNSLVVEIPPFRNQRITSPVHVSFYVCNGKRKRSQYQRFTYLPANVPIIKTEPTDDYEPAPTCGPVSQGLSPLPRPYYSQQLAMPPDPSSCLVAGFPPCPQRSTLMPAAPGVSPKLHDLSPAAYTKGVASPGHCHLGLPQPAGEAPAVQDVPRPVATHPGSPGQPPPALLPQQVSAPPSSSCPPGLEHSLCPSSPSPPLPPATQEPTCLQPCSPACPPATGRPQHLPSTVRRDESPTAGPRLLPEVHEDGSPNLAPIPVTVKREPEELDQLYLDDVNEIIRNDLSSTSTHS

SEQ ID NO: 31016 - protein, 680 aa, Homo sapiens
MKSAEEEHYGYASSNVSPALPLPTAHSTLPAPCHNLQTSTPGIIPPADHPSGYGAALDGGPAGYFLSSGHTRPDGAPALESPRIEITSCLGLYHNNNQFFHDVEVEDVLPSSKRSPSTATLSLPSLEAYRDPSCLSPASSLSSRSCNSEASSYESNYSYPYASPQTSPWQSPCVSPKTTDPEEGFPRGLGACTLLGSPRHSPSTSPRASVTEESWLGARSSRPASPCNKRKYSLNGRQPPYSPHHSPTPSPHGSPRVSVTDDSWLGNTTQYTSSAIVAAINALTTDSSLDLGDGVPVKSRKTTLEQPPSVALKVEPVGEDLGSPPPPADFAPEDYSSFQHIRKGGFCDQYLAVPQHPYQWAKPKPLSPTSYMSPTLPALDWQLPSHSGPYELRIEVQPKSHHRAHYETEGSRGAVKASAGGHPIVQLHGYLENEPLMLQLFIGTADDRLLRPHAFYQVHRITGKTVSTTSHEAILSNTKVLEIPLLPENSMRAVIDCAGILKLRNSDIELRKGETDIGRKNTRVRLVFRVHVPQPSGRTLSLQVASNPIECSQRSAQELPLVEKQSTDSYPVVGGKKMVLSGHNFLQDSKVIFVEKAPDGHHVWEMEAKTDRDLCKPNSLVVEIPPFRNQRITSPVHVSFYVCNGKRKRSQYQRFTYLPANGNAIFLTVSREHERVGCFF

SEQ ID NO: 31017 - protein, 713 aa, Homo sapiens
MPSTSFPVPSKFPLGPAAAVFGRGETLGPAPRAGGTMKSAEEEHYGYASSNVSPALPLPTAHSTLPAPCHNLQTSTPGIIPPADHPSGYGAALDGGPAGYFLSSGHTRPDGAPALESPRIEITSCLGLYHNNNQFFHDVEVEDVLPSSKRSPSTATLSLPSLEAYRDPSCLSPASSLSSRSCNSEASSYESNYSYPYASPQTSPWQSPCVSPKTTDPEEGFPRGLGACTLLGSPRHSPSTSPRASVTEESWLGARSSRPASPCNKRKYSLNGRQPPYSPHHSPTPSPHGSPRVSVTDDSWLGNTTQYTSSAIVAAINALTTDSSLDLGDGVPVKSRKTTLEQPPSVALKVEPVGEDLGSPPPPADFAPEDYSSFQHIRKGGFCDQYLAVPQHPYQWAKPKPLSPTSYMSPTLPALDWQLPSHSGPYELRIEVQPKSHHRAHYETEGSRGAVKASAGGHPIVQLHGYLENEPLMLQLFIGTADDRLLRPHAFYQVHRITGKTVSTTSHEAILSNTKVLEIPLLPENSMRAVIDCAGILKLRNSDIELRKGETDIGRKNTRVRLVFRVHVPQPSGRTLSLQVASNPIECSQRSAQELPLVEKQSTDSYPVVGGKKMVLSGHNFLQDSKVIFVEKAPDGHHVWEMEAKTDRDLCKPNSLVVEIPPFRNQRITSPVHVSFYVCNGKRKRSQYQRFTYLPANVNEIIRNDLSSTSTHS

SEQ ID NO: 31018 - protein, 700 aa, Homo sapiens
MTGLEDQEFDFEFLFEFNQRDEGAAAAAPEHYGYASSNVSPALPLPTAHSTLPAPCHNLQTSTPGIIPPADHPSGYGAALDGGPAGYFLSSGHTRPDGAPALESPRIEITSCLGLYHNNNQFFHDVEVEDVLPSSKRSPSTATLSLPSLEAYRDPSCLSPASSLSSRSCNSEASSYESNYSYPYASPQTSPWQSPCVSPKTTDPEEGFPRGLGACTLLGSPRHSPSTSPRASVTEESWLGARSSRPASPCNKRKYSLNGRQPPYSPHHSPTPSPHGSPRVSVTDDSWLGNTTQYTSSAIVAAINALTTDSSLDLGDGVPVKSRKTTLEQPPSVALKVEPVGEDLGSPPPPADFAPEDYSSFQHIRKGGFCDQYLAVPQHPYQWAKPKPLSPTSYMSPTLPALDWQLPSHSGPYELRIEVQPKSHHRAHYETEGSRGAVKASAGGHPIVQLHGYLENEPLMLQLFIGTADDRLLRPHAFYQVHRITGKTVSTTSHEAILSNTKVLEIPLLPENSMRAVIDCAGILKLRNSDIELRKGETDIGRKNTRVRLVFRVHVPQPSGRTLSLQVASNPIECSQRSAQELPLVEKQSTDSYPVVGGKKMVLSGHNFLQDSKVIFVEKAPDGHHVWEMEAKTDRDLCKPNSLVVEIPPFRNQRITSPVHVSFYVCNGKRKRSQYQRFTYLPANVNEIIRNDLSSTSTHS

SEQ ID NO: 31019 - protein, 353 aa, Homo sapiens
MLQLFIGTADDRLLRPHAFYQVHRITGKTVSTTSHEAILSNTKVLEIPLLPENSMRAVIDCAGILKLRNSDIELRKGETDIGRKNTRVRLVFRVHVPQPSGRTLSLQVASNPIECSQRSAQELPLVEKQSTDSYPVVGGKKMVLSGHNFLQDSKVIFVEKAPDGHHVWEMEAKTDRDLCKPNSLVVEIPPFRNQRITSPVHVSFYVCNGKRKRSQYQRFTYLPANVPIIKTEPTDDYEPAPTCGPVSQGLSPLPRPYYSQQLAMPPDPSSCLVAGFPPCPQRSTLMPAAPGVSPKLHDLSPAAYTKGVASPGHCHLGLPQPAGEAPAVQDVPRPVATHPGSPGQPPPALLPQQ

SEQ ID NO: 31020 - protein, 499 aa, Homo sapiens
MLERPPALAMPMPTEGTPPPLSGTPIPVPAYFRHAEPGFSLKRPRGLSRSLPPPPPAKGSIPISRLFPPRTPGWHQLQPRRVSFRGEASETLQSPGYDPSRPESFFQQSFQRLSRLGHGSYGEVFKVRSKEDGRLYAVKRSMSPFRGPKDRARKLAEVGSHEKVGQHPCCVRLEQAWEEGGILYLQTELCGPSLQQHCEAWGASLPEAQVWGYLRDTLLALAHLHSQGLVHLDVKPANIFLGPRGRCKLGDFGLLVELGTAGAGEVQEGDPRYMAPELLQGSYGTAADVFSLGLTILEVACNMELPHGGEGWQQLRQGYLPPEFTAGLSSELRSVLVMMLEPDPKLRATAEALLALPVLRQPRAWGVLWCMAAEALSRGWALWQALLALLCWLWHGLAHPASWLQPLGPPATPPGSPPCSLLLDSSLSSNWDDDSLGPSLSPEAVLARTVGSTSTPRSRCTPRDALDLSDINSEPPRGSFPSFEPRNLLSLFEDTLDPT

SEQ ID NO: 31021 - protein, 480 aa, Homo sapiens
MLERPPALAMPMPTEGTPPPLSGTPIPVPAYFRHAEPGFSLKRPRGLSRSLPPPPPAKGSIPISRLFPPRTPGWHQLQPRRVSFRGEASETLQSPGYDPSRPESFFQQSFQRLSRLGHGSYGEVFKVRSKEDGRLYAVKRSMSPFRGPKDRARKLAEVGSHEKVGQHPCCVRLEQAWEEGGILYLQTELCGPSLQQHCEAWGASLPEAQVWGYLRDTLLALAHLHSQGLVHLDVKPANIFLGPRGRCKLGDFGLLVELGTAGAGEVQEGDPRYMAPELLQGSYGTAADVFSLGLTILEVACNMELPHGGEGWQQLRQGYLPPEFTAGLSSELRSVLVMMLEPDPKLRATAEALLALPVLRQPRAWGVLWCMAAEALSRGWALWQALLALLCWLWHGLAHPASWLQPLGPPATPPGSPPCSLLLDSSLSSNWDDDSLGPGHPPCLACPPAGLHSPLRLSWPGLWGAPPPPGAGAHPGMPWT

SEQ ID NO: 31022 - protein, 490 aa, Homo sapiens
MPMPTEGTPPPLSGTPIPVPAYFRHAEPGFSLKRPRGLSRSLPPPPPAKGSIPISRLFPPRTPGWHQLQPRRVSFRGEASETLQSPGYDPSRPESFFQQSFQRLSRLGHGSYGEVFKVRSKEDGRLYAVKRSMSPFRGPKDRARKLAEVGSHEKVGQHPCCVRLEQAWEEGGILYLQTELCGPSLQQHCEAWGASLPEAQVWGYLRDTLLALAHLHSQGLVHLDVKPANIFLGPRGRCKLGDFGLLVELGTAGAGEVQEGDPRYMAPELLQGSYGTAADVFSLGLTILEVACNMELPHGGEGWQQLRQGYLPPEFTAGLSSELRSVLVMMLEPDPKLRATAEALLALPVLRQPRAWGVLWCMAAEALSRGWALWQALLALLCWLWHGLAHPASWLQPLGPPATPPGSPPCSLLLDSSLSSNWDDDSLGPSLSPEAVLARTVGSTSTPRSRCTPRDALDLSDINSEPPRGSFPSFEPRNLLSLFEDTLDPT

SEQ ID NO: 31023 - protein, 430 aa, Homo sapiens
MLERWHQLQPRRVSFRGEASETLQSPGYDPSRPESFFQQSFQRLSRLGHGSYGEVFKVRSKEDGRLYAVKRSMSPFRGPKDRARKLAEVGSHEKVGQHPCCVRLEQAWEEGGILYLQTELCGPSLQQHCEAWGASLPEAQVWGYLRDTLLALAHLHSQGLVHLDVKPANIFLGPRGRCKLGDFGLLVELGTAGAGEVQEGDPRYMAPELLQGSYGTAADVFSLGLTILEVACNMELPHGGEGWQQLRQGYLPPEFTAGLSSELRSVLVMMLEPDPKLRATAEALLALPVLRQPRAWGVLWCMAAEALSRGWALWQALLALLCWLWHGLAHPASWLQPLGPPATPPGSPPCSLLLDSSLSSNWDDDSLGPSLSPEAVLARTVGSTSTPRSRCTPRDALDLSDINSEPPRGSFPSFEPRNLLSLFEDTLDPT

SEQ ID NO: 31024 - protein, 933 aa, Homo sapiens
MAPTKPSFQQDPSRRERITAQHPLPNQSECRKIYRYDGIYCESTYQNLQALRKEKSRDAARSRRGKENFEFYELAKLLPLPAAITSQLDKASIIRLTISYLKMRDFANQGDPPWNLRMEGPPPNTSVKVIGAQRRRSPSALAIEVFEAHLGSHILQSLDGFVFALNQEGKFLYISETVSIYLGLSQVELTGSSVFDYVHPGDHVEMAEQLGMKLPPGRGLLSQGTAEDGASSASSSSQSETPEPVESTSPSLLTTDNTLERSFFIRMKSTLTKRGVHIKSSGYKVIHITGRLRLRVSLSHGRTVPSQIMGLVVVAHALPPPTINEVRIDCHMFVTRVNMDLNIIYCENRISDYMDLTPVDIVGKRCYHFIHAEDVEGIRHSHLDLLNKGQCVTKYYRWMQKNGGYIWIQSSATIAINAKNANEKNIIWVNYLLSNPEYKDTPMDIAQLPHLPEKTSESSETSDSESDSKDTSGITEDNENSKSDEKGNQSENSEDPEPDRKKSGNACDNDMNCNDDGHSSSNPDSRDSDDSFEHSDFENPKAGEDGFGALGAMQIKVERYVESESDLRLQNCESLTSDSAKDSDSAGEAGAQASSKHQKRKKRRKRQKGGSASRRRLSSASSPGGLDAGLVEPPRLLSSPNSASVLKIKTEISEPINFDNDSSIWNYPPNREISRNESPYSMTKPPSSEHFPSPQGGGGGGGGGGGLHVAIPDSVLTPPGADGAAARKTQFGASATAALAPVASDPLSPPLSASPRDKHPGNGGGGGGGGGGAGGGGPSASNSLLYTGDLEALQRLQAGNVVLPLVHRVTGTLAATSTAAQRVYTTGTIRYAPAEVTLAMQSNLLPNAHAVNFVDVNSPGFGLDPKTPMEMLYHHVHRLNMSGPFGGAVSAASLTQMPAGNVFTTAEGLFSTLPFPVYSNGIHAAQTLERKED

SEQ ID NO: 31025 - protein, 903 aa, Homo sapiens
MAPTKPSFQQDPSRRERLQALRKEKSRDAARSRRGKENFEFYELAKLLPLPAAITSQLDKASIIRLTISYLKMRDFANQGDPPWNLRMEGPPPNTSVKVIGAQRRRSPSALAIEVFEAHLGSHILQSLDGFVFALNQEGKFLYISETVSIYLGLSQVELTGSSVFDYVHPGDHVEMAEQLGMKLPPGRGLLSQGTAEDGASSASSSSQSETPEPVESTSPSLLTTDNTLERSFFIRMKSTLTKRGVHIKSSGYKVIHITGRLRLRVSLSHGRTVPSQIMGLVVVAHALPPPTINEVRIDCHMFVTRVNMDLNIIYCENRISDYMDLTPVDIVGKRCYHFIHAEDVEGIRHSHLDLLNKGQCVTKYYRWMQKNGGYIWIQSSATIAINAKNANEKNIIWVNYLLSNPEYKDTPMDIAQLPHLPEKTSESSETSDSESDSKDTSGITEDNENSKSDEKGNQSENSEDPEPDRKKSGNACDNDMNCNDDGHSSSNPDSRDSDDSFEHSDFENPKAGEDGFGALGAMQIKVERYVESESDLRLQNCESLTSDSAKDSDSAGEAGAQASSKHQKRKKRRKRQKGGSASRRRLSSASSPGGLDAGLVEPPRLLSSPNSASVLKIKTEISEPINFDNDSSIWNYPPNREISRNESPYSMTKPPSSEHFPSPQGGGGGGGGGGGLHVAIPDSVLTPPGADGAAARKTQFGASATAALAPVASDPLSPPLSASPRDKHPGNGGGGGGGGGGAGGGGPSASNSLLYTGDLEALQRLQAGNVVLPLVHRVTGTLAATSTAAQRVYTTGTIRYAPAEVTLAMQSNLLPNAHAVNFVDVNSPGFGLDPKTPMEMLYHHVHRLNMSGPFGGAVSAASLTQMPAGNVFTTAEGLFSTLPFPVYSNGIHAAQTLERKED

SEQ ID NO: 31026 - protein, 920 aa, Homo sapiens
MAPTKPSFQQDPSRRERLQALRKEKSRDAARSRRGKENFEFYELAKLLPLPAAITSQLDKASIIRLTISYLKMRDFANQGDPPWNLRMEGPPPNTSVKGIQMWKSELCMRKTPCEVIGAQRRRSPSALAIEVFEAHLGSHILQSLDGFVFALNQEGKFLYISETVSIYLGLSQVELTGSSVFDYVHPGDHVEMAEQLGMKLPPGRGLLSQGTAEDGASSASSSSQSETPEPVESTSPSLLTTDNTLERSFFIRMKSTLTKRGVHIKSSGYKVIHITGRLRLRVSLSHGRTVPSQIMGLVVVAHALPPPTINEVRIDCHMFVTRVNMDLNIIYCENRISDYMDLTPVDIVGKRCYHFIHAEDVEGIRHSHLDLLNKGQCVTKYYRWMQKNGGYIWIQSSATIAINAKNANEKNIIWVNYLLSNPEYKDTPMDIAQLPHLPEKTSESSETSDSESDSKDTSGITEDNENSKSDEKGNQSENSEDPEPDRKKSGNACDNDMNCNDDGHSSSNPDSRDSDDSFEHSDFENPKAGEDGFGALGAMQIKVERYVESESDLRLQNCESLTSDSAKDSDSAGEAGAQASSKHQKRKKRRKRQKGGSASRRRLSSASSPGGLDAGLVEPPRLLSSPNSASVLKIKTEISEPINFDNDSSIWNYPPNREISRNESPYSMTKPPSSEHFPSPQGGGGGGGGGGGLHVAIPDSVLTPPGADGAAARKTQFGASATAALAPVASDPLSPPLSASPRDKHPGNGGGGGGGGGGAGGGGPSASNSLLYTGDLEALQRLQAGNVVLPLVHRVTGTLAATSTAAQRVYTTGTIRYAPAEVTLAMQSNLLPNAHAVNFVDVNSPGFGLDPKTPMEMLYHHVHRLNMSGPFGGAVSAASLTQMPAGNVFTTAEGLFSTLPFPVYSNGIHAAQTLERKED

SEQ ID NO: 31027 - protein, 901 aa, Homo sapiens
MAPTKPSFQQDPSRRERLQALRKEKSRDAARSRRGKENFEFYELAKLLPLPAAITSQLDKASIIRLTISYLKMRDFANQGDPPWNLRMEGPPPNTSVKGAQRRRSPSALAIEVFEAHLGSHILQSLDGFVFALNQEGKFLYISETVSIYLGLSQVELTGSSVFDYVHPGDHVEMAEQLGMKLPPGRGLLSQGTAEDGASSASSSSQSETPEPVESTSPSLLTTDNTLERSFFIRMKSTLTKRGVHIKSSGYKVIHITGRLRLRVSLSHGRTVPSQIMGLVVVAHALPPPTINEVRIDCHMFVTRVNMDLNIIYCENRISDYMDLTPVDIVGKRCYHFIHAEDVEGIRHSHLDLLNKGQCVTKYYRWMQKNGGYIWIQSSATIAINAKNANEKNIIWVNYLLSNPEYKDTPMDIAQLPHLPEKTSESSETSDSESDSKDTSGITEDNENSKSDEKGNQSENSEDPEPDRKKSGNACDNDMNCNDDGHSSSNPDSRDSDDSFEHSDFENPKAGEDGFGALGAMQIKVERYVESESDLRLQNCESLTSDSAKDSDSAGEAGAQASSKHQKRKKRRKRQKGGSASRRRLSSASSPGGLDAGLVEPPRLLSSPNSASVLKIKTEISEPINFDNDSSIWNYPPNREISRNESPYSMTKPPSSEHFPSPQGGGGGGGGGGGLHVAIPDSVLTPPGADGAAARKTQFGASATAALAPVASDPLSPPLSASPRDKHPGNGGGGGGGGGGAGGGGPSASNSLLYTGDLEALQRLQAGNVVLPLVHRVTGTLAATSTAAQRVYTTGTIRYAPAEVTLAMQSNLLPNAHAVNFVDVNSPGFGLDPKTPMEMLYHHVHRLNMSGPFGGAVSAASLTQMPAGNVFTTAEGLFSTLPFPVYSNGIHAAQTLERKED

SEQ ID NO: 31028 - protein, 153 aa, Homo sapiens
MRDFANQGDPPWNLRMEGPPPNTSVKGAQRRRSPSALAIEVFEAHLGSHILQSLDGFVFALNQEGKFLYISETVSIYLGLSQVELTGSSVFDYVHPGDHVEMAEQLGMKLPPGRGLLSQGTAEDGASSASSSSQSETPEPVVCFPPASDQFLL

SEQ ID NO: 31029 - protein, 257 aa, Homo sapiens
MAPTKPSFQQDPSRRERITAQHPLPNQSECRKIYRYDGIYCESTYQNLQALRKEKSRDAARSRRGKENFEFYELAKLLPLPAAITSQLDKASIIRLTISYLKMRDFANQGDPPWNLRMEGPPPNTSVKVIGAQRRRSPSALAIEVFEAHLGSHILQSLDGFVFALNQEGKFLYISETVSIYLGLSQVELTGSSVFDYVHPGDHVEMAEQLGMKLPPGRGLLSQGTAEDGASSASSSSQSETPEPVVCFPPASDQFLL

SEQ ID NO: 31030 - protein, 1427 aa, Homo sapiens
MLLPSDVARLVLGYLQQENLISTCQTFILESSDLKEYAEHCTDEGFIPACLLSLFGKNLTTILNEYVAMKTKETSNNVPAIMSSLWKKLDHTLSQIRSMQSSPRFAGSQRARTRTGIAEIKRQRKLASQTAPASAELLTLPYLSGQFTTPPSTGTQVTRPSGQISDPSRSYFVVVNHSQSQDTVTTGEALNVIPGAQEKKAHASLMSPGRRKSESQRKSTTLSGPHSTIRNFQDPNAFAVEKQMVIENAREKILSNKSLQEKLAENINKFLTSDNNIAQVPKQTDNNPTEPETSIDEFLGLPSEIHMSEEAIQDILEQTESDPAFQALFDLFDYGKTKNNKNISQSISSQPMESNPSIVLADETNLAVKGSFETEESDGQSGQPAFCTSYQNDDPLNALKNSNNHDVLRQEDQENFSQISTSIQKKAFKTAVPTEQKCDIDITFESVPNLNDFNQRGNSNAECNPHCAELYTNQMSTETEMAIGIEKNSLSSNVPSESQLQPDQPDIPITSFVSLGCEANNENLILSGKSSQLLSQDTSLTGKPSKKSQFCENSNDTVKLKINFHGSKSSDSSEVHKSKIEINVLEPVMSQLSNCQDNSCLQSEILPVSVESSHLNVSGQVEIHLGDSLSSTKQPSNDSASVELNHTENEAQASKSENSQEPSSSVKEENTIFLSLGGNANCEKVALTPPEGTPVENSHSLPPESVCSSVGDSHPESQNTDDKPSSNNSAEIDASNIVSLKVIISDDPFVSSDTELTSAVSSINGENLPTIILSSPTKSPTKNAELVKCLSSEETVGAVVYAEVGDSASMEQSLLTFKSEDSAVNNTQNEDGIAFSANVTPCVSKDGGYIQLMPATSTAFGNSNNILIATCVTDPTALGTSVSQSNVVVLPGNSAPMTAQPLPPQLQTPPRSNSVFAVNQAVSPNFSQGSAIIIASPVQPVLQGMVGMIPVSVVGQNGNNFSTPPRQVLHMPLTAPVCNRSIPQFPVPPKSQKAQGLRNKPCIGKQVNNLVDSSGHSVGCHAQKTEVSDKSIATDLGKKSEETTVPFPEESIVPAAKPCHRRVLCFDSTTAPVANTQGPNHKMVSQNKERNAVSFPNLDSPNVSSTLKPPSNNAIKREKEKPPLPKILSKSESAISRHTTIRETQSEKKVSPTEIVLESFHKATANKENELCSDVERQKNPENSKLSIGQQNGGLRSEKSIASLQEMTKKQGTSSNNKNVLSVGTAVKDLKQEQTKSASSLITTEMLQDIQRHSSVSRLADSSDLPVPRTPGSGAGEKHKEEPIDIIKAPSSRRFSEDSSTSKVMVPPVTPDLPACSPASETGSENSVNMAAHTLMILSRAAISRTTSATPLKDNTQQFRASSRSTTKKRKIEELDERERNSRPSSKNLTNSSIPMKKKKIKKKKLPSSFPAGMDVDKFLLSLHYDE

SEQ ID NO: 31031 - protein, 1203 aa, Homo sapiens
MGNLKSVAQEPGPPCGLGLGLGLGLCGKQGPATPAPEPSRAPASLLPPAPEHSPPSSPLTQPPEGPKFPRVKNWEVGSITYDTLSAQAQQDGPCTPRRCLGSLVFPRKLQGRPSPGPPAPEQLLSQARDFINQYYSSIKRSGSQAHEQRLQEVEAEVAATGTYQLRESELVFGAKQAWRNAPRCVGRIQWGKLQVFDARDCRSAQEMFTYICNHIKYATNRGNLRSAITVFPQRCPGRGDFRIWNSQLVRYAGYRQQDGSVRGDPANVEITELCIQHGWTPGNGRFDVLPLLLQAPDDPPELFLLPPELVLEVPLEHPTLEWFAALGLRWYALPAVSNMLLEIGGLEFPAAPFSGWYMSTEIGTRNLCDPHRYNILEDVAVCMDLDTRTTSSLWKDKAAVEINVAVLHSYQLAKVTIVDHHAATASFMKHLENEQKARGGCPADWAWIVPPISGSLTPVFHQEMVNYFLSPAFRYQPDPWKGSAAKGTGITRKKTFKEVANAVKISASLMGTVMAKRVKATILYGSETGRAQSYAQQLGRLFRKAFDPRVLCMDEYDVVSLEHETLVLVVTSTFGNGDPPENGESFAAALMEMSGPYNSSPRPEQHKSYKIRFNSISCSDPLVSSWRRKRKESSNTDSAGALGTLRFCVFGLGSRAYPHFCAFARAVDTRLEELGGERLLQLGQGDELCGQEEAFRGWAQAAFQAACETFCVGEDAKAAARDIFSPKRSWKRQRYRLSAQAEGLQLLPGLIHVHRRKMFQATIRSVENLQSSKSTRATILVRLDTGGQEGLQYQPGDHIGVCPPNRPGLVEALLSRVEDPPAPTEPVAVEQLEKGSPGGPPPGWVRDPRLPPCTLRQALTFFLDITSPPSPQLLRLLSTLAEEPREQQELEALSQDPRRYEEWKWFRCPTLLEVLEQFPSVALPAPLLLTQLPLLQPRYYSVSSAPSTHPGEIHLTVAVLAYRTQDGLGPLHYGVCSTWLSQLKPGDPVPCFIRGAPSFRLPPDPSLPCILVGPGTGIAPFRGFWQERLHDIESKGLQPTPMTLVFGCRCSQLDHLYRDEVQNAQQRGVFGRVLTAFSREPDNPKTYVQDILRTELAAEVHRVLCLERGHMFVCGDVTMATNVLQTVQRILATEGDMELDEAGDVIGVLRDQQRYHEDIFGLTLRTQEVTSRIRTQSFSLQERQLRGAVPWAFDPPGSDTNSP

SEQ ID NO: 31032 - protein, 629 aa, Homo sapiens
MGNLKSVAQEPGPPCGLGLGLGLGLCGKQGPATPAPEPSRAPASLLPPAPEHSPPSSPLTQPPEGPKFPRVKNWEVGSITYDTLSAQAQQDGPCTPRRCLGSLVFPRKLQGRPSPGPPAPEQLLSQARDFINQYYSSIKRSGSQAHEQRLQEVEAEVAATGTYQLRESELVFGAKQAWRNAPRCVGRIQWGKLQVFDARDCRSAQEMFTYICNHIKYATNRGNLRSAITVFPQRCPGRGDFRIWNSQLVRYAGYRQQDGSVRGDPANVEITELCIQHGWTPGNGRFDVLPLLLQAPDDPPELFLLPPELVLEVPLEHPTLEWFAALGLRWYALPAVSNMLLEIGGLEFPAAPFSGWYMSTEIGTRNLCDPHRYNILEDVAVCMDLDTRTTSSLWKDKAAVEINVAVLHSYQLAKVTIVDHHAATASFMKHLENEQKARGGCPADWAWIVPPISGSLTPVFHQEMVNYFLSPAFRYQPDPWKGSAAKGTGITRKKTFKEVANAVKISASLMGTVMAKRVKATILYGSETGRAQSYAQQLGRLFRKAFDPRVLCMDEYDVVSLEHETLVLVVTSTFGNGDPPENGEGLTLWPRLECSSTITAHCSLNLLDSSNPPTSTSQVVGTTGACHDA

SEQ ID NO: 31033 - protein, 614 aa, Homo sapiens
MGNLKSVAQEPGPPCGLGLGLGLGLCGKQGPATPAPEPSRAPASLLPPAPEHSPPSSPLTQPPEGPKFPRVKNWEVGSITYDTLSAQAQQDGPCTPRRCLGSLVFPRKLQGRPSPGPPAPEQLLSQARDFINQYYSSIKRSGSQAHEQRLQEVEAEVAATGTYQLRESELVFGAKQAWRNAPRCVGRIQWGKLQVFDARDCRSAQEMFTYICNHIKYATNRGNLRSAITVFPQRCPGRGDFRIWNSQLVRYAGYRQQDGSVRGDPANVEITELCIQHGWTPGNGRFDVLPLLLQAPDDPPELFLLPPELVLEVPLEHPTLEWFAALGLRWYALPAVSNMLLEIGGLEFPAAPFSGWYMSTEIGTRNLCDPHRYNILEDVAVCMDLDTRTTSSLWKDKAAVEINVAVLHSYQLAKVTIVDHHAATASFMKHLENEQKARGGCPADWAWIVPPISGSLTPVFHQEMVNYFLSPAFRYQPDPWKGSAAKGTGITRKKTFKEVANAVKISASLMGTVMAKRVKATILYGSETGRAQSYAQQLGRLFRKAFDPRVLCMDEYDVVSLEHETLVLVVTSTFGNGDPPENGERWGFAMLPRLVSNSWVQAIHLPRPPKVLRL

SEQ ID NO: 31034 - protein, 1161 aa, Homo sapiens
MVKLSIVLTPQFLSHDQGQLTKELQQHVKSVTCPCEYLRKVINTLADHHHRGTDFGGSPWLHIIIAFPTSYKVVITLWIVYLWVSLLKTIFWSRNGHDGSTDVQQRAWRSNRRRQEGLRSICMHTKKRVSSFRGNKIGLKDVITLRRHVETKVRAKIRKRKVTTKINRHDKINGKRKTARKQKMFQRAQELRRRAEDYHKCKIPPSARKALCNWVRMAAAEHRHSSGLPYWPYLTAETLKNRMGHQPPPPTQQHCITDNSLSLKTPLECLLTPLPPSADDNLKTPPECLLTPLPPSADDNLKTPPECLLTPLPPSAPPSAPPSADDNLKTRAECLLHPLPPSADDNLKTPSERQLTPLPPSAPPSADDNIKTTAERLRGPLPPSADDNLKTPSERQLTPLPPSAPPSADDNIKTPAEHLRGPLPPSADDNLKTPSERQLTPLPPSAPPSADDNIKTPAERLRGPLPPSADDNLKTPSERQLTPLPPSAPPSADDNIKTPAEHLRGPLPPSADDNLKTPSERQLTPLPPSAPPSADDNIKTTAEHLRGPLPPSADDNLKTPSERQLTPLPPSAPPSADDNIKTPAEHLQFRFHPQRMIISRDLPSVSSLPFHPQLHPQQMIISRYLLSICGFRFHRQRMIISRHLPSVSSLPFHPQLHPQQMIISRHLPSVCGGRFHPQPMIISRHLPSVSSLPFHPQLHPQQMIISRHLPSVCGGRFHPQPMIISRHLPSVSSLPFHPQLHPQQMIISRHLPSVCGGRFHPQPMIISRHLPSVSSLPFHPQLHPQQMIISRHLPSVCGGRFHPQPMIISRHLPSVSSLPFHPQLHPQQMIISRHLPSVCGGRFHPQPMIISRHLPSVSSLPFHPQLHPQQMIISRHLPSVCGERLWVPLPPSADDNLKTPSKRQLTPLPPSAPPSADDNIKTPAERLRGPLPPSADDNLKTPSKRQLTPLPPSAPPSADDNIKTPAERLRGPLPPSADDNLKTPSERQLTPLPPSAPPSADDNIKTPAERLRGPLPPSADDNLKTPSERQLTPLPPSAPTSADDNIKTPAERLRGPLPPSADDNLKTPPLATQEAEAEKPRKPKRQRAAEMEPPPEPKRRRVGDVEPSRKPKRRRAADVEPSSPEPKRRRVGDVEPSRKPKRRRAADVEPSSPEPKRRRLS

SEQ ID NO: 31035 - protein, 902 aa, Homo sapiens; identical to SEQ ID NO: 260

SEQ ID NO: 31036 - protein, 965 aa, Homo sapiens
MITTLPSLLPASLASISHRVTNLPSNSLSHNPGLSKPDFPGNSSPGLPSSSSPGRDLGAPAGSMGAASCEDEELEFKLVFGEEKEAPPLGAGGLGEELDSEDAPPCCRLALGEPPPYGAAPIGIPRPPPPRPGMHSPPPRPAPSPGTWESQPARSVRLGGPGGGAGGAGGGRVLECPSIRITSISPTPEPPAALEDNPDAWGDGSPRDYPPPEGFGGYREAGGQGGGAFFSPSPGSSSLSSWSFFSDASDEAALYAACDEVESELNEAASRFGLGSPLPSPRASPRPWTPEDPWSLYGPSPGGRGPEDSWLLLSAPGPTPASPRPASPCGKRRYSSSGTPSSASPALSRRGSLGEEGSEPPPPPPLPLARDPGSPGPFDYVGAPPAESIPQKTRRTSSEQAVALPRSEEPASCNGKLPLGAEESVAPPGGSRKEVAGMDYLAVPSPLAWSKARIGGHSPIFRTSALPPLDWPLPSQYEQLELRIEVQPRAHHRAHYETEGSRGAVKAAPGGHPVVKLLGYSEKPLTLQMFIGTADERNLRPHAFYQVHRITGKMVATASYEAVVSGTKVLEMTLLPENNMAANIDCAGILKLRNSDIELRKGETDIGRKNTRVRLVFRVHVPQGGGKVVSVQAASVPIECSQRSAQELPQVEAYSPSACSVRGGEELVLTGSNFLPDSKVVFIERGPDGKLQWEEEATVNRLQSNEVTLTLTVPEYSNKRVSRPVQVYFYVSNGRRKRSPTQSFRFLPVICKEEPLPDSSLRGFPSASATPFGTDMDFSPPRPPYPSYPHEDPACETPYLSEGFGYGMPPLYPQTGPPPSYRPGLRMFPETRGTTGCAQPPAVSFLPRPFPSDPYGGRGSSFSLGLPFSPPAPFRPPPLPASPPLEGPFPSQSDVHPLPAEGYNKVGPGYGPGEGAPEQEKSRGGYSSGFRDSVPIQGITLEEVSEIIGRDLSGFPAPPGEEPPA

SEQ ID NO: 31037 - protein, 964 aa, Homo sapiens
MITTLPSLLPASLASISHRVTNLPSNSLSHNPGLSKPDFPGNSSPGLPSSSSPGRDLGAPAGSMGAASCEDEELEFKLVFGEEKEAPPLGAGGLGEELDSEDAPPCCRLALGEPPPYGAAPIGIPRPPPPRPGMHSPPPRPAPSPGTWESQPARSVRLGGPGGGAGGAGGGRVLECPSIRITSISPTPEPPAALEDNPDAWGDGSPRDYPPPEGFGGYREAGGQGGGAFFSPSPGSSSLSSWSFFSDASDEAALYAACDEVESELNEAASRFGLGSPLPSPRASPRPWTPEDPWSLYGPSPGGRGPEDSWLLLSAPGPTPASPRPASPCGKRRYSSSGTPSSASPALSRRGSLGEEGSEPPPPPPLPLARDPGSPGPFDYVGAPPAESIPQKTRRTSSEQAVALPRSEEPASCNGKLPLGAEESVAPPGGSRKEVAGMDYLAVPSPLAWSKARIGGHSPIFRTSALPPLDWPLPSQYEQLELRIEVQPRAHHRAHYETEGSRGAVKAAPGGHPVVKLLGYSEKPLTLQMFIGTADERNLRPHAFYQVHRITGKMVATASYEAVVSGTKVLEMTLLPENNMAANIDCAGILKLRNSDIELRKGETDIGRKNTRVRLVFRVHVPQGGGKVVSVQAASVPIECSQRSAQELPQVEAYSPSACSVRGGEELVLTGSNFLPDSKVVFIERGPDGKLQWEEEATVNRLQSNEVTLTLTVPEYSNKRVSRPVQVYFYVSNGRRKRSPTQSFRFLPVICKEEPLPDSSLRGFPSASATPFGTDMDFSPPRPPYPSYPHEDPACETPYLSEGFGYGMPPLYPQTGPPPSYRPGLRMFPETRGTTGCAQPPAVSFLPRPFPSDPYGGRGSSFSLGLPFSPPAPFRPPPLPASPPLEGPFPSQSDVHPLPAEGYNKVGPGYGPGEGAPEQEKSRGGYSSGFRDSVPIQGITLEEGGCGTGGCECECVQEIALHVC

SEQ ID NO: 31038 - protein, 934 aa, Homo sapiens
MADGGADSAAQRLPEGPGRVAPGRDLGAPAGSMGAASCEDEELEFKLVFGEEKEAPPLGAGGLGEELDSEDAPPCCRLALGEPPPYGAAPIGIPRPPPPRPGMHSPPPRPAPSPGTWESQPARSVRLGGPGGGAGGAGGGRVLECPSIRITSISPTPEPPAALEDNPDAWGDGSPRDYPPPEGFGGYREAGGQGGGAFFSPSPGSSSLSSWSFFSDASDEAALYAACDEVESELNEAASRFGLGSPLPSPRASPRPWTPEDPWSLYGPSPGGRGPEDSWLLLSAPGPTPASPRPASPCGKRRYSSSGTPSSASPALSRRGSLGEEGSEPPPPPPLPLARDPGSPGPFDYVGAPPAESIPQKTRRTSSEQAVALPRSEEPASCNGKLPLGAEESVAPPGGSRKEVAGMDYLAVPSPLAWSKARIGGHSPIFRTSALPPLDWPLPSQYEQLELRIEVQPRAHHRAHYETEGSRGAVKAAPGGHPVVKLLGYSEKPLTLQMFIGTADERNLRPHAFYQVHRITGKMVATASYEAVVSGTKVLEMTLLPENNMAANIDCAGILKLRNSDIELRKGETDIGRKNTRVRLVFRVHVPQGGGKVVSVQAASVPIECSQRSAQELPQVEAYSPSACSVRGGEELVLTGSNFLPDSKVVFIERGPDGKLQWEEEATVNRLQSNEVTLTLTVPEYSNKRVSRPVQVYFYVSNGRRKRSPTQSFRFLPVICKEEPLPDSSLRGFPSASATPFGTDMDFSPPRPPYPSYPHEDPACETPYLSEGFGYGMPPLYPQTGPPPSYRPGLRMFPETRGTTGCAQPPAVSFLPRPFPSDPYGGRGSSFSLGLPFSPPAPFRPPPLPASPPLEGPFPSQSDVHPLPAEGYNKVGPGYGPGEGAPEQEKSRGGYSSGFRDSVPIQGITLEEVSEIIGRDLSGFPAPPGEEPPA

SEQ ID NO: 31039 - protein, 933 aa, Homo sapiens
MADGGADSAAQRLPEGPGRVAPGRDLGAPAGSMGAASCEDEELEFKLVFGEEKEAPPLGAGGLGEELDSEDAPPCCRLALGEPPPYGAAPIGIPRPPPPRPGMHSPPPRPAPSPGTWESQPARSVRLGGPGGGAGGAGGGRVLECPSIRITSISPTPEPPAALEDNPDAWGDGSPRDYPPPEGFGGYREAGGQGGGAFFSPSPGSSSLSSWSFFSDASDEAALYAACDEVESELNEAASRFGLGSPLPSPRASPRPWTPEDPWSLYGPSPGGRGPEDSWLLLSAPGPTPASPRPASPCGKRRYSSSGTPSSASPALSRRGSLGEEGSEPPPPPPLPLARDPGSPGPFDYVGAPPAESIPQKTRRTSSEQAVALPRSEEPASCNGKLPLGAEESVAPPGGSRKEVAGMDYLAVPSPLAWSKARIGGHSPIFRTSALPPLDWPLPSQYEQLELRIEVQPRAHHRAHYETEGSRGAVKAAPGGHPVVKLLGYSEKPLTLQMFIGTADERNLRPHAFYQVHRITGKMVATASYEAVVSGTKVLEMTLLPENNMAANIDCAGILKLRNSDIELRKGETDIGRKNTRVRLVFRVHVPQGGGKVVSVQAASVPIECSQRSAQELPQVEAYSPSACSVRGGEELVLTGSNFLPDSKVVFIERGPDGKLQWEEEATVNRLQSNEVTLTLTVPEYSNKRVSRPVQVYFYVSNGRRKRSPTQSFRFLPVICKEEPLPDSSLRGFPSASATPFGTDMDFSPPRPPYPSYPHEDPACETPYLSEGFGYGMPPLYPQTGPPPSYRPGLRMFPETRGTTGCAQPPAVSFLPRPFPSDPYGGRGSSFSLGLPFSPPAPFRPPPLPASPPLEGPFPSQSDVHPLPAEGYNKVGPGYGPGEGAPEQEKSRGGYSSGFRDSVPIQGITLEEGGCGTGGCECECVQEIALHVC

SEQ ID NO: 31040 - protein, 915 aa, Homo sapiens
MLSGRDLGAPAGSMGAASCEDEELEFKLVFGEEKEAPPLGAGGLGEELDSEDAPPCCRLALGEPPPYGAAPIGIPRPPPPRPGMHSPPPRPAPSPGTWESQPARSVRLGGPGGGAGGAGGGRVLECPSIRITSISPTPEPPAALEDNPDAWGDGSPRDYPPPEGFGGYREAGGQGGGAFFSPSPGSSSLSSWSFFSDASDEAALYAACDEVESELNEAASRFGLGSPLPSPRASPRPWTPEDPWSLYGPSPGGRGPEDSWLLLSAPGPTPASPRPASPCGKRRYSSSGTPSSASPALSRRGSLGEEGSEPPPPPPLPLARDPGSPGPFDYVGAPPAESIPQKTRRTSSEQAVALPRSEEPASCNGKLPLGAEESVAPPGGSRKEVAGMDYLAVPSPLAWSKARIGGHSPIFRTSALPPLDWPLPSQYEQLELRIEVQPRAHHRAHYETEGSRGAVKAAPGGHPVVKLLGYSEKPLTLQMFIGTADERNLRPHAFYQVHRITGKMVATASYEAVVSGTKVLEMTLLPENNMAANIDCAGILKLRNSDIELRKGETDIGRKNTRVRLVFRVHVPQGGGKVVSVQAASVPIECSQRSAQELPQVEAYSPSACSVRGGEELVLTGSNFLPDSKVVFIERGPDGKLQWEEEATVNRLQSNEVTLTLTVPEYSNKRVSRPVQVYFYVSNGRRKRSPTQSFRFLPVICKEEPLPDSSLRGFPSASATPFGTDMDFSPPRPPYPSYPHEDPACETPYLSEGFGYGMPPLYPQTGPPPSYRPGLRMFPETRGTTGCAQPPAVSFLPRPFPSDPYGGRGSSFSLGLPFSPPAPFRPPPLPASPPLEGPFPSQSDVHPLPAEGYNKVGPGYGPGEGAPEQEKSRGGYSSGFRDSVPIQGITLEEVSEIIGRDLSGFPAPPGEEPPA

SEQ ID NO: 31041 - protein, 914 aa, Homo sapiens
MLSGRDLGAPAGSMGAASCEDEELEFKLVFGEEKEAPPLGAGGLGEELDSEDAPPCCRLALGEPPPYGAAPIGIPRPPPPRPGMHSPPPRPAPSPGTWESQPARSVRLGGPGGGAGGAGGGRVLECPSIRITSISPTPEPPAALEDNPDAWGDGSPRDYPPPEGFGGYREAGGQGGGAFFSPSPGSSSLSSWSFFSDASDEAALYAACDEVESELNEAASRFGLGSPLPSPRASPRPWTPEDPWSLYGPSPGGRGPEDSWLLLSAPGPTPASPRPASPCGKRRYSSSGTPSSASPALSRRGSLGEEGSEPPPPPPLPLARDPGSPGPFDYVGAPPAESIPQKTRRTSSEQAVALPRSEEPASCNGKLPLGAEESVAPPGGSRKEVAGMDYLAVPSPLAWSKARIGGHSPIFRTSALPPLDWPLPSQYEQLELRIEVQPRAHHRAHYETEGSRGAVKAAPGGHPVVKLLGYSEKPLTLQMFIGTADERNLRPHAFYQVHRITGKMVATASYEAVVSGTKVLEMTLLPENNMAANIDCAGILKLRNSDIELRKGETDIGRKNTRVRLVFRVHVPQGGGKVVSVQAASVPIECSQRSAQELPQVEAYSPSACSVRGGEELVLTGSNFLPDSKVVFIERGPDGKLQWEEEATVNRLQSNEVTLTLTVPEYSNKRVSRPVQVYFYVSNGRRKRSPTQSFRFLPVICKEEPLPDSSLRGFPSASATPFGTDMDFSPPRPPYPSYPHEDPACETPYLSEGFGYGMPPLYPQTGPPPSYRPGLRMFPETRGTTGCAQPPAVSFLPRPFPSDPYGGRGSSFSLGLPFSPPAPFRPPPLPASPPLEGPFPSQSDVHPLPAEGYNKVGPGYGPGEGAPEQEKSRGGYSSGFRDSVPIQGITLEEGGCGTGGCECECVQEIALHVC

SEQ ID NO: 31042 - protein, 901 aa, Homo sapiens
MGAASCEDEELEFKLVFGEEKEAPPLGAGGLGEELDSEDAPPCCRLALGEPPPYGAAPIGIPRPPPPRPGMHSPPPRPAPSPGTWESQPARSVRLGGPGGGAGGAGGGRVLECPSIRITSISPTPEPPAALEDNPDAWGDGSPRDYPPPEGFGGYREAGGQGGGAFFSPSPGSSSLSSWSFFSDASDEAALYAACDEVESELNEAASRFGLGSPLPSPRASPRPWTPEDPWSLYGPSPGGRGPEDSWLLLSAPGPTPASPRPASPCGKRRYSSSGTPSSASPALSRRGSLGEEGSEPPPPPPLPLARDPGSPGPFDYVGAPPAESIPQKTRRTSSEQAVALPRSEEPASCNGKLPLGAEESVAPPGGSRKEVAGMDYLAVPSPLAWSKARIGGHSPIFRTSALPPLDWPLPSQYEQLELRIEVQPRAHHRAHYETEGSRGAVKAAPGGHPVVKLLGYSEKPLTLQMFIGTADERNLRPHAFYQVHRITGKMVATASYEAVVSGTKVLEMTLLPENNMAANIDCAGILKLRNSDIELRKGETDIGRKNTRVRLVFRVHVPQGGGKVVSVQAASVPIECSQRSAQELPQVEAYSPSACSVRGGEELVLTGSNFLPDSKVVFIERGPDGKLQWEEEATVNRLQSNEVTLTLTVPEYSNKRVSRPVQVYFYVSNGRRKRSPTQSFRFLPVICKEEPLPDSSLRGFPSASATPFGTDMDFSPPRPPYPSYPHEDPACETPYLSEGFGYGMPPLYPQTGPPPSYRPGLRMFPETRGTTGCAQPPAVSFLPRPFPSDPYGGRGSSFSLGLPFSPPAPFRPPPLPASPPLEGPFPSQSDVHPLPAEGYNKVGPGYGPGEGAPEQEKSRGGYSSGFRDSVPIQGITLEEGGCGTGGCECECVQEIALHVC

SEQ ID NO: 31043 - protein, 890 aa, Homo sapiens
MPASISSIFPGPTLLLSCGSEELDSEDAPPCCRLALGEPPPYGAAPIGIPRPPPPRPGMHSPPPRPAPSPGTWESQPARSVRLGGPGGGAGGAGGGRVLECPSIRITSISPTPEPPAALEDNPDAWGDGSPRDYPPPEGFGGYREAGGQGGGAFFSPSPGSSSLSSWSFFSDASDEAALYAACDEVESELNEAASRFGLGSPLPSPRASPRPWTPEDPWSLYGPSPGGRGPEDSWLLLSAPGPTPASPRPASPCGKRRYSSSGTPSSASPALSRRGSLGEEGSEPPPPPPLPLARDPGSPGPFDYVGAPPAESIPQKTRRTSSEQAVALPRSEEPASCNGKLPLGAEESVAPPGGSRKEVAGMDYLAVPSPLAWSKARIGGHSPIFRTSALPPLDWPLPSQYEQLELRIEVQPRAHHRAHYETEGSRGAVKAAPGGHPVVKLLGYSEKPLTLQMFIGTADERNLRPHAFYQVHRITGKMVATASYEAVVSGTKVLEMTLLPENNMAANIDCAGILKLRNSDIELRKGETDIGRKNTRVRLVFRVHVPQGGGKVVSVQAASVPIECSQRSAQELPQVEAYSPSACSVRGGEELVLTGSNFLPDSKVVFIERGPDGKLQWEEEATVNRLQSNEVTLTLTVPEYSNKRVSRPVQVYFYVSNGRRKRSPTQSFRFLPVICKEEPLPDSSLRGFPSASATPFGTDMDFSPPRPPYPSYPHEDPACETPYLSEGFGYGMPPLYPQTGPPPSYRPGLRMFPETRGTTGCAQPPAVSFLPRPFPSDPYGGRGSSFSLGLPFSPPAPFRPPPLPASPPLEGPFPSQSDVHPLPAEGYNKVGPGYGPGEGAPEQEKSRGGYSSGFRDSVPIQGITLEEVSEIIGRDLSGFPAPPGEEPPA

SEQ ID NO: 31044 - protein, 889 aa, Homo sapiens
MPASISSIFPGPTLLLSCGSEELDSEDAPPCCRLALGEPPPYGAAPIGIPRPPPPRPGMHSPPPRPAPSPGTWESQPARSVRLGGPGGGAGGAGGGRVLECPSIRITSISPTPEPPAALEDNPDAWGDGSPRDYPPPEGFGGYREAGGQGGGAFFSPSPGSSSLSSWSFFSDASDEAALYAACDEVESELNEAASRFGLGSPLPSPRASPRPWTPEDPWSLYGPSPGGRGPEDSWLLLSAPGPTPASPRPASPCGKRRYSSSGTPSSASPALSRRGSLGEEGSEPPPPPPLPLARDPGSPGPFDYVGAPPAESIPQKTRRTSSEQAVALPRSEEPASCNGKLPLGAEESVAPPGGSRKEVAGMDYLAVPSPLAWSKARIGGHSPIFRTSALPPLDWPLPSQYEQLELRIEVQPRAHHRAHYETEGSRGAVKAAPGGHPVVKLLGYSEKPLTLQMFIGTADERNLRPHAFYQVHRITGKMVATASYEAVVSGTKVLEMTLLPENNMAANIDCAGILKLRNSDIELRKGETDIGRKNTRVRLVFRVHVPQGGGKVVSVQAASVPIECSQRSAQELPQVEAYSPSACSVRGGEELVLTGSNFLPDSKVVFIERGPDGKLQWEEEATVNRLQSNEVTLTLTVPEYSNKRVSRPVQVYFYVSNGRRKRSPTQSFRFLPVICKEEPLPDSSLRGFPSASATPFGTDMDFSPPRPPYPSYPHEDPACETPYLSEGFGYGMPPLYPQTGPPPSYRPGLRMFPETRGTTGCAQPPAVSFLPRPFPSDPYGGRGSSFSLGLPFSPPAPFRPPPLPASPPLEGPFPSQSDVHPLPAEGYNKVGPGYGPGEGAPEQEKSRGGYSSGFRDSVPIQGITLEEGGCGTGGCECECVQEIALHVC

SEQ ID NO: 31045 - protein, 857 aa, Homo sapiens
MITTLPSLLPASLASISHRVTNLPSNSLSHNPGLSKPDFPGNSSPGLPSSSSPGRDLGAPAGSMGAASCEDEELEFKLVFGEEKEAPPLGAGGLGEELDSEDAPPCCRLALGEPPPYGAAPIGIPRPPPPRPGMHSPPPRPAPSPGTWESQPARSVRLGGPGGGAGGAGGGRVLECPSIRITSISPTPEPPAALEDNPDAWGDGSPRDYPPPEGFGGYREAGGQGGGAFFSPSPGSSSLSSWSFFSDASDEAALYAACDEVESELNEAASRFGLGSPLPSPRASPRPWTPEDPWSLYGPSPGGRGPEDSWLLLSAPGPTPASPRPASPCGKRRYSSSGTPSSASPALSRRGSLGEEGSEPPPPPPLPLARDPGSPGPFDYVGAPPAESIPQKTRRTSSEQAVALPRSEEPASCNGKLPLGAEESVAPPGGSRKEVAGMDYLAVPSPLAWSKARIGGHSPIFRTSALPPLDWPLPSQYEQLELRIEVQPRAHHRAHYETEGSRGAVKAAPGGHPVVKLLGYSEKPLTLQMFIGTADERNLRPHAFYQVHRITGKMVATASYEAVVSGTKVLEMTLLPENNMAANIDCAGILKLRNSDIELRKGETDIGRKNTRVRLVFRVHVPQGGGKVVSVQAASVPIECSQRSAQELPQVEAYSPSACSVRGGEELVLTGSNFLPDSKVVFIERGPDGKLQWEEEATVNRLQSNEVTLTLTVPEYSNKRVSRPVQVYFYVSNGRRKRSPTQSFRFLPVICKEEPLPDSSLRGFPSASATPFGTDMDFSPPRPPYPSYPHEDPACETPYLSEGFGYGMPPLYPQTGPPPSYRPGLRMFPETRGTTVSEIIGRDLSGFPAPPGEEPPA

SEQ ID NO: 31046 - protein, 832 aa, Homo sapiens
MHSPPPRPAPSPGTWESQPARSVRLGGPGGGAGGAGGGRVLECPSIRITSISPTPEPPAALEDNPDAWGDGSPRDYPPPEGFGGYREAGGQGGGAFFSPSPGSSSLSSWSFFSDASDEAALYAACDEVESELNEAASRFGLGSPLPSPRASPRPWTPEDPWSLYGPSPGGRGPEDSWLLLSAPGPTPASPRPASPCGKRRYSSSGTPSSASPALSRRGSLGEEGSEPPPPPPLPLARDPGSPGPFDYVGAPPAESIPQKTRRTSSEQAVALPRSEEPASCNGKLPLGAEESVAPPGGSRKEVAGMDYLAVPSPLAWSKARIGGHSPIFRTSALPPLDWPLPSQYEQLELRIEVQPRAHHRAHYETEGSRGAVKAAPGGHPVVKLLGYSEKPLTLQMFIGTADERNLRPHAFYQVHRITGKMVATASYEAVVSGTKVLEMTLLPENNMAANIDCAGILKLRNSDIELRKGETDIGRKNTRVRLVFRVHVPQGGGKVVSVQAASVPIECSQRSAQELPQVEAYSPSACSVRGGEELVLTGSNFLPDSKVVFIERGPDGKLQWEEEATVNRLQSNEVTLTLTVPEYSNKRVSRPVQVYFYVSNGRRKRSPTQSFRFLPVICKEEPLPDSSLRGFPSASATPFGTDMDFSPPRPPYPSYPHEDPACETPYLSEGFGYGMPPLYPQTGPPPSYRPGLRMFPETRGTTGCAQPPAVSFLPRPFPSDPYGGRGSSFSLGLPFSPPAPFRPPPLPASPPLEGPFPSQSDVHPLPAEGYNKVGPGYGPGEGAPEQEKSRGGYSSGFRDSVPIQGITLEEVSEIIGRDLSGFPAPPGEEPPA

SEQ ID NO: 31047 - protein, 831 aa, Homo sapiens
MHSPPPRPAPSPGTWESQPARSVRLGGPGGGAGGAGGGRVLECPSIRITSISPTPEPPAALEDNPDAWGDGSPRDYPPPEGFGGYREAGGQGGGAFFSPSPGSSSLSSWSFFSDASDEAALYAACDEVESELNEAASRFGLGSPLPSPRASPRPWTPEDPWSLYGPSPGGRGPEDSWLLLSAPGPTPASPRPASPCGKRRYSSSGTPSSASPALSRRGSLGEEGSEPPPPPPLPLARDPGSPGPFDYVGAPPAESIPQKTRRTSSEQAVALPRSEEPASCNGKLPLGAEESVAPPGGSRKEVAGMDYLAVPSPLAWSKARIGGHSPIFRTSALPPLDWPLPSQYEQLELRIEVQPRAHHRAHYETEGSRGAVKAAPGGHPVVKLLGYSEKPLTLQMFIGTADERNLRPHAFYQVHRITGKMVATASYEAVVSGTKVLEMTLLPENNMAANIDCAGILKLRNSDIELRKGETDIGRKNTRVRLVFRVHVPQGGGKVVSVQAASVPIECSQRSAQELPQVEAYSPSACSVRGGEELVLTGSNFLPDSKVVFIERGPDGKLQWEEEATVNRLQSNEVTLTLTVPEYSNKRVSRPVQVYFYVSNGRRKRSPTQSFRFLPVICKEEPLPDSSLRGFPSASATPFGTDMDFSPPRPPYPSYPHEDPACETPYLSEGFGYGMPPLYPQTGPPPSYRPGLRMFPETRGTTGCAQPPAVSFLPRPFPSDPYGGRGSSFSLGLPFSPPAPFRPPPLPASPPLEGPFPSQSDVHPLPAEGYNKVGPGYGPGEGAPEQEKSRGGYSSGFRDSVPIQGITLEEGGCGTGGCECECVQEIALHVC

SEQ ID NO: 31048 - protein, 826 aa, Homo sapiens
MADGGADSAAQRLPEGPGRVAPGRDLGAPAGSMGAASCEDEELEFKLVFGEEKEAPPLGAGGLGEELDSEDAPPCCRLALGEPPPYGAAPIGIPRPPPPRPGMHSPPPRPAPSPGTWESQPARSVRLGGPGGGAGGAGGGRVLECPSIRITSISPTPEPPAALEDNPDAWGDGSPRDYPPPEGFGGYREAGGQGGGAFFSPSPGSSSLSSWSFFSDASDEAALYAACDEVESELNEAASRFGLGSPLPSPRASPRPWTPEDPWSLYGPSPGGRGPEDSWLLLSAPGPTPASPRPASPCGKRRYSSSGTPSSASPALSRRGSLGEEGSEPPPPPPLPLARDPGSPGPFDYVGAPPAESIPQKTRRTSSEQAVALPRSEEPASCNGKLPLGAEESVAPPGGSRKEVAGMDYLAVPSPLAWSKARIGGHSPIFRTSALPPLDWPLPSQYEQLELRIEVQPRAHHRAHYETEGSRGAVKAAPGGHPVVKLLGYSEKPLTLQMFIGTADERNLRPHAFYQVHRITGKMVATASYEAVVSGTKVLEMTLLPENNMAANIDCAGILKLRNSDIELRKGETDIGRKNTRVRLVFRVHVPQGGGKVVSVQAASVPIECSQRSAQELPQVEAYSPSACSVRGGEELVLTGSNFLPDSKVVFIERGPDGKLQWEEEATVNRLQSNEVTLTLTVPEYSNKRVSRPVQVYFYVSNGRRKRSPTQSFRFLPVICKEEPLPDSSLRGFPSASATPFGTDMDFSPPRPPYPSYPHEDPACETPYLSEGFGYGMPPLYPQTGPPPSYRPGLRMFPETRGTTVSEIIGRDLSGFPAPPGEEPPA

SEQ ID NO: 31049 - protein, 807 aa, Homo sapiens
MLSGRDLGAPAGSMGAASCEDEELEFKLVFGEEKEAPPLGAGGLGEELDSEDAPPCCRLALGEPPPYGAAPIGIPRPPPPRPGMHSPPPRPAPSPGTWESQPARSVRLGGPGGGAGGAGGGRVLECPSIRITSISPTPEPPAALEDNPDAWGDGSPRDYPPPEGFGGYREAGGQGGGAFFSPSPGSSSLSSWSFFSDASDEAALYAACDEVESELNEAASRFGLGSPLPSPRASPRPWTPEDPWSLYGPSPGGRGPEDSWLLLSAPGPTPASPRPASPCGKRRYSSSGTPSSASPALSRRGSLGEEGSEPPPPPPLPLARDPGSPGPFDYVGAPPAESIPQKTRRTSSEQAVALPRSEEPASCNGKLPLGAEESVAPPGGSRKEVAGMDYLAVPSPLAWSKARIGGHSPIFRTSALPPLDWPLPSQYEQLELRIEVQPRAHHRAHYETEGSRGAVKAAPGGHPVVKLLGYSEKPLTLQMFIGTADERNLRPHAFYQVHRITGKMVATASYEAVVSGTKVLEMTLLPENNMAANIDCAGILKLRNSDIELRKGETDIGRKNTRVRLVFRVHVPQGGGKVVSVQAASVPIECSQRSAQELPQVEAYSPSACSVRGGEELVLTGSNFLPDSKVVFIERGPDGKLQWEEEATVNRLQSNEVTLTLTVPEYSNKRVSRPVQVYFYVSNGRRKRSPTQSFRFLPVICKEEPLPDSSLRGFPSASATPFGTDMDFSPPRPPYPSYPHEDPACETPYLSEGFGYGMPPLYPQTGPPPSYRPGLRMFPETRGTTVSEIIGRDLSGFPAPPGEEPPA

SEQ ID NO: 31050 - protein, 794 aa, Homo sapiens
MGAASCEDEELEFKLVFGEEKEAPPLGAGGLGEELDSEDAPPCCRLALGEPPPYGAAPIGIPRPPPPRPGMHSPPPRPAPSPGTWESQPARSVRLGGPGGGAGGAGGGRVLECPSIRITSISPTPEPPAALEDNPDAWGDGSPRDYPPPEGFGGYREAGGQGGGAFFSPSPGSSSLSSWSFFSDASDEAALYAACDEVESELNEAASRFGLGSPLPSPRASPRPWTPEDPWSLYGPSPGGRGPEDSWLLLSAPGPTPASPRPASPCGKRRYSSSGTPSSASPALSRRGSLGEEGSEPPPPPPLPLARDPGSPGPFDYVGAPPAESIPQKTRRTSSEQAVALPRSEEPASCNGKLPLGAEESVAPPGGSRKEVAGMDYLAVPSPLAWSKARIGGHSPIFRTSALPPLDWPLPSQYEQLELRIEVQPRAHHRAHYETEGSRGAVKAAPGGHPVVKLLGYSEKPLTLQMFIGTADERNLRPHAFYQVHRITGKMVATASYEAVVSGTKVLEMTLLPENNMAANIDCAGILKLRNSDIELRKGETDIGRKNTRVRLVFRVHVPQGGGKVVSVQAASVPIECSQRSAQELPQVEAYSPSACSVRGGEELVLTGSNFLPDSKVVFIERGPDGKLQWEEEATVNRLQSNEVTLTLTVPEYSNKRVSRPVQVYFYVSNGRRKRSPTQSFRFLPVICKEEPLPDSSLRGFPSASATPFGTDMDFSPPRPPYPSYPHEDPACETPYLSEGFGYGMPPLYPQTGPPPSYRPGLRMFPETRGTTVSEIIGRDLSGFPAPPGEEPPA

SEQ ID NO: 31051 - protein, 782 aa, Homo sapiens
MPASISSIFPGPTLLLSCGSEELDSEDAPPCCRLALGEPPPYGAAPIGIPRPPPPRPGMHSPPPRPAPSPGTWESQPARSVRLGGPGGGAGGAGGGRVLECPSIRITSISPTPEPPAALEDNPDAWGDGSPRDYPPPEGFGGYREAGGQGGGAFFSPSPGSSSLSSWSFFSDASDEAALYAACDEVESELNEAASRFGLGSPLPSPRASPRPWTPEDPWSLYGPSPGGRGPEDSWLLLSAPGPTPASPRPASPCGKRRYSSSGTPSSASPALSRRGSLGEEGSEPPPPPPLPLARDPGSPGPFDYVGAPPAESIPQKTRRTSSEQAVALPRSEEPASCNGKLPLGAEESVAPPGGSRKEVAGMDYLAVPSPLAWSKARIGGHSPIFRTSALPPLDWPLPSQYEQLELRIEVQPRAHHRAHYETEGSRGAVKAAPGGHPVVKLLGYSEKPLTLQMFIGTADERNLRPHAFYQVHRITGKMVATASYEAVVSGTKVLEMTLLPENNMAANIDCAGILKLRNSDIELRKGETDIGRKNTRVRLVFRVHVPQGGGKVVSVQAASVPIECSQRSAQELPQVEAYSPSACSVRGGEELVLTGSNFLPDSKVVFIERGPDGKLQWEEEATVNRLQSNEVTLTLTVPEYSNKRVSRPVQVYFYVSNGRRKRSPTQSFRFLPVICKEEPLPDSSLRGFPSASATPFGTDMDFSPPRPPYPSYPHEDPACETPYLSEGFGYGMPPLYPQTGPPPSYRPGLRMFPETRGTTVSEIIGRDLSGFPAPPGEEPPA

SEQ ID NO: 31052 - protein, 724 aa, Homo sapiens
MHSPPPRPAPSPGTWESQPARSVRLGGPGGGAGGAGGGRVLECPSIRITSISPTPEPPAALEDNPDAWGDGSPRDYPPPEGFGGYREAGGQGGGAFFSPSPGSSSLSSWSFFSDASDEAALYAACDEVESELNEAASRFGLGSPLPSPRASPRPWTPEDPWSLYGPSPGGRGPEDSWLLLSAPGPTPASPRPASPCGKRRYSSSGTPSSASPALSRRGSLGEEGSEPPPPPPLPLARDPGSPGPFDYVGAPPAESIPQKTRRTSSEQAVALPRSEEPASCNGKLPLGAEESVAPPGGSRKEVAGMDYLAVPSPLAWSKARIGGHSPIFRTSALPPLDWPLPSQYEQLELRIEVQPRAHHRAHYETEGSRGAVKAAPGGHPVVKLLGYSEKPLTLQMFIGTADERNLRPHAFYQVHRITGKMVATASYEAVVSGTKVLEMTLLPENNMAANIDCAGILKLRNSDIELRKGETDIGRKNTRVRLVFRVHVPQGGGKVVSVQAASVPIECSQRSAQELPQVEAYSPSACSVRGGEELVLTGSNFLPDSKVVFIERGPDGKLQWEEEATVNRLQSNEVTLTLTVPEYSNKRVSRPVQVYFYVSNGRRKRSPTQSFRFLPVICKEEPLPDSSLRGFPSASATPFGTDMDFSPPRPPYPSYPHEDPACETPYLSEGFGYGMPPLYPQTGPPPSYRPGLRMFPETRGTTVSEIIGRDLSGFPAPPGEEPPA

SEQ ID NO: 31053 - protein, 437 aa, Homo sapiens
MFIGTADERNLRPHAFYQVHRITGKMVATASYEAVVSGTKVLEMTLLPENNMAANIDCAGILKLRNSDIELRKGETDIGRKNTRVRLVFRVHVPQGGGKVVSVQAASVPIECSQRSAQELPQVEAYSPSACSVRGGEELVLTGSNFLPDSKVVFIERGPDGKLQWEEEATVNRLQSNEVTLTLTVPEYSNKRVSRPVQVYFYVSNGRRKRSPTQSFRFLPVICKEEPLPDSSLRGFPSASATPFGTDMDFSPPRPPYPSYPHEDPACETPYLSEGFGYGMPPLYPQTGPPPSYRPGLRMFPETRGTTGCAQPPAVSFLPRPFPSDPYGGRGSSFSLGLPFSPPAPFRPPPLPASPPLEGPFPSQSDVHPLPAEGYNKVGPGYGPGEGAPEQEKSRGGYSSGFRDSVPIQGITLEEVSEIIGRDLSGFPAPPGEEPPA

SEQ ID NO: 31054 - protein, 436 aa, Homo sapiens
MFIGTADERNLRPHAFYQVHRITGKMVATASYEAVVSGTKVLEMTLLPENNMAANIDCAGILKLRNSDIELRKGETDIGRKNTRVRLVFRVHVPQGGGKVVSVQAASVPIECSQRSAQELPQVEAYSPSACSVRGGEELVLTGSNFLPDSKVVFIERGPDGKLQWEEEATVNRLQSNEVTLTLTVPEYSNKRVSRPVQVYFYVSNGRRKRSPTQSFRFLPVICKEEPLPDSSLRGFPSASATPFGTDMDFSPPRPPYPSYPHEDPACETPYLSEGFGYGMPPLYPQTGPPPSYRPGLRMFPETRGTTGCAQPPAVSFLPRPFPSDPYGGRGSSFSLGLPFSPPAPFRPPPLPASPPLEGPFPSQSDVHPLPAEGYNKVGPGYGPGEGAPEQEKSRGGYSSGFRDSVPIQGITLEEGGCGTGGCECECVQEIALHVC

SEQ ID NO: 31055 - protein, 329 aa, Homo sapiens
MFIGTADERNLRPHAFYQVHRITGKMVATASYEAVVSGTKVLEMTLLPENNMAANIDCAGILKLRNSDIELRKGETDIGRKNTRVRLVFRVHVPQGGGKVVSVQAASVPIECSQRSAQELPQVEAYSPSACSVRGGEELVLTGSNFLPDSKVVFIERGPDGKLQWEEEATVNRLQSNEVTLTLTVPEYSNKRVSRPVQVYFYVSNGRRKRSPTQSFRFLPVICKEEPLPDSSLRGFPSASATPFGTDMDFSPPRPPYPSYPHEDPACETPYLSEGFGYGMPPLYPQTGPPPSYRPGLRMFPETRGTTVSEIIGRDLSGFPAPPGEEPPA

SEQ ID NO: 31056 - protein, 190 aa, Homo sapiens
MDFSPPRPPYPSYPHEDPACETPYLSEGFGYGMPPLYPQTGPPPSYRPGLRMFPETRGTTGCAQPPAVSFLPRPFPSDPYGGRGSSFSLGLPFSPPAPFRPPPLPASPPLEGPFPSQSDVHPLPAEGYNKVGPGYGPGEGAPEQEKSRGGYSSGFRDSVPIQGITLEEVSEIIGRDLSGFPAPPGEEPPA

SEQ ID NO: 31057 - protein, 189 aa, Homo sapiens
MDFSPPRPPYPSYPHEDPACETPYLSEGFGYGMPPLYPQTGPPPSYRPGLRMFPETRGTTGCAQPPAVSFLPRPFPSDPYGGRGSSFSLGLPFSPPAPFRPPPLPASPPLEGPFPSQSDVHPLPAEGYNKVGPGYGPGEGAPEQEKSRGGYSSGFRDSVPIQGITLEEGGCGTGGCECECVQEIALHVC

SEQ ID NO: 31058 - protein, 82 aa, Homo sapiens
MDFSPPRPPYPSYPHEDPACETPYLSEGFGYGMPPLYPQTGPPPSYRPGLRMFPETRGTTVSEIIGRDLSGFPAPPGEEPPA

SEQ ID NO: 31059 - protein, 1138 aa, Homo sapiens
MVKLSIVLTPQFLSHDQGQLTKELQQHVKSVTCPCEYLRKVINTLADHHHRGTDFGGSPWLHVIIAFPTSYKVVITLWIVYLWVSLLKTIFWSRNGHDGSTDVQQRAWRSNRRRQEGLRSICMHTKKRVSSFRGNKIGLKDVITLRRHVETKVRAKIRKRKVTTKINHHDKINGKRKTARKQKMFQRAQELRRRAEDYHKCKIPPSARKALCNWVRMAAAEHRHSSGLPYWPYLTAETLKNRMGHQPPPPTQQHSITDNSLSLKTPPECVLTPLPPSADDNLKTPPECVLTPLPPSADDNLKTPPECLLTPLPPSADDNLKTPPECLLTPLPPSADDNLKTPPECLLTPLPPSAPPSAPPSADDNLKTRAECLLHPLPPSADDNLKTPSERQLTPLPPSAPPSADDNIKTPAERLRGPLPPSADDNLKTPSERQLTPLPPSAPPSADDNIKTPAERLRGPLPPSADDNLKTPSERQLTPLPPSAPPSADDNIKTPAERLRGPLPPSADDNLKTPSERQLTPLPPSAPPSADDNIKTPAERLRGPLPPSADDNLKTPSERQLTPLPPSAPPSADDNIKTPAFHPQRMIISRHLPSVSSLPFHPQLHSQQMIISRYLLSVCGFRFHHQPMIISRHLPSVSSLPFHPQLHPQQMIISRHLPSVCGGRFHPQRMIISRHLPSVSSLPFHPQLHPQQMIISRHLPSVCGGRFHPQRMIISRHLPSVSSLPFHPQLHPQQMIISRHLPSVCGERLRGPLPPSADDNLKTPSERQLTPLPPSAPPSADDNIKTPAERLRRPLPPSADDNLKTPSERQLTPLPPSAPPSADDNIKTPAERLRGPLPPSADDNLKTPSERQLTPLPPSAPPSADDNIKTPAERLRGPLPPSADDNLKTPSERQLTPLPPSAPPSADDNIKTPAERLRGPLPPSADDNLKTPSERQLTPLPPSAPPSADDNIKTPAERLRGPLPPSADDNLKTPSERQLTPLPPSAPPSADDNIKTPAERLRGPLPPSADDNLKTPPLATQEAEAEKPRKPKRQRAAEMEPPPEPKRRRVGDVEPSRKPKRRRAADVEPSSPKPKRRRVGDVEPSRKPKRRRAADVEPSSPEPKRRRVGDVEPSRKPKRRRAADVEPSSPEPKRRRLS

SEQ ID NO: 31060 - protein, 443 aa, Homo sapiens
MRLRFWLLIWLLLGFISHQPTPVINSLAVYRHRETDFGVGVRDHPGQHGKTPSPQKLDNLIIIIIGFLRRDTFTILFCTSYLCVSFLKTIFWSRNGHDGSTDVQQRAWRSNRSRQKGLRSICMHTKKRVSSFRGNKIGLKDVITLRRHVETKVRAKIRKRKVTTKINRHDKINGKRKTARKQKMFQRAQELRRRAEDYHKCKIPPSARKPLCNWVRMAAAEHRHSSGLPCWPYLTAEALKNRMGRQPPPPTQQHSITDNSLSLKTPPECLLHPLPPSVDDNIKECPLAPLPPSVDDNLKEYLLVPLPPSPLPPSVDDNLKDCLFVPLPPSPLPPSVDDNLKTPPLATQEAEAEKPPKPKRWRVDEVEQSPKPKRRRADEVEQSPKPKRQREAEAQQLPKPKRRRLSKLRTRHCTQAWAIRINPWVEKKKKIKKQNKTHAPKTN

SEQ ID NO: 31061 - protein, 1065 aa, Homo sapiens
MRKQEVRTGREAGQGHGTGSPAEQVKALMDLLAGKGSQGSQAPQALDRTPDAPLGPCSNDSRIQRHRKALLSKVGGGPELGGPWHRLASLLLVEGLTDLQLREHDFTQVEATRGGGHPARTVALDRLFLPLSRVSVPPRVSITIGVAGMGKTTLVRHFVRLWAHGQVGKDFSLVLPLTFRDLNTHEKLCADRLICSVFPHVGEPSLAVAVPARALLILDGLDECRTPLDFSNTVACTDPKKEIPVDHLITNIIRGNLFPEVSIWITSRPSASGQIPGGLVDRMTEIRGFNEEEIKVCLEQMFPEDQALLGWMLSQVQADRALYLMCTVPAFCRLTGMALGHLWRSRTGPQDAELWPPRTLCELYSWYFRMALSGEGQEKGKASPRIEQVAHGGRKMVGTLGRLAFHGLLKKKYVFYEQDMKAFGVDLALLQGAPCSCFLQREETLASSVAYCFTHLSLQEFVAAAYYYGASRRAIFDLFTESGVSWPRLGFLTHFRSAAQRAMQAEDGRLDVFLRFLSGLLSPRVNALLAGSLLAQGEHQAYRTQVAELLQGCLRPDAAVCARAINVLHCLHELQHTELARSVEEAMESGALARLTGPAHRAALAYLLQVSDACAQEANLSLSLSQGVLQSLLPQLLYCRKLRLDTNQFQDPVMELLGSVLSGKDCRIQKISLAENQISNKGAKALARSLLVNRSLTSLDLRGNSIGPQGAKALADALKINRTLTSLSLQGNTVRDDGARSMAEALASNRTLSMLHLQKNSIGPMGAQRMADALKQNRSLKELMFSSNSIGDGGAKALAEALKVNQGLESLDLQSNSISDAGVAALMGALCTNQTLLSLSLRENSISPEGAQAIAHALCANSTLKNLDLTANLLHDQGARAIAVAVRENRTLTSLHLQWNFIQAGAAQALGQALQLNRSLTSLDLQENAIGDDGACAVARALKVNTALTALYLQVASIGASGAQVLGEALAVNRTLEILDLRGNAIGVAGAKALANALKVNSSLRRLNLQENSLGMDGAICIATALSGNHRLQHINLQGNHIGDSGARMISEAIKTNAPTCTVEM

SEQ ID NO: 31062 - protein, 1111 aa, Homo sapiens
MEMDAPRPPSLAVPGAASRPGRLLDGGHGRQQVQALSSQLLEVIPDSRKQEVRTGREAGQGHGTGSPAEQVKALMDLLAGKGSQGSQAPQALDRTPDAPLGPCSNDSRIQRHRKALLSKVGGGPELGGPWHRLASLLLVEGLTDLQLREHDFTQVEATRGGGHPARTVALDRLFLPLSRVSVPPRVSITIGVAGMGKTTLVRHFVRLWAHGQVGKDFSLVLPLTFRDLNTHEKLCADRLICSVFPHVGEPSLAVAVPARALLILDGLDECRTPLDFSNTVACTDPKKEIPVDHLITNIIRGNLFPEVSIWITSRPSASGQIPGGLVDRMTEIRGFNEEEIKVCLEQMFPEDQALLGWMLSQVQADRALYLMCTVPAFCRLTGMALGHLWRSRTGPQDAELWPPRTLCELYSWYFRMALSGEGQEKGKASPRIEQVAHGGRKMVGTLGRLAFHGLLKKKYVFYEQDMKAFGVDLALLQGAPCSCFLQREETLASSVAYCFTHLSLQEFVAAAYYYGASRRAIFDLFTESGVSWPRLGFLTHFRSAAQRAMQAEDGRLDVFLRFLSGLLSPRVNALLAGSLLAQGEHQAYRTQVAELLQGCLRPDAAVCARAINVLHCLHELQHTELARSVEEAMESGALARLTGPAHRAALAYLLQVSDACAQEANLSLSLSQGVLQSLLPQLLYCRKLRLDTNQFQDPVMELLGSVLSGKDCRIQKISLAENQISNKGAKALARSLLVNRSLTSLDLRGNSIGPQGAKALADALKINRTLTSLSLQGNTVRDDGARSMAEALASNRTLSMLHLQKNSIGPMGAQRMADALKQNRSLKELMFSSNSIGDGGAKALAEALKVNQGLESLDLQSNSISDAGVAALMGALCTNQTLLSLSLRENSISPEGAQAIAHALCANSTLKNLDLTANLLHDQGARAIAVAVRENRTLTSLHLQWNFIQAGAAQALGQALQLNRSLTSLDLQENAIGDDGACAVARALKVNTALTALYLQVASIGASGAQVLGEALAVNRTLEILDLRGNAIGVAGAKALANALKVNSSLRRLNLQENSLGMDGAICIATALSGNHRLQHINLQGNHIGDSGARMISEAIKTNAPTCTVEM

SEQ ID NO: 31063 - protein, 761 aa, Homo sapiens
MRKQEVRTGREAGQGHGTGSPAEQVKALMDLLAGKGSQGSQAPQALDRTPDAPLGPCSNDSRIQRHRKALLSKVGGGPELGGPWHRLASLLLVEGLTDLQLREHDFTQVEATRGGGHPARTVALDRLFLPLSRVSVPPRVSITIGVAGMGKTTLVRHFVRLWAHGQVGKDFSLVLPLTFRDLNTHEKLCADRLICSVFPHVGEPSLAVAVPARALLILDGLDECRTPLDFSNTVACTDPKKEIPVDHLITNIIRGNLFPEVSIWITSRPSASGQIPGGLVDRMTEIRGFNEEEIKVCLEQMFPEDQALLGWMLSQVQADRALYLMCTVPAFCRLTGMALGHLWRSRTGPQDAELWPPRTLCELYSWYFRMALSGEGQEKGKASPRIEQVAHGGRKMVGTLGRLAFHGLLKKKYVFYEQDMKAFGVDLALLQGAPCSCFLQREETLASSVAYCFTHLSLQEFVAAAYYYGASRRAIFDLFTESGVSWPRLGFLTHFRSAAQRAMQAEDGRLDVFLRFLSGLLSPRVNALLAGSLLAQGEHQAYRTQVAELLQGCLRPDAAVCARAINVLHCLHELQHTELARSVEEAMESGALARLTGPAHRAALAYLLQVSDACAQEANLSLSLSQGVLQSLLPQLLYCRKLRLDTNQFQDPVMELLGSVLSGKDCRIQKISLAENQISNKGAKALARSLLVNRSLTSLDLRGNSIGPQGAKALADALKINRTLTSLRVKFMYHKIDCFRRVPEADACNPSTLGGQGRWIT

SEQ ID NO: 31064 - protein, 1037 aa, Homo sapiens
MRKQEVRTGREAGQGHGTGSPAEQVKALMDLLAGKGSQGSQAPQALDRTPDAPLGPCSNDSRIQRHRKALLSKVGGGPELGGPWHRLASLLLVEGLTDLQLREHDFTQVEATRGGGHPARTVALDRLFLPLSRVSVPPRVSITIGVAGMGKTTLVRHFVRLWAHGQVGKDFSLVLPLTFRDLNTHEKLCADRLICSVFPHVGEPSLAVAVPARALLILDGLDECRTPLDFSNTVACTDPKKEIPVDHLITNIIRGNLFPEVSIWITSRPSASGQIPGGLVDRMTEIRGFNEEEIKVCLEQMFPEDQALLGWMLSQVQADRALYLMCTVPAFCRLTGMALGHLWRSRTGPQDAELWPPRTLCELYSWYFRMALSGEGQEKGKASPRIEQVAHGGRKMVGTLGRLAFHGLLKKKYVFYEQDMKAFGVDLALLQGAPCSCFLQREETLASSVAYCFTHLSLQEFVAAAYYYGASRRAIFDLFTESGVSWPRLGFLTHFRSAAQRAMQAEDGRLDVFLRFLSGLLSPRVNALLAGSLLAQGEHQAYRTQVAELLQGCLRPDAAVCARAINVLHCLHELQHTELARSVEEAMESGALARLTGPAHRAALAYLLQVSDACAQEANLSLSLSQGVLQSLLPQLLYCRKLRLDTNQFQDPVMELLGSVLSGKDCRIQKISLAENQISNKGAKALARSLLVNRSLTSLDLRGNSIGPQGAKALADALKINRTLTSLSLQGNTVRDDGARSMAEALASNRTLSMLHLQKNSIGPMGAQRMADALKQNRSLKELMFSSNSIGDGGAKALAEALKVNQGLESLDLQSNSISDAGVAALMGALCTNQTLLSLSLRENSISPEGAQAIAHALCANSTLKNLDLQWNFIQAGAAQALGQALQLNRSLTSLDLQENAIGDDGACAVARALKVNTALTALYLQVASIGASGAQVLGEALAVNRTLEILDLRGNAIGVAGAKALANALKVNSSLRRLNLQENSLGMDGAICIATALSGNHRLQHINLQGNHIGDSGARMISEAIKTNAPTCTVEM

SEQ ID NO: 31065 - protein, 284 aa, Homo sapiens
MFDKTRLPYVALDVLCVLLAGLPFAILTSRHTPFQRGVFCNDESIKYPYKEDTIPYALLGGIIIPFSIIVIILGETLSVYCNLLHSNSFIRNNYIATIYKAIGTFLFGAAASQSLTDIAKYSIGRLRPHFLDVCDPDWSKINCSDGYIEYYICRGNAERVKEGRLSFYSGHSSFSMYCMLFVALYLQARMKGDWARLLRPTLQFGLVAVSIYVGLSRVSDYKHHWSDVLTGLIQGALVAILVAVYVSDFFKERTSFKERKEEDSHTTLHETPTTGNHYPSNHQP

SEQ ID NO: 31066 - protein, 285 aa, Homo sapiens
MFDKTRLPYVALDVLCVLLASMPMAVLKLGQIYPFQRGFFCKDNSINYPYHDSTVTSTVLILVGVGLPISSIILGETLSVYCNLLHSNSFIRNNYIATIYKAIGTFLFGAAASQSLTDIAKYSIGRLRPHFLDVCDPDWSKINCSDGYIEYYICRGNAERVKEGRLSFYSGHSSFSMYCMLFVALYLQARMKGDWARLLRPTLQFGLVAVSIYVGLSRVSDYKHHWSDVLTGLIQGALVAILVAVYVSDFFKERTSFKERKEEDSHTTLHETPTTGNHYPSNHQP

SEQ ID NO: 31067 - protein, 938 aa, Homo sapiens
MSTMRLLTLALLFSCSVARAACDPKIVNIGAVLSTRKHEQMFREAVNQANKRHGSWKIQLNATSVTHKPNAIQMALSVCEDLISSQVYAILVSHPPTPNDHFTPTPVSYTAGFYRIPVLGLTTRMSIYSDKSIHLSFLRTVPPYSHQSSVWFEMMRVYSWNHIILLVSDDHEGRAAQKRLETLLEERESKAEKVLQFDPGTKNVTALLMEAKELEARVIILSASEDDAATVYRAAAMLNMTGSGYVWLVGEREISGNALRYAPDGILGLQLINGKNESAHISDAVGVVAQAVHELLEKENITDPPRGCVGNTNIWKTGPLFKRVLMSSKYADGVTGRVEFNEDGDRKFANYSIMNLQNRKLVQVGIYNGTHVIPNDRKIIWPGGETEKPRGYQMSTRLKIVTIHQEPFVYVKPTLSDGTCKEEFTVNGDPVKKVICTGPNDTSPGSPRHTVPQCCYGFCIDLLIKLARTMNFTYEVHLVADGKFGTQERVNNSNKKEWNGMMGELLSGQADMIVAPLTINNERAQYIEFSKPFKYQGLTILVKKEIPRSTLDSFMQPFQSTLWLLVGLSVHVVAVMLYLLDRFSPFGRFKVNSEEEEEDALTLSSAMWFSWGVLLNSGIGEGAPRSFSARILGMVWAGFAMIIVASYTANLAAFLVLDRPEERITGINDPRLRNPSDKFIYATVKQSSVDIYFRRQVELSTMYRHMEKHNYESAAEAIQAVRDNKLHAFIWDSAVLEFEASQKCDLVTTGELFFRSGFGIGMRKDSPWKQNVSLSILKSHENGFMEDLDKTWVRYQECDSRSNAPATLTFENMAGVFMLVAGGIVAGIFLIFIEIAYKRHKDARRKQMQLAFAAVNVWRKNLQDRKSGRAEPDPKKKATFRAITSTLASSFKRRRSSKDTSTGGGRGALQNQKDTVLPRRAIEREEGQLQLCSRHRES

SEQ ID NO: 31068 - protein, 885 aa, Homo sapiens
MSTMRLLTLALLFSCSVARAACDPKIVNIGAVLSTRKHEQMFREAVNQANKRHGSWKIQLNATSVTHKPNAIQMALSVCEDLISSQVYAILVSHPPTPNDHFTPTPVSYTAGFYRIPVLGLTTRMSIYSDKSIHLSFLRTVPPYSHQSSVWFEMMRVYSWNHIILLVSDDHEGRAAQKRLETLLEERESKAEKVLQFDPGTKNVTALLMEAKELEARVIILSASEDDAATVYRAAAMLNMTGSGYVWLVGEREISGNALRYAPDGILGLQLINGKNESAHISDAVGVVAQAVHELLEKENITDPPRGCVGNTNIWKTGPLFKRVLMSSKYADGVTGRVEFNEDGDRKFANYSIMNLQNRKLVQVGIYNGTHVIPNDRKIIWPGGETEKPRGYQMSTRLKIVTIHQEPFVYVKPTLSDGTCKEEFTVNGDPVKKVICTGPNDTSPGSPRHTVPQCCYGFCIDLLIKLARTMNFTYEVHLVADGKFGTQERVNNSNKKEWNGMMGELLSGQADMIVAPLTINNERAQYIEFSKPFKYQGLTILVKKEIPRSTLDSFMQPFQSTLWLLVGLSVHVVAVMLYLLDRFSPFGRFKVNSEEEEEDALTLSSAMWFSWGVLLNSGIGEGAPRSFSARILGMVWAGFAMIIVASYTANLAAFLVLDRPEERITGINDPRLRNPSDKFIYATVKQSSVDIYFRRQVELSTMYRHMEKHNYESAAEAIQAVRDNKLHAFIWDSAVLEFEASQKCDLVTTGELFFRSGFGIGMRKDSPWKQNVSLSILKSHENGFMEDLDKTWVRYQECDSRSNAPATLTFENMAGVFMLVAGGIVAGIFLIFIEIAYKRHKDARRKQMQLAFAAVNVWRKNLQQYHPTDITGPLNLSDPSVSTVV

SEQ ID NO: 31069 - protein, 901 aa, Homo sapiens
MSTMRLLTLALLFSCSVARAACDPKIVNIGAVLSTRKHEQMFREAVNQANKRHGSWKIQLNATSVTHKPNAIQMALSVCEDLISSQVYAILVSHPPTPNDHFTPTPVSYTAGFYRIPVLGLTTRMSIYSDKSIHLSFLRTVPPYSHQSSVWFEMMRVYSWNHIILLVSDDHEGRAAQKRLETLLEERESKAEKVLQFDPGTKNVTALLMEAKELEARVIILSASEDDAATVYRAAAMLNMTGSGYVWLVGEREISGNALRYAPDGILGLQLINGKNESAHISDAVGVVAQAVHELLEKENITDPPRGCVGNTNIWKTGPLFKRVLMSSKYADGVTGRVEFNEDGDRKFANYSIMNLQNRKLVQVGIYNGTHVIPNDRKIIWPGGETEKPRGYQMSTRLKIVTIHQEPFVYVKPTLSDGTCKEEFTVNGDPVKKVICTGPNDTSPGSPRHTVPQCCYGFCIDLLIKLARTMNFTYEVHLVADGKFGTQERVNNSNKKEWNGMMGELLSGQADMIVAPLTINNERAQYIEFSKPFKYQGLTILVKKEIPRSTLDSFMQPFQSTLWLLVGLSVHVVAVMLYLLDRFSPFGRFKVNSEEEEEDALTLSSAMWFSWGVLLNSGIGEGAPRSFSARILGMVWAGFAMIIVASYTANLAAFLVLDRPEERITGINDPRLRNPSDKFIYATVKQSSVDIYFRRQVELSTMYRHMEKHNYESAAEAIQAVRDNKLHAFIWDSAVLEFEASQKCDLVTTGELFFRSGFGIGMRKDSPWKQNVSLSILKSHENGFMEDLDKTWVRYQECDSRSNAPATLTFENMAGVFMLVAGGIVAGIFLIFIEIAYKRHKDARRKQMQLAFAAVNVWRKNLQSTGGGRGALQNQKDTVLPRRAIEREEGQLQLCSRHRES

SEQ ID NO: 31070 - protein, 922 aa, Homo sapiens
MSTMRLLTLALLFSCSVARAACDPKIVNIGAVLSTRKHEQMFREAVNQANKRHGSWKIQLNATSVTHKPNAIQMALSVCEDLISSQVYAILVSHPPTPNDHFTPTPVSYTAGFYRIPVLGLTTRMSIYSDKSIHLSFLRTVPPYSHQSSVWFEMMRVYSWNHIILLVSDDHEGRAAQKRLETLLEERESKAEKVLQFDPGTKNVTALLMEAKELEARVIILSASEDDAATVYRAAAMLNMTGSGYVWLVGEREISGNALRYAPDGILGLQLINGKNESAHISDAVGVVAQAVHELLEKENITDPPRGCVGNTNIWKTGPLFKRVLMSSKYADGVTGRVEFNEDGDRKFANYSIMNLQNRKLVQVGIYNGTHVIPNDRKIIWPGGETEKPRGYQMSTRLKIVTIHQEPFVYVKPTLSDGTCKEEFTVNGDPVKKVICTGPNDTSPGSPRHTVPQCCYGFCIDLLIKLARTMNFTYEVHLVADGKFGTQERVNNSNKKEWNGMMGELLSGQADMIVAPLTINNERAQYIEFSKPFKYQGLTILVKKEIPRSTLDSFMQPFQSTLWLLVGLSVHVVAVMLYLLDRFSPFGRFKVNSEEEEEDALTLSSAMWFSWGVLLNSGIGEGAPRSFSARILGMVWAGFAMIIVASYTANLAAFLVLDRPEERITGINDPRLRNPSDKFIYATVKQSSVDIYFRRQVELSTMYRHMEKHNYESAAEAIQAVRDNKLHAFIWDSAVLEFEASQKCDLVTTGELFFRSGFGIGMRKDSPWKQNVSLSILKSHENGFMEDLDKTWVRYQECDSRSNAPATLTFENMAGVFMLVAGGIVAGIFLIFIEIAYKRHKDARRKQMQLAFAAVNVWRKNLQDRKSGRAEPDPKKKATFRAITSTLASSFKRRRSSKDTQYHPTDITGPLNLSDPSVSTVV

SEQ ID NO: 31071 - protein, 959 aa, Homo sapiens
MSTMRLLTLALLFSCSVARAACDPKIVNIGAVLSTRKHEQMFREAVNQANKRHGSWKIQLNATSVTHKPNAIQMALSVCEDLISSQVYAILVSHPPTPNDHFTPTPVSYTAGFYRIPVLGLTTRMSIYSDKSIHLSFLRTVPPYSHQSSVWFEMMRVYSWNHIILLVSDDHEGRAAQKRLETLLEERESKSKKRNYENLDQLSYDNKRGPKAEKVLQFDPGTKNVTALLMEAKELEARVIILSASEDDAATVYRAAAMLNMTGSGYVWLVGEREISGNALRYAPDGILGLQLINGKNESAHISDAVGVVAQAVHELLEKENITDPPRGCVGNTNIWKTGPLFKRVLMSSKYADGVTGRVEFNEDGDRKFANYSIMNLQNRKLVQVGIYNGTHVIPNDRKIIWPGGETEKPRGYQMSTRLKIVTIHQEPFVYVKPTLSDGTCKEEFTVNGDPVKKVICTGPNDTSPGSPRHTVPQCCYGFCIDLLIKLARTMNFTYEVHLVADGKFGTQERVNNSNKKEWNGMMGELLSGQADMIVAPLTINNERAQYIEFSKPFKYQGLTILVKKEIPRSTLDSFMQPFQSTLWLLVGLSVHVVAVMLYLLDRFSPFGRFKVNSEEEEEDALTLSSAMWFSWGVLLNSGIGEGAPRSFSARILGMVWAGFAMIIVASYTANLAAFLVLDRPEERITGINDPRLRNPSDKFIYATVKQSSVDIYFRRQVELSTMYRHMEKHNYESAAEAIQAVRDNKLHAFIWDSAVLEFEASQKCDLVTTGELFFRSGFGIGMRKDSPWKQNVSLSILKSHENGFMEDLDKTWVRYQECDSRSNAPATLTFENMAGVFMLVAGGIVAGIFLIFIEIAYKRHKDARRKQMQLAFAAVNVWRKNLQDRKSGRAEPDPKKKATFRAITSTLASSFKRRRSSKDTSTGGGRGALQNQKDTVLPRRAIEREEGQLQLCSRHRES

SEQ ID NO: 31072 - protein, 943 aa, Homo sapiens
MSTMRLLTLALLFSCSVARAACDPKIVNIGAVLSTRKHEQMFREAVNQANKRHGSWKIQLNATSVTHKPNAIQMALSVCEDLISSQVYAILVSHPPTPNDHFTPTPVSYTAGFYRIPVLGLTTRMSIYSDKSIHLSFLRTVPPYSHQSSVWFEMMRVYSWNHIILLVSDDHEGRAAQKRLETLLEERESKSKKRNYENLDQLSYDNKRGPKAEKVLQFDPGTKNVTALLMEAKELEARVIILSASEDDAATVYRAAAMLNMTGSGYVWLVGEREISGNALRYAPDGILGLQLINGKNESAHISDAVGVVAQAVHELLEKENITDPPRGCVGNTNIWKTGPLFKRVLMSSKYADGVTGRVEFNEDGDRKFANYSIMNLQNRKLVQVGIYNGTHVIPNDRKIIWPGGETEKPRGYQMSTRLKIVTIHQEPFVYVKPTLSDGTCKEEFTVNGDPVKKVICTGPNDTSPGSPRHTVPQCCYGFCIDLLIKLARTMNFTYEVHLVADGKFGTQERVNNSNKKEWNGMMGELLSGQADMIVAPLTINNERAQYIEFSKPFKYQGLTILVKKEIPRSTLDSFMQPFQSTLWLLVGLSVHVVAVMLYLLDRFSPFGRFKVNSEEEEEDALTLSSAMWFSWGVLLNSGIGEGAPRSFSARILGMVWAGFAMIIVASYTANLAAFLVLDRPEERITGINDPRLRNPSDKFIYATVKQSSVDIYFRRQVELSTMYRHMEKHNYESAAEAIQAVRDNKLHAFIWDSAVLEFEASQKCDLVTTGELFFRSGFGIGMRKDSPWKQNVSLSILKSHENGFMEDLDKTWVRYQECDSRSNAPATLTFENMAGVFMLVAGGIVAGIFLIFIEIAYKRHKDARRKQMQLAFAAVNVWRKNLQDRKSGRAEPDPKKKATFRAITSTLASSFKRRRSSKDTQYHPTDITGPLNLSDPSVSTVV

SEQ ID NO: 31073 - protein, 906 aa, Homo sapiens
MSTMRLLTLALLFSCSVARAACDPKIVNIGAVLSTRKHEQMFREAVNQANKRHGSWKIQLNATSVTHKPNAIQMALSVCEDLISSQVYAILVSHPPTPNDHFTPTPVSYTAGFYRIPVLGLTTRMSIYSDKSIHLSFLRTVPPYSHQSSVWFEMMRVYSWNHIILLVSDDHEGRAAQKRLETLLEERESKSKKRNYENLDQLSYDNKRGPKAEKVLQFDPGTKNVTALLMEAKELEARVIILSASEDDAATVYRAAAMLNMTGSGYVWLVGEREISGNALRYAPDGILGLQLINGKNESAHISDAVGVVAQAVHELLEKENITDPPRGCVGNTNIWKTGPLFKRVLMSSKYADGVTGRVEFNEDGDRKFANYSIMNLQNRKLVQVGIYNGTHVIPNDRKIIWPGGETEKPRGYQMSTRLKIVTIHQEPFVYVKPTLSDGTCKEEFTVNGDPVKKVICTGPNDTSPGSPRHTVPQCCYGFCIDLLIKLARTMNFTYEVHLVADGKFGTQERVNNSNKKEWNGMMGELLSGQADMIVAPLTINNERAQYIEFSKPFKYQGLTILVKKEIPRSTLDSFMQPFQSTLWLLVGLSVHVVAVMLYLLDRFSPFGRFKVNSEEEEEDALTLSSAMWFSWGVLLNSGIGEGAPRSFSARILGMVWAGFAMIIVASYTANLAAFLVLDRPEERITGINDPRLRNPSDKFIYATVKQSSVDIYFRRQVELSTMYRHMEKHNYESAAEAIQAVRDNKLHAFIWDSAVLEFEASQKCDLVTTGELFFRSGFGIGMRKDSPWKQNVSLSILKSHENGFMEDLDKTWVRYQECDSRSNAPATLTFENMAGVFMLVAGGIVAGIFLIFIEIAYKRHKDARRKQMQLAFAAVNVWRKNLQQYHPTDITGPLNLSDPSVSTVV

SEQ ID NO: 31074 - protein, 500 aa, Homo sapiens
MATVIPGDLSEVRDTQKVPSGKRKRGETKPRKNFPCQLCDKAFNSVEKLKVHSYSHTGERPYKCIQQDCTKAFVSKYKLQRHMATHSPEKTHKCNYCEKMFHRKDHLKNHLHTHDPNKETFKCEECGKNYNTKLGFKRHLALHAATSGDLTCKVCLQTFESTGVLLEHLKSHAGKSSGGVKEKKHQCEHCDRRFYTRKDVRRHMVVHTGRKDFLCQYCAQRFGRKDHLTRHMKKSHNQELLKVKTEPVDFLDPFTCNVSVPIKDELLPVMSLPSSELLSKPFTNTLQLNLYNTPFQSMQSSGSAHQMITTLPLGMTCPIDMDTVHPSHHLSFKYPFSSTSYAISIPEKEQPLKGEIESYLMELQGGVPSSSQDSQASSSSKLGLDPQIGSLDDGAGDLSLSKSSISISDPLNTPALDFSQLFNFIPLNGPPYNPLSVGSLGMSYSQEEAHSSVSQLPPQTQDLQDPANTIGLGSLHSLSAAFTSSLSTSTTLPRFHQAFQ

SEQ ID NO: 31075 - protein, 418 aa, Homo sapiens
MATHSPEKTHKCNYCEKMFHRKDHLKNHLHTHDPNKETFKCEECGKNYNTKLGFKRHLALHAATSGDLTCKVCLQTFESTGVLLEHLKSHAGKSSGGVKEKKHQCEHCDRRFYTRKDVRRHMVVHTGRKDFLCQYCAQRFGRKDHLTRHMKKSHNQELLKVKTEPVDFLDPFTCNVSVPIKDELLPVMSLPSSELLSKPFTNTLQLNLYNTPFQSMQSSGSAHQMITTLPLGMTCPIDMDTVHPSHHLSFKYPFSSTSYAISIPEKEQPLKGEIESYLMELQGGVPSSSQDSQASSSSKLGLDPQIGSLDDGAGDLSLSKSSISISDPLNTPALDFSQLFNFIPLNGPPYNPLSVGSLGMSYSQEEAHSSVSQLPPQTQDLQDPANTIGLGSLHSLSAAFTSSLSTSTTLPRFHQAFQ

SEQ ID NO: 31076 - protein, 745 aa, Homo sapiens
MEVMNLMEQPIKVTEWQQTYTYDSGIHSGANTCVPSVSSKGIMEEDEACGRQYTLKKTTTYTQGVPPSQGDLEYQMSTTARAKRVREAMCPGVSGEDSSLLLATQVEGQATNLQRLAEPSQLLKSAIVHLINYQDDAELATRALPELTKLLNDEDPVVVTKAAMIVNQLSKKEASRRALMGSPQLVAAVVRTMQNTSDLDTARCTTSILHNLSHHREGLLAIFKSGGIPALVRMLSSPVESVLFYAITTLHNLLLYQEGAKMAVRLADGLQKMVPLLNKNNPKFLAITTDCLQLLAYGNQESKLIILANGGPQALVQIMRNYSYEKLLWTTSRVLKVLSVCPSNKPAIVEAGGMQALGKHLTSNSPRLVQNCLWTLRNLSDVATKQEGLESVLKILVNQLSVDDVNVLTCATGTLSNLTCNNSKNKTLVTQNSGVEALIHAILRAGDKDDITEPAVCALRHLTSRHPEAEMAQNSVRLNYGIPAIVKLLNQPNQWPLVKATIGLIRNLALCPANHAPLQEAAVIPRLVQLLVKAHQDAQRHVAAGTQQPYTDGVRMEEIVEGCTGALHILARDPMNRMEIFRLNTIPLFVQLLYSSVENIQRVAAGVLCELAQDKEAADAIDAEGASAPLMELLHSRNEGTATYAAAVLFRISEDKNPDYRKRVSVELTNSLFKHDPAAWEAAQSMIPINEPYGDDMDATYRPMYSSDVPLDPLEMHMDMDGDYPIDTYSDGLRPPYPTADHMLA

SEQ ID NO: 31077 - protein, 485 aa, Homo sapiens
MSVPLLKIGVVLSTMAMITNWMSQTLPSLVGLNTTKLSAAGGGTLDRSTGVLPTNPEESWQVYSSAQDSEGRCICTVVAPQQTMCSRDARTKQLRQLLEKVQNMSQSIEVLDRRTQRDLQYVEKMENQMKGLESKFKQVEESHKQHLARQFKAIKAKMDELRPLIPVLEEYKADAKLVLQFKEEVQNLTSVLNELQEEIGAYDYDELQSRVSNLEERLRACMQKLACGKLTGISDPVTVKTSGSRFGSWMTDPLAPEGDNRVWYMDGYHNNRFVREYKSMVDFMNTDNFTSHRLPHPWSGTGQVVYNGSIYFNKFQSHIIIRFDLKTETILKTRSLDYAGYNNMYHYAWGGHSDIDLMVDESGLWAVYATNQNAGNIVVSRLDPVSLQTLQTWNTSYPKRSAGEAFIICGTLYVTNGYSGGTKVHYAYQTNASTYEYIDIPFQNKYSHISMLDYNPKDRALYAWNNGHQILYNVTLFHVIRSDEL

SEQ ID NO: 31078 - protein, 153 aa, Homo sapiens
MSVPLLKIGVVLSTMAMITNWMSQTLPSLVGLNTTKLSAAGGGTLDRSTGVLPTNPEESWQVYSSAQDSEGRCICTVVAPQQTMCSRDARTKQLRQLLEKVQNMSQSIEVLDRRTQRDLQYVEKMENQMKGLESKFKQVEESHKQHLARQFKG

SEQ ID NO: 31079 - protein, 467 aa, Homo sapiens
MPGRWRWQRDMHPARKLLSLLFLILMGTELTQVLPTNPEESWQVYSSAQDSEGRCICTVVAPQQTMCSRDARTKQLRQLLEKVQNMSQSIEVLDRRTQRDLQYVEKMENQMKGLESKFKQVEESHKQHLARQFKAIKAKMDELRPLIPVLEEYKADAKLVLQFKEEVQNLTSVLNELQEEIGAYDYDELQSRVSNLEERLRACMQKLACGKLTGISDPVTVKTSGSRFGSWMTDPLAPEGDNRVWYMDGYHNNRFVREYKSMVDFMNTDNFTSHRLPHPWSGTGQVVYNGSIYFNKFQSHIIIRFDLKTETILKTRSLDYAGYNNMYHYAWGGHSDIDLMVDESGLWAVYATNQNAGNIVVSRLDPVSLQTLQTWNTSYPKRSAGEAFIICGTLYVTNGYSGGTKVHYAYQTNASTYEYIDIPFQNKYSHISMLDYNPKDRALYAWNNGHQILYNVTLFHVIRSDEL

SEQ ID NO: 31080 - protein, 135 aa, Homo sapiens
MPGRWRWQRDMHPARKLLSLLFLILMGTELTQVLPTNPEESWQVYSSAQDSEGRCICTVVAPQQTMCSRDARTKQLRQLLEKVQNMSQSIEVLDRRTQRDLQYVEKMENQMKGLESKFKQVEESHKQHLARQFKG

SEQ ID NO: 31081 - protein, 458 aa, Homo sapiens
MGEAPGREGRGPCPQLESPRRRRVLPTNPEESWQVYSSAQDSEGRCICTVVAPQQTMCSRDARTKQLRQLLEKVQNMSQSIEVLDRRTQRDLQYVEKMENQMKGLESKFKQVEESHKQHLARQFKAIKAKMDELRPLIPVLEEYKADAKLVLQFKEEVQNLTSVLNELQEEIGAYDYDELQSRVSNLEERLRACMQKLACGKLTGISDPVTVKTSGSRFGSWMTDPLAPEGDNRVWYMDGYHNNRFVREYKSMVDFMNTDNFTSHRLPHPWSGTGQVVYNGSIYFNKFQSHIIIRFDLKTETILKTRSLDYAGYNNMYHYAWGGHSDIDLMVDESGLWAVYATNQNAGNIVVSRLDPVSLQTLQTWNTSYPKRSAGEAFIICGTLYVTNGYSGGTKVHYAYQTNASTYEYIDIPFQNKYSHISMLDYNPKDRALYAWNNGHQILYNVTLFHVIRSDEL

SEQ ID NO: 31082 - protein, 454 aa, Homo sapiens
MWPLTVPPPLLLLLCSGLAGQTLFQNPEEGWQLYTSAQAPDGKCICTAVIPAQSTCSRDGRSRELRQLMEKVQNVSQSMEVLELRTYRDLQYVRGMETLMRSLDARLRAADGSLSAKSFQELKDRMTELLPLSSVLEQYKADTRTIVRLREEVRNLSGSLAAIQEEMGAYGYEDLQQRVMALEARLHACAQKLGCGKLTGVSNPITVRAMGSRFGSWMTDTMAPSADSRVWYMDGYYKGRRVLEFRTLGDFIKGQNFIQHLLPQPWAGTGHVVYNGSLFYNKYQSNVVVKYHFRSRSVLVQRSLPGAGYNNTFPYSWGGFSDMDFMVDESGLWAVYTTNQNAGNIVVSRLDPHTLEVMRSWDTGYPKRSAGEAFMICGVLYVTNSHLAGAKVYFAYFTNTSSYEYTDVPFHNQYSHISMLDYNPRERALYTWNNGHQVLYNVTLFHVISTSGDP

SEQ ID NO: 31083 - protein, 750 aa, Homo sapiens
MGKSESQMDITDINTPKPKKKQRWTPLEISLSVLVLLLTIIAVTMIALYATYDDGICKSSDCIKSAARLIQNMDATTEPCTDFFKYACGGWLKRNVIPETSSRYGNFDILRDELEVVLKDVLQEPKTEDIVAVQKAKALYRSCINESAIDSRGGEPLLKLLPDIYGWPVATENWEQKYGASWTAEKAIAQLNSKYGKKVLINLFVGTDDKNSVNHVIHIDQPRLGLPSRDYYECTGIYKEACTAYVDFMISVARLIRQEERLPIDENQLALEMNKVMELEKEIANATAKPEDRNDPMLLYNKMTLAQIQNNFSLEINGKPFSWLNFTNEIMSTVNISITNEEDVVVYAPEYLTKLKPILTKYSARDLQNLMSWRFIMDLVSSLSRTYKESRNAFRKALYGTTSETATWRRCANYVNGNMENAVGRLYVEAAFAGESKHVVEDLIAQIREVFIQTLDDLTWMDAETKKRAEEKALAIKERIGYPDDIVSNDNKLNNEYLELNYKEDEYFENIIQNLKFSQSKQLKKLREKVDKDEWISGAAVVNAFYSSGRNQIVFPAGILQPPFFSAQQSNSLNYGGIGMVIGHEITHGFDDNGRNFNKDGDLVDWWTQQSASNFKEQSQCMVYQYGNFSWDLAGGQHLNGINTLGENIADNGGLGQAYRAYQNYIKKNGEEKLLPGLDLNHKQLFFLNFAQVWCGTYRPEYAVNSIKTDVHSPGNFRIIGTLQNSAEFSEAFHCRKNSYMNPEKKCRVW

SEQ ID NO: 31084 - protein, 345 aa, Homo sapiens
MDGEDIPDFSSLKEETAYWKELSLKYKQSFQEARDELVEFQEGSRELEAELEAQLVQAEQRNRDLQADNQRLKYEVEALKEKLEHQYAQSYKQVSVLEDDLSQTRAIKEQLHKYVRELEQANDDLERAKRATIVSLEDFEQRLNQAIERNAFLESELDEKESLLVSVQRLKDEARDLRQELAVRERQQEVTRKSAPSSPTLDCEKMDSAVQASLSLPATPVGKGTENTFPSPKAIPNGFGTSPLTPSARISALNIVGDLLRKVGALESKLAACRNFAKDQASRKSYISGNVNCGVLNGNGTKFSRSGHTSFFDKGAVNGFDPAPPPPGLGSSRPSSAPGMLPLSV

SEQ ID NO: 31085 - protein, 367 aa, Homo sapiens
MDGEDIPDFSSLKEETAYWKELSLKYKQSFQEARDELVEFQEGSRELEAELEAQLVQAEQRNRDLQADNQRLKYEVEALKEKLEHQYAQSYKQVSVLEDDLSQTRAIKEQLHKYVRELEQANDDLERAKRATIVSLEDFEQRLNQAIERNAFLESELDEKESLLVSVQRLKDEARDLRQELAVRERQQEVTRKSAPSSPTLDCEKMDSAVQASLSLPATPVGKGTENTFPSPKAIPNGFGTSPLTPSARISALNIVGDLLRKVGALESKLAACRNFAKDQASRKSYISGNVNCGVLNGNGTKFSRSGHTSFFDKGSSSSCAIRASRRRFSSSSADLAGRGGGDGSIPAQHSTGASGKAPPPTLLLET

SEQ ID NO: 31086 - protein, 328 aa, Homo sapiens
MDGEDIPDFSSLKEETAYWKELSLKYKQSFQEARDELVEFQEGSRELEAELEAQLVQAEQRNRDLQADNQRLKYEVEALKEKLEHQYAQSYKQVSVLEDDLSQTRAIKEQLHKYVRELEQANDDLERAKRATIVSLEDFEQRLNQAIERNAFLESELDEKESLLVSVQRLKDEARDLRQELAVRERQQEVTRKSAPSSPTLDCEKMDSAVQASLSLPATPVGKGTENTFPSPKAIPNGFGTSPLTPSARISALNIVGDLLRKVGALESKLAACRNFAKDQASRKSYISGNVNCGVLNGNGTKFSRSGHTSFFDKGQEKVIFPTLFMGQ

SEQ ID NO: 31087 - protein, 426 aa, Homo sapiens
MTPLCLNCSVLPGDLYPGGARNPMACNGSAARGHFDPEDLNLTDEALRLKYLGPQQTELFMPICATYLLIFVVGAVGNGLTCLVILRHKAMRTPTNYYLFSLAVSDLLVLLVGLPLELYEMWHNYPFLLGVGGCYFRTLLFEMVCLASVLNVTALSVERYVAVVHPLQARSMVTRAHVRRVLGAVWGLAMLCSLPNTSLHGIRQLHVPCRGPVPDSAVCMLVRPRALYNMVVQTTALLFFCLPMAIMSVLYLLIGLRLRRERLLLMQEAKGRGSAAARSRYTCRLQQHDRGRRQVTKMLFVLVVVFGICWAPFHADRVMWSVVSQWTDGLHLAFQHVHVISGIFFYLGSAANPVLYSLMSSRFRETFQEALCLGACCHRLRPRHSSHSLSRMTTGSTLCDVGSLGSWVHPLAGNDGPEAQQETDPS

SEQ ID NO: 31088 - protein, 942 aa, Homo sapiens
MASDAVQSEPRSWSLLEQLGLAGADLAAPGVQQQLELERERLRREIRKELKLKEGAENLRRATTDLGRSLGPVELLLRGSSRRLDLLHQQLQELHAHVVLPDPAATHDGPQSPGAGGPTCSATNLSRVAGLEKQLAIELKVKQGAENMIQTYSNGSTKDRKLLLTAQQMLQDSKTKIDIIRMQLRRALQAGQLENQAAPDDTQGSPDLGAVELRIEELRHHFRVEHAVAEGAKNVLRLLSAAKAPDRKAVSEAQEKLTESNQKLGLLREALERRLGELPADHPKGRLLREELAAASSAAFSTRLAGPFPATHYSTLCKPAPLTGTLEVRVVGCRDLPETIPWNPTPSMGGPGTPDSRPPFLSRPARGLYSRSGSLSGRSSLKAEAENTSEVSTVLKLDNTVVGQTSWKPCGPNAWDQSFTLELERARELELAVFWRDQRGLCALKFLKLEDFLDNERHEVQLDMEPQGCLVAEVTFRNPVIERIPRLRRQKKIFSKQQGKAFQRARQMNIDVATWVRLLRRLIPNATGTGTFSPGASPGSEARTTGDISVEKLNLGTDSDSSPQKSSRDPPSSPSSLSSPIQESTAPELPSETQETPGPALCSPLRKSPLTLEDFKFLAVLGRGHFGKVLLSEFRPSGELFAIKALKKGDIVARDEVESLMCEKRILAAVTSAGHPFLVNLFGCFQTPEHVCFVMEYSAGGDLMLHIHSDVFSEPRAIFYSACVVLGLQFLHEHKIVYRDLKLDNLLLDTEGYVKIADFGLCKEGMGYGDRTSTFCGTPEFLAPEVLTDTSYTRAVDWWGLGVLLYEMLVGESPFPGDDEEEVFDSIVNDEVRYPRFLSAEAIGIMRRLLRRNPERRLGSSERDAEDVKKQPFFRTLGWEALLARRLPPPFVPTLSGRTDVSNFDEEFTGEAPTLSPPRDARPLTAAEQAAFLDFDFVAGGC

SEQ ID NO: 31089 - protein, 948 aa, Homo sapiens
MAEANNPSEQELESEPRSWSLLEQLGLAGADLAAPGVQQQLELERERLRREIRKELKLKEGAENLRRATTDLGRSLGPVELLLRGSSRRLDLLHQQLQELHAHVVLPDPAATHDGPQSPGAGGPTCSATNLSRVAGLEKQLAIELKVKQGAENMIQTYSNGSTKDRKLLLTAQQMLQDSKTKIDIIRMQLRRALQAGQLENQAAPDDTQGSPDLGAVELRIEELRHHFRVEHAVAEGAKNVLRLLSAAKAPDRKAVSEAQEKLTESNQKLGLLREALERRLGELPADHPKGRLLREELAAASSAAFSTRLAGPFPATHYSTLCKPAPLTGTLEVRVVGCRDLPETIPWNPTPSMGGPGTPDSRPPFLSRPARGLYSRSGSLSGRSSLKAEAENTSEVSTVLKLDNTVVGQTSWKPCGPNAWDQSFTLELERARELELAVFWRDQRGLCALKFLKLEDFLDNERHEVQLDMEPQGCLVAEVTFRNPVIERIPRLRRQKKIFSKQQGKAFQRARQMNIDVATWVRLLRRLIPNATGTGTFSPGASPGSEARTTGDISVEKLNLGTDSDSSPQKSSRDPPSSPSSLSSPIQESTAPELPSETQETPGPALCSPLRKSPLTLEDFKFLAVLGRGHFGKVLLSEFRPSGELFAIKALKKGDIVARDEVESLMCEKRILAAVTSAGHPFLVNLFGCFQTPEHVCFVMEYSAGGDLMLHIHSDVFSEPRAIFYSACVVLGLQFLHEHKIVYRDLKLDNLLLDTEGYVKIADFGLCKEGMGYGDRTSTFCGTPEFLAPEVLTDTSYTRAVDWWGLGVLLYEMLVGESPFPGDDEEEVFDSIVNDEVRYPRFLSAEAIGIMRRLLRRNPERRLGSSERDAEDVKKQPFFRTLGWEALLARRLPPPFVPTLSGRTDVSNFDEEFTGEAPTLSPPRDARPLTAAEQAAFLDFDFVAGGC

SEQ ID NO: 31090 - protein, 603 aa, Homo sapiens
MASDAVQSEPRSWSLLEQLGLAGADLAAPGVQQQLELERERLRREIRKELKLKEGAENLRRATTDLGRSLGPVELLLRGSSRRLDLLHQQLQELHAHVVLPDPAATHDGPQSPGAGGPTCSATNLSRVAGLEKQLAIELKVKQGAENMIQTYSNGSTKDRKLLLTAQQMLQDSKTKIDIIRMQLRRALQAGQLENQAAPDDTQGSPDLGAVELRIEELRHHFRVEHAVAEGAKNVLRLLSAAKAPDRKAVSEAQEKLTESNQKLGLLREALERRLGELPADHPKGRLLREELAAASSAAFSTRLAGPFPATHYSTLCKPAPLTGTLEVRVVGCRDLPETIPWNPTPSMGGPGTPDSRPPFLSRPARGLYSRSGSLSGRSSLKAEAENTSEVSTVLKLDNTVVGQTSWKPCGPNAWDQSFTLELERARELELAVFWRDQRGLCALKFLKLEDFLDNERHEVQLDMEPQGCLVAEVTFRNPVIERIPRLRRQKKIFSKQQGKAFQRARQMNIDVATWVRLLRRLIPNATGTGTFSPGASPGSEARTTGDISVEKLNLGTDSDSSPQKSSRDPPSSPSSLSSPIQESTAPELPSETQETPGPALCR

SEQ ID NO: 31091 - protein, 1410 aa, Homo sapiens
MADTDLFMECEEEELEPWQKISDVIEDSVVEDYNSVDKTTTVSVSQQPVSAPVPIAAHASVAGHLSTSTTVSSSGAQNSDSTKKTLVTLIANNNAGNPLVQQGGQPLILTQNPAPGLGTMVTQPVLRPVQVMQNANHVTSSPVASQPIFITTQGFPVRNVRPVQNAMNQVGIVLNVQQGQTVRPITLVPAPGTQFVKPTVGVPQVFSQMTPVRPGSTMPVRPTTNTFTTVIPATLTIRSTVPQSQSQQTKSTPSTSTTPTATQPTSLGQLAVQSPGQSNQTTNPKLAPSFPSPPAVSIASFVTVKRPGVTGENSNEVAKLVNTLNTIPSLGQSPGPVVVSNNSSAHGSQRTSGPESSMKVTSSIPVFDLQDGGRKICPRCNAQFRVTEALRGHMCYCCPEMVEYQKKGKSLDSEPSVPSAAKPPSPEKTAPVASTPSSTPIPALSPPTKVPEPNENVGDAVQTKLIMLVDDFYYGRDGGKVAQLTNFPKVATSFRCPHCTKRLKNNIRFMNHMKHHVELDQQNGEVDGHTICQHCYRQFSTPFQLQCHLENVHSPYESTTKCKICEWAFESEPLFLQHMKDTHKPGEMPYVCQVCQYRSSLYSEVDVHFRMIHEDTRHLLCPYCLKVFKNGNAFQQHYMRHQKRNVYHCNKCRLQFLFAKDKIEHKLQHHKTFRKPKQLEGLKPGTKVTIRASRGQPRTVPVSSNDTPPSALQEAAPLTSSMDPLPVFLYPPVQRSIQKRAVRKMSVMGRQTCLECSFEIPDFPNHFPTYVHCSLCRYSTCCSRAYANHMINNHVPRKSPKYLALFKNSVSGIKLACTSCTFVTSVGDAMAKHLVFNPSHRSSSILPRGLTWIAHSRHGQTRDRVHDRNVKNMYPPPSFPTNKAATVKSAGATPAEPEELLTPLAPALPSPASTATPPPTPTHPQALALPPLATEGAECLNVDDQDEGSPVTQEPELASGGGGSGGVGKKEQLSVKKLRVVLFALCCNTEQAAEHFRNPQRRIRRWLRRFQASQGENLEGKYLSFEAEEKLAEWVLTQREQQLPVNEETLFQKATKIGRSLEGGFKISYEWAVRFMLRHHLTPHARRAVAHTLPKDVAENAGLFIDFVQRQIHNQDLPLSMIVAIDEISLFLDTEVLSSDDRKENALQTVGTGEPWCDVVLAILADGTVLPTLVFYRGQMDQPANMPDSILLEAKESGYSDDEIMELWSTRVWQKHTACQRSKGMLVMDCHRTHLSEEVLAMLSASSTLPAVVPAGCSSKIQPLDVCIKRTVKNFLHKKWKEQAREMADTACDSDVLLQLVLVWLGEVLGVIGDCPELVQRSFLVASVLPGPDGNINSPTRNADMQEELIASLEEQLKLSGEHSESSTPRPRSSPEETIEPESLHQLFEGESETESFYGFEEADLDLMEI

SEQ ID NO: 31092 - protein, 1357 aa, Homo sapiens
MADTDLFMECEEEELEPWQKISDVIEDSVVEDYNSVDKTTTAGNPLVQQGGQPLILTQNPAPGLGTMVTQPVLRPVQVMQNANHVTSSPVASQPIFITTQGFPVRNVRPVQNAMNQVGIVLNVQQGQTVRPITLVPAPGTQFVKPTVGVPQVFSQMTPVRPGSTMPVRPTTNTFTTVIPATLTIRSTVPQSQSQQTKSTPSTSTTPTATQPTSLGQLAVQSPGQSNQTTNPKLAPSFPSPPAVSIASFVTVKRPGVTGENSNEVAKLVNTLNTIPSLGQSPGPVVVSNNSSAHGSQRTSGPESSMKVTSSIPVFDLQDGGRKICPRCNAQFRVTEALRGHMCYCCPEMVEYQKKGKSLDSEPSVPSAAKPPSPEKTAPVASTPSSTPIPALSPPTKVPEPNENVGDAVQTKLIMLVDDFYYGRDGGKVAQLTNFPKVATSFRCPHCTKRLKNNIRFMNHMKHHVELDQQNGEVDGHTICQHCYRQFSTPFQLQCHLENVHSPYESTTKCKICEWAFESEPLFLQHMKDTHKPGEMPYVCQVCQYRSSLYSEVDVHFRMIHEDTRHLLCPYCLKVFKNGNAFQQHYMRHQKRNVYHCNKCRLQFLFAKDKIEHKLQHHKTFRKPKQLEGLKPGTKVTIRASRGQPRTVPVSSNDTPPSALQEAAPLTSSMDPLPVFLYPPVQRSIQKRAVRKMSVMGRQTCLECSFEIPDFPNHFPTYVHCSLCRYSTCCSRAYANHMINNHVPRKSPKYLALFKNSVSGIKLACTSCTFVTSVGDAMAKHLVFNPSHRSSSILPRGLTWIAHSRHGQTRDRVHDRNVKNMYPPPSFPTNKAATVKSAGATPAEPEELLTPLAPALPSPASTATPPPTPTHPQALALPPLATEGAECLNVDDQDEGSPVTQEPELASGGGGSGGVGKKEQLSVKKLRVVLFALCCNTEQAAEHFRNPQRRIRRWLRRFQASQGENLEGKYLSFEAEEKLAEWVLTQREQQLPVNEETLFQKATKIGRSLEGGFKISYEWAVRFMLRHHLTPHARRAVAHTLPKDVAENAGLFIDFVQRQIHNQDLPLSMIVAIDEISLFLDTEVLSSDDRKENALQTVGTGEPWCDVVLAILADGTVLPTLVFYRGQMDQPANMPDSILLEAKESGYSDDEIMELWSTRVWQKHTACQRSKGMLVMDCHRTHLSEEVLAMLSASSTLPAVVPAGCSSKIQPLDVCIKRTVKNFLHKKWKEQAREMADTACDSDVLLQLVLVWLGEVLGVIGDCPELVQRSFLVASVLPGPDGNINSPTRNADMQEELIASLEEQLKLSGEHSESSTPRPRSSPEETIEPESLHQLFEGESETESFYGFEEADLDLMEI

SEQ ID NO: 31093 - protein, 1366 aa, Homo sapiens
MADTDLFMECEEEELEPWQKISDVIEDSVVEDYNSVDKTTTAGNPLVQQGGQPLILTQNPAPGLGTMVTQPVLRPVQVMQNANHVTSSPVASQPIFITTQGFPVRNVRPVQNAMNQVGIVLNVQQGQTVRPITLVPAPGTQFVKPTVGVPQVFSQMTPVRPGSTMPVRPTTNTFTTVIPATLTIRSTVPQSQSQQTKSTPSTSTTPTATQPTSLGQLAVQSPGQSNQTTNPKLAPSFPSPPAVSIASFVTVKRPGVTGENSNEVAKLVNTLNTIPSLGQSPGPVVVSNNSSAHGSQRTSGPESSMKVTSSIPVFDLQDGGRKICPRCNAQFRVTEALRGHMCYCCPEMVEYQKKGKSLDSEPSVPSAAKPPSPEKTAPVASTPSSTPIPALSPPTKVPEPNENVGDAVQTKLIMLVDDFYYGRDGGKVAQLTNFPKVATSFRCPHCTKRLKNNIRFMNHMKHHVELDQQNGEVDGHTICQHCYRQFSTPFQLQCHLENVHSPYESTTKCKICEWAFESEPLFLQHMKDTHKPGEMPYVCQPYFPSYVTQVCQYRSSLYSEVDVHFRMIHEDTRHLLCPYCLKVFKNGNAFQQHYMRHQKRNVYHCNKCRLQFLFAKDKIEHKLQHHKTFRKPKQLEGLKPGTKVTIRASRGQPRTVPVSSNDTPPSALQEAAPLTSSMDPLPVFLYPPVQRSIQKRAVRKMSVMGRQTCLECSFEIPDFPNHFPTYVHCSLCRYSTCCSRAYANHMINNHVPRKSPKYLALFKNSVSGIKLACTSCTFVTSVGDAMAKHLVFNPSHRSSSILPRGLTWIAHSRHGQTRDRVHDRNVKNMYPPPSFPTNKAATVKSAGATPAEPEELLTPLAPALPSPASTATPPPTPTHPQALALPPLATEGAECLNVDDQDEGSPVTQEPELASGGGGSGGVGKKEQLSVKKLRVVLFALCCNTEQAAEHFRNPQRRIRRWLRRFQASQGENLEGKYLSFEAEEKLAEWVLTQREQQLPVNEETLFQKATKIGRSLEGGFKISYEWAVRFMLRHHLTPHARRAVAHTLPKDVAENAGLFIDFVQRQIHNQDLPLSMIVAIDEISLFLDTEVLSSDDRKENALQTVGTGEPWCDVVLAILADGTVLPTLVFYRGQMDQPANMPDSILLEAKESGYSDDEIMELWSTRVWQKHTACQRSKGMLVMDCHRTHLSEEVLAMLSASSTLPAVVPAGCSSKIQPLDVCIKRTVKNFLHKKWKEQAREMADTACDSDVLLQLVLVWLGEVLGVIGDCPELVQRSFLVASVLPGPDGNINSPTRNADMQEELIASLEEQLKLSGEHSESSTPRPRSSPEETIEPESLHQLFEGESETESFYGFEEADLDLMEI

SEQ ID NO: 31094 - protein, 363 aa, Homo sapiens
MADTDLFMECEEEELEPWQKISDVIEDSVVEDYNSVDKTTTVSVSQQPVSAPVPIAAHASVAGHLSTSTTVSSSGAQNSDSTKKTLVTLIANNNAGNPLVQQGGQPLILTQNPAPGLGTMVTQPVLRPVQVMQNANHVTSSPVASQPIFITTQGFPVRNVRPVQNAMNQVGIVLNVQQGQTVRPITLVPAPGTQFVKPTVGVPQVFSQMTPVRPGSTMPVRPTTNTFTTVIPATLTIRSTVPQSQSQQTKSTPSTSTTPTATQPTSLGQLAVQSPGQSNQTTNPKLAPSFPSPPAVSIASFVTVKRPGVTGENSNEVAKLVNTLNTIPSLGQSPGPVVVSNNSSAHGSQRTSGPESSMKGTIT

SEQ ID NO: 31095 - protein, 1315 aa, Homo sapiens
MADTDLFMECEEEELEPWQKISDVIEDSVVEDYNSVDKTTTVSVSQQPVSAPVPIAAHASVAGHLSTSTTVSSSGAQNSDSTKKTLVTLIANNNAPGTQFVKPTVGVPQVFSQMTPVRPGSTMPVRPTTNTFTTVIPATLTIRSTVPQSQSQQTKSTPSTSTTPTATQPTSLGQLAVQSPGQSNQTTNPKLAPSFPSPPAVSIASFVTVKRPGVTGENSNEVAKLVNTLNTIPSLGQSPGPVVVSNNSSAHGSQRTSGPESSMKVTSSIPVFDLQDGGRKICPRCNAQFRVTEALRGHMCYCCPEMVEYQKKGKSLDSEPSVPSAAKPPSPEKTAPVASTPSSTPIPALSPPTKVPEPNENVGDAVQTKLIMLVDDFYYGRDGGKVAQLTNFPKVATSFRCPHCTKRLKNNIRFMNHMKHHVELDQQNGEVDGHTICQHCYRQFSTPFQLQCHLENVHSPYESTTKCKICEWAFESEPLFLQHMKDTHKPGEMPYVCQVCQYRSSLYSEVDVHFRMIHEDTRHLLCPYCLKVFKNGNAFQQHYMRHQKRNVYHCNKCRLQFLFAKDKIEHKLQHHKTFRKPKQLEGLKPGTKVTIRASRGQPRTVPVSSNDTPPSALQEAAPLTSSMDPLPVFLYPPVQRSIQKRAVRKMSVMGRQTCLECSFEIPDFPNHFPTYVHCSLCRYSTCCSRAYANHMINNHVPRKSPKYLALFKNSVSGIKLACTSCTFVTSVGDAMAKHLVFNPSHRSSSILPRGLTWIAHSRHGQTRDRVHDRNVKNMYPPPSFPTNKAATVKSAGATPAEPEELLTPLAPALPSPASTATPPPTPTHPQALALPPLATEGAECLNVDDQDEGSPVTQEPELASGGGGSGGVGKKEQLSVKKLRVVLFALCCNTEQAAEHFRNPQRRIRRWLRRFQASQGENLEGKYLSFEAEEKLAEWVLTQREQQLPVNEETLFQKATKIGRSLEGGFKISYEWAVRFMLRHHLTPHARRAVAHTLPKDVAENAGLFIDFVQRQIHNQDLPLSMIVAIDEISLFLDTEVLSSDDRKENALQTVGTGEPWCDVVLAILADGTVLPTLVFYRGQMDQPANMPDSILLEAKESGYSDDEIMELWSTRVWQKHTACQRSKGMLVMDCHRTHLSEEVLAMLSASSTLPAVVPAGCSSKIQPLDVCIKRTVKNFLHKKWKEQAREMADTACDSDVLLQLVLVWLGEVLGVIGDCPELVQRSFLVASVLPGPDGNINSPTRNADMQEELIASLEEQLKLSGEHSESSTPRPRSSPEETIEPESLHQLFEGESETESFYGFEEADLDLMEI

SEQ ID NO: 31096 - protein, 1401 aa, Homo sapiens
MADTDLFMECEEEELEPWQKISDVIEDSVVEDYNSVDKTTTVSVSQQPVSAPVPIAAHASVAGHLSTSTTVSSSGAQNSDSTKKTLVTLIANNNAGNPLVQQGGQPLILTQNPAPGLGTMVTQPVLRPVQVMQNANHVTSSPVASQPIFITTQGFPVRNVRPVQNAMNQVGIVLNVQQGQTVRPITLVPAPGTQFVKPTVGVPQVFSQMTPVRPGSTMPVRPTTNTFTTVIPATLTIRSTVPQSQSQQTKSTPSTSTTPTATQPTSLGQLAVQSPGQSNQTTNPKLVSIASFVTVKRPGVTGENSNEVAKLVNTLNTIPSLGQSPGPVVVSNNSSAHGSQRTSGPESSMKVTSSIPVFDLQDGGRKICPRCNAQFRVTEALRGHMCYCCPEMVEYQKKGKSLDSEPSVPSAAKPPSPEKTAPVASTPSSTPIPALSPPTKVPEPNENVGDAVQTKLIMLVDDFYYGRDGGKVAQLTNFPKVATSFRCPHCTKRLKNNIRFMNHMKHHVELDQQNGEVDGHTICQHCYRQFSTPFQLQCHLENVHSPYESTTKCKICEWAFESEPLFLQHMKDTHKPGEMPYVCQVCQYRSSLYSEVDVHFRMIHEDTRHLLCPYCLKVFKNGNAFQQHYMRHQKRNVYHCNKCRLQFLFAKDKIEHKLQHHKTFRKPKQLEGLKPGTKVTIRASRGQPRTVPVSSNDTPPSALQEAAPLTSSMDPLPVFLYPPVQRSIQKRAVRKMSVMGRQTCLECSFEIPDFPNHFPTYVHCSLCRYSTCCSRAYANHMINNHVPRKSPKYLALFKNSVSGIKLACTSCTFVTSVGDAMAKHLVFNPSHRSSSILPRGLTWIAHSRHGQTRDRVHDRNVKNMYPPPSFPTNKAATVKSAGATPAEPEELLTPLAPALPSPASTATPPPTPTHPQALALPPLATEGAECLNVDDQDEGSPVTQEPELASGGGGSGGVGKKEQLSVKKLRVVLFALCCNTEQAAEHFRNPQRRIRRWLRRFQASQGENLEGKYLSFEAEEKLAEWVLTQREQQLPVNEETLFQKATKIGRSLEGGFKISYEWAVRFMLRHHLTPHARRAVAHTLPKDVAENAGLFIDFVQRQIHNQDLPLSMIVAIDEISLFLDTEVLSSDDRKENALQTVGTGEPWCDVVLAILADGTVLPTLVFYRGQMDQPANMPDSILLEAKESGYSDDEIMELWSTRVWQKHTACQRSKGMLVMDCHRTHLSEEVLAMLSASSTLPAVVPAGCSSKIQPLDVCIKRTVKNFLHKKWKEQAREMADTACDSDVLLQLVLVWLGEVLGVIGDCPELVQRSFLVASVLPGPDGNINSPTRNADMQEELIASLEEQLKLSGEHSESSTPRPRSSPEETIEPESLHQLFEGESETESFYGFEEADLDLMEI

SEQ ID NO: 31097 - protein, 1348 aa, Homo sapiens
MADTDLFMECEEEELEPWQKISDVIEDSVVEDYNSVDKTTTAGNPLVQQGGQPLILTQNPAPGLGTMVTQPVLRPVQVMQNANHVTSSPVASQPIFITTQGFPVRNVRPVQNAMNQVGIVLNVQQGQTVRPITLVPAPGTQFVKPTVGVPQVFSQMTPVRPGSTMPVRPTTNTFTTVIPATLTIRSTVPQSQSQQTKSTPSTSTTPTATQPTSLGQLAVQSPGQSNQTTNPKLVSIASFVTVKRPGVTGENSNEVAKLVNTLNTIPSLGQSPGPVVVSNNSSAHGSQRTSGPESSMKVTSSIPVFDLQDGGRKICPRCNAQFRVTEALRGHMCYCCPEMVEYQKKGKSLDSEPSVPSAAKPPSPEKTAPVASTPSSTPIPALSPPTKVPEPNENVGDAVQTKLIMLVDDFYYGRDGGKVAQLTNFPKVATSFRCPHCTKRLKNNIRFMNHMKHHVELDQQNGEVDGHTICQHCYRQFSTPFQLQCHLENVHSPYESTTKCKICEWAFESEPLFLQHMKDTHKPGEMPYVCQVCQYRSSLYSEVDVHFRMIHEDTRHLLCPYCLKVFKNGNAFQQHYMRHQKRNVYHCNKCRLQFLFAKDKIEHKLQHHKTFRKPKQLEGLKPGTKVTIRASRGQPRTVPVSSNDTPPSALQEAAPLTSSMDPLPVFLYPPVQRSIQKRAVRKMSVMGRQTCLECSFEIPDFPNHFPTYVHCSLCRYSTCCSRAYANHMINNHVPRKSPKYLALFKNSVSGIKLACTSCTFVTSVGDAMAKHLVFNPSHRSSSILPRGLTWIAHSRHGQTRDRVHDRNVKNMYPPPSFPTNKAATVKSAGATPAEPEELLTPLAPALPSPASTATPPPTPTHPQALALPPLATEGAECLNVDDQDEGSPVTQEPELASGGGGSGGVGKKEQLSVKKLRVVLFALCCNTEQAAEHFRNPQRRIRRWLRRFQASQGENLEGKYLSFEAEEKLAEWVLTQREQQLPVNEETLFQKATKIGRSLEGGFKISYEWAVRFMLRHHLTPHARRAVAHTLPKDVAENAGLFIDFVQRQIHNQDLPLSMIVAIDEISLFLDTEVLSSDDRKENALQTVGTGEPWCDVVLAILADGTVLPTLVFYRGQMDQPANMPDSILLEAKESGYSDDEIMELWSTRVWQKHTACQRSKGMLVMDCHRTHLSEEVLAMLSASSTLPAVVPAGCSSKIQPLDVCIKRTVKNFLHKKWKEQAREMADTACDSDVLLQLVLVWLGEVLGVIGDCPELVQRSFLVASVLPGPDGNINSPTRNADMQEELIASLEEQLKLSGEHSESSTPRPRSSPEETIEPESLHQLFEGESETESFYGFEEADLDLMEI

SEQ ID NO: 31098 - protein, 782 aa, Homo sapiens
MSGEDGPAAGPGAAAAAARERRREQLRQWGARAGAEPGPGERRARTVRFERAAEFLAACAGGDLDEARLMLRAADPGPGAELDPAAPPPARAVLDSTNADGISALHQACIDENLEVVRFLVEQGATVNQADNEGWTPLHVAASCGYLDIARYLLSHGANIAAVNSDGDLPLDLAESDAMEGLLKAEIARRGVDVEAAKRAEEELLLHDTRCWLNGGAMPEARHPRTGASALHVAAAKGYIEVMRLLLQAGYDPELRDGDGWTPLHAAAHWGVEDACRLLAEHGGGMDSLTHAGQRPCDLADEEVLSLLEELARKQEDLRNQKEASQSRGQEPQAPSSSKHRRSSVCRLSSREKISLQDLSKERRPGGAGGPPIQDEDEGEEGPTEPPPAEPRTLNGVSSPPHPSPKSPVQLEEAPFSRRFGLLKTGSSGALGPPERRTAEGAPGAGLQRSASSSWLEGTSTQAKELRLARITPTPSPKLPEPSVLSEVTKPPPCLENSSPPSRIPEPESPAKPNVPTASTAPPADSRDRRRSYQMPVRDEESESQRKARSRLMRQSRRSTQGVTLTDLKEAEKAAGKAPESEKPAQSLDPSRRPRVPGVENSDSPAQRAEAPDGQGPGPQAAREHRKVGKEWRGPAEGEEAEPADRSQESSTLEGGPSARRQRWQRDLNPEPEPESEEPDGGFRTLYAELRRENERLREALTETTLRLAQLKVELERATQRQERFAERPALLELERFERRALERKAAELEEELKALSDLRADNQRLKDENAALIRVISKLSK

SEQ ID NO: 31099 - protein, 719 aa, Homo sapiens
MSGEDGPAAGPGAAAAAARERRREQLRQWGARAGAEPGPGERRARTVRFERAAEFLAACAGGDLDEARLMLRAADPGPGAELDPAAPPPARAVLDSTNADGISALHQACIDENLEVVRFLVEQGATVNQADNEGWTPLHVAASCGYLDIARYLLSHGANIAAVNSDGDLPLDLAESDAMEGLLKAEIARRGVDVEAAKRAEEELLLHDTRCWLNGGAMPEARHPRTGASALHVAAAKGYIEVMRLLLQAGYDPELRDGDGWTPLHAAAHWGVEDACRLLAEHGGGMDSLTHAGQRPCDLADEEVLSLLEELARKQEDLRNQKEASQSRGQEPQAPSSSKHRRSSVCRLSSREKISLQDLSKERRPGGAGGPPIQDEDEGEEGPTEPPPAEPRTLNGVSSPPHPSPKSPVQLEEAPFSRRFGLLKTGSSGALGPPERRTAEGAPGAGLQRSASSSWLEGTSTQAKELRLARITPTPSPKLPEPSVLSEVTKPPPCLENSSPPSRIPEPESPAKPNVPTASTAPPADSRDRRRSYQMPVRDEESESQRKARSRLMRQSRRSTQGVTLTDLKEAEKAAEEAEPADRSQESSTLEGGPSARRQRWQRDLNPEPEPESEEPDGGFRTLYAELRRENERLREALTETTLRLAQLKVELERATQRQERFAERPALLELERFERRALERKAAELEEELKALSDLRADNQRLKDENAALIRVISKLSK

SEQ ID NO: 31100 - protein, 780 aa, Homo sapiens
MSGEDGPAAGPGAAAAAARERRREQLRQWGARAGAEPGPGERRARTVRFERAAEFLAACAGGDLDEARLMLRAADPGPGAELDPAAPPPARAVLDSTNADGISALHQACIDENLEVVRFLVEQGATVNQADNEGWTPLHVAASCGYLDIARYLLSHGANIAAVNSDGDLPLDLAESDAMEGLLKAEIARRGVDVEAAKRAEEELLLHDTRCWLNGGAMPEARHPRTGASALHVAAAKGYIEVMRLLLQAGYDPELRDGDGWTPLHAAAHWGVEDACRLLAEHGGGMDSLTHAGQRPCDLADEEVLSLLEELARKQEDLRNQKEASQSRGQEPQAPSSSKHRRSSVCRLSSREKISLQDLSKERRPGGAGGPPIQDEDEGEEGPTEPPPAEPRTLNGVSSPPHPSPKSPVLEEAPFSRRFGLLKTGSSGALGPPERRTAEGAPGAGLQRSASSSWLEGTSTQAKELRLARITPTPSPKLPEPSVLSEVTKPPPCLENSSPPSRIPEPESPAKPNVPTASTAPPADSRDRRRSYQMPVRDEESESQRKARSRLMRQSRRSTQGVTLTDLKEAEKAAGKAPESEKPAQSLDPSRRPRVPGVENSDSPAQREAPDGQGPGPQAAREHRKVGKEWRGPAEGEEAEPADRSQESSTLEGGPSARRQRWQRDLNPEPEPESEEPDGGFRTLYAELRRENERLREALTETTLRLAQLKVELERATQRQERFAERPALLELERFERRALERKAAELEEELKALSDLRADNQRLKDENAALIRVISKLSK

SEQ ID NO: 31101 - protein, 781 aa, Homo sapiens
MSGEDGPAAGPGAAAAAARERRREQLRQWGARAGAEPGPGERRARTVRFERAAEFLAACAGGDLDEARLMLRAADPGPGAELDPAAPPPARAVLDSTNADGISALHQACIDENLEVVRFLVEQGATVNQADNEGWTPLHVAASCGYLDIARYLLSHGANIAAVNSDGDLPLDLAESDAMEGLLKAEIARRGVDVEAAKRAEEELLLHDTRCWLNGGAMPEARHPRTGASALHVAAAKGYIEVMRLLLQAGYDPELRDGDGWTPLHAAAHWGVEDACRLLAEHGGGMDSLTHAGQRPCDLADEEVLSLLEELARKQEDLRNQKEASQSRGQEPQAPSSSKHRRSSVCRLSSREKISLQDLSKERRPGGAGGPPIQDEDEGEEGPTEPPPAEPRTLNGVSSPPHPSPKSPVQLEEAPFSRRFGLLKTGSSGALGPPERRTAEGAPGAGLQRSASSSWLEGTSTQAKELRLARITPTPSPKLPEPSVLSEVTKPPPCLENSSPPSRIPEPESPAKPNVPTASTAPPADSRDRRRSYQMPVRDEESESQRKARSRLMRQSRRSTQGVTLTDLKEAEKAAGKAPESEKPAQSLDPSRRPRVPGVENSDSPAQREAPDGQGPGPQAAREHRKVGKEWRGPAEGEEAEPADRSQESSTLEGGPSARRQRWQRDLNPEPEPESEEPDGGFRTLYAELRRENERLREALTETTLRLAQLKVELERATQRQERFAERPALLELERFERRALERKAAELEEELKALSDLRADNQRLKDENAALIRVISKLSK

SEQ ID NO: 31102 - protein, 707 aa, Homo sapiens
MRNGGPCQPLAAGPRAEGASVNWSVTAWGPGTQACIDENLEVVRFLVEQGATVNQADNEGWTPLHVAASCGYLDIARYLLSHGANIAAVNSDGDLPLDLAESDAMEGLLKAEIARRGVDVEAAKRAEEELLLHDTRCWLNGGAMPEARHPRTGASALHVAAAKGYIEVMRLLLQAGYDPELRDGDGWTPLHAAAHWGVEDACRLLAEHGGGMDSLTHAGQRPCDLADEEVLSLLEELARKQEDLRNQKEASQSRGQEPQAPSSSKHRRSSVCRLSSREKISLQDLSKERRPGGAGGPPIQDEDEGEEGPTEPPPAEPRTLNGVSSPPHPSPKSPVQLEEAPFSRRFGLLKTGSSGALGPPERRTAEGAPGAGLQRSASSSWLEGTSTQAKELRLARITPTPSPKLPEPSVLSEVTKPPPCLENSSPPSRIPEPESPAKPNVPTASTAPPADSRDRRRSYQMPVRDEESESQRKARSRLMRQSRRSTQGVTLTDLKEAEKAAGKAPESEKPAQSLDPSRRPRVPGVENSDSPAQREAPDGQGPGPQAAREHRKVGKEWRGPAEGEEAEPADRSQESSTLEGGPSARRQRWQRDLNPEPEPESEEPDGGFRTLYAELRRENERLREALTETTLRLAQLKVELERATQRQERFAERPALLELERFERRALERKAAELEEELKALSDLRADNQRLKDENAALIRVISKLSK

SEQ ID NO: 31103 - protein, 1014 aa, Homo sapiens
NKSRKRRNRVSFLGAVTVEPPKPIPLTWKTEKPVWVNQWPLPKQKLEALHLLANEQLEKGHIEPSFSPWNSPVFVIQKKSGKWHTLTDLRAVNAVIQPMGPLQPGLPSPAMIPKDWPLIIIDLKDCFFTIPLAEQDCEKFAFTIPAINNKEPATRFQWKVLPQGMLNSPTICQTFVGRALQPVREKFSDCYIIHYIDDILCAAETKDKLIDCYTFLQAEVANAGLAIASDKIQTSTPFHYLGMQIENRKIKPQKIEIRKDTLKTLNDFQKLLGDINWIRPTLGIPTYAMSNLFSILRGDSDLNSQRILTPEATKEIKLVEEKIQSAQINRIDPLAPLQLLIFATAHSPTGIIIQNTDLVEWSFLPHSTVKTFTLYLDQIATLIGQTRLRITKLCGNDPDKIVVPLTKEQVRQAFINSGAWQIGLANFVGLIDNHYPKTKIFQFLKLTTWILPKITRREPLENALTVFTDGSSNGKAAYTGPKERVIKTPYQSAQRDELVAVITVLQDFDQPINIISDSAYVVQATRDVETALIKYSMDDQLNQLFNLLQQTVRKRNFPFYITYIRAHTNLPGPLTKANEQADLLVSSALIKAQELHALTHVNAAGLKNKFDVTWKQAKDIVQHCTQCQVLHLPTQEAGVNPRGLCPNALWQMDVTHVPSFGRLSYVHVTVDTYSHFIWATCQTGESTSHVKKHLLSCFAVMGVPEKIKTDNGPGYCSKAFQKFLSQWKISHTTGIPYNSQGQAIVERTNRTLKTQLVKQKEGGDSKECTTPQMQLNLALYTLNFLNIYRNQTTTSAEQHLTGKKNSPHEGKLIWWKDNKNKTWEIGKVITWGRGFACVSPGENQLPVWLPTRHLKFYNEPIGDAKKRASTEMVTPVTWMDNPIEVYVNDSIWVPGPIDDRCPAKPEEEGMMINISIGYRYPPICLGRAPGCLMPAVQNWLVEVPTVSPISRFTYHMVSGMSLRPRVNYLQDFSYQRSLKFRPKGKPCPKEIPKESKNTEVLVWEECVANSAVIL

SEQ ID NO: 31104 - protein, 984 aa, Homo sapiens
MASNPERGEILLTELQGDSRSLPFSENVSAVQKLDFSDTMVQQKLDDIKDRIKREIRKELKIKEGAENLRKVTTDKKSLAYVDNILKKSNKKLEELHHKLQELNAHIVVSDPEDITDCPRTPDTPNNDPRCSTSNNRLKALQKQLDIELKVKQGAENMIQMYSNGSSKDRKLHGTAQQLLQDSKTKIEVIRMQILQAVQTNELAFDNAKPVISPLELRMEELRHHFRIEFAVAEGAKNVMKLLGSGKVTDRKALSEAQARFNESSQKLDLLKYSLEQRLNEVPKNHPKSRIIIEELSLVAASPTLSPRQSMISTQNQYSTLSKPAALTGTLEVRLMGCQDILENVPGRSKATSVALPGWSPSETRSSFMSRTSKSKSGSSRNLLKTDDLSNDVCAVLKLDNTVVGQTSWKPISNQSWDQKFTLELDRSRELEISVYWRDWRSLCAVKFLRLEDFLDNQRHGMCLYLEPQGTLFAEVTFFNPVIERRPKLQRQKKIFSKQQGKTFLRAPQMNINIATWGRLVRRAIPTVNHSGTFSPQAPVPTTVPVVDVRIPQLAPPASDSTVTKLDFDLEPEPPPAPPRASSLGEIDESSELRVLDIPGQDSETVFDIQNDRNSILPKSQSEYKPDTPQSGLEYSGIQELEDRRSQQRFQFNLQDFRCCAVLGRGHFGKVLLAEYKNTNEMFAIKALKKGDIVARDEVDSLMCEKRIFETVNSVRHPFLVNLFACFQTKEHVCFVMEYAAGGDLMMHIHTDVFSEPRAVFYAACVVLGLQYLHEHKIVYRDLKLDNLLLDTEGFVKIADFGLCKEGMGYGDRTSTFCGTPEFLAPEVLTETSYTRAVDWWGLGVLIYEMLVGESPFPGDDEEEVFDSIVNDEVRYPRFLSTEAISIMRRLLRRNPERRLGASEKDAEDVKKHPFFRLIDWSALMDKKVKPPFIPTIRGREDVSNFDDEFTSEAPILTPPREPRILSEEEQEMFRDFDYIADWC

SEQ ID NO: 31105 - protein, 968 aa, Homo sapiens
MASNPERGEILLTELQGDSRSLPFSENVSAVQKLDFSDTMVQQKLDDIKDRIKREIRKELKIKEGAENLRKVTTDKKSLAYVDNILKKSNKKLEELHHKLQELNAHIVVSDPEDITDCPRTPDTPNNDPRCSTSNNRLKALQKQLDIELKVKQGAENMIQMYSNGSSKDRKLHGTAQQLLQDSKTKIEVIRMQILQAVQTNELAFDNAKPVISPLELRMEELRHHFRIEFAVAEGAKNVMKLLGSGKVTDRKALSEAQARFNESSQKLDLLKYSLEQRLNEVPKNHPKSRIIIEELSLVAASPTLSPRQSMISTQNQYSTLSKPAALTGTLEVRLMGCQDILENVPGRSKATSVALPGWSPSETRSSFMSRTSKNDVCAVLKLDNTVVGQTSWKPISNQSWDQKFTLELDRSRELEISVYWRDWRSLCAVKFLRLEDFLDNQRHGMCLYLEPQGTLFAEVTFFNPVIERRPKLQRQKKIFSKQQGKTFLRAPQMNINIATWGRLVRRAIPTVNHSGTFSPQAPVPTTVPVVDVRIPQLAPPASDSTVTKLDFDLEPEPPPAPPRASSLGEIDESSELRVLDIPGQDSETVFDIQNDRNSILPKSQSEYKPDTPQSGLEYSGIQELEDRRSQQRFQFNLQDFRCCAVLGRGHFGKVLLAEYKNTNEMFAIKALKKGDIVARDEVDSLMCEKRIFETVNSVRHPFLVNLFACFQTKEHVCFVMEYAAGGDLMMHIHTDVFSEPRAVFYAACVVLGLQYLHEHKIVYRDLKLDNLLLDTEGFVKIADFGLCKEGMGYGDRTSTFCGTPEFLAPEVLTETSYTRAVDWWGLGVLIYEMLVGESPFPGDDEEEVFDSIVNDEVRYPRFLSTEAISIMRRLLRRNPERRLGASEKDAEDVKKHPFFRLIDWSALMDKKVKPPFIPTIRGREDVSNFDDEFTSEAPILTPPREPRILSEEEQEMFRDFDYIADWC

SEQ ID NO: 31106 - protein, 936 aa, Homo sapiens
MASNPERGEILLTELQGDSRSLPFSENVSAVQKLDFSDTMVQQKLDDIKDRIKREIRKELKIKEGAENLRKVTTDKKSLAYVDNILKKSNKKLEELHHKLQELNAHIVVSDPEDITDCPRTPDTPNNDPRCSTSNNRLKALQKQLDIELKVKQGAENMIQMYSNGSSKDRKLHGTAQQLLQDSKTKIEVIRMQILQAVQTNELAFDNAKPVISPLELRMEELRHHFRIEFAVAEGAKNVMKLLGSGKVTDRKALSEAQARFNESSQKLDLLKYSLEQRLNEVPKNHPKSRIIIEELSLVAASPTLSPRQSMISTQNQYSTLSKPAALTGTLEVRLMGCQDILENVPGRSKATSVALPGWSPSETRSSFMSRTSKSKSGSSRNLLKTDDLSNDVCAVLKLDNTVVGQTSWKPISNQSWDQKFTLELDRVTFFNPVIERRPKLQRQKKIFSKQQGKTFLRAPQMNINIATWGRLVRRAIPTVNHSGTFSPQAPVPTTVPVVDVRIPQLAPPASDSTVTKLDFDLEPEPPPAPPRASSLGEIDESSELRVLDIPGQDSETVFDIQNDRNSILPKSQSEYKPDTPQSGLEYSGIQELEDRRSQQRFQFNLQDFRCCAVLGRGHFGKVLLAEYKNTNEMFAIKALKKGDIVARDEVDSLMCEKRIFETVNSVRHPFLVNLFACFQTKEHVCFVMEYAAGGDLMMHIHTDVFSEPRAVFYAACVVLGLQYLHEHKIVYRDLKLDNLLLDTEGFVKIADFGLCKEGMGYGDRTSTFCGTPEFLAPEVLTETSYTRAVDWWGLGVLIYEMLVGESPFPGDDEEEVFDSIVNDEVRYPRFLSTEAISIMRRLLRRNPERRLGASEKDAEDVKKHPFFRLIDWSALMDKKVKPPFIPTIRGREDVSNFDDEFTSEAPILTPPREPRILSEEEQEMFRDFDYIADWC

SEQ ID NO: 31107 - protein, 827 aa, Homo sapiens
MIQMYSNGSSKDRKLHGTAQQLLQDSKTKIEVIRMQILQAVQTNELAFDNAKPVISPLELRMEELRHHFRIEFAVAEGAKNVMKLLGSGKVTDRKALSEAQARFNESSQKLDLLKYSLEQRLNEVPKNHPKSRIIIEELSLVAASPTLSPRQSMISTQNQYSTLSKPAALTGTLEVRLMGCQDILENVPGRSKATSVALPGWSPSETRSSFMSRTSKSKSGSSRNLLKTDDLSNDVCAVLKLDNTVVGQTSWKPISNQSWDQKFTLELDRSRELEISVYWRDWRSLCAVKFLRLEDFLDNQRHGMCLYLEPQGTLFAEVTFFNPVIERRPKLQRQKKIFSKQQGKTFLRAPQMNINIATWGRLVRRAIPTVNHSGTFSPQAPVPTTVPVVDVRIPQLAPPASDSTVTKLDFDLEPEPPPAPPRASSLGEIDESSELRVLDIPGQDSETVFDIQNDRNSILPKSQSEYKPDTPQSGLEYSGIQELEDRRSQQRFQFNLQDFRCCAVLGRGHFGKVLLAEYKNTNEMFAIKALKKGDIVARDEVDSLMCEKRIFETVNSVRHPFLVNLFACFQTKEHVCFVMEYAAGGDLMMHIHTDVFSEPRAVFYAACVVLGLQYLHEHKIVYRDLKLDNLLLDTEGFVKIADFGLCKEGMGYGDRTSTFCGTPEFLAPEVLTETSYTRAVDWWGLGVLIYEMLVGESPFPGDDEEEVFDSIVNDEVRYPRFLSTEAISIMRRLLRRNPERRLGASEKDAEDVKKHPFFRLIDWSALMDKKVKPPFIPTIRGREDVSNFDDEFTSEAPILTPPREPRILSEEEQEMFRDFDYIADWC

SEQ ID NO: 31108 - protein, 658 aa, Homo sapiens
MNSTLEVRLMGCQDILENVPGRSKATSVALPGWSPSETRSSFMSRTSKSKSGSSRNLLKTDDLSNDVCAVLKLDNTVVGQTSWKPISNQSWDQKFTLELDRSRELEISVYWRDWRSLCAVKFLRLEDFLDNQRHGMCLYLEPQGTLFAEVTFFNPVIERRPKLQRQKKIFSKQQGKTFLRAPQMNINIATWGRLVRRAIPTVNHSGTFSPQAPVPTTVPVVDVRIPQLAPPASDSTVTKLDFDLEPEPPPAPPRASSLGEIDESSELRVLDIPGQDSETVFDIQNDRNSILPKSQSEYKPDTPQSGLEYSGIQELEDRRSQQRFQFNLQDFRCCAVLGRGHFGKVLLAEYKNTNEMFAIKALKKGDIVARDEVDSLMCEKRIFETVNSVRHPFLVNLFACFQTKEHVCFVMEYAAGGDLMMHIHTDVFSEPRAVFYAACVVLGLQYLHEHKIVYRDLKLDNLLLDTEGFVKIADFGLCKEGMGYGDRTSTFCGTPEFLAPEVLTETSYTRAVDWWGLGVLIYEMLVGESPFPGDDEEEVFDSIVNDEVRYPRFLSTEAISIMRRLLRRNPERRLGASEKDAEDVKKHPFFRLIDWSALMDKKVKPPFIPTIRGREDVSNFDDEFTSEAPILTPPREPRILSEEEQEMFRDFDYIADWC

SEQ ID NO: 31109 - protein, 969 aa, Homo sapiens
NKSRKRRNRVSFLGAATVEPPKPIPLTWKTEKPVWVNQWPLPKQKLEALHLLANEQLEKGHIEPSFSPWNSPVFVIQKKSGKWRMLTDLRAVNAVIQPMGPLQPGLPSPAMIPKDWPLIIIDLKDCFFTIPLAEQDCEKFAFTIPAINNKEPATRFQWKVLPQGMLNSPTICQTFVGRALQPVREKFSDCYIIHYIDDILCAAETKDKLIDCYTFLQAEVANAGLAIASDKIQTSTPFHYLGMQIENRKIKPQKIEIRKDTLKTLNDFQKLLGDINWIRPTLGIPTYAMSNLFSILRGDSDLNSKRILTPEATKEIKLVEEKIQSAQINRIDPLAPLQLLIFATAHSPTGIIIQNTDLVEWSFLPHSTVKTFTLYLDQIATLIGQTRLRIIKLCGNDPDKIVVPLTKEQVRQAFINSGAWQIGLANFVGIIDNHYPKTKIFQFLKMTTWILPKITRREPLENALTVFTDGSSNGKAAYTGPKERVIKTPYQSAQRAELVAVITVLQDFDQPINIISDSAYVVQATRDVETALIKYSMDDQLNQLFNLLQQTVRKRNFPFYITHIRAHTNLPGPLTKANEEADLLVSSALIKAQELHALTHVNAAGLKNKFDVTWKQAKDIVQHCTQCQVLHLPTQEAGVNPRGLCPNALWQMDVTHVPSFGRLSYVHVTVDTYSHFIWATCQTGESTSHVKKHLLSCFAVMGVPEKIKTDNGPGYCSKAFQKFLSQWKISHTTGIPYNSQGQAIVERTNRTLKTQLVKQKEGGDSKECTTPQMQLNLALYTLNFLNIYRNQTTTSAEQHLTGKKNSPHEGKLIWWKDNKNKTWEIGKVITWGRGFACVSPGENQLPVWIPTRHLKFYNEPIGDAKKRASTEMVTPVTWMDNPIEVYVNDSVWVPGPTDDRCPAKPEEEGMMINISIGYRYPPICLGRAPGCLMPTVQNWLVEVPIVSPICRFTYHMVSGMSLRPRVNYL

SEQ ID NO: 31110 - protein, 812 aa, Homo sapiens
NKSRKRRNRVSFLGVTTVEPPKPIPLTWKTEKLVWVNQWPLPKQKLEALHLLANEQLEKGHIEPSFSPWNSPVFVIQKKSSKWRMLTDLRAVNAVIQPMGPLQPGLPSPAMIPKDWPLIIIDLKDCFFTIPLAEQDCEKFAFTIPAINNKEPATRFQWKVLPQGMLNSPTICQTFVGRALQPVRDKFSDCYIIHYFDDILCAAETKDKLIDCYTFLQAEVANAGLAIASDKIQTSTPFHYLGMQIENRKIKPQKIEIRKDTLKTLNDFQKLLGDINWIRPTLGIPTYAMSNLFSILRGDSDLNSKRMLTPEATKEIKLVEEKIQSAQINRIDPLAPLQLLIFATAHSPTGIIIQNTDLVEWSFLPHSTVKTFTLYLDQIATLIGPTRLRIIKLCGNDPDKIVVPLTKEQVRQAFINSGAWQIGLANFVGIIDNHYPKTKIFQFLKLTTWILPKITRREPLENALTVFTDGSSNGKVAYTGPKERVIKTPYQSAQRAELVAVITVLQDFDQPINIISDSAYVVQATRDVETALIKYSMDDQLNQLFNLLQQTVRKRNFPFYITHIRAHTNLPGPLTKANEQADLLVSSAFIKAQELHALTHVNAAGLKNKFDVTWKQAKDIVQHCTQCQVLDLPTQEAGVNPEVCVLMHYGKWMSHMYLHLGRLSYVHVTVDTYSHFMCATCQTGESTSHVKKHLLSCFAVMGVPEKIKTDNGPGYCSKAFQKFLSQWKISHTTGIPYNSQGQAIVERTNRTLKTQLVKQKEGGDSKECTTPQMQLNLALYTLNFLNIYRNQTTTSAEHLTGKKNSPHEGKLI

SEQ ID NO: 31111 - protein, 959 aa, Homo sapiens
NKSKKRRNRVSFLGAATVEPPKPIPLTWKTEKPVWVNQWPLPKQKLEALHLLANEQLEKGHIEPSFSPWNSPVFVIQKKSGKWRMLTDLRAVNAVNAVIQPMGPLQPGLPSLAMIPKDWPLIIIDLKDCFFTIPLAEQDCEKFAFTIPAINNKEPATRFQWKVLPQGMLNSPTICQTFVGRALQPVREKFSDCYIIHYIDDILCAAEMKDKLIDCYTFLQAEVANAGLAIASDKIQTSTPFHYLEMQIENRKIKPPKIEIRKDTLKTLNDFQKLLGDINWIRPTLGIPTYAMSNLFSILRGDSDLNSKRMLTPEATKEIKLVEEKIQSAQINRIDPLAPLQLLIFATAHSPTGIIIQNTDLVEWSFLPHSTVKTFTLYLDQMATLIGQTRLRIIKLCGNDPDKIVVPLTKEQVRQAFINSGAWQIGLANFVGIIDNHYPKTKIFQFLKMTTWILPKITRREPLENALTVFTDGSSNGKAAYTGPKERVIKTQYQSAQRAELVAVITVLQDFDQPINIISDSAYVVQATRDVETALIKYSMDDQLNQLFNLLQQTVRKRNFPFYITHIRAHTNLPGPLTKANEQADLLVSSALIKAQELHALTHVNVAGLKNKFDVTWKQAKDIVQHCTQCQVLHLPTQEAGVNPRGLCPNALWQMDVTHVSSFGRLSYIHVTVDTYSHFIWATCQTGESTSHVKKHLLSCFAVMGVPEKIKTDNGPGYCSKAFQKFLSQWKISHTTGIPYNSQGQAIVERTNRTLKTQLVKQKEGGDSKECTTPQMQLNLALYTLNFLNIYRNQTTTSAEQHLTGKKNSPHEGKLIWWKDNKNKTWEIGKVITWGRGFACVSPGENQLPVWIPTRHLKFYNEPIGDAKKSTSAETETPQSSTVDSQDEQNGDVRRTDEVAIHQESRAADLGTTKEADAVSYKISREHKGDTNPREYAACGLDDCINGGKSPYACRSSCS

SEQ ID NO: 31112 - protein, 954 aa, Homo sapiens
NKSKKRRNRVSFLGAATVEPPKPIPLTWKTEKPVWVNQWPLPKQKLEALHLLANEQLEKGHIEPSFSPWNSPVFVIQKKSGKWRMLTDLRAVNAVIQPMGPLQPGLPSPAMIPKDWPLIIIDLKDCFFTIPLAEQDCEKFAFTIPAINNKEPATRFQWKVLPQGMLNSPTICQTFVGRALQPVREKFSDCYIIHYIDDILCAAETKDKLIDCYTFLQAEVANAGLAIASDKIQTSTPFHYLGMQIENRKIKPQKIEIRKDTLKALNDFQKLLGDINWIRPTLGIPTYAMSNLFSILRGDSDLNSKRMLTPEATKEIKLVEEKIQSAQINRIDPLAPLQLLIFATAHSPTGIIIQNTDLVEWSFLPHSTVKTFTLYLDQIATLIGQTRLRIIKLCGNDPDKIVVPLTKEQVRQAFINSGAWQIGLANFVGIIDNHYPKTKIFQFLKLTTWILPKITRREPLENALTVFTDGSSNGKAAYTGPKERVIKTPYQSAQRAELVAVITVLQDFDINIISDSAYVVQATRDVETALIKYSMDDQLNQLFNLLQQTVRKRNFPFYITHIRAHTNLPGPLTKANKQADLLVSSALIKAQELHALTHVNAAGLKNKFDVTWKLAKDIVQHCTQCQVLHLPTQEAGVNPRGLCPNALWQMDVTHVPSFGRLSYVHVTVDTYSHFIWATCHTGESTSHVKKHLLSCFAVMGVPEKIKTDNGPGYCSKAFQKFLSQWKISHTTGIPYNSQGQAIVERTNRTLKTQLVKQKEGGDSKECTTPQMQLNLALYTLNFLNIYRNQTTTSAEQHLTGKKNSPHEGKLIWWKDNKNKTWEIGKVITWGRGFACVSPGENQLPVWIPTRHLKFYNEPIRDAKKSTSAETETPQSSTVDSQDEQNGDVRRTDEVAIHQEGRAANLGTTKEADAVSYKISREHKGDTNPREYAACSLDDCINGGKSPYACRSSCS

SEQ ID NO: 31113 - protein, 956 aa, Homo sapiens
NKSRKRRNRESLLGAATVEPPKPIPLTWKTEKPVWVNQWPLPKQKLEALHLLANEQLEKGHIEPSFSPWNSPVFVIQKKSGKWRMLTDLRAVNAVIQPMGPLQPGLPSPAMIPKDWPLIIIDLKDCFFTIPLAEQDCEKFAFTIPAINNKEPATRFQWKVLPQGMLNSPTICQTFVGRALQPVREKFSDCYIIHCIDDILCAAETKDKLIDCYTFLQAEVANAGLAIASDKIQTSTPFHYLGMQIENRKIKPQKIEIRKDTLKTLNDFQKLLGDINWIRPTLGIPTYAMSNLFSILRGDSDLNSKRMLTPEATKEIKLVEEKIQSAQINRIDPLAPLQLLIFATAHSPTGIIIQNTDLVEWSFLPHSTVKTFTLYLDQIATLIGQTRLRIIKLCGNDPDKIVVPLTKEQVRQAFINSGAWKIGLANFVGIIDNHYPKTKIFQFLKLTTWILPKITRREPLENALTVFTDGSSNGKAAYTGPKERVIKTPYQSAQRAELVAVITVLQDFDQPINIISDSAYVVQATRDVETALIKYSMDDQLNQLFNLLQQTVRKRNFPFYITHIRAHTNLPGPLTKANEQADLLVSSALIKAQELHALTHVNAAGLKNKFDVTWKQAKDIVQHCTQCQVLHLPTQEAGVNPRGLCPNALWQMDVTHVPSFGRLSYVHVTVDTYSHFIWATCQTGESTSHVKKHLLSCFAVMGVPEKIKTDNGPGYCSKAFQKFLSQWKISHTTGIPYNSQGQAIVERTNRTLKTQLVKQKEGGDSKECTTPQMQLNLALYTLNFLNIYRNQTTTSAEQHLTGKKNSPHEGKLIWWKDNKNKTWEIGKVITWGRGFACVSPGENQLPVWIPTRHLKFYNEPIRDAKKSTSAETETSQSSTVDSQDEQNGDVRRTDEVAIHQEGRAANLGTTKEADAVSYKISREHKGDTNPREYAACSLDDCINGGKSPYACRSSCS

SEQ ID NO: 31114 - protein, 1459 aa, Homo sapiens
NKSRKRRNRLSFLGAATVEPPKPIPLTWKTEKPVWVNQWPLPKQKLEALHLLANEQLEKGHIEPSFSPWNSPVFVIQKKSGKWRMLTDLRAVNAVIQPMGPLQPGLPSPAMIPKDWPLIIIDLKDCFFTIPLAEQDCEKFAFTIPAINNKEPATRFQWKVLPQGMLNSPTICQTFVGRALQPVREKFSDCYIIHYIDDILCAAETRDKLIDCYTFLQAEVANAGLAIASDKIQTSTPFHYLGMQIENRKIKQQKIEIRKDTLKTLNDFQKLLGDINWIRPTLGIPTYAMSNLFSILRGDSDLNSKRILTPEATKEIKLVEEKIQSAQINRIDPLAPLQLLIFATAHSPTGIIIQNTDLVEWSFLPHSTVKTFTLYLDQIATLIGQTRLRIIKLCGNDPDKIVVPLTKEQVRQAFINSGAWQIGLANFVGIIDNHYPKTKIFQFLKLTTWILPKITRREPLENALTVFTDGSSNGKAAYTGPKERVIKTPYQSAQRAELVAVITVLQDFDQPINIISDSAYVVQATRDVETALIKYSMDDQLNQLFNLLQQTVRKRNFPFYITHIRAHTNLPGPLTKANEQADLLVSSALIKAQELHALTHVNAAGLKNKFDVTWKQAKDIVQHCTQCQILHLPTQEAGVNPRGLCPNALWQMDVTHVPSFGRLSYVHVTVDTYSHFIWATCQTGESTSHVKKHLLSCFAVMGVPEKIKTDNGPGYCSKAFQKFLSQWKISHTTGIPYNSQGQAIVERTNRTLKTQLVKQKEGGDSKECTTPQMQLNLALYTLNFLNIYRNQTTTSAEQHLTGKKNSPHEGKLIWWKDNKNKTWEIGKVITWGRGFACVSPGENQLPVWIPTRHLKFYNEPIGDAKKRASTEMVTPVTWMDNPIEIYVNDSVWVPGPIDDRCPAKPEEEGMMINISIGYRYPPICLGRAPGCLMPAVQNWLVEVPTVSPISRFTYHMVSGMSLRPRVNYLQDFSYQRSLKFRPKGKPCPKEIPKESKNTEVLVWEECVANSAVILQNNEFGTIIDWAPRGQFYHNCSGQTQSCPSAQVSPAVDSDLTESLDKHKHKKLQSFYPWEWGEKGISTPRPKIVSPVSGPEHPELWRLTVASHHIRIWSGNQTLETRDCKPFYTIDLNSSLTVPLQSCVKPPYMLVVGNIVIKPDSQTITCENCRLLTCIDSTFNWQHRILLVRAREGVWIPVSMDRPWEASPSVHILTEVLKGVLNRSKRFIFTLIAVIMGLIAVTATAAVAGVALHSSVQSVNFVNDWQKNSTRLWNSQSSIDQKLANQINDLRQTVIWMGDRLMSLEHRFQLQCDWNTSDFCITPQIYNESEHHWDMVRRHLQGREDNLTLDISKLKEQIFEASKAHLNLVPGTEAIAGVADGLANLNPVTWVKTIGSTTIINLILILVCLFCLLLVCRCTQQLRRDSDHRERAMMTMAVLSKRKGGNVGKSKRDQIVTVSV

SEQ ID NO: 31115 - protein, 889 aa, Homo sapiens
MEEGAPRQPGPSQWPPEDEKEVIRRAIQKELKIKEGVENLRRVATDRRHLGHVQQLLRSSNRRLEQLHGELRELHARILLPGPGPGPAEPVASGPRPWAEQLRARHLEALRRQLHVELKVKQGAENMTHTCASGTPKERKLLAAAQQMLRDSQLKVALLRMKISSLEASGSPEPGPELLAEELQHRLHVEAAVAEGAKNVVKLLSSRRTQDRKALAEAQAQLQESSQKLDLLRLALEQLLEQLPPAHPLRSRVTRELRAAVPGYPQPSGTPVKPTALTGTLQVRLLGCEQLLTAVPGRSPAAALASSPSEGWLRTKAKHQRGRGELASEVLAVLKVDNRVVGQTGWGQVAEQSWDQTFVIPLERARELEIGVHWRDWRQLCGVAFLRLEDFLDNACHQLSLSLVPQGLLFAQVTFCDPVIERRPRLQRQERIFSKRRGQDFLRASQMNLGMAAWGRLVMNLLPPCSSPSTISPPKGCPRTPTTLREASDPATPSNFLPKKTPLGEEMTPPPKPPRLYLPQEPTSEETPRTKRPHMEPRTRRGPSPPASPTRKPPRLQDFRCLAVLGRGHFGKVLLVQFKGTGKYYAIKALKKQEVLSRDEIESLYCEKRILEAVGCTGHPFLLSLLACFQTSSHACFVTEFVPGGDLMMQIHEDVFPEPQARFYVACVVLGLQFLHEKKIIYRDLKLDNLLLDAQGFLKIADFGLCKEGIGFGDRTSTFCGTPEFLAPEVLTQEAYTRAVDWWGLGVLLYEMLVGECPFPGDTEEEVFDCIVNMDAPYPGFLSVQGLEFIQKLLQKCPEKRLGAGEQDAEEIKVQPFFRTTNWQALLARTIQPPFVPTLCGPADLRYFEGEFTGLPPALTPPAPHSLLTARQQAAFRDFDFVSERFLEP

SEQ ID NO: 31116 - protein, 956 aa, Homo sapiens
NKSRKRRNRVSFLGAATVEPPKPIPLTWKTEKPVWVNQWPLPKQKLEALHLLANEQLEKGHIEPSFSPWNSPVFVIQKKSGKWRMLTDLRAVNAVIQPMGPLQPGLPSPAMIPKDWPLIIIDLKDCFFTIPLAEQDCEKFAFTIPAINNKEPATRFQWKVLPQGMLNSPTICQTFVGRALQPVRDKFSDCYIIHYIDDILCAAETKDKLIDCYTFLQAEVANAGLAIASDKIQTSTPFHYLGMQIENRKIKPQKIEIRKDTLKTLNDFQKLLGDINWIRPTLGIPTYVMSNLFSILRGDSDLNSKRMLTPETTKEIKLVEEKIQSAQINRIDPLAPLRLLIFATAHSPIGIIIQNTDLVEWSFLPHSTVKTFTLYLDQIATLIGQTRLRIIKLCGNDPDKIVVPLTKEQVRQAFINSGAWQIGLANFVGIIDNHYPKTKIFQFLKLTTWILPKITRREPLENALTVFTDGSSNGKAAYTGLKERVIKTPYQSAQRAELVAVITVLQDFDQPINIISDSAYVVQATRDVETALIKYSMDDQLNQLFNLLQQTVRKRNFPFYITHIRAHTNLPGPLTKANEQADLLVSSALIKAQELHALTHVNAAGLKNKFDVTWKQAKDIVQHCTQCQVLHLPTQEAGVNPRGLCPNALWQMDVTHVPSFGRLSYVHVTVDTYSHFIWATCQTGESTSHVKKHLLSCFAVMGVPEKIKTDNGPGYCSKAFQKFLSQWKISHTTGIPYNSQGQAIVERTNRTLKTQLVKQKEGGDSKECTTPQMQLNLAPYTLNFLNIYRNQTTTSAEQHLTGKKNSPHEGKLIWWKDNKNKTWEIGKVITWGRGFACVSPGENQLPVWMPTRHLKFYNEPIGDAKKSTSAETETPQSSTVDSQDEQNGDVRRTDEVAIHQEGRAADLGTTKEADAVSYKISREHKGDTNPREYAACSLDDCINGGKSPYACRSSCS

SEQ ID NO: 31117 - protein, 358 aa, Homo sapiens
MEPIGARLSLEAPGPAPFREAPPAEELPAPVVPCVQGGGDGGGASETPSPDAQLGDRPLSPKEEAAPQEQEELLECRRRCRARSFSLPADPILQAAKFLQQQQQQAVALGGEGAEDAQLGPGGCCAKCKKRVQFADTLGLSLASVKHFSEAEEPQVPPAVLSRLRSFPMRAEDLEQLGGLLAAAAVAAPLSAPPSRLRPLFQLPGPSAAAERLQRQRVCLERVQCSTASGAEVKGSGRVLSCPGPRAVTVRYTFTEWRSFLDVPAELQPEPLEPQQPEAPSGASEPGSGDAKKEPGAECFHFSLCLPPGLQPEDEEDADERGVAVHFAVCYRCAQGEYWDNNAGANYTLRYARPADAL

SEQ ID NO: 31118 - protein, 870 aa, Homo sapiens
MDSTKEKCDSYKDDLLLRMGLNDNKAGMEGLDKEKINKIIMEATKGSRFYGNELKKEKQVNQRIENMMQQKAQITSQQLRKAQLQVDRFAMELEQSRNLSNTIVHIDMDAFYAAVEMRDNPELKDKPIAVGSMSMLSTSNYHARRFGVRAAMPGFIAKRLCPQLIIVPPNFDKYRAVSKEVKEILADYDPNFMAMSLDEAYLNITKHLEERQNWPEDKRRYFIKMGSSVENDNPGKEVNKLSEHERSISPLLFEESPSDVQPPGDPFQVNFEEQNNPQILQNSVVFGTSAQEVVKEIRFRIEQKTTLTASAGIAPNTMLAKVCSDKNKPNGQYQILPNRQAVMDFIKDLPIRKVSGIGKVTEKMLKALGIITCTELYQQRALLSLLFSETSWHYFLHISLGLGSTHLTRDGERKSMSVERTFSEINKAEEQYSLCQELCSELAQDLQKERLKGRTVTIKLKNVNFEVKTRASTVSSVVSTAEEIFAIAKELLKTEIDADFPHPLRLRLMGVRISSFPNEEDRKHQQRSIIGFLQAGNQALSATECTLEKTDKDKFVKPLEMSHKKSFFDKKRSERKWSHQDTFKCEAVNKQSFQTSQPFQVLKKKMNENLEISENSDDCQILTCPVCFRAQGCISLEALNKHVDECLDGPSISENFKMFSCSHVSATKVNKKENVPASSLCEKQDYEAHPKIKEISSVDCIALVDTIDNSSKAESIDALSNKHSKEECSSLPSKSFNIEHCHQNSSSTVSLENEDVGSFRQEYRQPYLCEVKTGQALVCPVCNVEQKTSDLTLFNVHVDVCLNKSFIQELRKDKFNPVNQPKESSRSTGSSSGVQKAVTRTKRPGLMTKYSTSKKIKPNNPKHTLDIFFK

SEQ ID NO: 31119 - protein, 472 aa, Homo sapiens
MDSTKEKCDSYKDDLLLRMGLNDNKAGMEGLDKEKINKIIMEATKGSRFYGNELKKEKQVNQRIENMMQQKAQITSQQLRKAQLQVDRFAMELEQSRNLSNTIVHIDMDAFYAAVEMRDNPELKDKPIAVGSMSMLSTSNYHARRFGVRAAMPGFIAKRLCPQLIIVPPNFDKYRAVSKEVKEILADYDPNFMAMSLDEAYLNITKHLEERQNWPEDKRRYFIKMGSSVENDNPGKEVNKLSEHERSISPLLFEESPSDVQPPGDPFQVNFEEQNNPQILQNSVVFGTSAQEVVKEIRFRIEQKTTLTASAGIAPNTMLAKVCSDKNKPNGQYQILPNRQAVMDFIKDLPIRKVSGIGKVTEKMLKALGIITCTELYQQRALLSLLFSETSWHYFLHISLGLGSTHLTRDGERKSMSVERTFSEINKAEEQYSLCQELCSELAQDLQKERLKVLYFDMVSLVFKFFNSKMLP

SEQ ID NO: 31120 - protein, 672 aa, Homo sapiens
MDSTKEKCDSYKDDLLLRMGLNDNKAGMEGLDKEKINKIIMEATKGSRFYGNELKKEKQVNQRIENMMQQKAQITSQQLRKAQLQVDRFAMELEQSRNLSNTIVHIDMDAFYAAVEMRDNPELKDKPIAVGSMSMLSTSNYHARRFGVRAAMPGFIAKRLCPQLIIVPPNFDKYRAVSKEVKEILADYDPNFMAMSLDEAYLNITKHLEERQNWPEDKRRYFIKMGSSVENDNPGKEVNKLSEHERSISPLLFEESPSDVQPPGDPFQVNFEEQNNPQILQNSVVFGTSAQEVVKEIRFRIEQKTTLTASAGVRISSFPNEEDRKHQQRSIIGFLQAGNQALSATECTLEKTDKDKFVKPLEMSHKKSFFDKKRSERKWSHQDTFKCEAVNKQSFQTSQPFQVLKKKMNENLEISENSDDCQILTCPVCFRAQGCISLEALNKHVDECLDGPSISENFKMFSCSHVSATKVNKKENVPASSLCEKQDYEAHPKIKEISSVDCIALVDTIDNSSKAESIDALSNKHSKEECSSLPSKSFNIEHCHQNSSSTVSLENEDVGSFRQEYRQPYLCEVKTGQALVCPVCNVEQKTSDLTLFNVHVDVCLNKSFIQELRKDKFNPVNQPKESSRSTGSSSGVQKAVTRTKRPGLMTKYSTSKKIKPNNPKHTLDIFFK

SEQ ID NO: 31121 - protein, 372 aa, Homo sapiens
MELEQSRNLSNTIVHIDMDAFYAAVEMRDNPELKDKPIAVGSMSMLSTSNYHARRFGVRAAMPGFIAKRLCPQLIIVPPNFDKYRAVSKEVKEILADYDPNFMAMSLDEAYLNITKHLEERQNWPEDKRRYFIKMGSSVENDNPGKEVNKLSEHERSISPLLFEESPSDVQPPGDPFQVNFEEQNNPQILQNSVVFGTSAQEVVKEIRFRIEQKTTLTASAGIAPNTMLAKVCSDKNKPNGQYQILPNRQAVMDFIKDLPIRKVSGIGKVTEKMLKALGIITCTELYQQRALLSLLFSETSWHYFLHISLGLGSTHLTRDGERKSMSVERTFSEINKAEEQYSLCQELCSELAQDLQKERLKKKYLPLLRNC

SEQ ID NO: 31122 - protein, 489 aa, Homo sapiens
MDSTKEKCDSYKDDLLLRMGLNDNKAGMEGLDKEKINKIIMEATKGSRFYGNELKKEKQVNQRIENMMQQKAQITSQQLRKAQLQVDRFAMELEQSRNLSNTIVHIDMDAFYAAVEMRDNPELKDKPIAVGSMSMLSTSNYHARRFGVRAAMPGFIAKRLCPQLIIVPPNFDKYRAVSKEVKEILADYDPNFMAMSLDEAYLNITKHLEERQNWPEDKRRYFIKMGSSVENDNPGKEVNKLSEHERSISPLLFEESPSDVQPPGDPFQVNFEEQNNPQILQNSVVFGTSAQEVVKEIRFRIEQKTTLTASAGIAPNTMLAKVCSDKNKPNGQYQILPNRQAVMDFIKDLPIRKVSGIGKVTEKMLKALGIITCTELYQQRALLSLLFSETSWHYFLHISLGLGSTHLTRDGERKSMSVERTFSEINKAEEQYSLCQELCSELAQDLQKERLKVFGYLVFPMKRTGNTNKGALLAFYRLETKPCQPLSVH

SEQ ID NO: 31123 - protein, 461 aa, Homo sapiens
MDSTKEKCDSYKDDLLLRMGLNDNKAGMEGLDKEKINKIIMEATKGSRFYGNELKKEKQVNQRIENMMQQKAQITSQQLRKAQLQVDRFAMELEQSRNLSNTIVHIDMDAFYAAVEMRDNPELKDKPIAVGSMSMLSTSNYHARRFGVRAAMPGFIAKRLCPQLIIVPPNFDKYRAVSKEVKEILADYDPNFMAMSLDEAYLNITKHLEERQNWPEDKRRYFIKMGSSVENDNPGKEVNKLSEHERSISPLLFEESPSDVQPPGDPFQVNFEEQNNPQILQNSVVFGTSAQEVVKEIRFRIEQKTTLTASAGIAPNTMLAKVCSDKNKPNGQYQILPNRQAVMDFIKDLPIRKVSGIGKVTEKMLKALGIITCTELYQQRALLSLLFSETSWHYFLHISLGLGSTHLTRDGERKSMSVERTFSEINKAEEQYSLCQELCSELAQDLQKERLKVAQVEYRRL

SEQ ID NO: 31124 - protein, 371 aa, Homo sapiens
MELEQSRNLSNTIVHIDMDAFYAAVEMRDNPELKDKPIAVGSMSMLSTSNYHARRFGVRAAMPGFIAKRLCPQLIIVPPNFDKYRAVSKEVKEILADYDPNFMAMSLDEAYLNITKHLEERQNWPEDKRRYFIKMGSSVENDNPGKEVNKLSEHERSISPLLFEESPSDVQPPGDPFQVNFEEQNNPQILQNSVVFGTSAQEVVKEIRFRIEQKTTLTASAGIAPNTMLAKVCSDKNKPNGQYQILPNRQAVMDFIKDLPIRKVSGIGKVTEKMLKALGIITCTELYQQRALLSLLFSETSWHYFLHISLGLGSTHLTRDGERKSMSVERTFSEINKAEEQYSLCQELCSELAQDLQKERLKVAQVEYRRL

SEQ ID NO: 31125 - protein, 780 aa, Homo sapiens
MELEQSRNLSNTIVHIDMDAFYAAVEMRDNPELKDKPIAVGSMSMLSTSNYHARRFGVRAAMPGFIAKRLCPQLIIVPPNFDKYRAVSKEVKEILADYDPNFMAMSLDEAYLNITKHLEERQNWPEDKRRYFIKMGSSVENDNPGKEVNKLSEHERSISPLLFEESPSDVQPPGDPFQVNFEEQNNPQILQNSVVFGTSAQEVVKEIRFRIEQKTTLTASAGIAPNTMLAKVCSDKNKPNGQYQILPNRQAVMDFIKDLPIRKVSGIGKVTEKMLKALGIITCTELYQQRALLSLLFSETSWHYFLHISLGLGSTHLTRDGERKSMSVERTFSEINKAEEQYSLCQELCSELAQDLQKERLKGRTVTIKLKNVNFEVKTRASTVSSVVSTAEEIFAIAKELLKTEIDADFPHPLRLRLMGVRISSFPNEEDRKHQQRSIIGFLQAGNQALSATECTLEKTDKDKFVKPLEMSHKKSFFDKKRSERKWSHQDTFKCEAVNKQSFQTSQPFQVLKKKMNENLEISENSDDCQILTCPVCFRAQGCISLEALNKHVDECLDGPSISENFKMFSCSHVSATKVNKKENVPASSLCEKQDYEAHPKIKEISSVDCIALVDTIDNSSKAESIDALSNKHSKEECSSLPSKSFNIEHCHQNSSSTVSLENEDVGSFRQEYRQPYLCEVKTGQALVCPVCNVEQKTSDLTLFNVHVDVCLNKSFIQELRKDKFNPVNQPKESSRSTGSSSGVQKAVTRTKRPGLMTKYSTSKKIKPNNPKHTLDIFFK

SEQ ID NO: 31126 - protein, 139 aa, Homo sapiens
MSSLPVPYKLPVSLSVGSCVIIKGTPIHSFINDPQLQVDFYTDMDEDSDIAFRFRVHFGNHVVMNRREFGIWMLEETTDYVPFEDGKQFELCIYVHYNEYEIKVNGIRIYGFVHRIPPSFVKMVQVSRDISLTSVCVCN

SEQ ID NO: 31127 - protein, 258 aa, Homo sapiens
MIAISAVSSALLFSLLCEASTVVLLNSTDSSPPTNNFTDIEAALKAQLDSADIPKARRKRYISQNDMIAILDYHNQVRGKVFPPAANMEYMVWDENLAKSAEAWAATCIWDHGPSYLLRFLGQNLSVRTGRYRSILQLVKPWYDEVKDYAFPYPQDCNPRCPMRCFGPMCTHYTQMVWATSNRIGCAIHTCQNMNVWGSVWRRAVYLVCNYAPKGNWIGEAPYKVGVPCSSCPPSYGGSCTDNLCFPGVTSNYLYWFK

SEQ ID NO: 31128 - protein, 1887 aa, Homo sapiens
MAARGRGLLLLTLSVLLAAGPSAAAAKLNIPKVLLPFTRATRVNFTLEASEGCYRWLSTRPEVASIEPLGLDEQQCSQKAVVQARLTQPARLTSIIFAEDITTGQVLRCDAIVDLIHDIQIVSTTRELYLEDSPLELKIQALDSEGNTFSTLAGLVFEWTIVKDSEADRFSDSHNALRILTFLESTYIPPSYISEMEKAAKQGDTILVSGMKTGSSKLKARIQEAVYKNVRPAEVRLLILENILLNPAYDVYLMVGTSIHYKVQKIRQGKITELSMPSDQYELQLQNSIPGPEGDPARPVAVLAQDTSMVTALQLGQSSLVLGHRSIRMQGASRLPNSTIYVVEPGYLGFTVHPGDRWVLETGRLYEITIEVFDKFSNKVYVSDNIRIETVLPAEFFEVLSSSQNGSYHRIRALKRGQTAIDAALTSVVDQDGGVHILQVPVWNQQEVEIHIPITLYPSILTFPWQPKTGAYQYTIRAHGGSGNFSWSSSSHLVATVTVKGVMTTGSDIGFSVIQAHDVQNPLHFGEMKVYVIEPHSMEFAPCQVEARVGQALELPLRISGLMPGGASEVVTLSDCSHFDLAVEVENQGVFQPLPGRLPPGSEHCSGIRVKAEAQGSTTLLVSYRHGHVHLSAKITIAAYLPLKAVDPSSVALVTLGSSKEMLFEGGPRPWILEPSKFFQNVTAEDTDSIGLALFAPHSSRNYQQHWILVTCQALGEQVIALSVGNKPSLTNPFPAVEPAVVKFVCAPPSRLTLAPVYTSPQLDMSCPLLQQNKQVVPVSSHRNPRLDLAAYDQEGRRFDNFSSLSIQWESTRPVLASIEPELPMQLVSQDDESGQKKLHGLQAILVHEASGTTAITATATGYQESHLSSARTKQPHDPLVPLSASIELILVEDVRVSPEEVTIYNHPGIQAELRIREGSGYFFLNTSTADVVKVAYQEARGVAMVHPLLPGSSTIMIHDLCLVFPAPAKAVVYVSDIQELYIRVVDKVEIGKTVKAYVRVLDLHKKPFLAKYFPFMDLKLRAASPIITLVALDEALDNYTITFLIRGVAIGQTSLTASVTNKAGQRINSAPQQIEVFPPFRLMPRKVTLLIGATMQVTSEGGPQPQSNILFSISNESVALVSAAGLVQGLAIGNGTVSGLVQAVDAETGKVVIISQDLVQVEVLLLRAVRIRAPIMRMRTGTQMPIYVTGITNHQNPFSFGNAVPGLTFHWSVTKRDVLDLRGRHHEASIRLPSQYNFAMNVLGRVKGRTGLRVVVKAVDPTSGQLYGLARELSDEIQVQVFEKLQLLNPEIEAEQILMSPNSYIKLQTNRDGAASLSYRVLDGPEKVPVVHVDEKGFLASGSMIGTSTIEVIAQEPFGANQTIIVAVKVSPVSYLRVSMSPVLHTQNKEALVAVPLGMTVTFTVHFHDNSGDVFHAHSSVLNFATNRDDFVQIGKGPTNNTCVVRTVSVGLTLLRVWDAEHPGLSDFMPLPVLQAISPELSGAMVVGDVLCLATVLTSLEGLSGTWSSSANSILHIDPKTGVAVARAVGSVTVYYEVAGHLRTYKEVVVSVPQRIMARHLHPIQTSFQEATASKVIVAVGDRSSNLRGECTPTQREVIQALHPETLISCQSQFKPAVFDFPSQDVFTVEPQFDTALGQYFCSITMHRLTDKQRKHLSMKKTALVVSASLSSSHFSTEQVGAEVPFSPGLFADQAEILLSNHYTSSEIRVFGAPEVLENLEVKSGSPAVLAFAKEKSFGWPSFITYTVGVLDPAAGSQGPLSTTLTFSSPVTNQAIAIPVTVAFVVDRRGPGPYGASLFQHFLDSYQVMFFTLFALLAGTAVMIIAYHTVCTPRDLAVPAALTPRASPGHSPHYFAASSPTSPNALPPARKASPPSGLWSPAYASH

SEQ ID NO: 31129 - protein, 967 aa, Homo sapiens
MAARGRGLLLLTLSVLLAAGPSAAAAKLNIPKVLLPFTRATRVNFTLEASEGCYRWLSTRPEVASIEPLGLDEQQCSQKAVVQARLTQPARLTSIIFAEDITTGQVLRCDAIVDLIHDIQIVSTTRELYLEDSPLELKIQALDSEGNTFSTLAGLVFEWTIVKDSEADRFSDSHNALRILTFLESTYIPPSYISEMEKAAKQGDTILVSGMKTGSSKLKARIQEAVYKNVRPAEVRLLILENILLNPAYDVYLMVGTSIHYKVQKIRQGKITELSMPSDQYELQLQNSIPGPEGDPARPVAVLAQDTSMVTALQLGQSSLVLGHRSIRMQGASRLPNSTIYVVEPGYLGFTVHPGDRWVLETGRLYEITIEVFDKFSNKVYVSDNIRIETVLPAEFFEVLSSSQNGSYHRIRALKRGQTAIDAALTSVVDQDGGVHILQVPVWNQQEVEIHIPITLYPSILTFPWQPKTGAYQYTIRAHGGSGNFSWSSSSHLVATVTVKGVMTTGSDIGFSVIQAHDVQNPLHFGEMKVYVIEPHSMEFAPCQVEARVGQALELPLRISGLMPGGASEVVTLSDCSHFDLAVEVENQGVFQPLPGRLPPGSEHCSGIRVKAEAQGSTTLLVSYRHGHVHLSAKITIAAYLPLKAVDPSSVALVTLGSSKEMLFEGGPRPWILEPSKFFQNVTAEDTDSIGLALFAPHSSRNYQQHWILVTCQALGEQVIALSVGNKPSLTNPFPAVEPAVVKFVCAPPSRLTLAPVYTSPQLDMSCPLLQQNKQVVPVSSHRNPRLDLAAYDQEGRRFDNFSSLSIQWESTRPVLASIEPELPMQLVSQDDESGQKKLHGLQAILVHEASGTTAITATATGYQESHLSSARTKQPHDPLVPLSASIELILVEDVRVSPEEVTIYNHPGIQAELRIREGSGYFFLNTSTADVVKVAYQEARGVAMVSLGHRSPLLVFIPYLGCCVVN

SEQ ID NO: 31130 - protein, 463 aa, Homo sapiens
MHGSCSFLMLLLPLLLLLVATTGPVGALTDEEKRLMVELHNLYRAQVSPTASDMLHMRWDEELAAFAKAYARQCVWGHNKERGRRGENLFAITDEGMDVPLAMEEWHHEREHYNLSAATCSPGQMCGHYTQVVWAKTERIGCGSHFCEKLQGVEETNIELLVCNYEPPGNVKGKRPYQEGTPCSQCPSGYHCKNSLCEPIGSPEDAQDLPYLVTEAPSFRATEASDSRKMGTPSSLATGIPAFLVTEVSGSLATKALPAVETQAPTSLATKDPPSMATEAPPCVTTEVPSILAAHSLPSLDEEPVTFPKSTHVPIPKSADKVTDKTKVPSRSPENSLDPKMSLTGARELLPHAQEEAEAEAELPPSSEVLASVFPAQDKPGELQATLDHTGHTSSKSLPNFPNTSATANATGGRALALQSSLPGAEGPDKPSVVSGLNSGPGHVWGPLLGLLLLPPLVLAGIF

SEQ ID NO: 31131 - protein, 270 aa, Homo sapiens
MHGSCSFLMLLLPLLLLLVATTGPVGALTDEEKRLMVELHNLYRAQVSPTASDMLHMRWDEELAAFAKAYARQCVWGHNKERGRRGENLFAITDEGMDVPLAMEEWHHEREHYNLSAATCSPGQMCGHYTQVVWAKTERIGCGSHFCEKLQGVEETNIELLVCNYEPPGNVKGKRPYQEGTPCSQCPSGYHCKNSLCEPIGSPEDAQDLPYLVTEAPSFRATEASDSRKMGAEGPDKPSVVSGLNSGPGHVWGPLLGLLLLPPLVLAGIF

SEQ ID NO: 31132 - protein, 147 aa, Homo sapiens
MAAQRLGKRVLSKLQSPSRARGPGGSPGGLQKRHARVTVKYDRRELQRRLDVEKWIDGRLEELYRGMEADMPDEINIDELLELESEEERSRKIQGLLKSCGKPVEDFIQELLAKLQGLHRQPGLRQPSPSHDGSLSPLQDRARTAHP

SEQ ID NO: 31133 - protein, 120 aa, Homo sapiens
MAAQRLGKRVLSKLQSPSRARGPGGSPGGLQKRHARVTVKYDRRELQRRLDVEKWIDGRLEELYRGMGLLKSCGKPVEDFIQELLAKLQGLHRQPGLRQPSPSHDGSLSPLQDRARTAHP

SEQ ID NO: 31134 - protein, 386 aa, Homo sapiens [sequence omitted]

SEQ ID NO: 31135 - protein, 147 aa, Homo sapiens
MADSGTAGGAALAAPAPGPGSGGPGPRVYFQSPPGAAGEGPGGADDEGPVRRQGKVTVKYDRKELRKRLNLEEWILEQLTRLYDCQEEEIPELEIDVDELLDMESDDARAARVKELLVDCYKPTEAFISGLLDKIRGMQKLSTPQKK

SEQ ID NO: 31136 - protein, 743 aa, Homo sapiens
MNNPSETSKPSMESGDGNTGTQTNGLDFQKQPVPVGGAISTAQAQAFLGHLHQVQLAGTSLQAAAQSLNVQSKSNEESGDSQQPSQPSQQPSVQAAIPQTQLMLAGGQITGLTLTPAQQQLLLQQAQAQAQLLAAAVQQHSASQQHSAAGATISASAATPMTQIPLSQPIQIAQDLQQLQQLQQQNLNLQQFVLVHPTTNLQPAQFIISQTPQGQQGLLQAQNLLTQLPQQSQANLLQSQPSITLTSQPATPTRTIAATPIQTLPQSQSTPKRIDTPSLEEPSDLEELEQFAKTFKQRRIKLGFTQGDVGLAMGKLYGNDFSQTTISRFEALNLSFKNMCKLKPLLEKWLNDAENLSSDSSLSSPSALNSPGIEGLSRRRKKRTSIETNIRVALEKSFLENQKPTSEEITMIADQLNMEKEVIRVWFCNRRQKEKRINPPSSGGTSSSPIKAIFPSPTSLVATTPSLVTSSAATTLTVSPVLPLTSAAVTNLSVTGTSDTTSNNTATVISTAPPASSAVTSPSLSPSPSASASTSEASSASETSTTQTTSTPLSSPLGTSQVMVTASGLQTAAAAALQGAAQLPANASLAAMAAAAGLNPSLMAPSQFAAGGALLSLNPGTLSGALSPALMSNSTLATIQALASGGSLPITSLDATGNLVFANAGGAPNIVTAPLFLNPQNLSLLTSNPVSLVSAAAASAGNSAPVASLHATSTSAESIQNSLFTVASASGAASTTTTASKAQ

SEQ ID NO: 31137 - protein, 755 aa, Homo sapiens
MLDCSDYVLDSRMNNPSETSKPSMESGDGNTGTQTNGLDFQKQPVPVGGAISTAQAQAFLGHLHQVQLAGTSLQAAAQSLNVQSKSNEESGDSQQPSQPSQQPSVQAAIPQTQLMLAGGQITGLTLTPAQQQLLLQQAQAQAQLLAAAVQQHSASQQHSAAGATISASAATPMTQIPLSQPIQIAQDLQQLQQLQQQNLNLQQFVLVHPTTNLQPAQFIISQTPQGQQGLLQAQNLLTQLPQQSQANLLQSQPSITLTSQPATPTRTIAATPIQTLPQSQSTPKRIDTPSLEEPSDLEELEQFAKTFKQRRIKLGFTQGDVGLAMGKLYGNDFSQTTISRFEALNLSFKNMCKLKPLLEKWLNDAENLSSDSSLSSPSALNSPGIEGLSRRRKKRTSIETNIRVALEKSFLENQKPTSEEITMIADQLNMEKEVIRVWFCNRRQKEKRINPPSSGGTSSSPIKAIFPSPTSLVATTPSLVTSSAATTLTVSPVLPLTSAAVTNLSVTGTSDTTSNNTATVISTAPPASSAVTSPSLSPSPSASASTSEASSASETSTTQTTSTPLSSPLGTSQVMVTASGLQTAAAAALQGAAQLPANASLAAMAAAAGLNPSLMAPSQFAAGGALLSLNPGTLSGALSPALMSNSTLATIQALASGGSLPITSLDATGNLVFANAGGAPNIVTAPLFLNPQNLSLLTSNPVSLVSAAAASAGNSAPVASLHATSTSAESIQNSLFTVASASGAASTTTTASKAQ

SEQ ID NO: 31138 - protein, 741 aa, Homo sapiens
MKTRMKIFVMIHFHLMNSTQTNGLDFQKQPVPVGGAISTAQAQAFLGHLHQVQLAGTSLQAAAQSLNVQSKSNEESGDSQQPSQPSQQPSVQAAIPQTQLMLAGGQITGLTLTPAQQQLLLQQAQAQAQLLAAAVQQHSASQQHSAAGATISASAATPMTQIPLSQPIQIAQDLQQLQQLQQQNLNLQQFVLVHPTTNLQPAQFIISQTPQGQQGLLQAQNLLTQLPQQSQANLLQSQPSITLTSQPATPTRTIAATPIQTLPQSQSTPKRIDTPSLEEPSDLEELEQFAKTFKQRRIKLGFTQGDVGLAMGKLYGNDFSQTTISRFEALNLSFKNMCKLKPLLEKWLNDAENLSSDSSLSSPSALNSPGIEGLSRRRKKRTSIETNIRVALEKSFLENQKPTSEEITMIADQLNMEKEVIRVWFCNRRQKEKRINPPSSGGTSSSPIKAIFPSPTSLVATTPSLVTSSAATTLTVSPVLPLTSAAVTNLSVTGTSDTTSNNTATVISTAPPASSAVTSPSLSPSPSASASTSEASSASETSTTQTTSTPLSSPLGTSQVMVTASGLQTAAAAALQGAAQLPANASLAAMAAAAGLNPSLMAPSQFAAGGALLSLNPGTLSGALSPALMSNSTLATIQALASGGSLPITSLDATGNLVFANAGGAPNIVTAPLFLNPQNLSLLTSNPVSLVSAAAASAGNSAPVASLHATSTSAESIQNSLFTVASASGAASTTTTASKAQ

SEQ ID NO: 31139 - protein, 766 aa, Homo sapiens
MADGGAASQDESSAAAAAAADSRMNNPSETSKPSMESGDGNTGTQTNGLDFQKQPVPVGGAISTAQAQAFLGHLHQVQLAGTSLQAAAQSLNVQSKSNEESGDSQQPSQPSQQPSVQAAIPQTQLMLAGGQITGLTLTPAQQQLLLQQAQAQAQLLAAAVQQHSASQQHSAAGATISASAATPMTQIPLSQPIQIAQDLQQLQQLQQQNLNLQQFVLVHPTTNLQPAQFIISQTPQGQQGLLQAQNLLTQLPQQSQANLLQSQPSITLTSQPATPTRTIAATPIQTLPQSQSTPKRIDTPSLEEPSDLEELEQFAKTFKQRRIKLGFTQGDVGLAMGKLYGNDFSQTTISRFEALNLSFKNMCKLKPLLEKWLNDAENLSSDSSLSSPSALNSPGIEGLSRRRKKRTSIETNIRVALEKSFLENQKPTSEEITMIADQLNMEKEVIRVWFCNRRQKEKRINPPSSGGTSSSPIKAIFPSPTSLVATTPSLVTSSAATTLTVSPVLPLTSAAVTNLSVTGTSDTTSNNTATVISTAPPASSAVTSPSLSPSPSASASTSEASSASETSTTQTTSTPLSSPLGTSQVMVTASGLQTAAAAALQGAAQLPANASLAAMAAAAGLNPSLMAPSQFAAGGALLSLNPGTLSGALSPALMSNSTLATIQALASGGSLPITSLDATGNLVFANAGGAPNIVTAPLFLNPQNLSLLTSNPVSLVSAAAASAGNSAPVASLHATSTSAESIQNSLFTVASASGAASTTTTASKAQ

SEQ ID NO: 31140 - protein, 653 aa, Homo sapiens
MNNPSETSKPSMESGDGNTGTQTNGLDFQKQPVPVGGAISTAQAQAFLGHLHQVQLAGTSLQAAAQSLNVQSKSNEESGDSQQPSQPSQQPSVQAAIPQTQLMLAGGQITGLTLTPAQQQLLLQQAQAQAQLLAAAVQQHSASQQHSAAGATISASAATPMTQIPLSQPIQIAQDLQQLQQLQQQNLNLQQFVLVHPTTNLQPAQFIISQTPQGQQGLLQAQNLLTQLPQQSQANLLQSQPSITLTSQPATPTRTIAATPIQTLPQSQSTPKRIDTPSLEEPSDLEELEQFAKTFKQRRIKLGFTQGDVGLAMGKLYGNDFSQTTISRFEALNLSFKNMCKLKPLLEKWLNDAENLSSDSSLSSPSALNSPGIEGLSRRRKKRTSIETNIRVALEKSFLENQKPTSEEITMIADQLNMEKEVIRVWFCNRRQKEKRINPPSSGGTSSSPIKAIFPSPTSLVATTPSLVTSSAATTLTVSPVLPLTSAAVTNLSVTGTSDTTSNNTATVISTAPPASSAVTSPSLSPSPSASASTSEASSASETSTTQTTSTPLSSPLGTSQVMVTASGLQTAAAAALQGAAQLPANASLAAMAAAAGLNPSLMAPSQFAAGGALLSLNPGTLSGALSPALMSNSTLATIQGLLHGLENFLTKN

SEQ ID NO: 31141 - protein, 703 aa, Homo sapiens
MADGGAASQDESSAAAAAAADSRMNNPSETSKPSMESGDGNTGTQTNGLDFQKQPVPVGGAISTAQAQAFLGHLHQVQLAGTSLQAAAQSLNVQSKSNEESGDSQQPSQPSQQPSVQAAIPQTQLMLAGGQITGDLQQLQQLQQQNLNLQQFVLVHPTTNLQPAQFIISQTPQGQQGLLQAQNLLTQLPQQSQANLLQSQPSITLTSQPATPTRTIAATPIQTLPQSQSTPKRIDTPSLEEPSDLEELEQFAKTFKQRRIKLGFTQGDVGLAMGKLYGNDFSQTTISRFEALNLSFKNMCKLKPLLEKWLNDAENLSSDSSLSSPSALNSPGIEGLSRRRKKRTSIETNIRVALEKSFLENQKPTSEEITMIADQLNMEKEVIRVWFCNRRQKEKRINPPSSGGTSSSPIKAIFPSPTSLVATTPSLVTSSAATTLTVSPVLPLTSAAVTNLSVTGTSDTTSNNTATVISTAPPASSAVTSPSLSPSPSASASTSEASSASETSTTQTTSTPLSSPLGTSQVMVTASGLQTAAAAALQGAAQLPANASLAAMAAAAGLNPSLMAPSQFAAGGALLSLNPGTLSGALSPALMSNSTLATIQALASGGSLPITSLDATGNLVFANAGGAPNIVTAPLFLNPQNLSLLTSNPVSLVSAAAASAGNSAPVASLHATSTSAESIQNSLFTVASASGAASTTTTASKAQ

SEQ ID NO: 31142 - protein, 165 aa, Homo sapiens
MSVATGSSETAGGASGGGARVFFQSPRGGAGGSPGSSSGSGSSREDSAPVATAAAAGQVQQQQQRRHQQGKVTVKYDRKELRKRLVLEEWIVEQLGQLYGCEEEEMPEVEIDIDDLLDADSDEERASKLQEALVDCYKPTEEFIKELLSRIRGMRKLSPPQKKSV

SEQ ID NO: 31143 - protein, 145 aa, Homo sapiens
MLSSSPASCTSPSPDGENPCKKVHWASGRRRTSSTDSESKSHPDSSKIPRSRRPSRLTVKYDRGQLQRWLEMEQWVDAQVQELFQDQATPSEPEIDLEALMDLSTEEQKTQLEAILGNCPRPTEAFISELLSQLKKLRRLSRPQK

SEQ ID NO: 31144 - protein, 146 aa, Homo sapiens
MRLLQLLFRASPATLLLVLCLQLGANKAQDNTRKIIIKNFDIPKSVRPNDEVTAVLAVQTELKECMVVKTYLISSIPLQGAFNYKYTACLCDDNPKTFYWDFYTNRTVQIAAVVDVIRELGICPDDAAVIPIKNNRFYTIEILKVE

SEQ ID NO: 31145 - protein, 479 aa, Homo sapiens
MVHSSMGAPEIRMSKPLEAEKQGLDSPSEHTDTERNGPDTNHQNPQNKTSPFSVSPTGPSTKIKAEDPSGDSAPAAPLPPQPAQPHLPQAQLMLTGSQLAGDIQQLLQLQQLVLVPGHHLQPPAQFLLPQAQQSQPGLLPTPNLFQLPQQTQGALLTSQPRAGLPTQAVTRPTLPDPHLSHPQPPKCLEPPSHPEEPSDLEELEQFARTFKQRRIKLGFTQGDVGLAMGKLYGNDFSQTTISRFEALNLSFKNMCKLKPLLEKWLNDAETMSVDSSLPSPNQLSSPSLGFDGLPGRRRKKRTSIETNVRFALEKSFLANQKPTSEEILLIAEQLHMEKEVIRVWFCNRRQKEKRINPCSAAPMLPSPGKPASYSPHMVTPQGGAGTLPLSQASSSLSTTVTTLSSAVGTLHPSRTAGGGGGGGGAAPPLNSIPSVTPPPPATTNSTNPSPQGSHSAIGLSGLNPSTGPGLWWNPAPYQP

SEQ ID NO: 31146 - protein, 467 aa, Homo sapiens
MVHSSMGAPEIRMSKPLEAEKQGLDSPSEHTDTERNGPDTNHQNPQNKTSPFSVSPTGPSTKIKAEDPSGDSAPAAPLPPQPAQPHLPQAQLMLTGSQLAGDIQQLLQLQQLVLVPGHHLQPPAQFLLPQAQQSQPGLLPTPNLFQLPQQTQGALLTSQPRAGLPTQAVTRPTLPDPHLSHPQPPKCLEPPSHPEEPSDLEELEQFARTFKQRRIKLGFTQGDVGLAMGKLYGNDFSQTTISRFEALNLSFKNMCKLKPLLEKWLNDAETMSVDSSLPSPNQLSSPSLGFDGLPGRRRKKRTSIETNVRFALEKSFLANQKPTSEEILLIAEQLHMEKEVIRVWFCNRRQKEKRINPCSAAPMLPSPGKPASYSPHMVTPQGGAGTLPLSQASSSLSTTVTTLSSAVGTLHPSRTAGGGGGGGGAAPPLNSIPSVTPPPPATTNSTNPSPQGSHSAIGLSGLNPSTG

SEQ ID NO: 31147 - protein, 463 aa, Homo sapiens
MVHSSMGAPEIRMSKPLEAEKQGLDSPSEHTDTERNGPDTNHQNPQNKTSPFSVSPTGPSTKIKAEDPSGDSAPAAPLPPQPAQPHLPQAQLMLTGSQLAGDIQQLLQLQQLVLVPGHHLQPPAQFLLPQAQQSQPGLLPTPNLFQLPQQTQGALLTSQPRAGLPTQPPKCLEPPSHPEEPSDLEELEQFARTFKQRRIKLGFTQGDVGLAMGKLYGNDFSQTTISRFEALNLSFKNMCKLKPLLEKWLNDAETMSVDSSLPSPNQLSSPSLGFDGLPGRRRKKRTSIETNVRFALEKSFLANQKPTSEEILLIAEQLHMEKEVIRVWFCNRRQKEKRINPCSAAPMLPSPGKPASYSPHMVTPQGGAGTLPLSQASSSLSTTVTTLSSAVGTLHPSRTAGGGGGGGGAAPPLNSIPSVTPPPPATTNSTNPSPQGSHSAIGLSGLNPSTGPGLWWNPAPYQP

SEQ ID NO: 31148 - protein, 400 aa, Homo sapiens
MVHSSMGAPEIRMSKPLEAEKQGLDSPSEHTDTERNGPDTNHQNPQNKTSPFSVSPTGPSTKIKAEDPSGDSAPAAPLPPQPAQPHLPQAQLMLTGSQLAGDIQQLLQLQQLVLVPGHHLQPPAQFLLPQAQQSQPGLLPTPNLFQLPQQTQGALLTSQPRAGLPTQPPKCLEPPSHPEEPSDLEELEQFARTFKQRRIKLGFTQGDVGLAMGKLYGNDFSQTTISRFEALNLSFKNMCKLKPLLEKWLNDAETMSVDSSLPSPNQLSSPSLGFDGLPGRRRKKRTSIETNVRFALEKSFLANQKPTSEEILLIAEQLHMEKEVIRVWFCNRRQKEKRINPCSAAPMLPSPGKPASYSPHMVTPQGGAGTLPLSQASSSLSTTAQTPALKAATRLSACQA

SEQ ID NO: 31149 - protein, 602 aa, Homo sapiens
MVHSSMGAPEIRMSKPLEAEKQGLDSPSEHTDTERNGPDTNHQNPQNKTSPFSVSPTGPSTKIKAEDPSGDSAPAAPLPPQPAQPHLPQAQLMLTGSQLAGDIQQLLQLQQLVLVPGHHLQPPAQFLLPQAQQSQPGLLPTPNLFQLPQQTQGALLTSQPRAGLPTQAVTRPTLPDPHLSHPQPPKCLEPPSHPEEPSDLEELEQFARTFKQRRIKLGFTQGDVGLAMGKLYGNDFSQTTISRFEALNLSFKNMCKLKPLLEKWLNDAETMSVDSSLPSPNQLSSPSLGFDGLPGRRRKKRTSIETNVRFALEKSFLANQKPTSEEILLIAEQLHMEKEVIRVWFCNRRQKEKRINPCSAAPMLPSPGKPASYSPHMVTPQGGAGTLPLSQASSSLSTTVTTLSSAVGTLHPSRTAGGGGGGGGAAPPLNSIPSVTPPPPATTNSTNPSPQGSHSAIGLSGLNPSTGSTMVGLSSGLSPALMSNNPLATIQALASGGTLPLTSLDGSGNLVLGAAGAAPGSPSLVTSPLFLNHTGLPLLSAPPGVGLVSAAAAAVAASISSKSPGLSSSSSSSSSSSSSTCSDVAAQTPGGPGGPEAGSKAE

SEQ ID NO: 31150 - protein, 1358 aa, Homo sapiens
MGNQLAGIAPSQILSVESYFSDIHDFEYDKSLGSTRFFKVARAKHREGLVVVKVFAIQDPTLPLTSYKQELEELKIRLNSAQNCLPFQKASEKASEKAAMLFRQYVRDNLYDRISTRPFLNNIEKRWIAFQILTAVDQAHKSGVRHGDIKTENVMVTSWNWVLLTDFASFKPTYLPEDNPADFNYFFDTSRRRTCYIAPERFVDGGMFATELEYMRDPSTPLVDLNSNQRTRGELKRAMDIFSAGCVIAELFTEGVPLFDLSQLLAYRNGHFFPEQVLNKIEDHSIRELVTQMIHREPDKRLEAEDYLKQQRGNAFPEIFYTFLQPYMAQFAKETFLSADERILVIRKDLGNIIHNLCGHDLPEKAEGEPKENGLVILVSVITSCLQTLKYCDSKLAALELILHLAPRLSVEILLDRITPYLLHFSNDSVPRVRAEALRTLTKVLALVKEVPRNDINIYPEYILPGIAHLAQDDATIVRLAYAENIALLAETALRFLELVQLKNLNMENDPNNEEIDEVTHPNGNYDTELQALHEMVQQKVVTLLSDPENIVKQTLMENGITRLCVFFGRQKANDVLLSHMITFLNDKNDWHLRGAFFDSIVGVAAYVGWQSSSILKPLLQQGLSDAEEFVIVKALYALTCMCQLGLLQKPHVYEFASDIAPFLCHPNLWIRYGAVGFITVVARQISTADVYCKLMPYLDPYITQPIIQIERKLVLLSVLKEPVSRSIFDYALRSKDITSLFRHLHMRQKKRNGSLPDCPPPEDPAIAQLLKKLLSQGMTEEEEDKLLALKDFMMKSNKAKANIVDQSHLHDSSQKGVIDLAALGITGRQVDLVKTKQEPDDKRARKHVKQDSNVNEEWKSMFGSLDPPNMPQALPKGSDQEVIQTGKPPRSESSAGICVPLSTSSQVPEVTTVQNKKPVIPVLSSTILPSTYQIRITTCKTELQQLIQQKREQCNAERIAKQMMENAEWESKPPPPGWRPKGLLVAHLHEHKSAVNRIRVSDEHSLFATCSNDGTVKIWNSQKMEGKTTTTRSILTYSRIGGRVKTLTFCQGSHYLAIASDNGAVQLLGIEASKLPKSPKIHPLQSRILDQKEDGCVVDMHHFNSGAQSVLAYATVNGSLVGWDLRSSSNAWTLKHDLKSGLITSFAVDIHQCWLCIGTSSGTMACWDMRFQLPISSHCHPSRARIRRLSMHPLYQSWVIAAVQGNNEVSMWDMETGDRRFTLWASSAPPLSELQPSPHSVHGIYCSPADGNPILLTAGSDMKIRFWDLAYPERSYVVAGSTSSPSVSYYRKIIEGTEVVQEIQNKQKVGPSDDTPRRGPESLPVGHHDIITDVATFQTTQGFIVTASRDGIVKVWK

SEQ ID NO: 31151 - protein, 436 aa, Homo sapiens
MVNLESMHTDIKMSGDVADSTDARSTLSQVEPGNDRNGLDFNRQIKTEDLSDSLQQTLSHRPCHLSQGPAMMSGNQMSGLNASPCQDMASLHPLQQLVLVPGHLQSVSQFLLSQTQPGQQGLQPNLLPFPQQQSGLLLPQTGPGLASQAFGHPGLPGSSLEPHLEASQHLPVPKHLPSSGGADEPSDLEELEKFAKTFKQRRIKLGFTQGDVGLAMGKLYGNDFSQTTISRFEALNLSFKNMCKLKPLLEKWLNDAESSPSDPSVSTPSSYPSLSEVFGRKRKKRTSIETNIRLTLEKRFQDNPKPSSEEISMIAEQLSMEKEVVRVWFCNRRQKEKRINCPVATPIKPPVYNSRLVSPSGSLGPLSVPPVHSTMPGTVTSSCSPGNNSRPSSPGSGLHASSPTASQNNSKAAVNSASSFNSSGSWYRWNHSTYLH

SEQ ID NO: 31152 - protein, 438 aa, Homo sapiens
MESPRTAKGGRDIKMSGDVADSTDARSTLSQVEPGNDRNGLDFNRQIKTEDLSDSLQQTLSHRPCHLSQGPAMMSGNQMSGLNASPCQDMASLHPLQQLVLVPGHLQSVSQFLLSQTQPGQQGLQPNLLPFPQQQSGLLLPQTGPGLASQAFGHPGLPGSSLEPHLEASQHLPVPKHLPSSGGADEPSDLEELEKFAKTFKQRRIKLGFTQGDVGLAMGKLYGNDFSQTTISRFEALNLSFKNMCKLKPLLEKWLNDAESSPSDPSVSTPSSYPSLSEVFGRKRKKRTSIETNIRLTLEKRFQDNPKPSSEEISMIAEQLSMEKEVVRVWFCNRRQKEKRINCPVATPIKPPVYNSRLVSPSGSLGPLSVPPVHSTMPGTVTSSCSPGNNSRPSSPGSGLHASSPTASQNNSKAAVNSASSFNSSGSWYRWNHSTYLH

SEQ ID NO: 31153 - protein, 432 aa, Homo sapiens
MNDAKDIKMSGDVADSTDARSTLSQVEPGNDRNGLDFNRQIKTEDLSDSLQQTLSHRPCHLSQGPAMMSGNQMSGLNASPCQDMASLHPLQQLVLVPGHLQSVSQFLLSQTQPGQQGLQPNLLPFPQQQSGLLLPQTGPGLASQAFGHPGLPGSSLEPHLEASQHLPVPKHLPSSGGADEPSDLEELEKFAKTFKQRRIKLGFTQGDVGLAMGKLYGNDFSQTTISRFEALNLSFKNMCKLKPLLEKWLNDAESSPSDPSVSTPSSYPSLSEVFGRKRKKRTSIETNIRLTLEKRFQDNPKPSSEEISMIAEQLSMEKEVVRVWFCNRRQKEKRINCPVATPIKPPVYNSRLVSPSGSLGPLSVPPVHSTMPGTVTSSCSPGNNSRPSSPGSGLHASSPTASQNNSKAAVNSASSFNSSGSWYRWNHSTYLH

SEQ ID NO: 31154 - protein, 880 aa, Homo sapiens
MQPGATTCTEDRIQHALERCLHGLSLSRRSTSWSAGLCLNCWSLQELVSRDPGHFLILLEQILQKTREVQEKGTYDLLTPLALLFYSTVLCTPHFPPDSDLLLKAASTYHRFLTWPVPYCSICQELLTFIDAELKAPGISYQRLVRAEQGLPIRSHRSSTVTVLLLNPVEVQAEFLAVANKLSTPGHSPHSAYTTLLLHAFQATFGAHCDVPGLHCRLQAKTLAELEDIFTETAEAQELASGIGDAAEARRWLRTKLQAVGEKAGFPGVLDTAKPGKLHTIPIPVARCYTYSWSQDSFDILQEILLKEQELLQPGILGDDEEEEEEEEEVEEDLETDGHCAERDSLLSTSSLASHDSTLSLASSQASGPALSRHLLTSFVSGLSDGMDSGYVEDSEESSSEWPWRRGSQERRGHRRPGQKFIRIYKLFKSTSQLVLRRDSRSLEGSSDTALPLRRAGSLCSPLDEPVSPPSRAQRSRSLPQPKLGTQLPSWLLAPASRPQRRRPFLSGDEDPKASTLRVVVFGSDRISGKVARAYSNLRRLENNRPLLTRFFKLQFFYVPVKRSHGTSPGACPPPRSQTPSPPTDSPRHASPGELGTTPWEESTNDISHYLGMLDPWYERNVLGLMHLPPEVLCQQSLKAEAQALEGSPTQLPILADMLLYYCRFAARPVLLQVYQTELTFITGEKTTEIFIHSLELGHSAATRAIKASGPGSKRLGIDGDREAVPLTLQIIYSKGAISGRSRWSNLEKVCTSVNLNKACRKQEELDSSMEALTLNLTEVVKRQNSKSKKGFNQISTSQIKVDKVQIIGSNSCPFAVCLDQDERKILQSVVRCEVSPCYKPEKSDLSSPPQTPPDLPAQAAPDLCSLLCLPIMTFSGALP

SEQ ID NO: 31155 - protein, 494 aa, Homo sapiens
MDSGYVEDSEESSSEWPWRRGSQERRGHRRPGQKFIRIYKLFKSTSQLVLRRDSRSLEGSSDTALPLRRAGSLCSPLDEPVSPPSRAQRSRSLPQPKLGTQLPSWLLAPASRPQRRRPFLSGDEDPKASTLRVVVFGSDRISGKVARAYSNLRRLENNRPLLTRFFKLQFFYVPVKRSHGTSPGACPPPRSQTPSPPTDSPRHASPGELGTTPWEESTNDISHYLGMLDPWYERNVLGLMHLPPEVLCQQSLKAEAQALEGSPTQLPILADMLLYYCRFAARPVLLQVYQTELTFITGEKTTEIFIHSLELGHSAATRAIKASGPGSKRLGIDGDREAVPLTLQIIYSKGAISGRSRWSNLEKVCTSVNLNKACRKQEELDSSMEALTLNLTEVVKRQNSKSKKGFNQISTSQIKVDKVQIIGSNSCPFAVCLDQDERKILQSVVRCEVSPCYKPEKSDLSSPPQTPPDLPAQAAPDLCSLLCLPIMTFSGALP

SEQ ID NO: 31156 - protein, 451 aa, Homo sapiens
MATTAQYLPRGPGGGAGGTGPLMHPDAAAAAAAAAAAERLHAGAAYREVQKLMHHEWLGAGAGHPVGLAHPQWLPTGGGGGGDWAGGPHLEHGKAGGGGTGRADDGGGGGGFHARLVHQGAAHAGAAWAQGSTAHHLGPAMSPSPGASGGHQPQPLGLYAQAAYPGGGGGGLAGMLAAGGGGAGPGLHHALHEDGHEAQLEPSPPPHLGAHGHAHGHAHAGGLHAAAAHLHPGAGGGGSSVGEHSDEDAPSSDDLEQFAKQFKQRRIKLGFTQADVGLALGTLYGNVFSQTTICRFEALQLSFKNMCKLKPLLNKWLEETDSSSGSPTNLDKIAAQGRKRKKRTSIEVGVKGALESHFLKCPKPSAHEITGLADSLQLEKEVVRVWFCNRRQKEKRMTPAAGAGHPPMDDVYAPGELGPGGGGASPPSAPPPPPPAALHHHHHHTLPGSVQ

SEQ ID NO: 31157 - protein, 754 aa, Homo sapiens
MESSDVELDLQRSVQAVLRELSTQAPALQSNQGMWRWSLHKKVERDPGKSPVLVRILLRELEKAESQDLRHVIIPLLHTVMYVLTKATGITEELYQRIYAFCTRLLTLPTPYCTVALDCAIRLKTEMAVPGTLYQRMVIAEQNLTNELYPYQERVFLFVDPELVSASVCSALLLEIEAAQAQQTPETCMRHVVSHALQAALGEACHAGALHRKLQASPRRTLEHYFHAVVAALEQMASEASPSREGHVERLEEIYCSLLGPAAGRCGGDLVQERPPSIPLPSPYITFHLWTGEEQLWKELVLFLRPRSQLRLSADLEVLDLQGLRPDRELARVSVLSTDSGIERDLPTGADELPAPGSPEMERAGLQRKGGIKKRAWPLDFLMPGSWDGPPGLHRRTGRPSGDGEMLPGVSRLHTARVLVLGDDRMLGRLAQAYHRLRKRETQKFCLTPRLSLQLYYIPVLAPEKPAASRQPELGELATFLGRVDPWYQSNVNTLCPAIHKLAEMPPSLDTSRTVDPFILDVITYYIRMGTQPIYFQIYTVKIFFSDLSQDPTEDIFLIELKVKIQDSKFPKDGFSPRRRGVAEGPGAELSLCYQKALLSHRPREVTVSLRATGLILKAIPASDTEVSGSSHCPLPAAPVTDHTCLNVNVTEVVKSSNLAGKSFSTVTNTFRTNNIQIQSRDQRLLTLSLDKDDQRTFRDVVRFEVAPCPEPCSGAQKSKAPWLNLHGQQEVEAIKAKPKPLLMPINTFSGIVQ

SEQ ID NO: 31158 - protein, 443 aa, Homo sapiens
MATAASNHYSLLTSSASIVHAEPPGGMQQGAGGYREAQSLVQGDYGALQSNGHPLSHAHQWITALSHGGGGGGGGGGGGGGGGGGGGGDGSPWSTSPLGQPDIKPSVVVQQGGRGDELHGPGALQQQHQQQQQQQQQQQQQQQQQQQQQRPPHLVHHAANHHPGPGAWRSAAAAAHLPPSMGASNGGLLYSQPSFTVNGMLGAGGQPAGLHHHGLRDAHDEPHHADHHPHPHSHPHQQPPPPPPPQGPPGHPGAHHDPHSDEDTPTSDDLEQFAKQFKQRRIKLGFTQADVGLALGTLYGNVFSQTTICRFEALQLSFKNMCKLKPLLNKWLEEADSSSGSPTSIDKIAAQGRKRKKRTSIEVSVKGALESHFLKCPKPSAQEITSLADSLQLEKEVVRVWFCNRRQKEKRMTPPGGTLPGAEDVYGGSRDTPPHHGVQTPVQ

SEQ ID NO: 31159 - protein, 263 aa, Homo sapiens
MGASNGGLLYSQPSFTVNGMLGAGGQPAGLHHHGLRDAHDEPHHADHHPHPHSHPHQQPPPPPPPQGPPGHPGAHHDPHSDEDTPTSDDLEQFAKQFKQRRIKLGFTQADVGLALGTLYGNVFSQTTICRFEALQLSFKNMCKLKPLLNKWLEEADSSSGSPTSIDKIAAQGRKRKKRTSIEVSVKGALESHFLKCPKPSAQEITSLADSLQLEKEVVRVWFCNRRQKEKRMTPPGGTLPGAEDVYGGSRDTPPHHGVQTPVQ

SEQ ID NO: 31160 - protein, 244 aa, Homo sapiens
MLGAGGQPAGLHHHGLRDAHDEPHHADHHPHPHSHPHQQPPPPPPPQGPPGHPGAHHDPHSDEDTPTSDDLEQFAKQFKQRRIKLGFTQADVGLALGTLYGNVFSQTTICRFEALQLSFKNMCKLKPLLNKWLEEADSSSGSPTSIDKIAAQGRKRKKRTSIEVSVKGALESHFLKCPKPSAQEITSLADSLQLEKEVVRVWFCNRRQKEKRMTPPGGTLPGAEDVYGGSRDTPPHHGVQTPVQ

SEQ ID NO: 31161 - protein, 500 aa, Homo sapiens
MATAASNPYLPGNSLLAAGSIVHSDAAGAGGGGGGGGGGGGGGAGGGGGGMQPGSAAVTSGAYRGDPSSVKMVQSDFMQGAMAASNGGHMLSHAHQWVTALPHAAAAAAAAAAAAVEASSPWSGSAVGMAGSPQQPPQPPPPPPQGPDVKGGAGRDDLHAGTALHHRGPPHLGPPPPPPHQGHPGGWGAAAAAAAAAAAAAAAAHLPSMAGGQQPPPQSLLYSQPGGFTVNGMLSAPPGPGGGGGGAGGGAQSLVHPGLVRGDTPELAEHHHHHHHHAHPHPPHPHHAQGPPHHGGGGGGAGPGLNSHDPHSDEDTPTSDDLEQFAKQFKQRRIKLGFTQADVGLALGTLYGNVFSQTTICRFEALQLSFKNMCKLKPLLNKWLEEADSSTGSPTSIDKIAAQGRKRKKRTSIEVSVKGALESHFLKCPKPSAQEITNLADSLQLEKEVVRVWFCNRRQKEKRMTPPGIQQQTPDDVYSQVGTVSADTPPPHHGLQTSVQ

SEQ ID NO: 31162 - protein, 406 aa, Homo sapiens
MATPGNLGSSVLASKTKTKKKHFVAQKVKLFRASDPLLSVLMWGVNHSINELSHVQIPVMLMPDDFKAYSKIKVDNHLFNKENMPSHFKFKEYCPMVFRNLRERFGIDDQDFQNSLTRSAPLPNDSQARSGARFHTSYDKRYIIKTITSEDVAEMHNILKKYHQYIVECHGITLLPQFLGMYRLNVDGVEIYVIVTRNVFSHRLSVYRKYDLKGSTVAREASDKEKAKELPTLKDNDFINEGQKIYIDDNNKKVFLEKLKKDVEFLAQLKLMDYSLLVGIHDVERAEQEEVECEENDGEEEGESDGTHPVGTPPDSPGNTLNSSPPLAPGEFDPNIDVYGIKCHENSPRKEVYFMAIIDILTHYDAKKKAAHAAKTVKHGAGAEISTVNPEQYSKRFLDFIGHILT

SEQ ID NO: 31163 - protein, 347 aa, Homo sapiens
MLMPDDFKAYSKIKVDNHLFNKENMPSHFKFKEYCPMVFRNLRERFGIDDQDFQNSLTRSAPLPNDSQARSGARFHTSYDKRYIIKTITSEDVAEMHNILKKYHQYIVECHGITLLPQFLGMYRLNVDGVEIYVIVTRNVFSHRLSVYRKYDLKGSTVAREASDKEKAKELPTLKDNDFINEGQKIYIDDNNKKVFLEKLKKDVEFLAQLKLMDYSLLVGIHDVERAEQEEVECEENDGEEEGESDGTHPVGTPPDSPGNTLNSSPPLAPGEFDPNIDVYGIKCHENSPRKEVYFMAIIDILTHYDAKKKAAHAAKTVKHGAGAEISTVNPEQYSKRFLDFIGHILT

SEQ ID NO: 31164 - protein, 528 aa, Homo sapiens
MAEHLELLAEMPMVGRMSTQERLKHAQKRRAQQVKMWAQAEKEAQGKKGPGERPRKEAASQGLLKQVLFPPSVVLLEAAARNDLEEVRQFLGSGVSPDLANEDGLTALHQCCIDDFREMVQQLLEAGANINACDSECWTPLHAAATCGHLHLVELLIASGANLLAVNTDGNMPYDLCDDEQTLDCLETAMADRGITQDSIEAARAVPELRMLDDIRSRLQAGADLHAPLDHGATLLHVAAANGFSEAAALLLEHRASLSAKDQDGWEPLHAAAYWGQVPLVELLVAHGADLNAKSLMDETPLDVCGDEEVRAKLLELKHKHDALLRAQSRQRSLLRRRTSSAGSRGKVVRRVSLTQRTDLYRKQHAQEAIVWQQPPPTSPEPPEDNDDRQTGAELRPPPPEEDNPEVVRPHNGRVGGSPVRHLYSKRLDRSVSYQLSPLDSTTPHTLVHDKAHHTLADLKRQRAAAKLQRPPPEGPESPETAEPGLPGDTVTPQPDCGFRAGGDPPLLKLTAPAVEAPVERRPCCLLM

SEQ ID NO: 31165 - protein, 361 aa, Homo sapiens
MATAASNPYSILSSTSLVHADSAGMQQGSPFRNPQKLLQSDYLQGVPSNGHPLGHHWVTSLSDGGPWSSTLATSPLDQQDVKPGREDLQLGAIIHHRSPHVAHHSPHTNHPNAWGASPAPNPSITSSGQPLNVYSQPGFTVSGMLEHGGLTPPPAAASAQSLHPVLREPPDHGELGSHHCQDHSDEETPTSDELEQFAKQFKQRRIKLGFTQADVGLALGTLYGNVFSQTTICRFEGLQLSFKNMCKLKPLLNKWLEEADSSTGSPTSIDKIAAQGRKRKKRTSIEVSVKGVLETHFLKCPKPAAQEISSLADSLQLEKEVVRVWFCNRRQKEKRMTPPGDQQPHEVYSHTVKTDTSCHDL

SEQ ID NO: 31166 - protein, 416 aa, Homo sapiens
MSSNCTSTTAVAVAPLSASKTKTKKKHFVCQKVKLFRASEPILSVLMWGVNHTINELSNVPVPVMLMPDDFKAYSKIKVDNHLFNKENLPSRFKFKEYCPMVFRNLRERFGIDDQDYQNSVTRSAPINSDSQGRCGTRFLTTYDRRFVIKTVSSEDVAEMHNILKKYHQFIVECHGNTLLPQFLGMYRLTVDGVETYMVVTRNVFSHRLTVHRKYDLKGSTVAREASDKEKAKDLPTFKDNDFLNEGQKLHVGEESKKNFLEKLKRDVEFLAQLKIMDYSLLVGIHDVDRAEQEEMEVEERAEDEECENDGVGGNLLCSYGTPPDSPGNLLSFPRFFGPGEFDPSVDVYAMKSHESSPKKEVYFMAIIDILTPYDTKKKAAHAAKTVKHGAGAEISTVNPEQYSKRFNEFMSNILT

SEQ ID NO: 31167 - protein, 281 aa, Homo sapiens
MSSNCTSTTAVAVAPLSASKTKTKKKHFVCQKVKLFRASEPILSVLMWGVNHTINELSNVPVPVMLMPDDFKAYSKIKVDNHLFNKENLPSRFKFKEYCPMVFRNLRERFGIDDQDYQNSVTRSAPINSDSQGRCGTRFLTTYDRRFVIKTVSSEDVAEMHNILKKYHQFIVECHGNTLLPQFLGMYRLTVDGVETYMVVTRNVFSHRLTVHRKYDLKGSTVAREASDKEKAKDLPTFKDNDFLNEGQKLHVGEESKKNFLEKLKRDVEEILVLSPGRRIA

SEQ ID NO: 31168 - protein, 567 aa, Homo sapiens
MASHVDLLTELQLLEKVPTLERLRAAQKRRAQQLKKWAQYEQDLQHRKRKHERKRSTGGRRKKVSFEASVALLEASLRNDAEEVRYFLKNKVSPDLCNEDGLTALHQCCIDNFEEIVKLLLSHGANVNAKDNELWTPLHAAATCGHINLVKILVQYGADLLAVNSDGNMPYDLCEDEPTLDVIETCMAYQGITQEKINEMRVAPEQQMIADIHCMIAAGQDLDWIDAQGATLLHIAGANGYLRAAELLLDHGVRVDVKDWDGWEPLHAAAFWGQMQMAELLVSHGASLSARTSMDEMPIDLCEEEEFKVLLLELKHKHDVIMKSQLRHKSSLSRRTSSAGSRGKVVRRASLSDRTNLYRKEYEGEAILWQRSAAEDQRTSTYNGDIRETRTDQENKDPNPRLEKPVLLSEFPTKIPRGELDMPVENGLRAPVSAYQYALANGDVWKVHEVPDYSMAYGNPGVADATPPWSSYKEQSPQTLLELKRQRAAAKLLSHPFLSTHLGSSMARTGESSSEGKAPLIGGRTSPYSSNGTSVYYTVTSGDPPLLKFKAPIEEMEEKVHGCCRIS

SEQ ID NO: 31169 - protein, 525 aa, Homo sapiens
MASHVDLLTELQLLEKVPTLERLRAAQKRRAQQLKKWAQYEQDLQHRKRKHERKRSTGGRRKKVSFEASVALLEASLRNDAEEVRYFLKNKVSPDLCNEDGLTALHQCCIDNFEEIVKLLLSHGANVNAKDNELWTPLHAAATCGHINLVKILVQYGADLLAVNSDGNMPYDLCEDEPTLDVIETCMAYQGITQEKINEMRVAPEQQMIADIHCMIAAGQDLDWIDAQGATLMQMAELLVSHGASLSARTSMDEMPIDLCEEEEFKVLLLELKHKHDVIMKSQLRHKSSLSRRTSSAGSRGKVVRRASLSDRTNLYRKEYEGEAILWQRSAAEDQRTSTYNGDIRETRTDQENKDPNPRLEKPVLLSEFPTKIPRGELDMPVENGLRAPVSAYQYALANGDVWKVHEVPDYSMAYGNPGVADATPPWSSYKEQSPQTLLELKRQRAAAKLLSHPFLSTHLGSSMARTGESSSEGKAPLIGGRTSPYSSNGTSVYYTVTSGDPPLLKFKAPIEEMEEKVHGCCRIS

SEQ ID NO: 31170 - protein, 419 aa, Homo sapiens
MMSMNSKQPHFAMHPTLPEHKYPSLHSSSEAIRRACLPTPPLQSNLFASLDETLLARAEALAAVDIAVSQGKSHPFKPDATYHTMNSVPCTSTSTVPLAHHHHHHHHHQALEPGDLLDHISSPSLALMAGAGGAGAAAGGGGAHDGPGGGGGPGGGGGPGGGPGGGGGGGPGGGGGGPGGGLLGGSAHPHPHMHSLGHLSHPAAAAAMNMPSGLPHPGLVAAAAHHGAAAAAAAAAAGQVAAASAAAAVVGAAGLASICDSDTDPRELEAFAERFKQRRIKLGVTQADVGSALANLKIPGVGSLSQSTICRFESLTLSHNNMIALKPILQAWLEEAEGAQREKMNKPELFNGGEKKRKRTSIAAPEKRSLEAYFAVQPRPSSEKIAAIAEKLDLKKNVVRVWFCNQRQKQKRMKFSATY

SEQ ID NO: 31171 - protein, 335 aa, Homo sapiens
MNSVPCTSTSTVPLAHHHHHHHHHQALEPGDLLDHISSPSLALMAGAGGAGAAAGGGGAHDGPGGGGGPGGGGGPGGGPGGGGGGGPGGGGGGPGGGLLGGSAHPHPHMHSLGHLSHPAAAAAMNMPSGLPHPGLVAAAAHHGAAAAAAAAAAGQVAAASAAAAVVGAAGLASICDSDTDPRELEAFAERFKQRRIKLGVTQADVGSALANLKIPGVGSLSQSTICRFESLTLSHNNMIALKPILQAWLEEAEGAQREKMNKPELFNGGEKKRKRTSIAAPEKRSLEAYFAVQPRPSSEKIAAIAEKLDLKKNVVRVWFCNQRQKQKRMKFSATY

SEQ ID NO: 31172 - protein, 421 aa, Homo sapiens
MASSSVPPATVSAATAGPGPGFGFASKTKKKHFVQQKVKVFRAADPLVGVFLWGVAHSINELSQVPPPVMLLPDDFKASSKIKVNNHLFHRENLPSHFKFKEYCPQVFRNLRDRFGIDDQDYLVSLTRNPPSESEGSDGRFLISYDRTLVIKEVSSEDIADMHSNLSNYHQYIVKCHGNTLLPQFLGMYRVSVDNEDSYMLVMRNMFSHRLPVHRKYDLKGSLVSREASDKEKVKELPTLKDMDFLNKNQKVYIGEEEKKIFLEKLKRDVEFLVQLKIMDYSLLLGIHDIIRGSEPEEEAPVREDESEVDGDCSLTGPPALVGSYGTSPEGIGGYIHSHRPLGPGEFESFIDVYAIRSAEGAPQKEVYFMGLIDILTQYDAKKKAAHAAKTVKHGAGAEISTVHPEQYAKRFLDFITNIFA

SEQ ID NO: 31173 - protein, 373 aa, Homo sapiens
MASSSVPPATVSAATAGPGPGFGFASKTKKKHFVQQKVKVFRAADPLVGVFLWGVAHSINELSQVPPPVMLLPDDFKASSKIKVNNHLFHRENLPSHFKFKEYCPQVFRNLRDRFGIDDQDYLYIVKCHGNTLLPQFLGMYRVSVDNEDSYMLVMRNMFSHRLPVHRKYDLKGSLVSREASDKEKVKELPTLKDMDFLNKNQKVYIGEEEKKIFLEKLKRDVEFLVQLKIMDYSLLLGIHDIIRGSEPEEEAPVREDESEVDGDCSLTGPPALVGSYGTSPEGIGGYIHSHRPLGPGEFESFIDVYAIRSAEGAPQKEVYFMGLIDILTQYDAKKKAAHAAKTVKHGAGAEISTVHPEQYAKRFLDFITNIFA

SEQ ID NO: 31174 - protein, 403 aa, Homo sapiens
MASSSVPPATVSAATAGPGPGFGFASKTKKKHFVQQKVKVFRAADPLVGVFLWGVAHSINELSQVPPPVMLLPDDFKASSKIKEYCPQVFRNLRDRFGIDDQDYLVSLTRNPPSESEGSDGRFLISYDRTLVIKEVSSEDIADMHSNLSNYHQYIVKCHGNTLLPQFLGMYRVSVDNEDSYMLVMRNMFSHRLPVHRKYDLKGSLVSREASDKEKVKELPTLKDMDFLNKNQKVYIGEEEKKIFLEKLKRDVEFLVQLKIMDYSLLLGIHDIIRGSEPEEEAPVREDESEVDGDCSLTGPPALVGSYGTSPEGIGGYIHSHRPLGPGEFESFIDVYAIRSAEGAPQKEVYFMGLIDILTQYDAKKKAAHAAKTVKHGAGAEISTVHPEQYAKRFLDFITNIFA

SEQ ID NO: 31175 - protein, 409 aa, Homo sapiens
MMMMSLNSKQAFSMPHGGSLHVEPKYSALHSTSPGSSAPIAPSASSPSSSSNAGGGGGGGGGGGGGGGRSSSSSSSGSSGGGGSEAMRRACLPTPPSNIFGGLDESLLARAEALAAVDIVSQSKSHHHHPPHHSPFKPDATYHTMNTIPCTSAASSSSVPISHPSALAGTHHHHHHHHHHHHQPHQALEGELLEHLSPGLALGAMAGPDGAVVSTPAHAPHMATMNPMHQAALSMAHAHGLPSHMGCMSDVDADPRDLEAFAERFKQRRIKLGVTQADVGSALANLKIPGVGSLSQSTICRFESLTLSHNNMIALKPILQAWLEEAEKSHREKLTKPELFNGAEKKRKRTSIAAPEKRSLEAYFAIQPRPSSEKIAAIAEKLDLKKNVVRVWFCNQRQKQKRMKYSAGI

SEQ ID NO: 31176 - protein, 265 aa, Homo sapiens
MNTIPCTSAASSSSVPISHPSALAGTHHHHHHHHHHHHQPHQALEGELLEHLSPGLALGAMAGPDGAVVSTPAHAPHMATMNPMHQAALSMAHAHGLPSHMGCMSDVDADPRDLEAFAERFKQRRIKLGVTQADVGSALANLKIPGVGSLSQSTICRFESLTLSHNNMIALKPILQAWLEEAEKSHREKLTKPELFNGAEKKRKRTSIAAPEKRSLEAYFAIQPRPSSEKIAAIAEKLDLKKNVVRVWFCNQRQKQKRMKYSAGI

SEQ ID NO: 31177 - protein, 2102 aa, Homo sapiens
MAAAPARGGGGGGGGGGGCSGSGSSASRGFYFNTVLSLARSLAVQRPASLEKVQKLLCMCPVDFHGIFQLDERRRDAVIALGIFLIESDLQHKDCVVPYLLRLLKGLPKVYWVEESTARKGRGALPVAESFSFCLVTLLSDVAYRDPSLRDEILEVLLQVLHVLLGMCQALEIQDKEYLCKYAIPCLIGISRAFGRYSNMEESLLSKLFPKIPPHSLRVLEELEGVRRRSFNDFRSILPSNLLTVCQEGTLKRKTSSVSSISQVSPERGMPPPSSPGGSAFHYFEASCLPDGTALEPEYYFSTISSSFSVSPLFNGVTYKEFNIPLEMLRELLNLVKKIVEEAVLKSLDAIVASVMEANPSADLYYTSFSDPLYLTMFKMLRDTLYYMKDLPTSFVKEIHDFVLEQFNTSQGELQKILHDADRIHNELSPLKLRCQANAACVDLMVWAVKDEQGAENLCIKLSEKLQSKTSSKVIIAHLPLLICCLQGLGRLCERFPVVVHSVTPSLRDFLVIPSPVLVKLYKYHSQYHTVAGNDIKISVTNEHSESTLNVMSGKKSQPSMYEQLRDIAIDNICRCLKAGLTVDPVIVEAFLASLSNRLYISQESDKDAHLIPDHTIRALGHIAVALRDTPKVMEPILQILQQKFCQPPSPLDVLIIDQLGCLVITGNQYIYQEVWNLFQQISVKASSVVYSATKDYKDHGYRHCSLAVINALANIAANIQDEHLVDELLMNLLELFVQLGLEGKRASERASEKGPALKASSSAGNLGVLIPVIAVLTRRLPPIKEAKPRLQKLFRDFWLYSVLMGFAVEGSGLWPEEWYEGVCEIATKSPLLTFPSKEPLRSVLQYNSAMKNDTVTPAELSELRSTIINLLDPPPEVSALINKLDFAMSTYLLSVYRLEYMRVLRSTDPDRFQVMFCYFEDKAIQKDKSGMMQCVIAVADKVFDAFLNMMADKAKTKENEEELERHAQFLLVNFNHIHKRIRRVADKYLSGLVDKFPHLLWSGTVLKTMLDILQTLSLSLSADIHKDQPYYDIPDAPYRITVPDTYEARESIVKDFAARCGMILQEAMKWAPTVTKSHLQEYLNKHQNWVSGLSQHTGLAMATESILHFAGYNKQNTTLGATQLSERPACVKKDYSNFMASLNLRNRYAGEVYGMIRFSGTTGQMSDLNKMMVQDLHSALDRSHPQHYTQAMFKLTAMLISSKDCDPQLLHHLCWGPLRMFNEHGMETALACWEWLLAGKDGVEVPFMREMAGAWHMTVEQKFGLFSAEIKEADPLAASEASQPKPCPPEVTPHYIWIDFLVQRFEIAKYCSSDQVEIFSSLLQRSMSLNIGGAKGSMNRHVAAIGPRFKLLTLGLSLLHADVVPNATIRNVLREKIYSTAFDYFSCPPKFPTQGEKRLREDISIMIKFWTAMFSDKKYLTASQLVPPDNQDTRSNLDITVGSRQQATQGWINTYPLSSGMSTISKKSGMSKKTNRGSQLHKYYMKRRTLLLSLLATEIERLITWYNPLSAPELELDQAGENSVANWRSKYISLSEKQWKDNVNLAWSISPYLAVQLPARFKNTEAIGNEVTRLVRLDPGAVSDVPEAIKFLVTWHTIDADAPELSHVLCWAPTDPPTGLSYFSSMYPPHPLTAQYGVKVLRSFPPDAILFYIPQIVQALRYDKMGYVREYILWAASKSQLLAHQFIWNMKTNIYLDEEGHQKDPDIGDLLDQLVEEITGSLSGPAKDFYQREFDFFNKITNVSAIIKPYPKGDERKKACLSALSEVKVQPGCYLPSNPEAIVLDIDYKSGTPMQSAAKAPYLAKFKVKRCGVSELEKEGLRCRSDSEDECSTQEADGQKISWQAAIFKVGDDCRQDMLALQIIDLFKNIFQLVGLDLFVFPYRVVATAPGCGVIECIPDCTSRDQLGRQTDFGMYDYFTRQYGDESTLAFQQARYNFIRSMAAYSLLLFLLQIKDRHNGNIMLDKKGHIIHIDFGFMFESSPGGNLGWEPDIKLTDEMVMIMGGKMEATPFKWFMEMCVRGYLAVRPYMDAVVSLVTLMLDTGLPCFRGQTIKLLKHRFSPNMTEREAANFIMKVIQSCFLSNRSRTYDMIQYYQNDIPY

SEQ ID NO: 31178 - protein, 854 aa, Homo sapiens
MREMAGAWHMTVEQKFGLFSAEIKEADPLAASEASQPKPCPPEVTPHYIWIDFLVQRFEIAKYCSSDQVEIFSSLLQRSMSLNIGGAKGSMNRHVAAIGPRFKLLTLGLSLLHADVVPNATIRNVLREKIYSTAFDYFSCPPKFPTQGEKRLREDISIMIKFWTAMFSDKKYLTASQLVPPDNQDTRSNLDITVGSRQQATQGWINTYPLSSGMSTISKKSGMSKKTNRGSQLHKYYMKRRTLLLSLLATEIERLITWYNPLSAPELELDQAGENSVANWRSKYISLSEKQWKDNVNLAWSISPYLAVQLPARFKNTEAIGNEVTRLVRLDPGAVSDVPEAIKFLVTWHTIDADAPELSHVLCWAPTDPPTGLSYFSSMYPPHPLTAQYGVKVLRSFPPDAILFYIPQIVQALRYDKMGYVREYILWAASKSQLLAHQFIWNMKTNIYLDEEGHQKDPDIGDLLDQLVEEITGSLSGPAKDFYQREFDFFNKITNVSAIIKPYPKGDERKKACLSALSEVKVQPGCYLPSNPEAIVLDIDYKSGTPMQSAAKAPYLAKFKVKRCGVSELEKEGLRCRSDSEDECSTQEADGQKISWQAAIFKVGDDCRQDMLALQIIDLFKNIFQLVGLDLFVFPYRVVATAPGCGVIECIPDCTSRDQLGRQTDFGMYDYFTRQYGDESTLAFQQARYNFIRSMAAYSLLLFLLQIKDRHNGNIMLDKKGHIIHIDFGFMFESSPGGNLGWEPDIKLTDEMVMIMGGKMEATPFKWFMEMCVRGYLAVRPYMDAVVSLVTLMLDTGLPCFRGQTIKLLKHRFSPNMTEREAANFIMKVIQSCFLSNRSRTYDMIQYYQNDIPY

SEQ ID NO: 31179 - protein, 338 aa, Homo sapiens
MMAMNSKQPFGMHPVLQEPKFSSLHSGSEAMRRVCLPAPQLQGNIFGSFDESLLARAEALAAVDIVSHGKNHPFKPDATYHTMSSVPCTSTSSTVPISHPAALTSHPHHAVHQGLEGDLLEHISPTLSVSGLGAPEHSVMPAQIHPHHLGAMGHLHQAMGMSHPHTVAPHSAMPACLSDVESDPRELEAFAERFKQRRIKLGVTQADVGAALANLKIPGVGSLSQSTICRFESLTLSHNNMIALKPVLQAWLEEAEAAYREKNSKPELFNGSERKRKRTSIAAPEKRSLEAYFAIQPRPSSEKIAAIAEKLDLKKNVVRVWFCNQRQKQKRMKYSAVH

SEQ ID NO: 31180 - protein, 137 aa, Homo sapiens
MTMETLPKVLEVDEKSPEAKDLLPSQTASSLCISSRSESVWTTTPRSNWEIYRKPIVIMSVGGAILLFGVVITCLAYTLKLSDKSLSILKMVGPGFLSLGLMMLVCGLVWVPIIKKKQKHRQKSNFLRSLKSFFLTR

SEQ ID NO: 31181 - protein, 290 aa, Homo sapiens
MGSSKKVTLSVLSREQSEGVGARVRRSIGRPELKNLDPFLLFDEFKGGRPGGFPDHPHRGFETVSYLLEGGSMAHEDFCGHTGKMNPGDLQWMTAGRGILHAEMPCSEEPAHGLQLWVNLRSSEKMVEPQYQELKSEEIPKPSKDGVTVAVISGEALGIKSKVYTRTPTLYLDFKLDPGAKHSQPIPKGWTSFIYTISGDVYIGPDDAQQKIEPHHTAVLGEGDSVQVENKDPKRSHFVLIAGEPLREPVIQHGPFVMNTNEEISQAILDFRNAKNGFERAKTWKSKIGN

SEQ ID NO: 31182 - protein, 360 aa, Homo sapiens
MAGHLASDFAFSPPPGGGGDGPGGPEPGWVDPRTWLSFQGPPGGPGIGPGVGPGSEVWGIPPCPPPYEFCGGMAYCGPQVGVGLVPQGGLETSQPEGEAGVGVESNSDGASPEPCTVTPGAVKLEKEKLEQNPEESQDIKALQKELEQFAKLLKQKRITLGYTQADVGLTLGVLFGKVFSQTTICRFEALQLSFKNMCKLRPLLQKWVEEADNNENLQEICKAETLVQARKRKRTSIENRVRGNLENLFLQCPKPTLQQISHIAQQLGLEKDVVRVWFCNRRQKGKRSSSDYAQREDFEAAGSPFSGGPVSFPLAPGPHFGTPGYGSPHFTALYSSVPFPEGEAFPPVSVTTLGSPMHSN

SEQ ID NO: 31183 - protein, 265 aa, Homo sapiens
MHFYRLFLGATRRFLNPEWKGEIDNWCVYVLTSLLPFKIQSQDIKALQKELEQFAKLLKQKRITLGYTQADVGLTLGVLFGKVFSQTTICRFEALQLSFKNMCKLRPLLQKWVEEADNNENLQEICKAETLVQARKRKRTSIENRVRGNLENLFLQCPKPTLQQISHIAQQLGLEKDVVRVWFCNRRQKGKRSSSDYAQREDFEAAGSPFSGGPVSFPLAPGPHFGTPGYGSPHFTALYSSVPFPEGEAFPPVSVTTLGSPMHSN

SEQ ID NO: 31184 - protein, 328 aa, Homo sapiens
MAGHRPSNHFCPLPGSGGGGPRGPMPLRVDTLTWLSTQAAPGRVMVWPAVRPGICPGPDVWRIPLGPLPHEFRGWIAPCRPRLGASEAGDWLRRPSEGALPGPYIALRSIPKLPPPEDISGILKELQQLAKELRQKRLSLGYSQADVGIAVGALFGKVLSQTTICRFEAQQLSVANMWKLRPLLKKWLKEVEAENLLGLCKMEMILQQSGKWRRASRERRIGNSLEKFFQRCPKPTPQQISHIAGCLQLQKDVVRVWFYNRSKMGSRPTNDASPREIVGTAGPPCPGAPVCFHLGLGLPVDIPHYTRLYSAGVAHSSAPATTLGLLRF

SEQ ID NO: 31185 - protein, 816 aa, Homo sapiens
MGDTVVEPAPLKPTSEPTSGPPGNNGGSLLSVITEGVGELSVIDPEVAQKACQEVLEKVKLLHGGVAVSSRGTPLELVNGDGVDSEIRCLDDPPAQIREEEDEMGAAVASGTAKGARRRRQNNSAKQSWLLRLFESKLFDISMAISYLYNSKEPGVQAYIGNRLFCFRNEDVDFYLPQLLNMYIHMDEDVGDAIKPYIVHRCRQSINFSLQCALLLGAYSSDMHISTQRHSRGTKLRKLILSDELKPAHRKRELPSLSPAPDTGLSPSKRTHQRSKSDATASISLSSNLKRTASNPKVENEDEELSSSTESIDNSFSSPVRLAPEREFIKSLMAIGKRLATLPTKEQKTQRLISELSLLNHKLPARVWLPTAGFDHHVVRVPHTQAVVLNSKDKAPYLIYVEVLECENFDTTSVPARIPENRIRSTRSVENLPECGITHEQRAGSFSTVPNYDNDDEAWSVDDIGELQVELPEVHTNSCDNISQFSVDSITSQESKEPVFIAAGDIRRRLSEQLAHTPTAFKRDPEDPSAVALKEPWQEKVRRIREGSPYGHLPNWRLLSVIVKCGDDLRQELLAFQVLKQLQSIWEQERVPLWIKPYKILVISADSGMIEPVVNAVSIHQVKKQSQLSLLDYFLQEHGSYTTEAFLSAQRNFVQSCAGYCLVCYLLQVKDRHNGNILLDAEGHIIHIDFGFILSSSPRNLGFETSAFKLTTEFVDVMGGLDGDMFNYYKMLMLQGLIAARKHMDKVVQIVEIMQQGSQLPCFHGSSTIRNLKERFHMSMTEEQLQLLVEQMVDGSMRSITTKLYDGFQYLTNGIM

SEQ ID NO: 31186 - protein, 801 aa, Homo sapiens
MGDTVVEPAPLKPTSEPTSGPPGNNGGSLLSVITEGVGELSVIDPEVAQKACQEVLEKVKLLHGGVAVSSRGTPLELVNGDGVDSEIRCLDDPPAQIREEEDEMGAAVASGTAKGARRRRQNNSAKQSWLLRLFESKLFDISMAISYLYNSKEPGVQAYIGNRLFCFRNEDVDFYLPQLLNMYIHMDEDVGDAIKPYIVHRCRQSINFSLQCALLLGAYSSDMHISTQRHSRGTKLRKLILSDELKPAHRKRELPSLSPAPDTGLSPSKRTHQRSKSDATASISLSSNLKRTASNPKVENEDEPVRLAPEREFIKSLMAIGKRLATLPTKEQKTQRLISELSLLNHKLPARVWLPTAGFDHHVVRVPHTQAVVLNSKDKAPYLIYVEVLECENFDTTSVPARIPENRIRSTRSVENLPECGITHEQRAGSFSTVPNYDNDDEAWSVDDIGELQVELPEVHTNSCDNISQFSVDSITSQESKEPVFIAAGDIRRRLSEQLAHTPTAFKRDPEDPSAVALKEPWQEKVRRIREGSPYGHLPNWRLLSVIVKCGDDLRQELLAFQVLKQLQSIWEQERVPLWIKPYKILVISADSGMIEPVVNAVSIHQVKKQSQLSLLDYFLQEHGSYTTEAFLSAQRNFVQSCAGYCLVCYLLQVKDRHNGNILLDAEGHIIHIDFGFILSSSPRNLGFETSAFKLTTEFVDVMGGLDGDMFNYYKMLMLQGLIAARKHMDKVVQIVEIMQQGSQLPCFHGSSTIRNLKERFHMSMTEEQLQLLVEQMVDGSMRSITTKLYDGFQYLTNGIM

SEQ ID NO: 31187 - protein, 484 aa, Homo sapiens
MAIGKRLATLPTKEQKTQRLISELSLLNHKLPARVWLPTAGFDHHVVRVPHTQAVVLNSKDKAPYLIYVEVLECENFDTTSVPARIPENRIRSTRSVENLPECGITHEQRAGSFSTVPNYDNDDEAWSVDDIGELQVELPEVHTNSCDNISQFSVDSITSQESKEPVFIAAGDIRRRLSEQLAHTPTAFKRDPEDPSAVALKEPWQEKVRRIREGSPYGHLPNWRLLSVIVKCGDDLRQELLAFQVLKQLQSIWEQERVPLWIKPYKILVISADSGMIEPVVNAVSIHQVKKQSQLSLLDYFLQEHGSYTTEAFLSAQRNFVQSCAGYCLVCYLLQVKDRHNGNILLDAEGHIIHIDFGFILSSSPRNLGFETSAFKLTTEFVDVMGGLDGDMFNYYKMLMLQGLIAARKHMDKVVQIVEIMQQGSQLPCFHGSSTIRNLKERFHMSMTEEQLQLLVEQMVDGSMRSITTKLYDGFQYLTNGIM

SEQ ID NO: 31188 - protein, 330 aa, Homo sapiens
MSDSEKLNLDSIIGRLLEVQGSRPGKNVQLTENEIRGLCLKSREIFLSQPILLELEAPLKICGDIHGQYYDLLRLFEYGGFPPESNYLFLGDYVDRGKQSLETICLLLAYKIKYPENFFLLRGNHECASINRIYGFYDECKRRYNIKLWKTFTDCFNCLPIAAIVDEKIFCCHGGLSPDLQSMEQIRRIMRPTDVPDQGLLCDLLWSDPDKDVQGWGENDRGVSFTFGAEVVAKFLHKHDLDLICRAHQVVEDGYEFFAKRQLVTLFSAPNYCGEFDNAGAMMSVDETLMCSFQILKPADKNKGKYGQFSGLNPGGRPITPPRNSAKAKK

SEQ ID NO: 31189 - protein, 341 aa, Homo sapiens
MSDSEKLNLDSIIGRLLEGSRVLTPHCAPVQGSRPGKNVQLTENEIRGLCLKSREIFLSQPILLELEAPLKICGDIHGQYYDLLRLFEYGGFPPESNYLFLGDYVDRGKQSLETICLLLAYKIKYPENFFLLRGNHECASINRIYGFYDECKRRYNIKLWKTFTDCFNCLPIAAIVDEKIFCCHGGLSPDLQSMEQIRRIMRPTDVPDQGLLCDLLWSDPDKDVQGWGENDRGVSFTFGAEVVAKFLHKHDLDLICRAHQVVEDGYEFFAKRQLVTLFSAPNYCGEFDNAGAMMSVDETLMCSFQILKPADKNKGKYGQFSGLNPGGRPITPPRNSAKAKK

SEQ ID NO: 31190 - protein, 286 aa, Homo sapiens
MSDSEKLNLDSIIGRLLEGDIHGQYYDLLRLFEYGGFPPESNYLFLGDYVDRGKQSLETICLLLAYKIKYPENFFLLRGNHECASINRIYGFYDECKRRYNIKLWKTFTDCFNCLPIAAIVDEKIFCCHGGLSPDLQSMEQIRRIMRPTDVPDQGLLCDLLWSDPDKDVQGWGENDRGVSFTFGAEVVAKFLHKHDLDLICRAHQVVEDGYEFFAKRQLVTLFSAPNYCGEFDNAGAMMSVDETLMCSFQILKPADKNKGKYGQFSGLNPGGRPITPPRNSAKAKK

SEQ ID NO: 31191 - protein, 409 aa, Homo sapiens
MATSVGHRCLGLLHGVAPWRSSLHPCEITALSQSLQPLRKLPFRAFRTDARKIHTAPARTMFLLRPLPILLVTGGGYAGYRQYEKYRERELEKLGLEIPPKLAGHWEVALYKSVPTRLLSRAWGRLNQVELPHWLRRPVYSLYIWTFGVNMKEAAVEDLHHYRNLSEFFRRKLKPQARPVCGLHSVISPSDGRILNFGQVKNCEVEQVKGVTYSLESFLGPRMCTEDLPFPPAASCDSFKNQLVTREGNELYHCVIYLAPGDYHCFHSPTDWTVSHRRHFPGSLMSVNPGMARWIKELFCHNERVVLTGDWKHGFFSLTAVGATNVGSIRIYFDRDLHTNSPRHSKGSYNDFSFVTHTNREGVPMRKGEHLGEFNLGSTIVLIFEAPKDFNFQLKTGQKIRFGEALGSL

SEQ ID NO: 31192 - protein, 375 aa, Homo sapiens
MMCQSEARQGPELRAAKWLHFPQLALRRRLGQLSCMSRPALKLRSWPLTVLYYLLPFGALRPLSRVGWRPVSRVALYKSVPTRLLSRAWGRLNQVELPHWLRRPVYSLYIWTFGVNMKEAAVEDLHHYRNLSEFFRRKLKPQARPVCGLHSVISPSDGRILNFGQVKNCEVEQVKGVTYSLESFLGPRMCTEDLPFPPAASCDSFKNQLVTREGNELYHCVIYLAPGDYHCFHSPTDWTVSHRRHFPGSLMSVNPGMARWIKELFCHNERVVLTGDWKHGFFSLTAVGATNVGSIRIYFDRDLHTNSPRHSKGSYNDFSFVTHTNREGVPMRKGEHLGEFNLGSTIVLIFEAPKDFNFQLKTGQKIRFGEALGSL

SEQ ID NO: 31193 - protein, 301 aa, Homo sapiens
MPGISSQILTNAQGQVIGTLPWVVNSASVAAPAPAQSLQVQAVTPQLLLNAQGQVIATLASSPLPPPVAVRKPSTPESPAKSEVQPIQPTPTVPQPAVVIASPAPAAKPSASAPIPITCSETPTVSQLVSKPHTPSLDEDGINLEEIREFAKNFKIRRLSLGLTQTQVGQALTATEGPAYSQSAICRFEKLDITPKSAQKLKPVLEKWLNEAELRNQEGQQNLMEFVGGEPSKKRKRRTSFTPQAIEALNAYFEKNPLPTGQEITEIAKELNYDREVVRVWFCNRRQTLKNTSKLNVFQIP

SEQ ID NO: 31194 - protein, 691 aa, Homo sapiens
MSALLQDPMIAGQVSKPLLSVRSEMNAELRGEDKAATSDSELNEPLLAPVESNDSEDTPSKLFGARGNPALSDPGTPDQHQASQTHPPFPVGPQPLLTAQQLASAVAGVMPGGPPALNQPILIPFNMAGQLGGQQGLVLTLPTANLTNIQGLVAAAAAGGIMTLPLQNLQATSSLNSQLQQLQLQLQQQQQQQQQQPPPSTNQHPQPAPQAPSQSQQQPLQPTPPQQPPPASQQPPAPTSQLQQAPQPQQHQPHSHSQNQNQPSPTQQSSSPPQKPSQSPGHGLPSPLTPPNPLQLVNNPLASQAAAAAAAMSSIASSQAFGNALSSLQGVTGQLVTNAQGQIIGTIPLMPNPGPSSQAASGTQGLQVQPITPQLLTNAQGQIIATVIGNQILPVINTQGITLSPIKPGQQLHQPSQTSVGQAASQGNLLHLAHSQASMSQSPVRQASSSSSSSSSSSALSVGQLVSNPQTAAGEVDGVNLEEIREFAKAFKIRRLSLGLTQTQVGQALSATEGPAYSQSAICRHTILRSHFFLPQEAQENTIASSLTAKLNPGLLYPARFEKLDITPKSAQKIKPVLERWMAEAEARHRAGMQNLTEFIGSEPSKKRKRRTSFTPQALEILNAHFEKNTHPSGQEMTEIAEKLNYDREVVRVWFCNKRQALKNTIKRLKQHEPATAVPLEPLTDSLEENS

SEQ ID NO: 31195 - protein, 655 aa, Homo sapiens
MSALLQDPMIAGQVSKPLLSVRSEMNAELRGEDKAATSDSELNEPLLAPVESNDSEDTPSKLFGARGNPALSDPGTPDQHQASQTHPPFPVGPQPLLTAQQLASAVAGVMPGGPPALNQPILIPFNMAGQLGGQQGLVLTLPTANLTNIQGLVAAAAAGGIMTLPLQNLQATSSLNSQLQQLQLQLQQQQQQQQQQPPPSTNQHPQPAPQAPSQSQQQPLQPTPPQQPPPASQQPPAPTSQLQQAPQPQQHQPHSHSQNQNQPSPTQQSSSPPQKPSQSPGHGLPSPLTPPNPLQLVNNPLASQAAAAAAAMSSIASSQAFGNALSSLQGVTGQLVTNAQGQIIGTIPLMPNPGPSSQAASGTQGLQVQPITPQLLTNAQGQIIATVIGNQILPVINTQGITLSPIKPGQQLHQPSQTSVGQAASQGNLLHLAHSQASMSQSPVRQASSSSSSSSSSSALSVGQLVSNPQTAAGEVDGVNLEEIREFAKAFKIRRLSLGLTQTQVGQALSATEGPAYSQSAICRFEKLDITPKSAQKIKPVLERWMAEAEARHRAGMQNLTEFIGSEPSKKRKRRTSFTPQALEILNAHFEKNTHPSGQEMTEIAEKLNYDREVVRVWFCNKRQALKNTIKRLKQHEPATAVPLEPLTDSLEENS

SEQ ID NO: 31196 - protein, 291 aa, Homo sapiens
MSCQAFTSADTFIPLNSDASATLPLIMHHSAAECLPVSNHATNVMSTATGLHYSVPSCHYGNQPSTYGVMAGSLTPCLYKFPDHTLSHGFPPIHQPLLAEDPTAADFKQELRRKSKLVEEPIDMDSPEIRELEKFANEFKVRRIKLGYTQTNVGEALAAVHGSEFSQTTICRFENLQLSFKNACKLKAILSKWLEEAEQVGALYNEKVGANERKRKRRTTISIAAKDALERHFGEQNKPSSQEIMRMAEELNLEKEVVRVWFCNRRQREKRVKTSLNQSLFSISKEHLECR

SEQ ID NO: 31197 - protein, 317 aa, Homo sapiens
MSCQAFTSADTFIPLNSDASATLPLIMHHSAAECLPVSNHATNVMSTVPSILSLIQTPKCLCTHFSVTTLGNTATGLHYSVPSCHYGNQPSTYGVMAGSLTPCLYKFPDHTLSHGFPPIHQPLLAEDPTAADFKQELRRKSKLVEEPIDMDSPEIRELEKFANEFKVRRIKLGYTQTNVGEALAAVHGSEFSQTTICRFENLQLSFKNACKLKAILSKWLEEAEQVGALYNEKVGANERKRKRRTTISIAAKDALERHFGEQNKPSSQEIMRMAEELNLEKEVVRVWFCNRRQREKRVKTSLNQSLFSISKEHLECR

SEQ ID NO: 31198 - protein, 327 aa, Homo sapiens
MADGELNVDSLITRLLEVRGCRPGKIVQMTEAEVRGLCIKSREIFLSQPILLELEAPLKICGDIHGQYTDLLRLFEYGGFPPEANYLFLGDYVDRGKQSLETICLLLAYKIKYPENFFLLRGNHECASINRIYGFYDECKRRFNIKLWKTFTDCFNCLPIAAIVDEKIFCCHGGLSPDLQSMEQIRRIMRPTDVPDTGLLCDLLWSDPDKDVQGWGENDRGVSFTFGADVVSKFLNRHDLDLICRAHQVVEDGYEFFAKRQLVTLFSAPNYCGEFDNAGGMMSVDETLMCSFQILKPSEKKAKYQYGGLNSGRPVTPPRTANPPKKR

SEQ ID NO: 31199 - protein, 262 aa, Homo sapiens
MTVEQKFGLFSAEIKEADPLAASEASQPKPCPPEVTPHYIWIDFLVQRFEIAKYCSSDQVEIFSSLLQRSMSLNIGGAKGSMNRHVAAIGPRFKLLTLGLSLLHADVVPNATIRNVLREKIYSTAFDYFSCPPKFPTQGEKRLREDISIMIKFWTAMFSDKKYLTASQLVPPADIGDLREQLVEENTGSLSGPAKDFYQREFDFFNKITNVSAVIKPYPKGDQRKKACLSALSEVTVQPGCSLPSNPEAIVLDVDYKSGTPM

SEQ ID NO: 31200 - protein, 592 aa, Homo sapiens
MTVEQKFGLFSAEIKEADPLAASEASQPKPCPPEVTPHYIWIDFLVQRFEIAKYCSSDQVEIFSSLLQRSMSLNIGRAKGSMNRHVAAIGPRFKLLTLGLSLLHADVVPNATIRNVLREKIYSTAFDYFSCPPKFPTQGEKRLREDISIMIKFWTAMFSDKKYLTASQLVPPADIGDLLEQLVEENTGSLSGPAKDFYQRGFDFFNKITNVSAVIKPYPKGDERKKACLSALSEVTVQPGCSLPSNPEAIVLDVDYKSGTPMQSAAKAPYLAKFKVKRCGVSELEKEGLRCRSDSEDECSTQEADGQKISWQAAIFKLGDDCRQKSYWGARMPTDRILRLPASQDMLALQIIDLFKNIFQLVGLDLFVFPYRVVATAPGCGVIECIPDCTSRDQLGRQTDFGMYDYFTRQYGDESTLAFQQARYNFIRSMAAYSLLLFLLQIKDRHNGNIMLDKKGHIIHIDFGFMFESSPGGNLGWEPDIKLTDEMVMIMGGKMEATPFKWFMEMCVQATWLCGEPGPYMDVVVSLVTIMLDTGLPCFRGQTIKLLKHRFSPNMTEREAANFIMKVIQSCFLSNRSRTYNMIQYYQNDIPY

SEQ ID NO: 31201 - protein, 439 aa, Homo sapiens
MTVEQKFGLFSAEIKEADPLAASEASQPKPCPPEVTPHYIWIDFLVQRFEIAKYCSSDQVEIFSSLLQRSMSLNIGRAKGSMNRHVAAIGPRFKLLTLGLSLLHADVVPNATIRNVLREKIYSTAFDYFSCPPKFPTQGEKRLREDISIMIKFWTAMFSDKKYLTASQLVPPADIGDLLEQLVEENTGSLSGPAKDFYQRGFDFFNKITNVSAVIKPYPKGDERKKACLSALSEVTVQPGCSLPSNPEAIVLDVDYKSGTPMQSAAKAPYLAKFKVKRCGVSELEKEGLRCRSDSEDECSTQEADGQKISWQAAIFKLGDDCRQDMLALQIIDLFKNIFQLVGLDLFVFPYRVVATAPGCGVIECIPDCTSRDQLGRQTDFGMYDYFTRQYGDESTLAFQQVARVATGRGKSCVLHPTPATHTQPLPTPCSPQSSFVKG

SEQ ID NO: 31202 - protein, 501 aa, Homo sapiens
MTVEQKFGLFSAEIKEADPLAASEASQPKPCPPEVTPHYIWIDFLVQRFEIAKYCSSDQVEIFSSLLQRSMSLNIGRAKGSMNRHVAAIGPRFKLLTLGLSLLHADVVPNATIRNVLREKIYSTAFDYFSCPPKFPTQGEKRLREDISIMIKFWTAMFSDKKYLTASQLVPPADIGDLLEQLVEENTGSLSGPAKDFYQRGFDFFNKITNVSAVIKPYPKGDERKKACLSALSEVTVQPGCSLPSNPEAIVLDVDYKSGTPMQSAAKAPYLAKFKVKRCGVSELEKEGLRCRSDSEDECSTQEADGQKISWQAAIFKLGDDCRQDMLALQIIDLFKNIFQLVGLDLFVFPYRVVATAPGCGVIECIPDCTSRDQLGRQTDFGMYDYFTRQYGDESTLAFQQARYNFIRSMAAYSLLLFLLQIKDRHNGNIMLDKKGHIIHIDFGFMFESSPGGNLGWEPDIKLTDEMVMIMGGKMEATPFKWFMEMCVQATWLCGTGLAPT

SEQ ID NO: 31203 - protein, 562 aa, Homo sapiens
MASASSGPSSSVGFSSFDPAVPSCTLSSAASGIKRPMASEVLEARQDSYISLVPYASGMPIKKIGHRSVDSSGETTYKKTTSSALKGAIQLGITHTVGSLSTKPERDVLMQDFYVVESIFFPSEGSNLTPAHHYNDFRFKTYAPVAFRYFRELFGIRPDDYLYSLCSEPLIELCSSGASGSLFYVSSDDEFIIKTVQHKEAEFLQKLLPGYYMNLNQNPRTLLPKFYGLYCVQAGGKNIRIVVMNNLLPRSVKMHIKYDLKGSTYKRRASQKEREKPLPTFKDLDFLQDIPDGLFLDADMYNALCKTLQRDCLVLQSFKIMDYSLLMSIHNIDHAQREPLSSETQYSVDTRRPAPQKALYSTAMESIQGEARRGGTMETDDHMGGIPARNSKGERLLLYIGIIDILQSYRFVKKLEHSWKALVHDGDTVSVHRPGFYAERFQRFMCNTVFKKIPLKPSPSKKFRSGSSFSRRAGSSGNSCITYQPSVSGEHKAQVTTKAEVEPGVHLGRPDVLPQTPPLEEISEGSPIPDPSFSPLVGETLQMLTTSTTLEKLEVAESEFTH

SEQ ID NO: 31204 - protein, 500 aa, Homo sapiens
MASASSGPSSSVGFSSFDPAVPSCTLSSASGIKRPMASEVPYASGMPIKKIGHRSVDSSGETTYKKTTSSALKGAIQLGITHTVGSLSTKPERDVLMQDFYVVESIFFPSEGSNLTPAHHYNDFRFKTYAPVAFRYFRELFGIRPDDYLYSLCSEPLIELCSSGASGSLFYVSSDDEFIIKTVQHKEAEFLQKLLPGYYMNLNQNPRTLLPKFYGLYCVQAGGKNIRIVVMNNLLPRSVKMHIKYDLKGSTYKRRASQKEREKPLPTFKDLDFLQDIPDGLFLDADMYNALCKTLQRDCLVLQSFKIMDYSLLMSIHNIDHAQREPLSSETQYSVDTRRPAPQKALYSTAMESIQGEARRGGTMETDDHMGGIPARNSKGERLLLYIGIIDILQSYRFVKKLEHSWKALVHDGDTVSVHRPGFYAERFQRFMCNTVFKKIPCVHLGRPDVLPQTPPLEEISEGSPIPDPSFSPLVGETLQMLTTSTTLEKLEVAESEFTH

SEQ ID NO: 31205 - protein, 549 aa, Homo sapiens
MASASSGPSSSVGFSSFDPAVPSCTLSSASGIKRPMASEVPYASGMPIKKIGHRSVDSSGETTYKKTTSSALKGAIQLGITHTVGSLSTKPERDVLMQDFYVVESIFFPSEGSNLTPAHHYNDFRFKTYAPVAFRYFRELFGIRPDDYLYSLCSEPLIELCSSGASGSLFYVSSDDEFIIKTVQHKEAEFLQKLLPGYYMNLNQNPRTLLPKFYGLYCVQAGGKNIRIVVMNNLLPRSVKMHIKYDLKGSTYKRRASQKEREKPLPTFKDLDFLQDIPDGLFLDADMYNALCKTLQRDCLVLQSFKIMDYSLLMSIHNIDHAQREPLSSETQYSVDTRRPAPQKALYSTAMESIQGEARRGGTMETDDHMGGIPARNSKGERLLLYIGIIDILQSYRFVKKLEHSWKALVHDGDTVSVHRPGFYAERFQRFMCNTVFKKIPLKPSPSKKFRSGSSFSRRAGSSGNSCITYQPSVSGEHKAQVTTKAEVEPGVHLGRPDVLPQTPPLEEISEGSPIPDPSFSPLVGETLQMLTTSTTLEKLEVAESEFTH

SEQ ID NO: 31206 - protein, 522 aa, Homo sapiens
MASASSGPSSSVGFSSFDPAVPSCTLSSAASGIKRPMASEVPYASGMPIKKIGHRSVDSSGETTYKKTTSSALKGAIQLGITHTVGSLSTKPERDVLMQDFYVVESIFFPSEGSNLTPAHHYNDFRFKTYAPVAFRYFRELFGIRPDDYLYSLCSEPLIELCSSGASGSLFYVSSDDEFIIKTVQHKEAEFLQKLLPGYYMNLNQNPRTLLPKFYGLYCVQAGGKNIRIVVMNNLLPRSVKMHIKYDLKGSTYKRRASQKEREKPLPTFKDLDFLQDIPDGLFLDADMYNALCKTLQRDCLVLQSFKIMDYSLLMSIHNIDHAQREPLSSETQYSVDTRRPAPQKALYSTAMESIQGEARRGGTMETDDQFVKKLEHSWKALVHDGDTVSVHRPGFYAERFQRFMCNTVFKKIPLKPSPSKKFRSGSSFSRRAGSSGNSCITYQPSVSGEHKAQVTTKAEVEPGVHLGRPDVLPQTPPLEEISEGSPIPDPSFSPLVGETLQMLTTSTTLEKLEVAESEFTH

SEQ ID NO: 31207 - protein, 332 aa, Homo sapiens
MLLKEYRICMPLTVDEYKIGQLYMISKHSHEQSDRGEGVEVVQNEPFEDPHHGNGQFTEKRVYLNSKLPSWARAVVPKIFYVTEKAWNYYPYTITEYTCSFLPKFSIHIETKYEDNKGSNDTIFDNEAKDVEREVCFIDIACDEIPERYYKESEDPKHFKSEKTGRGQLREGWRDSHQPIMCSYKLVTVKFEVWGLQTRVEQFVHKVVRDILLIGHRQAFAWVDEWYDMTMDEVREFERATQEATNKKIGIFPPAISISSIPLLPSSVRSAPSSAPSTPLSTDAPEFLSVPKDRPRKKSAPETLTLPDPEKKATLNLPGMHSSDKPCRPKSE

SEQ ID NO: 31208 - protein, 268 aa, Homo sapiens
MLLKEYRICMPLTVDEYKIGQLYMISKHSHEQSDRGEGVEVVQNEPFEDPHHGNGQFTEKRVYLNSKLPSWARAVVPKIFYVTEKAWNYYPYTITEYTCSFLPKFSIHIETKYEDNKGSNDTIFDNEAKDVEREVCFIDIACDEIPERYYKESEDPKHFKSEKTGRGQLREGWRDSHQPIMCSYKLVTVKFEVWGLQTRVEQFVHKVVRDILLIGHRQAFAWVDEWYDMTMDEVREYEKNMHEQTNIKVCNQHSSPVDDIESHAQTST

SEQ ID NO: 31209 - protein, 323 aa, Homo sapiens
MADLDKLNIDSIIQRLLEVRGSKPGKNVQLQENEIRGLCLKSREIFLSQPILLELEAPLKICGDIHGQYYDLLRLFEYGGFPPESNYLFLGDYVDRGKQSLETICLLLAYKIKYPENFFLLRGNHECASINRIYGFYDECKRRYNIKLWKTFTDCFNCLPIAAIVDEKIFCCHGGLSPDLQSMEQIRRIMRPTDVPDQGLLCDLLWSDPDKDVLGWGENDRGVSFTFGAEVVAKFLHKHDLDLICRAHQVVEDGYEFFAKRQLVTLFSAPNYCGEFDNAGAMMSVDETLMCSFQILKPAEKKKPNATRPVTPPRGMITKQAKK

SEQ ID NO: 31210 - protein, 337 aa, Homo sapiens
MADLDKLNIDSIIQRLLEVRGSKPGKNVQLQENEIRGLCLKSREIFLSQPILLELEAPLKICGDIHGQYYDLLRLFEYGGFPPESNYLFLGDYVDRGKQSLETICLLLAYKIKYPENFFLLRGNHECASINRIYGFYDECKRRYNIKLWKTFTDCFNCLPIAAIVDEKIFCCHGGLSPDLQSMEQIRRIMRPTDVPDQGLLCDLLWSDPDKDVLGWGENDRGVSFTFGAEVVAKFLHKHDLDLICRAHQVVEDGYEFFAKRQLVTLFSAPNYCGEFDNAGAMMSVDETLMCSFQILKPAEKKKPNATRPVTPPRVASGLNPSIQKASNYRNNTVLYE

SEQ ID NO: 31211 - protein, 540 aa, Homo sapiens
MSSAAENGEAAPGKQNEEKTYKKTASSAIKGAIQLGIGYTVGNLTSKPERDVLMQDFYVVESVFLPSEGSNLTPAHHYPDFRFKTYAPLAFRYFRELFGIKPDDYLYSICSEPLIELSNPGASGSLFFVTSDDEFIIKTVQHKEAEFLQKLLPGYYMNLNQNPRTLLPKFYGLYCMQSGGINIRIVVMNNVLPRSMRMHFTYDLKGSTYKRRASRKEREKSNPTFKDLDFLQDMHEGLYFDTETYNALMKTLQRDCRVLESFKIMDYSLLLGIHFLDHSLKEKEEETPQNVPDAKRTGMQKVLYSTAMESIQGPGKSGDGIITENPDTMGGIPAKSHRGEKLLLFMGIIDILQSYRLMKKLEHSWKALVYDGDTVSVHRPSFYADRFLKFMNSRVFKKIQALKASPSKKRCNSIAALKATSQEIVSSISQEWKDEKRDLLTEGQSFSSLDEEALGSRHRPDLVPSTPSLFEAASLATTISSSSLYVNEHYPHDRPTLYSNSKGLPSSSTFTLEEGTIYLTAEPNTLEVQDDNASVLDVYL

SEQ ID NO: 31212 - protein, 549 aa, Homo sapiens
MSSAAENGEAAPGKQNEEKTYKKTQVKNQILSRLPKIPCTFIQAWTNTEMITLLACYYFRSVSTASSAIKGAIQLGIGYTVGNLTSKPERDVLMQDFYVVESVFLPSEGSNLTPAHHYPDFRFKTYAPLAFRYFRELFGIKPDDYLYSICSEPLIELSNPGASGSLFFVTSDDEFIIKTVQHKEAEFLQKLLPGYYMNLNQNPRTLLPKFYGLYCMQSGGINIRIVVMNNVLPRSMRMHFTYDLKGSTYKRRASRKEREKSNPTFKDLDFLQDMHEGLYFDTETYNALMKTLQRDCRVLESFKIMDYSLLLGIHFLDHSLKEKEEETPQNVPDAKRTGMQKVLYSTAMESIQGPGKSGDGIITENPDTMGGIPAKSHRGEKLLLFMGIIDILQSYRLMKKLEHSWKALVYDGDTVSVHRPSFYADRFLKFMNSRVFKKIQALKASPSKKRCNSIAALKATSQEIVSSISQEWKDEKRDLLTEGQSFSSLDEEALGSRHRPDLVPSTPSLFEAASLATTISSSSLYVNEHYPHDRPTLYSNRFKMATSEH

SEQ ID NO: 31213 - protein, 502 aa, Homo sapiens
MSSAAENGEAAPGKQNEEKTYKKTASSAIKGAIQLGIGYTVGNLTSKPERDVLMQDFYVVESVFLPSEGSNLTPAHHYPDFRFKTYAPLAFRYFRELFGIKPDDYLYSICSEPLIELSNPGASGSLFFVTSDDEFIIKTVQHKEAEFLQKLLPGYYMNLNQNPRTLLPKFYGLYCMQSGGINIRIVVMNNVLPRSMRMHFTYDLKGSTYKRRASRKEREKSNPTFKDLDFLQDMHEGLYFDTETYNALMKTLQRDCRVLESFKIMDYSLLLGIHFLDHSLKEKEEETPQNVPDAKRTGMQKVLYSTAMESIQGPGKSGDGIITENPDTMGGIPAKSHRGEKLLLFMGIIDILQSYRLMKKLEHSWKALVYDGDTVSVHRPSFYADRFLKFMNSRVFKKIQALKASPSKKRCNSIAALKATSQEIVSSISQEWKDEKRDLLTEGQSFSSLDEEALGSRHRPDLVPSTPSLFEAASLATTISSSSLYVNEHYPHDRPTLYSNSK

SEQ ID NO: 31214 - protein, 211 aa, Homo sapiens
MSHGHSHGGGGCRCAAEREEPPEQRGLAYGLYLRIDLERLQCLNESREGSGRGVFKPWEERTDRSKFVESDADEELLFNIPFTGNVKLKGIIIMGEDDDSHPSEMRLYKNIPQMSFDDTEREPDQTFSLNRDLTGELEYATKISRFSNVYHLSIHISKNFGADTTKVFYIGLRGEWTELRRHEVTICNYEASANPADHRVHQVTPQTHFIS

SEQ ID NO: 31215 - protein, 210 aa, Homo sapiens
MSHGHSHGGGGCRCAAEREEPPEQRGLAYGLYLRIDLERLQCLNESREGSGRVFKPWEERTDRSKFVESDADEELLFNIPFTGNVKLKGIIIMGEDDDSHPSEMRLYKNIPQMSFDDTEREPDQTFSLNRDLTGELEYATKISRFSNVYHLSIHISKNFGADTTKVFYIGLRGEWTELRRHEVTICNYEASANPADHRVHQVTPQTHFIS

SEQ ID NO: 31216 - protein, 360 aa, Homo sapiens
MAAERGAGQQQSQEMMEVDRRVESEESGDEEGKKHSSGIVADLSEQSLKDGEERGEEDPEEEHELPVDMETINLDRDAEDVDLNHYRIGKIEGFEVLKKVKTLCLRQNLIKCIENLEELQSLRELDLYDNQIKKIENLEALTELEILDISFNLLRNIEGVDKLTRLKKLFLVNNKISKIENLSNLHQLQMLELGSNRIRAIENIDTLTNLESLFLGKNKITKLQNLDALTNLTVLSMQSNRLTKIEGLQNLVNLRELYLSHNGIEVIEGLENNNKLTMLDIASNRIKKIENISHLTELQEFWMNDNLLESWSDLDELKGARSLETVYLERNPLQKDPQYRRKVMLALPSVRQIDATFVRF

SEQ ID NO: 31217 - protein, 317 aa, Homo sapiens
MAAERGAGQQQSQEMMEEEHELPVDMETINLDRDAEDVDLNHYRIGKIEGFEVLKKVKTLCLRQNLIKCIENLEELQSLRELDLYDNQIKKIENLEALTELEILDISFNLLRNIEGVDKLTRLKKLFLVNNKISKIENLSNLHQLQMLELGSNRIRAIENIDTLTNLESLFLGKNKITKLQNLDALTNLTVLSMQSNRLTKIEGLQNLVNLRELYLSHNGIEVIEGLENNNKLTMLDIASNRIKKIENISHLTELQEFWMNDNLLESWSDLDELKGARSLETVYLERNPLQKDPQYRRKVMLALPSVRQIDATFVRF

SEQ ID NO: 31218 - protein, 280 aa, Homo sapiens
MAAERGAGQQQSQEMMEVDRRVESEESGDEEGKKHSSGIVADLSEQSLKDGEERGEEDPEEEHELPVDMETINLDRDAEDVDLNHYRIGKIEGFEVLKKVKTLCLRQNLIKCIENLEELQSLRELDLYDNQIKKIENLEALTELEILDISFNLLRNIEGVDKLTRLKKLFLVNNKISKIENLSNLHQLQMLELGSNRIRAIENIDTLTNLESLFLGKNKITKLQNLDALTNLTVLSMQSNRLTKIEGLQNLVNLRELYLSHNGIEVIEGLENNVQDSLTY

SEQ ID NO: 31219 - protein, 237 aa, Homo sapiens
MAAERGAGQQQSQEMMEEEHELPVDMETINLDRDAEDVDLNHYRIGKIEGFEVLKKVKTLCLRQNLIKCIENLEELQSLRELDLYDNQIKKIENLEALTELEILDISFNLLRNIEGVDKLTRLKKLFLVNNKISKIENLSNLHQLQMLELGSNRIRAIENIDTLTNLESLFLGKNKITKLQNLDALTNLTVLSMQSNRLTKIEGLQNLVNLRELYLSHNGIEVIEGLENNVQDSLTY

SEQ ID NO: 31220 - protein, 221 aa, Homo sapiens
MEEHELPVDMETINLDRDAEDVDLNHYRIGKIEGFEVLKKVKTLCLRQNLIKCIENLEELQSLRELDLYDNQIKKIENLEALTELEILDISFNLLRNIEGVDKLTRLKKLFLVNNKISKIENLSNLHQLQMLELGSNRIRAIENIDTLTNLESLFLGKNKITKLQNLDALTNLTVLSMQSNRLTKIEGLQNLVNLRELYLSHNGIEVIEGLENNVQDSLTY

SEQ ID NO: 31221 - protein, 668 aa, Homo sapiens
MELEVPDEAESAEAGAVPSEAAWAAESGAAAGLAQKKAAPTEVLSMTAQPGPGHGKKLGHRGVDASGETTYKKTTSSTLKGAIQLGIGYTVGHLSSKPERDVLMQDFYVVESIFFPSEGSNLTPAHHFQDFRFKTYAPVAFRYFRELFGIRPDDYLYSLCNEPLIELSNPGASGSLFYVTSDDEFIIKTVMHKEAEFLQKLLPGYYMNLNQNPRTLLPKFYGLYCVQSGGKNIRVVVMNNILPRVVKMHLKFDLKGSTYKRRASKKEKEKSFPTYKDLDFMQDMPEGLLLDADTFSALVKTLQRDCLVLESFKIMDYSLLLGVHNIDQHERERQAQGAQSTSDEKRPVGQKALYSTAMESIQGGAARGEAIESDDTMGGIPAVNGRGERLLLHIGIIDILQSYRFIKKLEHTWKALVHDGDTVSVHRPSFYAERFFKFMSNTVFRKNSSLKSSPSKKGRGGALLAVKPLGPTAAFSASQIPSEREEAQYDLRGARSYPTLEDEGRPDLLPCTPPSFEEATTASIATTLSSTSLSIPERSPSETSEQPRYRRRTQSSGQDGRPQEEPPAEEDLQQITVQVEPACSVEIVVPKEEDAGVEASPAGASAAVEVETASQASDEEGAPASQASDEEDAPATDIYFPTDERSWVYSPLHYSAQAPPASDGESDT

SEQ ID NO: 31222 - protein, 700 aa, Homo sapiens
MELEVPDEAESAEAGAVPSEAAWAAESGAAAGLAQKKAAPTEVLSMTAQPGPGHGKKLGHRGVDASGETTYKKTTSSTLKGAIQLGIGYTVGHLSSKPERDVLMQDFYVVESIFFPSEGSNLTPAHHFQDFRFKTYAPVAFRYFRELFGIRPDDYLYSLCNEPLIELSNPGASGSLFYVTSDDEFIIKTVMHKEAEFLQKLLPGYYMNLNQNPRTLLPKFYGLYCVQSGGKNIRVVVMNNILPRVVKMHLKFDLKGSTYKRRASKKEKEKSFPTYKDLDFMQDMPEGLLLDADTFSALVKTLQRDCLVLESFKIMDYSLLLGVHNIDQHERERQAQGAQSTSDEKRPVGQKALYSTAMESIQGGAARGEAIESDDTMGGIPAVNGRGERLLLHIGIIDILQSYRFIKKLEHTWKALVHDGDTVSVHRPSFYAERFFKFMSNTVFRKNSSLKSSPSKKGRGGALLAVKPLGPTAAFSASQIPSEREEAQYDLRGARSYPTLEDEGRPDLLPCTPPSFEEATTASIATTLSSTSLSIPERSPSETSEQPRYRRRTQSSGQDGRPQEEPPAEEDLQQITVQVEPACSVEIVVPKEEDAGVEASPAGASAAVEVETASQASDEEGAPASQASDEEDAPATDIYFWRLWGPHAPTWPWRREGRAACLCPYPPHVVTPFPGTGLCASWSPDGTGGLGAMSCCVSVS

SEQ ID NO: 31223 - protein, 707 aa, Homo sapiens
MELEVPDEAESAEAGAVPSEAAWAAESGAAAGLAQKKAAPTEVLSMTAQPGPGHGKKLGHRGVDASGETTYKKTTSSTLKGAIQLGIGYTVGHLSSKPERDVLMQDFYVVESIFFPSEGSNLTPAHHFQDFRFKTYAPVAFRYFRELFGIRPDDYLYSLCNEPLIELSNPGASGSLFYVTSDDEFIIKTVMHKEAEFLQKLLPGYYMNLNQNPRTLLPKFYGLYCVQSGGKNIRVVVMNNILPRVVKMHLKFDLKGSTYKRRASKKEKEKSFPTYKDLDFMQDMPEGLLLDADTFSALVKTLQRDCLVLESFKIMDYSLLLGVHNIDQHERERQAQGAQSTSDEKRPVGQKALYSTAMESIQGGAARGEAIESDDTMGGIPAVNGRGERLLLHIGIIDILQSYRFIKKLEHTWKALVHDGDTVSVHRPSFYAERFFKFMSNTVFRKNSSLKSSPSKKGRGGALLAVKPLGPTAAFSASQIPSEREEAQYDLRGARSYPTLEDEGRPDLLPCTPPSFEEATTASIATTLSSTSLSIPERSPSETSEQPRYRRRTQSSGQDGRPQEEPPAEEDLQQITVQVEPACSVEIVVPKEEDAGVEASPAGASAAVEVETASQASDEEGAPASQASDEEDAPATDIYFFTDGRYWIYSPRHRRLRAVTLSASGTVSDRSRPPWGEGAVPLGQQGAAGPRPEAQCLTSVVFQKGFG

SEQ ID NO: 31224 - protein, 640 aa, Homo sapiens
MELEVPDEAESAEAGAVPSEAAWAAESGAAAGLAQKKAAPTEVLSMTAQPGPGHGKKLGHRGVDASGETTYKKTTSSTLKGAIQLGIGYTVGHLSSKPERDVLMQDFYVVESIFFPSEGSNLTPAHHFQDFRFKTYAPVAFRYFRELFGIRPDDYLYSLCNEPLIELSNPGASGSLFYVTSDDEFIIKTVMHKEAEFLQKLLPGYYMNLNQNPRTLLPKFYGLYCVQSGGKNIRVVVMNNILPRVVKMHLKFDLKGSTYKRRASKKEKEKSFPTYKDLDFMQDMPEGLLLDADTFSALVKTLQRDCLVLESFKIMDYSLLLGVHNIDQHERERQAQGAQSTSDEKRPVGQKALYSTAMESIQGGAARGEAIESDDTMGGIPAVNGRGERLLLHIGIIDILQSYRFIKKLEHTWKALVHDGDTVSVHRPSFYAERFFKFMSNTVFRKNSSLKSSPSKKGRGGALLAVKPLGPTAAFSASQIPSEREEAQYDLRGARSYPTLEDEGRPDLLPCTPPSFEEATTASIATTLSSTSLSIPERSPSETSEQPRYRRRTQSSGQDGRPQEEPPAEEDLQQITVQVEPACSVEIVVPKEEDAGVEASPAGASAAVEVETASQASDEEGAPASQASDEEDAPATDIYF

SEQ ID NO: 31225 - protein, 1244 aa, Homo sapiens
MLIKEYHILLPMSLDEYQVAQLYMIQKKSREESSGEGSGVEILANRPYTDGPGGSGQYTHKVYHVGSHIPGWFRALLPKAALQVEEESWNAYPYTRTRYTCPFVEKFSIEIETYYLPDGGQQPNVFNLSGAERRQRILDTIDIVRDAVAPGEYKAEEDPRLYHSVKTGRGPLSDDWARTAAQTGPLMCAYKLCKVEFRYWGMQAKIEQFIHDVGLRRVMLRAHRQAWCWQDEWTELSMADIRALEEETARMLAQRMAKCNTGSEGSEAQPPGKPSTEARSAASNTGTPDGPEAPPGPDASPDASFGKQWSSSSRSSYSSQHGGAVSPQSLSEWRMQNIARDSENSSEEEFFDAHEGFSDSEEVFPKEMTKWNSNDFIDAFASPVEAEGTPEPGAEAAKGIEDGAQAPRDSEGLDGAGELGAEACAVHALFLILHSGNILDSGPGDANSKQADVQTLSSAFEAVTRIHFPEALGHVALRLVPCPPICAAAYALVSNLSPYSHDGDSLSRSQDHIPLAALPLLATSSSRYQGAVATVIARTNQAYSAFLRSPEGAGFCGQVALIGDGVGGILGFDALCHSANAGTGSRGSSRRGSMNNELLSPEFGPVRDPLADGVEGLGRGSPEPSALPPQRIPSDMASPEPEGSQNSLQAAPATTSSWEPRRASTAFCPPAASSEAPDGPSSTARLDFKVSGFFLFGSPLGLVLALRKTVMPALEAAQMRPACEQIYNLFHAADPCASRLEPLLAPKFQAIAPLTVPRYQKFPLGDGSSLLLADTLQTHSSLFLEELEMLVPSTPTSTSGAFWKGSELATDPPAQPAAPSTTSEVVKILERWWGTKRIDYSLYCPEALTAFPTVTLPHLFHASYWESADVVAFILRQVIEKERPQLAECEEPSIYSPAFPREKWQRKRTQVKIRNVTSNHRASDTVVCEGRPQVLSGRFMYGPLDVVTLTGEKVDVYIMTQPLSGKWIHFGTEVTNSSGRLTFPVPPERALGIGVYPVRMVVRGDHTYAECCLTVVARGTEAVVFSIDGSFTASVSIMGSDPKVRAGAVDVVRHWQDSGYLIVYVTGRPDMQKHRVVAWLSQHNFPHGVVSFCDGLTHDPLRQKAMFLQSLVQEVELNIVAGYGSPKDVAVYAALGLSPSQTYIVGRAVRKLQAQCQFLSDGYVAHLGQLEAGSHSHASSGPPRAALGKSSYGVAAPVDFLRKQSQLLRSRGPSQAEREGPGTPPTTLARGKARSISLKLDSEE

SEQ ID NO: 31226 - protein, 1243 aa, Homo sapiens
MLIKEYHILLPMSLDEYQVAQLYMIQKKSREESSGEGSGVEILANRPYTDGPGGSGQYTHKVYHVGSHIPGWFRALLPKAALQVEEESWNAYPYTRTRYTCPFVEKFSIEIETYYLPDGGQQPNVFNLSGAERRQRILDTIDIVRDAVAPGEYKAEEDPRLYHSVKTGRGPLSDDWARTAAQTGPLMCAYKLCKVEFRYWGMQAKIEQFIHDVGLRRVMLRAHRQAWCWQDEWTELSMADIRALEEETARMLAQRMAKCNTGSEGSEAQPPGKPSTEARSAASNTGTPDGPEAPPGPDASPDASFGKQWSSSSRSSYSSQHGGAVSPQSLSEWRMQNIARDSENSSEEEFFDAHEGFSDSEEVFPKEMTKWNSNDFIDAFASPVEAEGTPEPGAEAAKGIEDGAQAPRDSEGLDGAGELGAEACAVHALFLILHSGNILDSGPGDANSKQADVQTLSSAFEAVTRIHFPEALGHVALRLVPCPPICAAAYALVSNLSPYSHDGDSLSRSQDHIPLAALPLLATSSSRYQGAVATVIARTNQAYSAFLRSPEGAGFCGQVALIGDGVGGILGFDALCHSANAGTGSRGSSRRGSMNNELLSPEFGPVRDPLADGVEGLGRGSPEPSALPPQRIPSDMASPEPEGSQNSLQAAPATTSSWEPRRASTAFCPPAASSEAPDGPSSTARLDFKVSGFFLFGSPLGLVLALRKTVMPALEAQMRPACEQIYNLFHAADPCASRLEPLLAPKFQAIAPLTVPRYQKFPLGDGSSLLLADTLQTHSSLFLEELEMLVPSTPTSTSGAFWKGSELATDPPAQPAAPSTTSEVVKILERWWGTKRIDYSLYCPEALTAFPTVTLPHLFHASYWESADVVAFILRQVIEKERPQLAECEEPSIYSPAFPREKWQRKRTQVKIRNVTSNHRASDTVVCEGRPQVLSGRFMYGPLDVVTLTGEKVDVYIMTQPLSGKWIHFGTEVTNSSGRLTFPVPPERALGIGVYPVRMVVRGDHTYAECCLTVVARGTEAVVFSIDGSFTASVSIMGSDPKVRAGAVDVVRHWQDSGYLIVYVTGRPDMQKHRVVAWLSQHNFPHGVVSFCDGLTHDPLRQKAMFLQSLVQEVELNIVAGYGSPKDVAVYAALGLSPSQTYIVGRAVRKLQAQCQFLSDGYVAHLGQLEAGSHSHASSGPPRAALGKSSYGVAAPVDFLRKQSQLLRSRGPSQAEREGPGTPPTTLARGKARSISLKLDSEE

SEQ ID NO: 31227 - protein, 855 aa, Homo sapiens
MARHLLLPLVMLVISPIPGAFQDSALSPTQEEPEDLDCGRPEPSARIVGGSNAQPGTWPWQVSLHHGGGHICGGSLIAPSWVLSAAHCFMTNGTLEPAAEWSVLLGVHSQDGPLDGAHTRAVAAIVVPANYSQVELGADLALLRLASPASLGPAVWPVCLPRASHRFVHGTACWATGWGDVQEADPLPLPWVLQEVELRLLGEATCQCLYSQPGPFNLTLQILPGMLCAGYPEGRRDTCQGDSGGPLVCEEGGRWFQAGITSFGFGCGRRNRPGVFTAVATYEAWIREQVMGSEPGPAFPTQPQKTQSDPQEPREENCTIALPECGKAPRPGAWPWEAQVMVPGSRPCHGALVSESWVLAPASCFLDPNSSDSPPRDLDAWRVLLPSRPRAERVARLVQHENASWDNASDLALLQLRTPVNLSAASRPVCLPHPEHYFLPGSRCRLARWGRGEPALGPGALLEAELLGGWWCHCLYGRQGAAVPLPGDPPHALCPAYQEKEEVGSCWNDSRWSLLCQEEGTWFLAGIRDFPSGCLRPRAFFPLQTHGPWISHVTRGAYLEDQLAWDWGPDGEETETQTCPPHTEHGACGLRLEAAPVGVLWPWLAEVHVAGDRVCTGILLAPGWVLAATHCVLRPGSTTVPYIEVYLGRAGASSLPQGHQVSRLVISIRLPQHLGLRPPLALLELSSRVEPSPSALPICLHPAGIPPGASCWVLGWKEPQDRVPVAAAVSILTQRICDCLYQGILPPGTLCVLYAEGQENRCEMTSAPPLLCQMTEGSWILVGMAVQGSRELFAAIGPEEAWISQTVGEANFLPPSGSPHWPTGGSNLCPPELAKASGSPHAVYFLLLLTLLIQS

SEQ ID NO: 31228 - protein, 752 aa, Homo sapiens
MARHLLLPLVMLVISPIPGAFQDSALSPTQEEPEDLDCGRPEPSARIVGGSNAQPGTWPWQVSLHHGGGHICGGSLIAPSWVLSAAHCFMTNGTLEPAAEWSVLLGVHSQDGPLDGAHTRAVAAIVVPANYSQVELGADLALLRLASPASLGPAVWPVCLPRASHRFVHGTACWATGWGDVQEADPLPLPWVLQEVELRLLGEATCQCLYSQPGPFNLTLQILPGMLCAGYPEGRRDTCQGDSGGPLVCEEGGRWFQAGITSFGFGCGRRNRPGVFTAVATYEAWIREQVMGSEPGPAFPTQPQKTQSDPQEPREENCTIALPECGKAPRPGAWPWEAQVMVPGSRPCHGALVSESWVLAPASCFLDPNSSDSPPRDLDAWRVLLPSRPRAERVARLVQHENASWDNASDLALLQLRTPVNLSAASRPVCLPHPEHYFLPGSRCRLARWGRGEPALGPGALLEAELLGGWWCHCLYGRQGAAVPLPGDPPHALCPAYQEKEEVGSCWNDSRWSLLCQEEGTWFLAGIRDFPSGCLRPRAFFPLQTHGPWISHVTRGAYLEDQLAWDWGPDGEETETQTCPPHTEHGACGLRLEAAPVGVLWPWLAEVHVAGDRVCTGILLAPGWVLAATHCVLRPGSTTVPYIEVYLGRAGASSLPQGHQMTSAPPLLCQMTEGSWILVGMAVQGSRELFAAIGPEEAWISQTVGEANFLPPSGSPHWPTGGSNLCPPELAKASGSPHAVYFLLLLTLLIQS

SEQ ID NO: 31229 - protein, 850 aa, Homo sapiens
MARHLLLPLVMLVISPIPGAFQDSALSPTQEEPEDLDCGRPEPSARIVGGSNAQPGTWPWQVSLHHGGGHICGGSLIAPSWVLSAAHCFMTNGTLEPAAEWSVLLGVHSQDGPLDGAHTRAVAAIVVPANYSQVELGADLALLRLASPASLGPAVWPVCLPRASHRFVHGTACWATGWGDVQEADPLPLPWVLQEVELRLLGEATCQCLYSQPGPFNLTLQILPGMLCAGYPEGRRDTCQGDSGGPLVCEEGGRWFQAGITSFGFGCGRRNRPGVFTAVATYEAWIREQVMGSEPGPAFPTQPQKTQSDPQEPREENCTIALPECGKAPRPGAWPWEAQVMVPGSRPCHGALVSESWVLAPASCFLDPNSSDSPPRDLDAWRVLLPSRPRAERVARLVQHENASWDNASDLALLQLRTPVNLSAASRPVCLPHPEHYFLPGSRCRLARWGRGEPALGPGALLEAELLGGWWCHCLYGRQGAAVPLPGDPPHALCPAYQEKEENDSRWSLLCQEEGTWFLAGIRDFPSGCLRPRAFFPLQTHGPWISHVTRGAYLEDQLAWDWGPDGEETETQTCPPHTEHGACGLRLEAAPVGVLWPWLAEVHVAGDRVCTGILLAPGWVLAATHCVLRPGSTTVPYIEVYLGRAGASSLPQGHQVSRLVISIRLPQHLGLRPPLALLELSSRVEPSPSALPICLHPAGIPPGASCWVLGWKEPQDRVPVAAAVSILTQRICDCLYQGILPPGTLCVLYAEGQENRCEMTSAPPLLCQMTEGSWILVGMAVQGSRELFAAIGPEEAWISQTVGEANFLPPSGSPHWPTGGSNLCPPELAKASGSPHAVYFLLLLTLLIQS

SEQ ID NO: 31230 - protein, 1349 aa, Homo sapiens
MIIKEYRIPLPMTVEEYRIAQLYMIQKKSRNETYGEGSGVEILENRPYTDGPGGSGQYTHKVYHVGMHIPSWFRSILPKAALRVVEESWNAYPYTRTRFTCPFVEKFSIDIETFYKTDAGENPDVFNLSPVEKNQLTIDFIDIVKDPVPHNEYKTEEDPKLFQSTKTQRGPLSENWIEEYKKQVFPIMCAYKLCKVEFRYWGMQSKIERFIHDTGLRRVMVRAHRQAWCWQDEWYGLSMENIRELEKEAQLMLSRKMAQFNEDGEEATELVKHEAVSDQTSGEPPEPSSSNGEPLVGRGLKKQWSTSSKSSRSSKRGASPSRHSISEWRMQSIARDSDESSDDEFFDAHEDLSDTEEMFPKDITKWSSNDLMDKIESPEPEDTQDGLYRQGAPEFRVASSVEQLNIIEDEVSQPLAAPPSKIHVLLLVLHGGTILDTGAGDPSSKKGDANTIANVFDTVMRVHYPSALGRLAIRLVPCPPVCSDAFALVSNLSPYSHDEGCLSSSQDHIPLAALPLLATSSPQYQEAVATVIQRANLAYGDFIKSQEGMTFNGQVCLIGDCVGGILAFDALCYSNQPVSESQSSSRRGSVVSMQDNDLLSPGILMNAAHCCGGGGGGGGGGGSSGGGGSSGGSSLESSRHLSRSNVDIPRSNGTEDPKRQLPRKRSDSSTYELDTIQQHQAFLSSLHASVLRTEPCSRHSSSSTMLDGTGALGRFDFEITDLFLFGCPLGLVLALRKTVIPALDVFQLRPACQQVYNLFHPADPSASRLEPLLERRFHALPPFSVPRYQRYPLGDGCSTLLADVLQTHNAAFQEHGAPSSPGTAPASRGFRRASEISIASQVSGMAESYTASSIAQKAPDALSHTPSVRRLSLLALPAPSPTTPGPHPPARKASPGLERAPGLPELDIGEVAAKWWGQKRIDYALYCPDALTAFPTVALPHLFHASYWESTDVVSFLLRQVMRHDNSSILELDGKEVSVFTPSKPREKWQRKRTHVKLRNVTANHRINDALANEDGPQVLTGRFMYGPLDMVTLTGEKVDVHIMTQPPSGEWLYLDTLVTNNSGRVSYTIPESHRLGVGVYPIKMVVRGDHTFADSYITVLPKGTEFVVFSIDGSFAASVSIMGSDPKVRAGAVDVVRHWQDLGYLIIYVTGRPDMQKQRVVAWLAQHNFPHGVVSFCDGLVHDPLRHKANFLKLLISELHLRVHAAYGSTKDVAVYSAISLSPMQIYIVGRPTKKLQQQCQFITDGYAAHLAQLKYSHRARPARNTATRMALRKGSFGLPGQGDFLRSRNHLLRTISAQPSGPSHRHERTQSQADGEQRGQRSMSVAAGCWGRAMTGRLEPGAAAGPK

SEQ ID NO: 31231 - protein, 1343 aa, Homo sapiens
MIIKEYRIPLPMTVEEYRIAQLYMIQKKSRNETYGEGSGVEILENRPYTDGPGGSGQYTHKVYHVGMHIPSWFRSILPKAALRVVEESWNAYPYTRTRFTCPFVEKFSIDIETFYKTDAGENPDVFNLSPVEKNQLTIDFIDIVKDPVPHNEYKTEEDPKLFQSTKTQRGPLSENWIEEYKKQVFPIMCAYKLCKVEFRYWGMQSKIERFIHDTGLRRVMVRAHRQAWCWQDEWYGLSMENIRELEKEAQLMLSRKMAQFNEDGEEATELVKHEAVSDQTSGEPPEPSSSNGEPLVGRGLKKQWSTSSKSSRSSKRGASPSRHSISEWRMQSIARDSDESSDDEFFDAHEDLSDTEEMFPKDITKWSSNDLMDKIESPEPEDTQDGLYRQGAPEFRVASSVEQLNIIEDEVSQPLAAPPSKIHVLLLVLHGGTILDTGAGDPSSKKGDANTIANVFDTVMRVHYPSALGRLAIRLVPCPPVCSDAFALVSNLSPYSHDEGCLSSSQDHIPLAALPLLATSSPQYQEAVATVIQRANLAYGDFIKSQEGMTFNGQVCLIGDCVGGILAFDALCYSNQPVSESQSSSRRGSVVSMQDNDLLSPGILMNAAHCCGGGGGGGGGGGSSGGGGSSGGSSLESSRHLSRSNVDIPRSNGTEDPKRQLPRKRSDSSTYELDTIQQHQAFLSSLHASVLRTEPCSRHSSSSTMLDGTGALGRFDFEITDLFLFGCPLGLVLALRKTVIPALDVFQLRPACQQVYNLFHPADPSASRLEPLLERRFHALPPFSVPRYQRYPLGDGCSTLLVETVQRNPELVLEGGPLAPLPHGDGFLETSMPVPAPTWQDGPRPGCAESDVLQTHNAAFQEHGAPSSPGTAPASRGFRRASEISIASQVSGMAESYTASSIAQIAAKWWGQKRIDYALYCPDALTAFPTVALPHLFHASYWESTDVVSFLLRQVMRHDNSSILELDGKEVSVFTPSKPREKWQRKRTHVKLRNVTANHRINDALANEDGPQVLTGRFMYGPLDMVTLTGEKVDVHIMTQPPSGEWLYLDTLVTNNSGRVSYTIPESHRLGVGVYPIKMVVRGDHTFADSYITVLPKGTEFVVFSIDGSFAASVSIMGSDPKVRAGAVDVVRHWQDLGYLIIYVTGRPDMQKQRVVAWLAQHNFPHGVVSFCDGLVHDPLRHKANFLKLLISELHLRVHAAYGSTKDVAVYSAISLSPMQIYIVGRPTKKLQQQCQFITDGYAAHLAQLKYSHRARPARNTATRMALRKGSFGLPGQGDFLRSRNHLLRTISAQPSGPSHRHERTQSQADGEQRGQRSMSVAAGCWGRAMTGRLEPGAAAGPK

SEQ ID NO: 31232 - protein, 1070 aa, Homo sapiens
MIIKEYRIPLPMTVEEYRIAQLYMIQKKSRNETYGEGSGVEILENRPYTRMQSIARDSDESSDDEFFDAHEDLSDTEEMFPKDITKWSSNDLMDKIESPEPEDTQDGLYRQGAPEFRVASSVEQLNIIEDEVSQPLAAPPSKIHVLLLVLHGGTILDTGAGDPSSKKGDANTIANVFDTVMRVHYPSALGRLAIRLVPCPPVCSDAFALVSNLSPYSHDEGCLSSSQDHIPLAALPLLATSSPQYQEAVATVIQRANLAYGDFIKSQEGMTFNGQVCLIGDCVGGILAFDALCYSNQPVSESQSSSRRGSVVSMQDNDLLSPGILMNAAHCCGGGGGGGGGGGSSGGGGSSGGSSLESSRHLSRSNVDIPRSNGTEDPKRQLPRKRSDSSTYELDTIQQHQAFLSSLHASVLRTEPCSRHSSSSTMLDGTGALGRFDFEITDLFLFGCPLGLVLALRKTVIPALDVFQLRPACQQVYNLFHPADPSASRLEPLLERRFHALPPFSVPRYQRYPLGDGCSTLLADVLQTHNAAFQEHGAPSSPGTAPASRGFRRASEISIASQVSGMAESYTASSIAQKAPDALSHTPSVRRLSLLALPAPSPTTPGPHPPARKASPGLERAPGLPELDIGEVAAKWWGQKRIDYALYCPDALTAFPTVALPHLFHASYWESTDVVSFLLRQVMRHDNSSILELDGKEVSVFTPSKPREKWQRKRTHVKLRNVTANHRINDALANEDGPQVLTGRFMYGPLDMVTLTGEKVDVHIMTQPPSGEWLYLDTLVTNNSGRVSYTIPESHRLGVGVYPIKMVVRGDHTFADSYITVLPKGTEFVVFSIDGSFAASVSIMGSDPKVRAGAVDVVRHWQDLGYLIIYVTGRPDMQKQRVVAWLAQHNFPHGVVSFCDGLVHDPLRHKANFLKLLISELHLRVHAAYGSTKDVAVYSAISLSPMQIYIVGRPTKKLQQQCQFITDGYAAHLAQLKYSHRARPARNTATRMALRKGSFGLPGQGDFLRSRNHLLRTISAQPSGPSHRHERTQSQADGEQRGQRSMSVAAGCWGRAMTGRLEPGAAAGPK

SEQ ID NO: 31233 - protein, 974 aa, Homo sapiens
MAKAGRAGGPPPGGGAPWHLRNVLSDSVESSDDEFFDAREEMAEGKNAILIGMSQWNSNDLVEQIETMGKLDEHQGEGTAPCTSSILQEKQRELYRVSLRRQRFPAQGSIEIHEDSEEGCPQRSCKTHVLLLVLHGGNILDTGAGDPSCKAADIHTFSSVLEKVTRAHFPAALGHILIKFVPCPAICSEAFSLVSHLNPYSHDEGCLSSSQDHVPLAALPLLAISSPQYQDAVATVIERANQVYREFLKSSDGIGFSGQVCLIGDCVGGLLAFDAICYSAGPSGDSPASSSRKGSISSTQDTPVAVEEDCSLASSKRLSKSNIDISSGLEDEEPKRPLPRKQSDSSTYDCEAITQHHAFLSSIHSSVLKDESETPAAGGPQLPEVSLGRFDFDVSDFFLFGSPLGLVLAMRRTVLPGLDGFQVRPACSQVYSFFHCADPSASRLEPLLEPKFHLVPPVSVPRYQRFPLGDGQSLLLADALHTHSPLFLEGSSRDSPPLLDAPASPPQASRFQRPGRRMSEGSSHSESSESSDSMAPVGASRITAKWWGSKRIDYALYCPDVLTAFPTVALPHLFHASYWESTDVVAFILRQVMRYESVNIKESARLDPAALSPANPREKWLRKRTQVKLRNVTANHRANDVIAAEDGPQVLVGRFMYGPLDMVALTGEKVDILVMAEPSSGRWVHLDTEITNSSGRITYNVPRPRRLGVGVYPVKMVVRGDQTCAMSYLTVLPRGMECVVFSIDGSFAASVSIMGSDPKVRPGAVDVVRHWQDLGYMILYITGRPDMQKQRVVSWLSQHNFPQGMIFFSDGLVHDPLRQKAIFLRNLMQECFIKISAAYGSTKDISVYSVLGLPASQIFIVGRPTKKYQTQCQFLSEGYAAHLAALEASHRSRPKKNNSRMILRKGSFGLHAQPEFLRKRNHLRRTMSVQQPDPPAANPKPERAQSQPESDKDHERPLPALSWARGPPKFESVP

SEQ ID NO: 31234 - protein, 565 aa, Homo sapiens
MRRTVLPGLDGFQVRPACSQVYSFFHCADPSASRLEPLLEPKFHLVPPVSVPRYQRFPLGDGQSLLLADALHTHSPLFLEGSSRDSPPLLDAPASPPQASRFQRPGRRMSEGSSHSESSESSDSMAPVGASRITAKWWGSKRIDYALYCPDVLTAFPTVALPHLFHASYWESTDVVAFILRQVMRYESVNIKESARLDPAALSPANPREKWLRKRTQVKLRNVTANHRANDVIAAEDGPQVLVGRFMYGPLDMVALTGEKVDILVMAEPSSGRWVHLDTEITNSSGRITYNVPRPRRLGVGVYPVKMVVRGDQTCAMSYLTVLPRGMECVVFSIDGSFAASVSIMGSDPKVRPGAVDVVRHWQDLGYMILYITGRPDMQKQRVVSWLSQHNFPQGMIFFSDGLVHDPLRQKAIFLRNLMQECFIKISAAYGSTKDISVYSVLGLPASQIFIVGRPTKKYQTQCQFLSEGYAAHLAALEASHRSRPKKNNSRMILRKGSFGLHAQPEFLRKRNHLRRTMSVQQPDPPAANPKPERAQSQPESDKDHERPLPALSWARGPPKFESVP

SEQ ID NO: 31235 - protein, 938 aa, Homo sapiens
MAKAGRAGGPPPGGGAPWHLRNVLSDSVESSDDEFFDARGEGTAPCTSSILQEKQRELYRVSLRRQRFPAQGSIEIHEDSEEGCPQRSCKTHVLLLVLHGGNILDTGAGDPSCKAADIHTFSSVLEKVTRAHFPAALGHILIKFVPCPAICSEAFSLVSHLNPYSHDEGCLSSSQDHVPLAALPLLAISSPQYQDAVATVIERANQVYREFLKSSDGIGFSGQVCLIGDCVGGLLAFDAICYSAGPSGDSPASSSRKGSISSTQDTPVAVEEDCSLASSKRLSKSNIDISSGLEDEEPKRPLPRKQSDSSTYDCEAITQHHAFLSSIHSSVLKDESETPAAGGPQLPEVSLGRFDFDVSDFFLFGSPLGLVLAMRRTVLPGLDGFQVRPACSQVYSFFHCADPSASRLEPLLEPKFHLVPPVSVPRYQRFPLGDGQSLLLADALHTHSPLFLEGSSRDSPPLLDAPASPPQASRFQRPGRRMSEGSSHSESSESSDSMAPVGASRITAKWWGSKRIDYALYCPDVLTAFPTVALPHLFHASYWESTDVVAFILRQVMRYESVNIKESARLDPAALSPANPREKWLRKRTQVKLRNVTANHRANDVIAAEDGPQVLVGRFMYGPLDMVALTGEKVDILVMAEPSSGRWVHLDTEITNSSGRITYNVPRPRRLGVGVYPVKMVVRGDQTCAMSYLTVLPRGMECVVFSIDGSFAASVSIMGSDPKVRPGAVDVVRHWQDLGYMILYITGRPDMQKQRVVSWLSQHNFPQGMIFFSDGLVHDPLRQKAIFLRNLMQECFIKISAAYGSTKDISVYSVLGLPASQIFIVGRPTKKYQTQCQFLSEGYAAHLAALEASHRSRPKKNNSRMILRKGSFGLHAQPEFLRKRNHLRRTMSVQQPDPPAANPKPERAQSQPESDKDHERPLPALSWARGPPKFESVP

SEQ ID NO: 31236 - protein, 484 aa, Homo sapiens
MACRGGAGNGHRASATLSRVSPGSLYTCRTRTHNICMVSDFFYPNMGGVESHIYQLSQCLIERGHKVIIVTHAYGNRKGIRYLTSGLKVYYLPLKVMYNQSTATTLFHSLPLLRYIFVRERVTIIHSHSSFSAMAHDALFHAKTMGLQTVFTDHSLFGFADVSSVLTNKLLTVSLCDTNHIICVSYTSKENTVLRAALNPEIVSVIPNAVDPTDFTPDPFRRHDSITIVVVSRLVYRKGIDLLSGIIPELCQKYPDLNFIIGGEGPKRIILEEVRERYQLHDRVRLLGALEHKDVRNVLVQGHIFLNTSLTEAFCMAIVEAASCGLQVVSTRVGGIPEVLPENLIILCEPSVKSLCEGLEKAIFQLKSGTLPAPENIHNIVKTFYTWRNVAERTEKVYDRVSVEAVLPMDKRLDRLISHCGPVTGYIFALLAVFNFLFLIFLRWMTPDSIIDVAIDATGPRGAWTNNYSHSKRGGENNEISETR

SEQ ID NO: 31237 - protein, 315 aa, Homo sapiens
MACRGGAGNGHRASATLSRVSPGSLYTCRTRTHNICMVSDFFYPNMGGVESHIYQLSQCLIERGHKVIIVTHAYGNRKGIRYLTSGLKVYYLPLKVMYNQSTATTLFHSLPLLRVRLLGALEHKDVRNVLVQGHIFLNTSLTEAFCMAIVEAASCGLQVVSTRVGGIPEVLPENLIILCEPSVKSLCEGLEKAIFQLKSGTLPAPENIHNIVKTFYTWRNVAERTEKVYDRVSVEAVLPMDKRLDRLISHCGPVTGYIFALLAVFNFLFLIFLRWMTPDSIIDVAIDATGPRGAWTNNYSHSKRGGENNEISETR

SEQ ID NO: 31238 - protein, 250 aa, Homo sapiens
MELTGIDLLSGIIPELCQKYPDLNFIIGGEGPKRIILEEVRERYQLHDRVRLLGALEHKDVRNVLVQGHIFLNTSLTEAFCMAIVEAASCGLQVVSTRVGGIPEVLPENLIILCEPSVKSLCEGLEKAIFQLKSGTLPAPENIHNIVKTFYTWRNVAERTEKVYDRVSVEAVLPMDKRLDRLISHCGPVTGYIFALLAVFNFLFLIFLRWMTPDSIIDVAIDATGPRGAWTNNYSHSKRGGENNEISETR

SEQ ID NO: 31239 - protein, 314 aa, Homo sapiens
MDAFKGGMSLERLPEGLRPPPPPPHDMGPAFHLARPADPREPLENSASESSDTELPEKERGGEPKGPEDSGAGGTGCGGADDPAKKKKQRRQRTHFTSQQLQELEATFQRNRYPDMSMREEIAVWTNLTEPRVRVWFKNRRAKWRKRERNQQLDLCKGGYVPQFSGLVQPYEDVYAAGYSYNNWAAKSLAPAPLSTKSFTFFNSMSPLSSQSMFSAPSSISSMTMPSSMGPGAVPGMPNSGLNNINNLTGSSLNSAMSPGACPYGTPASPYSVYRDTCNSSLASLRLKSKQHSSFGYGGLQGPASGLNACQYNS

SEQ ID NO: 31240 - protein, 554 aa, Homo sapiens
MRRPLSKCGMEPGGGDASLTLHGLQNRSHGKIKLRKRKSTLYFNTQEKSARRRGDLLGENIYLLLFTIALRILNCFLVQTSFVPDEYWQSLEVSHHMVFNYGYLTWEWTERLRSYTYPLIFASIYKILHLLGKDSVQLLIWIPRLAQALLSAVADVRLYSLMKQLENQEVARWVFFCQLCSWFTWYCCTRTLTNTMETVLTIIALFYYPLEGSKSMNSVKYSSLVALAFIIRPTAVILWTPLLFRHFCQEPRKLDLILHHFLPVGFVTLSLSLMIDRIFFGQWTLVQFNFLKFNVLQNWGTFYGSHPWHWYFSQGFPVILGTHLPFFIHGCYLAPKRYRILLVTVLWTLLVYSMLSHKEFRFIYPVLPFCMVFCGYSLTHLKTWKKPALSFLFLSNLFLALYTGLVHQRGTLDVMSHIQKVCYNNPNKSSASIFIMMPCHSTPYYSHVHCPLPMRFLQCPPDLTGKSHYLDEADVFYLNPLNWLHREFHDDASLPTHLITFSILEEEISAFLISSNYKRTAVFFHTHLPEGRIGSHIYVYERKLKGKFNMKMKF

SEQ ID NO: 31241 - protein, 297 aa, Homo sapiens
MYAQPVTNTKEVKWQKVLYERQPFPDNYVDRRFLEELRKNIHARKYQYWAVVFESSVVIQQLCSVCVFVVIWWYMDEGLLAPHWLLGTGLASSLIGYVLFDLIDGGEGRKKSGQTRWADLKSALVFITFTYGFSPVLKTLTESVSTDTIYAMSVFMLLGHLIFFDYGANAAIVSSTLSLNMAIFASVCLASRLPRSLHAFIMVTFAIQIFALWPMLQKKLKACTPRSYVGVTLLFAFSAVGGLLSISAVGAVLFALLLMSISCLCPFYLIRLQLFKENIHGPWDEAEIKEDLSRFLS

SEQ ID NO: 31242 - protein, 317 aa, Homo sapiens
METNCRKLVSACVQLGVQPAAVECLFSKDSEIKKVEFTDSPESRKEAASSKFFPRQHPGANEKDKSQQGKNEDVGAEDPSKKKRQRRQRTHFTSQQLQELEATFQRNRYPDMSTREEIAVWTNLTEARVRVWFKNRRAKWRKRERNQQAELCKNGFGPQFNGLMQPYDDMYPGYSYNNWAAKGLTSASLSTKSFPFFNSMNVNPLSSQSMFSPPNSISSMSMSSSMVPSAVTGVPGSSLNSLNNLNNLSSPSLNSAVPTPACPYAPPTPPYVYRDTCNSSLASLRLKAKQHSSFGYASVQNPASNLSACQYAVDRPV

SEQ ID NO: 31243 - protein, 324 aa, Homo sapiens
MNCMKGPLHLEHRAAGTKLSAVSSSSCHHPQPLAMASVLAPGQPRSLDSSKHRLEVHTISDTSSPEAAEKDKSQQGKNEDVGAEDPSKKKRQRRQRTHFTSQQLQELEATFQRNRYPDMSTREEIAVWTNLTEARVRVWFKNRRAKWRKRERNQQAELCKNGFGPQFNGLMQPYDDMYPGYSYNNWAAKGLTSASLSTKSFPFFNSMNVNPLSSQSMFSPPNSISSMSMSSSMVPSAVTGVPGSSLNSLNNLNNLSSPSLNSAVPTPACPYAPPTPPYVYRDTCNSSLASLRLKAKQHSSFGYASVQNPASNLSACQYAVDRPV

SEQ ID NO: 31244 - protein, 271 aa, Homo sapiens
METNCRKLVSACVQLEKDKSQQGKNEDVGAEDPSKKKRQRRQRTHFTSQQLQELEATFQRNRYPDMSTREEIAVWTNLTEARVRVWFKNRRAKWRKRERNQQAELCKNGFGPQFNGLMQPYDDMYPGYSYNNWAAKGLTSASLSTKSFPFFNSMNVNPLSSQSMFSPPNSISSMSMSSSMVPSAVTGVPGSSLNSLNNLNNLSSPSLNSAVPTPACPYAPPTPPYVYRDTCNSSLASLRLKAKQHSSFGYASVQNPASNLSACQYAVDRPV

SEQ ID NO: 31245 - protein, 219 aa, Homo sapiens
MKDNDIKRLLYTHLLCIFSIILSVFIPSLFLENFSILETHLTWLCICSGFVTAVNLVLYLVVKPNTSSKRSSLSHKVTGFLKCCIYFLMSCFSFHVIFVLYGAPLIELALETFLFAVILSTFTTVPCLCLLGPNLKAWLRVFSRNGVTSIWENSLQITTISSFVGAWLGALPIPLDWERPWQVWPISCTLGATFGYVAGLVISPLWIYWNRKQLTYKNN

SEQ ID NO: 31246 - protein, 206 aa, Homo sapiens
MKDNDIKRLLYTHLLCIFSIILSVFIPSLFLENFSILETHLTWLCICSGFVTAVNLVLYLVVKPNTSSKRSSLSHKVTGFLKCCIYFLMSCFSFHVIFVLYGAPLIELALETFLFAVILSTFTTVPCLCLLGPNLKAWLRVFSRNGVTSIWENSLQITTISSFVGAWLGALPIPLDWERPWQMTVERKRSTYRSLHVPCRGLGTVK

SEQ ID NO: 31247 - protein, 394 aa, Homo sapiens
MAAPSPGPREVLAPSPEAGCRAVTSSRRGLLWRLRDKQSRLGLFEISPGHELHGMTCMMQAGLWAATQVSMDHPPTGPPSRDDFSEVLTQVHEGFELGTLAGPAFAWLRRSLGLAEEDYQAALGPGGPYLQFLSTSKSKASFFLSHDQRFFLKTQGRREVQALLAHLPRYVQHLQRHPHSLLARLLGVHSLRVDRGKKTYFIVMQSVFYPAGRISERYDIKGCEVSRWVDPAPEGSPLVLVLKDLNFQGKTINLGPQRSWFLRQMELDTTFLRELNVLDYSLLIAFQRLHEDERGPGSSLIFRTARSVQGAQSPEESRAQNRRLLPDAPNALHILDGPEQRYFLGVVDLATVYGLRKRLEHLWKTLRYPGRTFSTVSPARYARRLCQWVEAHTE

SEQ ID NO: 31248 - protein, 191 aa, Homo sapiens
MQSVFYPAGRISERYDIKGCEVSRWVDPAPEGSPLVLVLKDLNFQGKTINLGPQRSWFLRQMELDTTFLRELNVLDYSLLIAFQRLHEDERGPGSSLIFRTARSVQGAQSPEESRAQNRRLLPDAPNALHILDGPEQRYFLGVVDLATVYGLRKRLEHLWKTLRYPGRTFSTVSPARYARRLCQWVEAHTE

SEQ ID NO: 31249 - protein, 302 aa, Homo sapiens
MEFGLLSEAEARSPALSLSDAGTPHPQLPEHGCKGQEHSDSEKASASLPGGSPEDGSLKKKQRRQRTHFTSQQLQELEATFQRNRYPDMSTREEIAVWTNLTEARVRVWFKNRRAKWRKRERSQQAELCKGSFAAPLGGLVPPYEEVYPGYSYGNWPPKALAPPLAAKTFPFAFNSVNVGPLASQPVFSPPSSIAASMVPSAAAAPGTVPGPGALQGLGGGPPGLAPAAVSSGAVSCPYASAAAAAAAAASSPYVYRDPCNSSLASLRLKAKQHASFSYPAVHGPPPAANLSPCQYAVERPV

SEQ ID NO: 31250 - protein, 983 aa, Homo sapiens
MRLGSGTFATCCVAIEVLGIAVFLRGFFPAPVRSSARAEHGAEPPAPEPSAGASSNWTTLPPPLFSKVVIVLIDALRDDFVFGSKGVKFMPYTTYLVEKGASHSFVAEAKPPTVTMPRIKALMTGSLPGFVDVIRNLNSPALLEDSVIRQAKAAGKRIVFYGDETWVKLFPKHFVEYDGTTSFFVSDYTEVDNNVTRHLDKVLKRGDWDILILHYLGLDHIGHISGPNSPLIGQKLSEMDSVLMKIHTSLQSKERETPLPNLLVLCGDHGMSETGSHGASSTEEVNTPLILISSAFERKPGDIRHPKHVQQTDVAATLAIALGLPIPKDSVGSLLFPVVEGRPMREQLRFLHLNTVQLSKLLQENVPSYEKDPGFEQFKMSERLHGNWIRLYLEEKHSEVLFNLGSKVLRQYLDALKTLSLSLSAQVAQYDIYSMMVGTVVVLEVLTLLLLSVPQALRRKAELEVPLSSPGFSLLFYLVILVLSAVHVIVCTSAESSCYFCGLSWLAAGGVMVLASALLCVIVSVLTNVLVGGNTPRKNPMHPSSRWSELDLLILLGTAGHVLSLGASSFVEEEHQTWYFLVNTLCLALSQETYRNYFLGDDGEPPCGLCVEQGHDGATAAWQDGPGCDVLERDKGHGSPSTSEVLRGREKWMVLASPWLILACCRLLRSLNQTGVQWAHRPDLGHWLTSSDHKAELSVLAALSLLVVFVLVQRGCSPVSKAALALGLLGVYCYRAAIGSVRFPWRPDSKDISKGIIEARFVYVFVLGILFTGTKDLLKSQVIAADFKLKTVGLWEIYSGLVLLAALLFRPHNLPVLAFSLLIQTLMTKFIWKPLRHDAAEITVMHYWFGQAFFYFQGNSNNIATVDISAGFVGLDTYVEIPAVLLTAFGTYAGPVLWASHLVHFLSSETRSGSALSHACFCYALICSIPVFTYIVLVTSLRYHLFIWSVFSPKLLYEGMHLLITAAVCVFFTAMDQTRLTQS

SEQ ID NO: 31251 - protein, 975 aa, Homo sapiens
MRLGSGTFATCCVAIEVLGIAVFLRGFFPAPVRSSARAEHGAEPPAPEPSAGASSNWTTLPPPLFSKVVIVLIDALRDDFVFGSKGVKFMPYTTYLVEKGASHSFVAEAKPPTVTMPRIKALMTGSLPGFVDVIRNLNSPALLEDSVIRQAKAAGKRIVFYGDETWVKLFPKHFVEYDGTTSFFVSDYTEVDNNVTRHLDKVLKRGDWDILILHYLGLDHIGHISGPNSPLIGQKLSEMDSVLMKIHTSLQSKERETPLPNLLVLCGDHGMSETGSHGASSTEEVNTPLILISSAFERKPGDIRHPKHVQQTDVAATLAIALGLPIPKDSVGSLLFPVVEGRPMREQLRFLHLNTVQLSKLLQENVPSYEKDPGFEQFKMSERLHGNWIRLYLEEKHSEVLFNLGSKVLRQYLDALKTLSLSLSAQVAQYDIYSMMVLTLLLLSVPQALRRKAELEVPLSSPGFSLLFYLVILVLSAVHVIVCTSAESSCYFCGLSWLAAGGVMVLASALLCVIVSVLTNVLVGGNTPRKNPMHPSSRWSELDLLILLGTAGHVLSLGASSFVEEEHQTWYFLVNTLCLALSQETYRNYFLGDDGEPPCGLCVEQGHDGATAAWQDGPGCDVLERDKGHGSPSTSEVLRGREKWMVLASPWLILACCRLLRSLNQTGVQWAHRPDLGHWLTSSDHKAELSVLAALSLLVVFVLVQRGCSPVSKAALALGLLGVYCYRAAIGSVRFPWRPDSKDISKGIIEARFVYVFVLGILFTGTKDLLKSQVIAADFKLKTVGLWEIYSGLVLLAALLFRPHNLPVLAFSLLIQTLMTKFIWKPLRHDAAEITVMHYWFGQAFFYFQGNSNNIATVDISAGFVGLDTYVEIPAVLLTAFGTYAGPVLWASHLVHFLSSETRSGSALSHACFCYALICSIPVFTYIVLVTSLRYHLFIWSVFSPKLLYEGMHLLITAAVCVFFTAMDQTRLTQS

SEQ ID NO: 31252 - protein, 850 aa, Homo sapiens
MRLGSGTFATCCVAIEVLGIAVFLRGFFPAPVRSSARAEHGAEPPAPEPSAGASSNWTTLPPPLFSKVVIVLIDALRDDFVFGSKGVKFMPYTTYLVEKGASHSFVAEAKPPTVTMPRIKERETPLPNLLVLCGDHGMSETGSHGASSTEEVNTPLILISSAFERKPGDIRHPKHVQQTDVAATLAIALGLPIPKDSVGSLLFPVVEGRPMREQLRFLHLNTVQLSKLLQENVPSYEKDPGFEQFKMSERLHGNWIRLYLEEKHSEVLFNLGSKVLRQYLDALKTLSLSLSAQVAQYDIYSMMVGTVVVLEVLTLLLLSVPQALRRKAELEVPLSSPGFSLLFYLVILVLSAVHVIVCTSAESSCYFCGLSWLAAGGVMVLASALLCVIVSVLTNVLVGGNTPRKNPMHPSSRWSELDLLILLGTAGHVLSLGASSFVEEEHQTWYFLVNTLCLALSQETYRNYFLGDDGEPPCGLCVEQGHDGATAAWQDGPGCDVLERDKGHGSPSTSEVLRGREKWMVLASPWLILACCRLLRSLNQTGVQWAHRPDLGHWLTSSDHKAELSVLAALSLLVVFVLVQRGCSPVSKAALALGLLGVYCYRAAIGSVRFPWRPDSKDISKGIIEARFVYVFVLGILFTGTKDLLKSQVIAADFKLKTVGLWEIYSGLVLLAALLFRPHNLPVLAFSLLIQTLMTKFIWKPLRHDAAEITVMHYWFGQAFFYFQGNSNNIATVDISAGFVGLDTYVEIPAVLLTAFGTYAGPVLWASHLVHFLSSETRSGSALSHACFCYALICSIPVFTYIVLVTSLRYHLFIWSVFSPKLLYEGMHLLITAAVCVFFTAMDQTRLTQS

SEQ ID NO: 31253 - protein, 463 aa, Homo sapiens
MRLGSGTFATCCVAIEVLGIAVFLRGFFPAPVRSSARAEHGAEPPAPEPSAGASSNWTTLPPPLFSKVVIVLIDALRDDFVFGSKGVKFMPYTTYLVEKGASHSFVAEAKPPTVTMPRIKALMTGSLPGFVDVIRNLNSPALLEDSVIRQAKAAGKRIVFYGDETWVKLFPKHFVEYDGTTSFFVSDYTEVDNNVTRHLDKVLKRGDWDILILHYLGLDHIGHISGPNSPLIGQKLSEMDSVLMKIHTSLQSKERETPLPNLLVLCGDHGMSETGSHGASSTEEVNTPLILISSAFERKPGDIRHPKHVQQTDVAATLAIALGLPIPKDSVGSLLFPVVEGRPMREQLRFLHLNTVQLSKLLQENVPSYEKDPGFEQFKMSERLHGNWIRLYLEEKHSEVLFNLGSKVLRQYLDALKTLSLSLSAQVAQFSPCSCSASHRHCTERLSWKSHCHLLGFLCSFIW

SEQ ID NO: 31254 - protein, 299 aa, Homo sapiens
MPYTTYLVEKGASHSFVAEAKPPTVTMPRIKALMTGSLPGFVDVIRNLNSPALLEDSVIRQAKAAGKRIVFYGDETWVKLFPKHFVEYDGTTSFFVSDYTEVDNNVTRHLDKVLKRGDWDILILHYLGLDHIGHISGPNSPLIGQKLSEMDSVLMKIHTSLQSKERETPLPNLLVLCGDHGMSETGSHGASSTEEVNTPLILISSAFERKPGDIRHPKHVQQTDVAATLAIALGLPIPKDSVGSLLFPVVEGRPMREQLRFLHLNTVQLSKLLQENVPSYEKGSHPAPAQRPTGTAQKG

SEQ ID NO: 31255 - protein, 341 aa, Homo sapiens
MTGSLPGFVDVIRNLNSPALLEDSVIRQAKAAGKRIVFYGDETWVKLFPKHFVEYDGTTSFFVSDYTEVDNNVTRHLDKVLKRGDWDILILHYLGLDHIGHISGPNSPLIGQKLSEMDSVLMKIHTSLQSKERETPLPNLLVLCGDHGMSETGSHGASSTEEVNTPLILISSAFERKPGDIRHPKHVQQTDVAATLAIALGLPIPKDSVGSLLFPVVEGRPMREQLRFLHLNTVQLSKLLQENVPSYEKDPGFEQFKMSERLHGNWIRLYLEEKHSEVLFNLGSKVLRQYLDALKTLSLSLSAQVAQFSPCSCSASHRHCAERLSWKSHCHLLGFLCSFIW

SEQ ID NO: 31256 - protein, 188 aa, Homo sapiens
MEDERSFSDICGGRLALQRRYYSPSCREFCLSCPRLSLRSLTAVTCTVWLAAYGLFTLCENSMILSAAIFITLLGLLGYLHFVKIDQETLLIIDSLGIQMTSSYASGKESTTFIEMGKVKDIVINEAIYMQKVIYYLCILLKDPVEPHGISQVVPVFQSAKPRLDCLIEVYRSCQEILAHQKATSTSP

SEQ ID NO: 31257 - protein, 1006 aa, Homo sapiens
MEGQSSRGSRRPGTRAGLGSLPMPQGVAQTGAPSKVDSSFQLPAKKNAALGPSEPRLALAPVGPRAAMSASSEGPRLALASPRPILAPLCTPEGQKTATAHRSSSLAPTSVGQLVMSASAGPKPPPATTGSVLAPTSLGLVMPASAGPRSPPVTLGPNLAPTSRDQKQEPPASVGPKPTLAASGLSLALASEEQPPELPSTPSPVPSPVLSPTQEQALAPASTASGAASVGQTSARKRDAPAPRPLPASEGHLQPPAQTSGPTGSPPCIQTSPDPRLSPSFRARPEALHSSPEDPVLPRPPQTLPLDVGQGPSEPGTHSPGLLSPTFRPGAPSGQTVPPPLPKPPRSPSRSPSHSPNRSPCVPPAPDMALPRLGTQSTGPGRCLSPNLQAQEAPAPVTTSSSTSTLSSSPWSAQPTWKSDPGFRITVVTWNVGTAMPPDDVTSLLHLGGGDDSDGADMIAIGLQEVNSMLNKRLKDALFTDQWSELFMDALGPFNFVLVSSVRMQGVILLLFAKYYHLPFLRDVQTDCTRTGLGGYWGNKGGVSVRLAAFGHMLCFLNCHLPAHMDKAEQRKDNFQTILSLQQFQGPGAQGILDHDLVFWFGDLNFRIESYDLHFVKFAIDSDQLHQLWEKDQLNMAKNTWPILKGFQEGPLNFAPTFKFDVGTNKYDTSAKKRKPAWTDRILWKVKAPGGGPSPSGRKSHRLQVTQHSYRSHMEYTVSDHKPVAAQFLLQFAFRDDMPLVRLEVADEWVRPEQAVVRYRMETVFARSSWDWIGLYRVGFRHCKDYVAYVWAKHEDVDGNTYQVTFSEESLPKGHGDFILGYYSHNHSILIGITEPFQISLPSSELASSSTDSSGTSSEGEDDSTLELLAPKSRSPSPGKSKRHRSRSPGLARFPGLALRPSSRERRGASRSPSPQSRRLSRVAPDRSSNGSSRGSSEEGPSGLPGPWAFPPAVPRSLGLLPALRLETVDPGGGGSWGPDREALAPNSLSPSPQGHRGLEEGGLGP

SEQ ID NO: 31258 - protein, 639 aa, Homo sapiens
MALPRLGTQSTGPGRCLSPNLQAQEAPAPVTTSSSTSTLSSSPWSAQPTWKSDPGFRITVVTWNVGTAMPPDDVTSLLHLGGGDDSDGADMIAIGLQEVNSMLNKRLKDALFTDQWSELFMDALGPFNFVLVSSVRMQGVILLLFAKYYHLPFLRDVQTDCTRTGLGGYWGNKGGVSVRLAAFGHMLCFLNCHLPAHMDKAEQRKDNFQTILSLQQFQGPGAQGILDHDLVFWFGDLNFRIESYDLHFVKFAIDSDQLHQLWEKDQLNMAKNTWPILKGFQEGPLNFAPTFKFDVGTNKYDTSAKKRKPAWTDRILWKVKAPGGGPSPSGRKSHRLQVTQHSYRSHMEYTVSDHKPVAAQFLLQFAFRDDMPLVRLEVADEWVRPEQAVVRYRMETVFARSSWDWIGLYRVGFRHCKDYVAYVWAKHEDVDGNTYQVTFSEESLPKGHGDFILGYYSHNHSILIGITEPFQISLPSSELASSSTDSSGTSSEGEDDSTLELLAPKSRSPSPGKSKRHRSRSPGLARFPGLALRPSSRERRGASRSPSPQSRRLSRVAPDRSSNGSSRGSSEEGPSGLPGPWAFPPAVPRSLGLLPALRLETVDPGGGGSWGPDREALAPNSLSPSPQGHRGLEEGGLGP

SEQ ID NO: 31259 - protein, 638 aa, Homo sapiens
MEGQSSRGSRRPGTRAGLGSLPMPQGVAQTGAPSKVDSSFQLPAKKNAALGPSEPRITVVTWNVGTAMPPDDVTSLLHLGGGDDSDGADMIAIGLQEVNSMLNKRLKDALFTDQWSELFMDALGPFNFVLVSSVRMQGVILLLFAKYYHLPFLRDVQTDCTRTGLGGYWGNKGGVSVRLAAFGHMLCFLNCHLPAHMDKAEQRKDNFQTILSLQQFQGPGAQGILDHDLVFWFGDLNFRIESYDLHFVKFAIDSDQLHQLWEKDQLNMAKNTWPILKGFQEGPLNFAPTFKFDVGTNKYDTSAKKRKPAWTDRILWKVKAPGGGPSPSGRKSHRLQVTQHSYRSHMEYTVSDHKPVAAQFLLQFAFRDDMPLVRLEVADEWVRPEQAVVRYRMETVFARSSWDWIGLYRVGFRHCKDYVAYVWAKHEDVDGNTYQVTFSEESLPKGHGDFILGYYSHNHSILIGITEPFQISLPSSELASSSTDSSGTSSEGEDDSTLELLAPKSRSPSPGKSKRHRSRSPGLARFPGLALRPSSRERRGASRSPSPQSRRLSRVAPDRSSNGSSRGSSEEGPSGLPGPWAFPPAVPRSLGLLPALRLETVDPGGGGSWGPDREALAPNSLSPSPQGHRGLEEGGLGP

SEQ ID NO: 31260 - protein, 252 aa, Homo sapiens
MEAMWLLCVALAVLAWGFLWVWDSSERMKSREQGGRLGAESRTLLVIAHPDDEAMFFAPTVLGLARLRHWVYLLCFSAGNYYNQGETRKKELLQSCDVLGIPLSSVMIIDNRDFPDDPGMQWDTEHVARVLLQHIEVNGINLVVTFDAGGVSGHSNHIALYAAVRALHSEGKLPKGCSVLTLQSVNVLRKYISLLDLPLSLLHTQDVLFVLNSKEVAQAKKAMSCHRSQLLWFRRLYIIFSRYMRINSLSFL

SEQ ID NO: 31261 - protein, 194 aa, Homo sapiens
MEAMWLLCVALAVLAWGFLWVWDSSERMKSREQGGRLGAESRTLLVIAHPDDEAMFFAPTVLGLARLRHWVYLLCFSAGNYYNQGETRKKELLQSCDVLGIPLSSVMIIDNRDFPDDPGMQWDTEHVARVLLQHIEVNGINLVVTFDAGGVSGHSNHIALYAAVRALHSEGKLPKGKACSFCKGPQDTVPLRNL

SEQ ID NO: 31262 - protein, 423 aa, Homo sapiens [sequence omitted]

SEQ ID NO: 31263 - protein, 931 aa, Homo sapiens
MLLFFTLGLLIHFVFFASIFDIYFTSPLVHGMTPQFTPLPPPARRLVLFVADGLRADALYELDENGNSRAPFIRNIIMHEGSWGISHTRVPTESRPGHVALIAGFYEDVSAVAKGWKENPVEFDSLFNESKYTWSWGSPDILPMFAKGASGDHVYTYSYDAKREDFGAQDATKLDTWVFDNVKDFFHHARNNQSLFSKINEEKIVFFLHLLGIDTNGHAHRPSSRDYKHNIKKVDDGVKEIVSMFNHFYGNDGKTTFIFTSDHGMTDWGSHGAGHPSETLTPLVTWGAGIKYPQRVSAQQFDDAFLKEWRLENWKRLDVNQADIAPLMTSLIGVPFPLNSVGILPVDYLNNTDLFKAESMFTNAVQILEQFKVKMTQKKEVTLPFLFTPFKLLSDSKQFNILRKARSYIKHRKFDEVVSLCKELIHLALKGLSYYHTYDRFFLGVNVVIGFVGWISYASLLIIKSHSNLIKGVSKEVKKPSHLLPCSFVAIGILVAFFLLIQACPWTYYVYGLLPLPIWYAVLREFQVIQDLVVSVLTYPLSHFVGYLLAFTLGIEVLVLSFFYRYMLTAGLTAFAAWPFLTRLWTRAKMTSLSWTFFSLLLAVFPLMPVVGRKPDISLVMGAGLLVLLLSLCVVTSLMKRKDSFIKEELLVHLLQVLSTVLSMYVVYSTQSSLLRKQGLPLMNQIISWATLASSLVVPLLSSPVLFQRLFSILLSLMSTYLLLSTGYEALFPLVLSCLMFVWINIEQETLQQSGVCCKQKLTSIQFSYNTDITQFRQLYLDDIRRAFFLVFFLVTAFFGTGNIASINSFDLASVYCFLTVFSPFMMGALMMWKILIPFVLVMCAFEAVQLTTQLSSKSLFLIVLVISDIMALHFFFLVKDYGSWLDIGTSISHYVIVMSMTIFLVFLNGLAQLLTTKKLRLCGKPKSHFM

SEQ ID NO: 31264 - protein, 861 aa, Homo sapiens
MTGRARARARGRARGQETAQLVGSTASQQPGYIQPRPQPPPAEGELFGRGRQRGTAGGTAKSQGLQISAGFQELSLAERGGRRRDFHDLGVNTRQNLDHVKESKTGSSGIIVRLSTNHFRLTSRPQWALYQYHIDYNPLMEARRLRSALLFQHEDLIGKCHAFDGTILFLPKRLQQKVTEVFSKTRNGEDVRITITLTNELPPTSPTCLQFYNIIFRRLLKIMNLQQIGRNYYNPNDPIDIPSHRLVIWPGFTTSILQYENSIMLCTDVSHKVLRSETVLDFMFNFYHQTEEHKFQEQVSKELIGLVVLTKYNNKTYRVDDIDWDQNPKSTFKKADGSEVSFLEYYRKQYNQEITDLKQPVLVSQPKRRRGPGGTLPGPAMLIPELCYLTGLTDKMRNDFNVMKDLAVHTRLTPEQRQREVGRLIDYIHKNDNVQRELRDWGLSFDSNLLSFSGRILQTEKIHQGGKTFDYNPQFADWSKETRGAPLISVKPLDNWLLIYTRRNYEAANSLIQNLFKVTPAMGMQMRKAIMIEVDDRTEAYLRVLQQKVTADTQIVVCLLSSNRKDKYDAIKKYLCTDCPTPSQCVVARTLGKQQTVMAIATKIALQMNCKMGGELWRVDIPLKLVMIVGIDCYHDMTAGRRSIAGFVASINEGMTRWFSRCIFQDRGQELVDGLKVCLQAALRAWNSCNEYMPSRIIVYRDGVGDGQLKTLVNYEVPQFLDCLKSIGRGYNPRLTVIVVKKRVNTRFFAQSGGRLQNPLPGTVIDVEVTRPEWYDFFIVSQAVRSGSVSPTHYNVIYDNSGLKPDHIQRLTYKLCHIYYNWPGVIRVPAPCQYAHKLAFLVGQSIHREPNLSLSNRLYYL

SEQ ID NO: 31265 - protein, 829 aa, Homo sapiens
MTGRARARARGRARGQETAQLVGSTASQQPGYIQPRPQPPPAEGELFGRGRQRGTAGGTAKSQGLQISAGFQELSLAERGGRRRDFHDLGVNTRQNLDHVKESKTGSSGIIVRLSTNHFRLTSRPQWALYQYHIDYNPLMEARRLRSALLFQHEDLIGKCHAFDGTILFLPKRLQQKVTEVFSKTRNGEDVRITITLTNELPPTSPTCLQFYNIIFRRLLKIMNLQQIGRNYYNPNDPIDIPSHRLVIWPGFTTSILQYENSIMLCTDVSHKVLRSETVLDFMFNFYHQTEEHKFQEQVSKELIGLVVLTKYNNKTYRVDDIDWDQNPKSTFKKADGSEVSFLEYYRKQYNQEITDLKQPVLVSQPKRRRGPGGTLPGPAMLIPELCYLTGLTDKMRNDFNVMKDLAVHTRLTPEQRQREVGRLIDYIHKNDNVQRELRDWGLSFDSNLLSFSGRILQTEKIHQGGKTFDYNPQFADWSKETRGAPLISVKPLDNWLLIYTRRNYEAANSLIQNLFKVTPAMGMQMRKAIMIEVDDRTEAYLRVLQQKVTADTQIVVCLLSSNRKDKYDAIKKYLCTDCPTPSQCVVARTLGKQQTVMAIATKIALQMNCKMGGELWRVDIPLKLVMIVGIDCYHDMTAGRRSIAGFVASINEGMTRWFSRCIFQDRGQELVDGLKVCLQAALRAWNSCNEYMPSRIIVYRDGVGDGQLKTLVNYEVPQFLDCLKSIGRGYNPRLTVIVVKKRVNTRFFAQSGGRLQNPLPGTVIDVEVTRPEWYDFFIVSQAVRSGSVSPTHYNVIYDNSGLKPDHIQRLTYKLCHIYYNWPVSASTC

SEQ ID NO: 31266 - protein, 775 aa, Homo sapiens
MIFGVNTRQNLDHVKESKTGSSGIIVRLSTNHFRLTSRPQWALYQYHIDYNPLMEARRLRSALLFQHEDLIGKCHAFDGTILFLPKRLQQKVTEVFSKTRNGEDVRITITLTNELPPTSPTCLQFYNIIFRRLLKIMNLQQIGRNYYNPNDPIDIPSHRLVIWPGFTTSILQYENSIMLCTDVSHKVLRSETVLDFMFNFYHQTEEHKFQEQVSKELIGLVVLTKYNNKTYRVDDIDWDQNPKSTFKKADGSEVSFLEYYRKQYNQEITDLKQPVLVSQPKRRRGPGGTLPGPAMLIPELCYLTGLTDKMRNDFNVMKDLAVHTRLTPEQRQREVGRLIDYIHKNDNVQRELRDWGLSFDSNLLSFSGRILQTEKIHQGGKTFDYNPQFADWSKETRGAPLISVKPLDNWLLIYTRRNYEAANSLIQNLFKVTPAMGMQMRKAIMIEVDDRTEAYLRVLQQKVTADTQIVVCLLSSNRKDKYDAIKKYLCTDCPTPSQCVVARTLGKQQTVMAIATKIALQMNCKMGGELWRVDIPLKLVMIVGIDCYHDMTAGRRSIAGFVASINEGMTRWFSRCIFQDRGQELVDGLKVCLQAALRAWNSCNEYMPSRIIVYRDGVGDGQLKTLVNYEVPQFLDCLKSIGRGYNPRLTVIVVKKRVNTRFFAQSGGRLQNPLPGTVIDVEVTRPEWYDFFIVSQAVRSGSVSPTHYNVIYDNSGLKPDHIQRLTYKLCHIYYNWPGVIRVPAPCQYAHKLAFLVGQSIHREPNLSLSNRLYYL

SEQ ID NO: 31267 - protein, 282 aa, Homo sapiens
MESRMWPALLLSHLLPLWPLLLLPLPPPAQGSSSSPRTPPAPARPPCARGGPSAPRHVCVWERAPPPSRSPRVPRSRRQVLPGTAPPATPSGFEEGPPSSQYPWAIVWGPTVSREDGGDPNSANPGFLDYGFAAPHGLATPHPNSDSMRGDGDGLILGEAPATLRPFLFGGRGEGVDPQLYVTITISIIIVLVATGIIFKFCWDRSQKRRRPSGQQGALRQEESQQPLTDLSPAGVTVLGAFGDSPTPTPDHEEPRGGPRPGMPHPKGAPAFQLNRIPLVNL

SEQ ID NO: 31268 - protein, 276 aa, Homo sapiens
MESRMWPALLLSHLLPLWPLLLLPLPPPAQGSSSSPRTPPAPARPPCARGGPSAPRHVCVWERAPPPSRSPRVPRSRRQVLPGTAPPATPSGFEEGPPSSQYPWAIVWGPTVSREDGGDPNSANPGFLDYGFAAPHGLATPHPNSDSMRGDGDGLILGEAPATLRPFLFGGRGEGVDPQLYVTITISIIIVLVATGIIFKFCWDRSQKRRRPSGQQGALRQEESQQPLTDLSPAGVTVLGAFGDSPTPTPDHEEPRGGPRPGMPHPKGAPAFQLNR

SEQ ID NO: 31269 - protein, 1089 aa, Homo sapiens
MQKASVLLFLAWVCFLFYAGIALFTSGFLLTRLELTNHSSCQEPPGPGSLPWGSQGKPGACWMASRFSRVVLVLIDALRFDFAQPQHSHVPREPPVSLPFLGKLSSLQRILEIQPHHARLYRSQVDPPTTTMQRLKALTTGSLPTFIDAGSNFASHAIVEDNLIKQLTSAGRRVVFMGDDTWKDLFPGAFSKAFFFPSFNVRDLDTVDNGILEHLYPTMDSGEWDVLIAHFLGVDHCGHKHGPHHPEMAKKLSQMDQVIQGLVERLENDTLLVVAGDHGMTTNGDHGGDSELEVSAALFLYSPTAVFPSTPPEEPEVIPQVSLVPTLALLLGLPIPFGNIGEVMAELFSGGEDSQPHSSALAQASALHLNAQQVSRFLHTYSAATQDLQAKELHQLQNLFSKASADYQWLLQSPKGAEATLPTVIAELQQFLRGARAMCIESWARFSLVRMAGGTALLAASCFICLLASQWAISPGFPFCPLLLTPVAWGLVGAIAYAGLLGTIELKLDLVLLGAVAAVSSFLPFLWKAWAGWGSKRPLATLFPIPGPVLLLLLFRLAVFFSDSFVVAEARATPFLLGSFILLLVVQLHWEGQLLPPKLLTMPRLGTSATTNPPRHNGAYALRLGIGLLLCTRLAGLFHRCPEETPVCHSSPWLSPLASMVGGRAKNLWYGACVAALVALLAAVRLWLRRYGNLKSPEPPMLFVRWGLPLMALGTAAYWALASGADEAPPRLRVLVSGASMVLPRAVAGLAASGLALLLWKPVTVLVKAGAGAPRTRTVLTPFSGPPTSQADLDYVVPQIYRHMQEEFRGRLERTKSQGPLTVAAYQLGSVYSAAMVTALTLLAFPLLLLHAERISLVFLLLFLQSFLLLHLLAAGIPVTTPGPFTVPWQAVSAWALMATQTFYSTGHQPVFPAIHWHAAFVGFPEGHGSCTWLPALLVGANTFASHLLFAVGCPLLLLWPFLCESQGLRKRQQPPGNEADARVRPEEEEEPLMEMRLRDAPQHFYAALLQLGLKYLFILGIQILACALAASILRRHLMVWKVFAPKFIFEAVGFIVSSVGLLLGIALVMRVDGAVSSWFRQLFLAQQR

SEQ ID NO: 31270 - protein, 672 aa, Homo sapiens
MQKASVLLFLAWVCFLFYAGIALFTSGFLLTRLELTNHSSCQEPPGPGSLPWGSQGKPGACWMASRFSRVVLVLIDALRFDFAQPQHSHVPREPPVSLPFLGKLSSLQRILEIQPHHARLYRSQVDPPTTTMQRLKALTTGSLPTFIDAGSNFASHAIVEDNLIKQLTSAGRRVVFMGDDTWKDLFPGAFSKAFFFPSFNVRDLDTVDNGILEHLYPTMDSGEWDVLIAHFLGVDHCGHKHGPHHPEMAKKLSQMDQVIQGLVERLENDTLLVVAGDHGMTTNGDHGGDSELEVSAALFLYSPTAVFPSTPPEEPEVIPQVSLVPTLALLLGLPIPFGNIGEVMAELFSGGEDSQPHSSALAQASALHLNAQQVSRFLHTYSAATQDLQAKELHQLQNLFSKASADYQWLLQSPKGAEATLPTVIAELQQFLRGARAMCIESWARFSLSFLLLHLLAAGIPVTTPGPFTVPWQAVSAWALMATQTFYSTGHQPVFPAIHWHAAFVGFPEGHGSCTWLPALLVGANTFASHLLFAVGCPLLLLWPFLCESQGLRKRQQPPGNEADARVRPEEEEEPLMEMRLRDAPQHFYAALLQLGLKYLFILGIQILACALAASILRRHLMVWKVFAPKFIFEAVGFIVSSVGLLLGIALVMRVDGAVSSWFRQLFLAQQR

SEQ ID NO: 31271 - protein, 1649 aa, Homo sapiens
MDDDSLDELVARSPGPDGHPQVGPADPAGDFEESSVGSSGDSGDDSDSEHGDGTDGEDEGASEEEDLEDRSGSEDSEDDGETLLEVAGTQGKLEAAGSFNSDDDAESCPICLNAFRDQAVGTPENCAHYFCLDCIVEWSKNANSCPVDRTLFKCICIRAQFGGKILRKIPVENTKASEEEEDPTFCEVCGRSDREDRLLLCDGCDAGYHMECLDPPLQEVPVDEWFCPECAAPGVVLAADAGPVSEEEVSLLLADVVPTTSRLRPRAGRTRAIARTRQSERVRATVNRNRISTARRVQHTPGRLGSSLLDEAIEAVATGLSTAVYQRPLTPRTPARRKRKTRRRKKVPGRKKTPSGPSAKSKSSATRSKKRQHRVKKRRGKKVKSEATTRSRIARTLGLRRPVHSSCIPSVLKPVEPSLGLLRADIGAASLSLFGDPYELDPFDSSEELSANPLSPLSAKRRALSRSALQSHQPVARPVSVGLSRRRLPAAVPEPDLEEEPVPDLLGSILSGQSLLMLGSSDVIIHRDGSLSAKRAAPVSFQRNSGSLSRGEEGFKGCLQPRALPSGSPAQGPSGNRPQSTGLSCQGRSRTPARTAGAPVRLDLPAAPGAVQARNLSNGSVPGFRQSHSPWFNGTNKHTLPLASAASKISSRDSKPPCRSVVPGPPLKPAPRRTDISELPRIPKIRRDDGGGRRDAAPAHGQSIEIPSACISRLTGREGTGQPGRGTRAESEASSRVPREPGVHTGSSRPPAPSSHGSLAPLGPSRGKGVGSTFESFRINIPGNMAHSSQLSSPGFCNTFRPVDDKEQRKENPSPLFSIKKTKQLRSEVYDPSDPTGSDSSAPGSSPERSGPGLLPSEITRTISINSPKAQTVQAVRCVTSYTVESIFGTEPEPPLGPSSAMSKLRGAVAAEGASDTEREEPTESQGLAARLRRPSPPEPWDEEDGASCSTFFGSEERTVTCVTVVEPEAPPSPDVLQAATHRVVELRPPSRSRSTSSSRSRKKAKRKRVSREHGRTRSGTRSESRDRSSRSASPSVGEERPRRQRSKAKSRRSSSDRSSSRERAKRKKAKDKSREHRRGPWGHSRRTSRSRSGSPGSSSYEHYESRKKKKRRSASRPRGRECSPTSSLERLCRHKHQRERSHERPDRKESVAWPRDRRKRRSRSPSSEHRAREHRRPRSREKWPQTRSHSPERKGAVREASPAPLAQGEPGREDLPTRLPALGEAHVSPEVATADKAPLQAPPVLEVAAECEPDDLDLDYGDSVEAGHVFDDFSSDAVFIQLDDMSSPPSPESTDSSPERDFPLKPALPPASLAVAAIQREVSLMHDEDPSQPPPLPEGTQEPHLLRPDAAEKAEAPSSPDVAPAGKEDSPSASGRVQEAARPEEVVSQTPLLRSRALVKRVTWNLQESESSAPAEDRAPRAPLHRPQKPREGAWDMEDVAPTGVRQVFSELPFPSHVLPEPGFPDTDPSQVYSPGLPPAPAQPSSIPPCALVSQPTVQFILQGSLPLVGCGAAQTLAPVPAALTPASEPASQATAASNSEEKTPAPRLAAEKTKKEEYMKKLHMQERAVEEVKLAIKPFYQKREVTKEEYKDILRKAVQKICHSKSGEINPVKVANLVKAYVDKYRHMRRHKKPEAGEEPPTQGAEG

SEQ ID NO: 31272 - protein, 1494 aa, Homo sapiens
MDDDSLDELVARSPGPDGHPQVGPADPAGDFEESSVGSSGDSGDDSDSEHGDGTDGEDEGASEEEDLEDRSGSEDSEDDGETLLEVAGTQGKLEAAGSFNSDDDAESCPICLNAFRDQAVGTPENCAHYFCLDCIVEWSKNANSCPVDRTLFKCICIRAQFGGKILRKIPVENTKASEEEEDPTFCEVCGRSDREDRLLLCDGCDAGYHMECLDPPLQEVPVDEWFCPECAAPGVVLAADAGPVSEEEVSLLLADVVPTTSRLRPRAGRTRAIARTRQSERVRATVNRNRISTARRVQHTPGRLGSSLLDEAIEAVATGLSTAVYQRPLTPRTPARRKRKTRRRKKVPGRKKTPSGPSAKSKSSATRSKKRQHRVKKRRGKKVKSEATTRSRIARTLGLRRPVHSSCIPSVLKPVEPSLGLLRADIGAASLSLFGDPYELDPFDSSEELSANPLSPLSAKRRALSRSALQSHQPVARPVSVGLSRRRLPAAVPEPDLEEEPVPDLLGSILSGQSLLMLGSSDVIIHRDGSLSAKRAAPVSFQRNSGSLSRGEEGFKGCLQPRALPSGSPAQGPSGNRPQSTGLSCQGRSRTPARTAGAPVRLDLPAAPGAVQARNLSNGSVPGFRQSHSPWFNGTNKHTLPLASAASKISSRDSKPPCRSVVPGPPLKPAPRRTDISELPRIPKIRRDDGGGRRDAAPAHGQSIEIPSACISRLTGREGTGQPGRGTRAESEASSRVPREPGVHTGSSRPPAPSSHGSLAPLGPSRGKGVGSTFESFRINIPGNMAHSSQLSSPGFCNTFRPVDDKEQRKENPSPLFSIKKTKQLRSEVYDPSDPTGSDSSAPGSSPERSGPGLLPSEITRTISINSPKAQTVQAVRCVTSYTVESIFGTEPEPPLGPSSAMSKLRGAVAAEGASDTEREEPTESQGLAARLRRPSPPEPWDEEDGASCSTFFGSEERTVTCVTVVEPEAPPSPDVLQAATHRVVELRPPSRSRSTSSSRSRKKAKRKRVSREHGRTRSGTRSESRDRSSRSASPSVGEERPRRQRSKAKSRRSSSDRSSSRERAKRKKAKDKSREHRRGPWGHSRRTSRSRSGSPGSSSYEHYESRKKKKRRSASRPRGRECSPTSSLERLCRHKHQRERSHERPDRKESVAWPRDRRKRRSRSPSSEHRAREHRRPRSREKWPQTRSHSPERKGAVREASPAPLAQGEPGREDLPTRLPALGEAHVSPEVATADKAPLQAPPVLEVAAECEPDDLDLDYGDSVEAGHVFDDFSSDAVFIQLDDMSSPPSPESTDSSPERDFPLKPALPPASLAVAAIQREVSLMHDEDPSQPPPLPEGTQEPHLLRPDAAEKAEAPSSPDVAPAGKEDSPSASGRVQEAARPEEVVSQTPLLRSRALVKRVTWNLQESESSAPAEDRAPRAPLHRPQKPREGAWDMEDVAPTGVRQVFSELPFPSHVLPEPGFPDTDPSQPQSQPVKPLQPATRRRRPRPPG

SEQ ID NO: 31273 - protein, 1648 aa, Homo sapiens
MDDDSLDELVARSPGPDGHPQVGPADPAGDFEESSVGSSGDSGDDSDSEHGDGTDGEDEGASEEEDLEDRSGSEDSEDDGETLLEVAGTQGKLEAAGSFNSDDDAESCPICLNAFRDQAVGTPENCAHYFCLDCIVEWSKNANSCPVDRTLFKCICIRAQFGGKILRKIPVENTKASEEEEDPTFCEVCGRSDREDRLLLCDGCDAGYHMECLDPPLQEVPVDEWFCPECAAPGVVLAADAGPVSEEEVSLLLADVVPTTSRLRPRAGRTRAIARTRQSERVRATVNRNRISTARRVQHTPGRLGSSLLDEAIEAVATGLSTAVYQRPLTPRTPARRKRKTRRRKKVPGRKKTPSGPSAKSKSSATRSKKRQHRVKKRRGKKVKSEATTRSRIARTLGLRRPVHSSCIPSVLKPVEPSLGLLRADIGAASLSLFGDPYELDPFDSEELSANPLSPLSAKRRALSRSALQSHQPVARPVSVGLSRRRLPAAVPEPDLEEEPVPDLLGSILSGQSLLMLGSSDVIIHRDGSLSAKRAAPVSFQRNSGSLSRGEEGFKGCLQPRALPSGSPAQGPSGNRPQSTGLSCQGRSRTPARTAGAPVRLDLPAAPGAVQARNLSNGSVPGFRQSHSPWFNGTNKHTLPLASAASKISSRDSKPPCRSVVPGPPLKPAPRRTDISELPRIPKIRRDDGGGRRDAAPAHGQSIEIPSACISRLTGREGTGQPGRGTRAESEASSRVPREPGVHTGSSRPPAPSSHGSLAPLGPSRGKGVGSTFESFRINIPGNMAHSSQLSSPGFCNTFRPVDDKEQRKENPSPLFSIKKTKQLRSEVYDPSDPTGSDSSAPGSSPERSGPGLLPSEITRTISINSPKAQTVQAVRCVTSYTVESIFGTEPEPPLGPSSAMSKLRGAVAAEGASDTEREEPTESQGLAARLRRPSPPEPWDEEDGASCSTFFGSEERTVTCVTVVEPEAPPSPDVLQAATHRVVELRPPSRSRSTSSSRSRKKAKRKRVSREHGRTRSGTRSESRDRSSRSASPSVGEERPRRQRSKAKSRRSSSDRSSSRERAKRKKAKDKSREHRRGPWGHSRRTSRSRSGSPGSSSYEHYESRKKKKRRSASRPRGRECSPTSSLERLCRHKHQRERSHERPDRKESVAWPRDRRKRRSRSPSSEHRAREHRRPRSREKWPQTRSHSPERKGAVREASPAPLAQGEPGREDLPTRLPALGEAHVSPEVATADKAPLQAPPVLEVAAECEPDDLDLDYGDSVEAGHVFDDFSSDAVFIQLDDMSSPPSPESTDSSPERDFPLKPALPPASLAVAAIQREVSLMHDEDPSQPPPLPEGTQEPHLLRPDAAEKAEAPSSPDVAPAGKEDSPSASGRVQEAARPEEVVSQTPLLRSRALVKRVTWNLQESESSAPAEDRAPRAPLHRPQKPREGAWDMEDVAPTGVRQVFSELPFPSHVLPEPGFPDTDPSQVYSPGLPPAPAQPSSIPPCALVSQPTVQFILQGSLPLVGCGAAQTLAPVPAALTPASEPASQATAASNSEEKTPAPRLAAEKTKKEEYMKKLHMQERAVEEVKLAIKPFYQKREVTKEEYKDILRKAVQKICHSKSGEINPVKVANLVKAYVDKYRHMRRHKKPEAGEEPPTQGAEG

SEQ ID NO: 31274 - protein, 284 aa, Homo sapiens
MDYSYLNSYDSCVAAMEASAYGDFGACSQPGGFQYSPLRPAFPAAGPPCPALGSSNCALGALRDHQPAPYSAVPYKFFPEPSGLHEKRKQRRIRTTFTSAQLKELERVFAETHYPDIYTREELALKIDLTEARVQVWFQNRRAKFRKQERAASAKGAAGAAGAKKGEARCSSEDDDSKESTCSPTPDSTASLPPPPAPGLASPRLSPSPLPVALGSGPGPGPGPQPLKGALWAGVAGGGGGGPGAGAAELLKAWQPAESGPGPFSGVLSSFHRKPGPALKTNLF

SEQ ID NO: 31275 - protein, 621 aa, Homo sapiens
MADFEELRNMVSSFRVSELQVLLGFAGRNKSGRKHDLLMRALHLLKSGCSPAVQIKIRELYRRRYPRTLEGLSDLSTIKSSVFSLDGGSSPVEPDLAVAGIHSLPSTSVTPHSPSSPVGSVLLQDTKPTFEMQQPSPPIPPVHPDVQLKNLPFYDVLDVLIKPTSLVQSSIQRFQEKFFIFALTPQQVREICISRDFLPGGRRDYTVQVQLRLCLAETSCPQEDNYPNSLCIKVNGKLFPLPGYAPPPKNGIEQKRPGRPLNITSLVRLSSAVPNQISISWASEIGKNYSMSVYLVRQLTSAMLLQRLKMKGIRNPDHSRALIKEKLTADPDSEIATTSLRVSLMCPLGKMRLTIPCRAVTCTHLQCFDAALYLQMNEKKPTWICPVCDKKAAYESLILDGLFMEILNDCSDVDEIKFQEDGSWCPMRPKKEAMKVSSQPCTKIESSSVLSKPCSVTVASEASKKKVDVIDLTIESSSDEEEDPPAKRKCIFMSETQSSPTKGVLMYQPSSVRVPSVTSVDPAAIPPSLTDYSVPFHHTPISSMSSDLPGLDFLSLIPVDPQYCPPMFLDSLTSPLTASSTSVTTTSSHESSTHVSSSSSRSETGVITSSGSNIPDIISLD

SEQ ID NO: 31276 - protein, 572 aa, Homo sapiens
MADFEELRNMVSSFRVSELQVLLGFAGRNKSGRKHDLLMRALHLLKSGCSPAVQIKIRELYRRRYPRTLEGLSDLSTIKSSVFSLDGGSSPVEPDLAVAGIHSLPSTSVTPHSPSSPVGSVLLQDTKPTFEMQQPSPPIPPVHPDVQLKNLPFYDVLDVLIKPTSLVQSSIQRFQEKFFIFALTPQQVREICISRDFLPGGRRDYTVQVQLRLCLAETSCPQEDNYPNSLCIKVNGKLFPLPGYAPPPKNGIEQKRPGRPLNITSLVRLSSAVPNQISISWASEIGKNYSMSVYLVRQLTSAMLLQRLKMKGIRNPDHSRALIKEKLTADPDSEIATTSLRVSLMCPLGKMRLTIPCRAVTCTHLQCFDAALYLQMNEKKPTWICPVCDKKAAYESLILDGLFMEILNDCSDVDEIKFQEDGSWCPMRPKKEAMKVSSQPCTKIESSSVLSKPCSVTVASEASKKKVDVIDLTIESSSDEEEDPPAKRKCIFMSETQSSPTKGVLMYQPSSVRVPSVTSVDPAAIPPSLTDYSVPFHHTPISSMSSDLPGEQRRNDINNELKLGTSSDTVQQ

SEQ ID NO: 31277 - protein, 405 aa, Homo sapiens
MNAGKQLQRTLHNMVSSFRVSELQVLLGFAGRNKSGRKHDLLMRALHLLKSGCSPAVQIKIRELYRRRYPRTLEGLSDLSTIKSSVFSLDGGSSPVEPDLAVAGIHSLPSTSVTPHSPSSPVGSVLLQDTKPTFEMQQPSPPIPPVHPDVQLKNLPFYDVLDVLIKPTSLVQSSIQRFQEKFFIFALTPQQVREICISRDFLPGGRRDYTVQVQLRLCLAETSCPQEDNYPNSLCIKVNGKLFPLPGYAPPPKNGIEQKRPGRPLNITSLVRLSSAVPNQISISWASEIGKNYSMSVYLVRQLTSAMLLQRLKMKGIRNPDHSRALIKEKLTADPDSEIATTSLRVSLMCPLGKMRLTIPCRAVTCTHLQCFDAALYLQMNEKKPTWICPVCDKKAAYESLILDG

SEQ ID NO: 31278 - protein, 555 aa, Homo sapiens
MAAAGAAATHLEVARGKRAALFFAAVAIVLGLPLWWKTTETYRASLPYSQISGLNALQLRLMVPVTVVFTRESVPLDDQEKLPFTVVHEREIPLKYKMKIKCRFQKAYRRALDHEEEALSSGSVQEAEAMLDEPQEQAEGSLTVYVISEHSSLLPQDMMSYIGPKRTAVVRGIMHREAFNIIGRRIVQVAQAMSLTEDVLAAALADHLPEDKWSAEKRRPLKSSLGYEITFSLLNPDPKSHDVYWDIEGAVRRYVQPFLNALGAAGNFSVDSQILYYAMLGVNPRFDSASSSYYLDMHSLPHVINPVESRLGSSAASLYPVLNFLLYVPELAHSPLYIQDKDGAPVATNAFHSPRWGGIMVYNVDSKTYNASVLPVRVEVDMVRVMEVFLAQLRLLFGIAQPQLPPKCLLSGPTSEGLMTWELDRLLWARSVENLATATTTLTSLAQLLGKISNIVIKDDVASEVYKAVAAVQKSAEELASGHLASAFVASQEAVTSSELAFFDPSLLHLLYFPDDQKFAIYIPLFLPMAVPILLSLVKIFLETRKSWRKPEKTD

SEQ ID NO: 31279 - protein, 547 aa, Homo sapiens
MPSEVARGKRAALFFAAVAIVLGLPLWWKTTETYRASLPYSQISGLNALQLRLMVPVTVVFTRESVPLDDQEKLPFTVVHEREIPLKYKMKIKCRFQKAYRRALDHEEEALSSGSVQEAEAMLDEPQEQAEGSLTVYVISEHSSLLPQDMMSYIGPKRTAVVRGIMHREAFNIIGRRIVQVAQAMSLTEDVLAAALADHLPEDKWSAEKRRPLKSSLGYEITFSLLNPDPKSHDVYWDIEGAVRRYVQPFLNALGAAGNFSVDSQILYYAMLGVNPRFDSASSSYYLDMHSLPHVINPVESRLGSSAASLYPVLNFLLYVPELAHSPLYIQDKDGAPVATNAFHSPRWGGIMVYNVDSKTYNASVLPVRVEVDMVRVMEVFLAQLRLLFGIAQPQLPPKCLLSGPTSEGLMTWELDRLLWARSVENLATATTTLTSLAQLLGKISNIVIKDDVASEVYKAVAAVQKSAEELASGHLASAFVASQEAVTSSELAFFDPSLLHLLYFPDDQKFAIYIPLFLPMAVPILLSLVKIFLETRKSWRKPEKTD

SEQ ID NO: 31280 - protein, 643 aa, Homo sapiens
MGQESSKPVWPNPTGGYQSNTGRRYGRRHAYVSFRPPTSQRERIASQRKTNSEVPMHRSAPSQTTKRSRSPFSTTRRSWDDSESSGTNLNIDNEDYSRYPPREYRASGSRRGMAYGHIDSYGADDSEEEGAGPVERPPVRGKTGKFKDDKLYDPEKGARSLAGPPPHFSSFSRDVREERDKLDPVPAARCSASRADFLPQSSVASQSSSEGKLATKGDSSERERREQNLPARPSRAPVSICGGGENTSKSAEEPVVRPKIRNLASPNCVKPKIFFDTDDDDDMPHSTSRWRDTANDNEGHSDGLARRGRGESSSGYPEPKYPEDKREARSDQVKPEKVPRRRRTMADPDFWTHSDDYYKYCDEDSDSDKEWIAALRRKYRSREQTLSSSGESWETLPGKEEREPPQAKVSASTGTSPGPGASASAGAGAGASAGSNGSNYLEEVREPSLQEEQASLEEGEIPWLQYHENDSSSEGDNDSGHELMQPGVFMLDGNNNLEDDSSVSEDLEVDWSLFDGFADGLGVAEAISYVDPQFLTYMALEERLAQAMETALAHLESLAVDVEVANPPASKESIDALPEILVTEDHGAVGQEMCCPICCSEYVKGEVATELPCHHYFHKPCVSIWLQKSGTCPVCRCMFPPPL

SEQ ID NO: 31281 - protein, 455 aa, Homo sapiens
MGQESSKPVWPNPTGGYQSNTGRRYGRRHAYVSFRPPTSQRERIASQRKTNSEVPMHRSAPSQTTKRSRSPFSTTRRSWDDSESSGTNLNIDNEDYSSTSRWRDTANDNEGHSDGLARRGRGESSSGYPEPKYPEDKREARSDQVKPEKVPRRRRTMADPDFWTHSDDYYKYCDEDSDSDKEWIAALRRKYRSREQTLSSSGESWETLPGKEEREPPQAKVSASTGTSPGPGASASAGAGAGASAGSNGSNYLEEVREPSLQEEQASLEEGEIPWLQYHENDSSSEGDNDSGHELMQPGVFMLDGNNNLEDDSSVSEDLEVDWSLFDGFADGLGVAEAISYVDPQFLTYMALEERLAQAMETALAHLESLAVDVEVANPPASKESIDALPEILVTEDHGAVGQEMCCPICCSEYVKGEVATELPCHHYFHKPCVSIWLQKSGTCPVCRCMFPPPL

SEQ ID NO: 31282 - protein, 588 aa, Homo sapiens
MHRSAPSQTTKRSRSPFSTTRRSWDDSESSGTNLNIDNEDYSRYPPREYRASGSRRGMAYGHIDSYGADDSEEEGAGPVERPPVRGKTGKFKDDKLYDPEKGARSLAGPPPHFSSFSRDVREERDKLDPVPAARCSASRADFLPQSSVASQSSSEGKLATKGDSSERERREQNLPARPSRAPVSICGGGENTSKSAEEPVVRPKIRNLASPNCVKPKIFFDTDDDDDMPHSTSRWRDTANDNEGHSDGLARRGRGESSSGYPEPKYPEDKREARSDQVKPEKVPRRRRTMADPDFWTHSDDYYKYCDEDSDSDKEWIAALRRKYRSREQTLSSSGESWETLPGKEEREPPQAKVSASTGTSPGPGASASAGAGAGASAGSNGSNYLEEVREPSLQEEQASLEEGEIPWLQYHENDSSSEGDNDSGHELMQPGVFMLDGNNNLEDDSSVSEDLEVDWSLFDGFADGLGVAEAISYVDPQFLTYMALEERLAQAMETALAHLESLAVDVEVANPPASKESIDALPEILVTEDHGAVGQEMCCPICCSEYVKGEVATELPCHHYFHKPCVSIWLQKSGTCPVCRCMFPPPL

SEQ ID NO: 31283 - protein, 314 aa, Homo sapiens
MYKMEYSYLNSSAYESCMAGMDTSSLASAYADFSSCSQASGFQYNPIRTTFGATSGCPSLTPGSCSLGTLRDHQSSPYAAVPYKLFTDHGGLNEKRKQRRIRTTFTSAQLKELERVFAETHYPDIYTREELALKIDLTEARVQVWFQNRRAKFRKQERAAAAAAAAAKNGSSGKKSDSSRDDESKEAKSTDPDSTGGPGPNPNPTPSCGANGGGGGGPSPAGAPGAAGPGGPGGEPGKGGAAAAAAAAAAAAAAAAAAAAGGLAAAGGPGQGWAPGPGPITSIPDSLGGPFASVLSSLQRPNGAKAALVKSSMF

SEQ ID NO: 31284 - protein, 708 aa, Homo sapiens
MSQYTEKEPAAMDQESGKAVWPKPAGGYQTITGRRYGRRHAYVSFKPCMTRHERSLGRAGDDYEVLELDDVPKENSSGSSPLDQVDSSLPSEPIFEKSETEIPTCGSALNQTTESSQSFVAVHHSEEGRDTLGSSTNLHNHSEGEYIPGACSASSVQNGIALVHTDSYDPDGKHGEDNDHLQLSAEVVEGSRYQESLGNTVFELENREAEAYTGLSPPVPSFNCEVRDEFEELDSVPLVKSSAGDTEFVHQNSQEIQRSSQDEMVSTKQQNNTSQERQTEHSPEDAACGPGHICSEQNTNDREKNHGSSPEQVVRPKVRKLISSSQVDQETGFNRHEAKQRSVQRWREALEVEESGSDDLLIKCEEYDGEHDCMFLDPPYSRVITQRETENNQMTSESGATAGRQEVDNTFWNGCGDYYQLYDKDEDSSECSDGEWSASLPHRFSGTEKDQSSSDESWETLPGKDENEPELQSDSSGPEEENQELSLQEGEQTSLEEGEIPWLQYNEVNESSSDEGNEPANEFAQPAFMLDGNNNLEDDSSVSEDLDVDWSLFDGFADGLGVAEAISYVDPQFLTYMALEERLAQAMETALAHLESLAVDVEVANPPASKESIDGLPETLVLEDHTAIGQEQCCPICCSEYIKDDIATELPCHHFFHKPCVSIWLQKSGTCPVCRRHFPPAVIEASAAPSSEPDPDAPPSNDSIAEAP

SEQ ID NO: 31285 - protein, 688 aa, Homo sapiens
MSQYTEKEPAAMDQESGKAVWPKPAGGYQTITGRRYGRRHAYVSFKPCMTRHERSLGRAGDDYEVLELDDVPKENSSGSSPLDQVDSSLPSEPIFEKSETEIPTCGSALNQTTESSQSFVAVHHSEEGRDTLGSSTNLHNHSEGEYIPGACSASSVQNGIALVHTDSYDPDGKHGEDNDHLQLSAEVVEGSRYQESLGNTVFELENREAEAYTGLSPPVPSFNCEVRDEFEELDSVPLVKSSAGDTEFVHQNSQEIQRSSQDEMVSTKQQNNTSQERQTEHSPEDAACGPGHICSEQNTNDREKNHGSSPEQVVRPKVRKLISSSQVDQETGFNRHEAKQRSVQRWREALEVEESGSDDLLIKCEEYDGEHDCMFLDPPYSRVITQRETENNQMTSESGATAGRQEVDNTFWNGCGDYYQLYDKDEDSSECSDGEWSASLPHRFSGTEKDQSSSDESWETLPGKDENEPELQSDSSGPEEENQELSLQEGEQTSLEEGEIPWLQYNEVNESSSDEGNEPANEFAQPAFMLDGNNNLEDDSSVSEAISYVDPQFLTYMALEERLAQAMETALAHLESLAVDVEVANPPASKESIDGLPETLVLEDHTAIGQEQCCPICCSEYIKDDIATELPCHHFFHKPCVSIWLQKSGTCPVCRRHFPPAVIEASAAPSSEPDPDAPPSNDSIAEAP

SEQ ID NO: 31286 - protein, 628 aa, Homo sapiens
MAELGELKHMVMSFRVSELQVLLGFAGRNKSGRKHELLAKALHLLKSSCAPSVQMKIKELYRRRFPRKTLGPSDLSLLSLPPGTSPVGSPGPLAPIPPTLLAPGTLLGPKREVDMHPPLPQPVHPDVTMKPLPFYEVYGELIRPTTLASTSSQRFEEAHFTFALTPQQVQQILTSREVLPGAKCDYTIQVQLRFCLCETSCPQEDYFPPNLFVKVNGKLCPLPGYLPPTKNGAEPKRPSRPINITPLARLSATVPNTIVVNWSSEFGRNYSLSVYLVRQLTAGTLLQKLRAKGIRNPDHSRALIKEKLTADPDSEVATTSLRVSLMCPLGKMRLTVPCRALTCAHLQSFDAALYLQMNEKKPTWTCPVCDKKAPYESLIIDGLFMEILSSCSDCDEIQFMEDGSWCPMKPKKEASEVCPPPGYGLDGLQYSPVQGGDPSENKKKVEVIDLTIESSSDEEDLPPTKKHCSVTSAAIPALPGSKGVLTSGHQPSSVLRSPAMGTLGGDFLSSLPLHEYPPAFPLGADIQGLDLFSFLQTESQHYGPSVITSLDEQDALGHFFQYRGTPSHFLGPLAPTLGSSHCSATPAPPPGRVSSIVAPGGALREGHGGPLPSGPSLTGCRSDIISLD

SEQ ID NO: 31287 - protein, 578 aa, Homo sapiens
MAAAMPLALLVLLLLGPGGWCLAEPPRDSLREELVITPLPSGDVAATFQFRTRWDSELQREGVSHYRLFPKALGQLISKYSLRELHLSFTQGFWRTRYWGPPFLQAPSGAELWVWFQDTVTDVDKSWKELSNVLSGIFCASLNFIDSTNTVTPTASFKPLGLANDTDHYFLRYAVLPREVVCTENLTPWKKLLPCSSKAGLSVLLKADRLFHTSYHSQAVHIRPVCRNARCTSISWELRQTLSVVFDAFITGQGKKDWSLFRMFSRTLTEPCPLASESRVYVDITTYNQDNETLEVHPPPTTTYQDVILGTRKTYAIYDLLDTAMINNSRNLNIQLKWKRPPENEAPPVPFLHAQRYVSGYGLQKGELSTLLYNTHPYRAFPVLLLDTVPWYLRLYVHTLTITSKGKENKPSYIHYQPAQDRLQPHLLEMLIQLPANSVTKVSIQFERALLKWTEYTPDPNHGFYVSPSVLSALVPSMVAAKPVDWEESPLFNSLFPVSDGSNYFVRLYTEPLLVNLPTPDFSMPYNVICLTCTVVAVCYGSFYNLLTRTFHIEEPRTGGLAKRLANLIRRARGVPPL

SEQ ID NO: 31288 - protein, 384 aa, Homo sapiens
MAAAMPLALLVLLLLGPGGWCLAEPPRDSLREELVITPLPSGDVAATFQFRTRWDSELQREGDWSLFRMFSRTLTEPCPLASESRVYVDITTYNQDNETLEVHPPPTTTYQDVILGTRKTYAIYDLLDTAMINNSRNLNIQLKWKRPPENEAPPVPFLHAQRYVSGYGLQKGELSTLLYNTHPYRAFPVLLLDTVPWYLRLYVHTLTITSKGKENKPSYIHYQPAQDRLQPHLLEMLIQLPANSVTKVSIQFERALLKWTEYTPDPNHGFYVSPSVLSALVPSMVAAKPVDWEESPLFNSLFPVSDGSNYFVRLYTEPLLVNLPTPDFSMPYNVICLTCTVVAVCYGSFYNLLTRTFHIEEPRTGGLAKRLANLIRRARGVPPL

SEQ ID NO: 31289 - protein, 367 aa, Homo sapiens
MWIPRGQSPRPTPDRPLSPSDTDHYFLRYAVLPREVVCTENLTPWKKLLPCSSKAGLSVLLKADRLFHTSYHSQAVHIRPVCRNARCTSISWELRQTLSVVFDAFITGQGKKDWSLFRMFSRTLTEPCPLASESRVYVDITTYNQDNETLEVHPPPTTTYQDVILGTRKTYAIYDLLDTAMINNSRNLNIQLKWKRPPENGYIHYQPAQDRLQPHLLEMLIQLPANSVTKVSIQFERALLKWTEYTPDPNHGFYVSPSVLSALVPSMVAAKPVDWEESPLFNSLFPVSDGSNYFVRLYTEPLLVNLPTPDFSMPYNVICLTCTVVAVCYGSFYNLLTRTFHIEEPRTGGLAKRLANLIRRARGVPPL

SEQ ID NO: 31290 - protein, 476 aa, Homo sapiens
MAAAMPLALLVLLLLGPGGWCLAEPPRDSLREELVITPLPSGDVAATFQFRTRWDSELQREGDTDHYFLRYAVLPREVVCTENLTPWKKLLPCSSKAGLSVLLKADRLFHTSYHSQAVHIRPVCRNARCTSISWELRQTLSVVFDAFITGQGKKDWSLFRMFSRTLTEPCPLASESRVYVDITTYNQDNETLEVHPPPTTTYQDVILGTRKTYAIYDLLDTAMINNSRNLNIQLKWKRPPENEAPPVPFLHAQRYVSGYGLQKGELSTLLYNTHPYRAFPVLLLDTVPWYLRLYVHTLTITSKGKENKPSYIHYQPAQDRLQPHLLEMLIQLPANSVTKVSIQFERALLKWTEYTPDPNHGFYVSPSVLSALVPSMVAAKPVDWEESPLFNSLFPVSDGSNYFVRLYTEPLLVNLPTPDFSMPYNVICLTCTVVAVCYGSFYNLLTRTFHIEEPRTGGLAKRLANLIRRARGVPPL

SEQ ID NO: 31291 - protein, 522 aa, Homo sapiens
MAAAMPLALLVLLLLGPGGWCLAEPPRDSLREELVITPLPSGDVAATFQFRTRWDSELQREGVSHYRLFPKALGQLISKYSLRELHLSFTQGFWRTRYWGPPFLQAPSDTDHYFLRYAVLPREVVCTENLTPWKKLLPCSSKAGLSVLLKADRLFHTSYHSQAVHIRPVCRNARCTSISWELRQTLSVVFDAFITGQGKKDWSLFRMFSRTLTEPCPLASESRVYVDITTYNQDNETLEVHPPPTTTYQDVILGTRKTYAIYDLLDTAMINNSRNLNIQLKWKRPPENEAPPVPFLHAQRYVSGYGLQKGELSTLLYNTHPYRAFPVLLLDTVPWYLRLYVHTLTITSKGKENKPSYIHYQPAQDRLQPHLLEMLIQLPANSVTKVSIQFERALLKWTEYTPDPNHGFYVSPSVLSALVPSMVAAKPVDWEESPLFNSLFPVSDGSNYFVRLYTEPLLVNLPTPDFSMPYNVICLTCTVVAVCYGSFYNLLTRTFHIEEPRTGGLAKRLANLIRRARGVPPL

SEQ ID NO: 31292 - protein, 511 aa, Homo sapiens
MAAAMPLALLVLLLLGPGGWCLAEPPRDSLREELVITPLPSGDVAATFQFRTRWDSELQREGVSHYRLFPKALGQLISKYSLRELHLSFTQGFWRTRYWGPPFLQAPSGAELWVWFQDTVTDVDKSWKELSNVLSGIFCASLNFIDSTNTVTPTASFKPLGLANDTDHYFLRYAVLPREVVCTENLTPWKKLLPCSSKAGLSVLLKADRLFHTSYHSQAVHIRPVCRNARCTSISWELRQTLSVVFDAFITGQGKKDWSLFRMFSRTLTEPCPLASESRVYVDITTYNQDNETLEVHPPPTTTYQDVILGTRKTYAIYDLLDTAMINNSRNLNIQLKWKRPPENGYIHYQPAQDRLQPHLLEMLIQLPANSVTKVSIQFERALLKWTEYTPDPNHGFYVSPSVLSALVPSMVAAKPVDWEESPLFNSLFPVSDGSNYFVRLYTEPLLVNLPTPDFSMPYNVICLTCTVVAVCYGSFYNLLTRTFHIEEPRTGGLAKRLANLIRRARGVPPL

SEQ ID NO: 31293 - protein, 310 aa, Homo sapiens
MPLLVEGRRVRLPQSAGDLVRAHPPLEERARLLRGQSVQQVGPQGLLYVQQRELAVTSPKDGSISILGSDDATTCHIVVLRHTGNGATCLTHCDGTDTKAEVPLIMNSIKSFSDHAQCGRLEVHLVGGFSDDRQLSQKLTHQLLSEFDRQEDDIHLVTLCVTELNDREENENHFPVIYGIAVNIKTAEIYRASFQDRGPEEQLRAARTLAGGPMISIYDAETEQLRIGPYSWTPFPHVDFWLHQDDKQILENLSTSPLAEPPHFVEHIRSTLMFLKKHPSPAHTLFSGNKALLYKKNEDGLWEKISSPGS

SEQ ID NO: 31294 - protein, 392 aa, Homo sapiens
MELVAGCYEQVLFGFAVHPEPEACGDHEQWTLVADFTHHAHTASLSAVAVNSRFVVTGSKDETIHIYDMKKKIEHGALVHHSGTITCLKFYGNRHLISGAEDGLICIWDAKKWECLKSIKAHKGQVTFLSIHPSGKLALSVGTDKTLRTWNLVEGRSAFIKNIKQNAHIVEWSPRGEQYVVIIQNKIDIYQLDTASISGTITNEKRISSVKFLSESVLAVAGDEEVIRFFDCDSLVCLCEFKAHENRVKDMFSFEIPEHHVIVSASSDGFIKMWKLKQDKKVPPSLLCEINTNARLTCLGVWLDKVADMKESLPPAAEPSPVSKEQSKIGKKEPGDTVHKEEKRSKPNTKKRGLTGDSKKATKESGLISTKKRKMVEMLEKKRKKKKIKTMQ

SEQ ID NO: 31295 - protein, 258 aa, Homo sapiens
MAARVAAVRAAAWLLLGAATGLTRGPAAAFTAARSDAGIRAMCSEIILRQEVLKDGFHRDLLIKVKFGESIEDLHTCRLLIKQDIPAGLYVDPYELASLRERNITEAVMVSENFDIEAPNYLSKESEVLIYARRDSQCIDCFQAFLPVHCRYHRPHSEDGEASIVVNNPDLLMFCDQEFPILKCWAHSEVAAPCALENEDICQWNKMKYKSVYKNVILQVPVGLTVHTSLVCSVTLLITILCSTLILVAVFKYGHFSL

SEQ ID NO: 31296 - protein, 276 aa, Homo sapiens
MAARVAAVRAAAWLLLGAATGLTRGPAAAFTAARSDAGIRAMCSEIILRQEVLKDGFHRDLLIKVKFGESIEDLHTCRLLIKQDIPAGLYVDPYELASLRERNITEAVMVSENFDIEAPNYLSKESEVLIYARRDSQCIDCFQAFLPVHCRYHRPHSEDGEASIVVNNPDLLMFCDQAGSRRMIRFRFDSFDKTIEFPILKCWAHSEVAAPCALENEDICQWNKMKYKSVYKNVILQVPVGLTVHTSLVCSVTLLITILCSTLILVAVFKYGHFSL

SEQ ID NO: 31297 - protein, 205 aa, Homo sapiens
MEGNGPAAVHYQPASPPRDACVYSSCYCEENIWKLCEYIKNHDQYPLEECYAVFISNERKMIPIWKQQARPGDGPVIWDYHVVLLHVSSGGQNFIYDLDTVLPFPCLFDTYVEDAFKSDDDIHPQFRRKFRVIRADSYLKNFASDRSHMKDSSGNWREPPPPYPCIETGDSKMNLNDFISMDPKVGWGAVYTLSEFTHRFGSKNC

SEQ ID NO: 31298 - protein, 145 aa, Homo sapiens
MIPIWKQQARPGDGPVIWDYHVVLLHVSSGGQNFIYDLDTVLPFPCLFDTYVEDAFKSDDDIHPQFRRKFRVIRADSYLKNFASDRSHMKDSSGNWREPPPPYPCIETGDSKMNLNDFISMDPKVGWGAVYTLSEFTHRFGSKNC

SEQ ID NO: 31299 - protein, 290 aa, Homo sapiens
MANPKLLGMGLSEAEAIGADSARFEELLLQASKELQQAQTTRPESTQIQPQPGFCIKTNSSEGKVFINICHSPSIPPPADVTEEELLQMLEEDQAGFRIPMSLGEPHAELDAKGQGCTAYDVAVNSDFYRRMQNSDFLRELVITIAREGLEDKYNLQLNPEWRMMKNRPFMGSISQQNIRSEQRPRIQELGDLYTPAPGRAESGPEKPHLNLWLEAPDLLLAEVDLPKLDGALGLSLEIGENRLVMGGPQQLYHLDAYIPLQINSHESKAAFHRKRKQLMVAMPLLPVPS

SEQ ID NO: 31300 - protein, 180 aa, Homo sapiens
MANPKLLGMGLSEAEAIGADSARFEELLLQLSCIRIAPFEEQMRGLMAQTPSLEVVFLYTGLEGAPASPDNQTRIDTNPASAWFLHKDQLLGREGFHQHLPLPLYPSSRRRDRGGAASDARGGPSWVSHPHESGRASCRTGCKRPGMYRLRRSCQQRLLPEDAEQRFLAGARDHHRQGGP

SEQ ID NO: 31301 - protein, 199 aa, Homo sapiens
MANPKLLGMGLSEAEAIGADSARFEELLLQASKELQQAQTTRPESTQIQPQPGFCIKTNSSEGKVFINICHSPSIPPPADVTEEELLQMLEEDQAGFRIPMSLGEPHAELDASQCPQRTQESGPLGPFFPRTQESWAQDPPPSAPGDLAPRSDSFPYGRSLVPWTSHTRAVLVLPPGQAGTFPCPTPGPGGLGRVLFVH

SEQ ID NO: 31302 - protein, 348 aa, Homo sapiens
MNDPNSCVDNATVCSGASCVVPESNFNNILSVVLSTVLTILLALVMFSMGCNVEIKKFLGHIKRPWGICVGFLCQFGIMPLTGFILSVAFDILPLQAVVVLIIGCCPGGTASNILAYWVDGDMDLSVSMTTCSTLLALGMMPLCLLIYTKMWVDSGSIVIPYDNIGTSLVSLVVPVSIGMFVNHKWPQKAKIILKIGSIAGAILIVLIAVVGGILYQSAWIIAPKLWIIGTIFPVAGYSLGFLLARIAGLPWYRCRTVAFETGMQNTQLCSTIVQLSFTPEELNVVFTFPLIYSIFQLAFAAIFLGFYVAYKKCHGKNKAEIPESKENGTEPESSFYKANGGFQPDEK

SEQ ID NO: 31303 - protein, 315 aa, Homo sapiens
METSSKGLLTQVTQFWNLLDDLAQSDPEGYEKFIQQQLKEGKQLCAAPEPQLCLQTRILKPKEKILFINLCQWTRIPAPQSTTHPVPLTVGKPEDTTEISDAYTVIDVAYNPDVLHAAEKDQVKKNQLIQMAMKCIEEKFQFTLSHSYHITKFRIKGSIQRMKQNLMGIQTDSIDLREKMRRELTLGQIRSSTMSNPDHFPQLLLPKDQVSGKAVCLIEEISSTEIQVEMKMPAYELKIVHDHSEKPLKIELKVELPGINSVSLCDLSVSEDDLLIEVSEKYRLHLNLPKLIDTEMTTAKFIKEKSTLIITMPLV

SEQ ID NO: 31304 - protein, 288 aa, Homo sapiens
METSSKGLLTQVTQFWNLLDDLAQSDPEGYEKFIQQQLKEGKQLCAAPEPQLCLQTRILKPKEKILFINLCQWTRIPAPQSTTHPVPLTVGKPEDTTEISDAYTVIDVAYNPDVLHAAEKDQVKKNQLIQMAMKCIEEKFQFTLSHSYHITKFRIKGSIQRMKQNLMGIQTDSIDLREKMRRELTLGQIRSSTMSNPDHFPQLLLPKDQVSGKAVCLIEEISSTEIQVEMKMPAYELKIVHDHSEKPLKIELKVELPGINSVSLCDLSVSEGTTEPQALAKDELSLKF

SEQ ID NO: 31305 - protein, 273 aa, Homo sapiens
METSSKGLLTQVTQFWNLLDDLAQSDPEGYEKFIQQQLKEGKQLCAAPEPQLCLQTRILKPKEKILFINLCQWTRIPAPQSTTHPVPLTVGKPEDTTEISDAYTVIDVAYNPDVLHAAEKDQVKKNQLIQMAMKCIEEKFQFTLSHSYHITKFRIKGSIQRMKQNLMGIQTDSIDLREKMRRELTLGQIRSSTMSNPDHFPQLLLPKDQVSGKAVCLIEEISSTEIQVEMKMPAYELKIVHDHSEKPLKIELKVELPGINSVSLCDLSVSEVS

SEQ ID NO: 31306 - protein, 535 aa, Homo sapiens
MSEGESQTVLSSGSDPKVESSSSAPGLTSVSPPVTSTTSAASPEEEEESEDESEILEESPCGRWQKRREEVNQRNVPGIDSAYLAMDTEEGVEVVWNEVQFSERKNYKLQEEKVRAVFDNLIQLEHLNIVKFHKYWADIKENKARVIFITEYMSSGSLKQFLKKTKKNHKTMNEKAWKRWCTQILSALSYLHSCDPPIIHGNLTCDTIFIQHNGLIKIGSVAPDTINNHVKTCREEQKNLHFFAPEYGEVTNVTTAVDIYSFGMCALEMAVLEIQGNGESSYVPQEAISSAIQLLEDPLQREFIQKCLQSEPARRPTARELLFHPALFEVPSLKLLAAHCIVGHQHMIPENALEEITKNMDTSAVLAEIPAGPGREPVQTLYSQSPALELDKFLEDVRNGIYPLTAFGLPRPQQPQQEEVTSPVVPPSVKTPTPEPAEVETRKVVLMQCNIESVEEGVKHHLTLLLKLEDKLNRHLSCDLMPNENIPELAAELVQLGFISEADQSRLTSLLEETLNKFNFARNSTLNSAAVTVSS

SEQ ID NO: 31307 - protein, 350 aa, Homo sapiens
MAGRLLGKALAAVSLSLALASVTIRSSRCRGIQAFRNSFSSSWFHLNTNVMSGSNGSKENSHNKARTSPYPGSKVERSQVPNEKVGWLVEWQDYKPVEYTAVSVLAGPRWADPQISESNFSPKFNEKDGHVERKSKNGLYEIENGRPRNPAGRTGLVGRGLLGRWGPNHAADPIITRWKRDSSGNKIMHPVSGKHILQFVAIKRKDCGEWAIPGGMVDPGEKISATLKREFGEEALNSLQKTSAEKREIEEKLHKLFSQDHLVIYKGYVDDPRNTDNAWMETEAVNYHDETGEIMDNLMLEAGDDAGKVKWVDINDKLKLYASHSQFIKLVAEKRDAHWSEDSEADCHAL

SEQ ID NO: 31308 - protein, 300 aa, Homo sapiens
MSGSNGSKENSHNKARTSPYPGSKVERSQVPNEKVGWLVEWQDYKPVEYTAVSVLAGPRWADPQISESNFSPKFNEKDGHVERKSKNGLYEIENGRPRNPAGRTGLVGRGLLGRWGPNHAADPIITRWKRDSSGNKIMHPVSGKHILQFVAIKRKDCGEWAIPGGMVDPGEKISATLKREFGEEALNSLQKTSAEKREIEEKLHKLFSQDHLVIYKGYVDDPRNTDNAWMETEAVNYHDETGEIMDNLMLEAGDDAGKVKWVDINDKLKLYASHSQFIKLVAEKRDAHWSEDSEADCHAL

SEQ ID NO: 31309 - protein, 328 aa, Homo sapiens
MAEVRVQLLLSRRPESVSFARSVCGLLGAGPGLGTWPIHCSLKRGRLVLSSRPFPGASARLPLQRPPFCPFAALEERPRVPGAELPTDRGVDLGVAVILQSSDKTVLLTRRARTLSVSPNLWVPPGGHVELEEELLDGGLRELWEESGLHLPQGQFSWVPLGLWESAYPPRLSWGLPKYHHIVLYLLVISQESQQQLQARIQPNPNEVSALMWLTPDVAAAVAAAEDGTETPGLLPQDLPPSVLAVELEEDGRARPLVLHMSTLLRMIPTMAEDKERVSTGTKFALKLWLQHLGRTPPPCKSAAYLDPGPAKEEWNMDPLPPNQGSGK

SEQ ID NO: 31310 - protein, 323 aa, Homo sapiens
MASEGLAGALASVLAGQGSSVHSCDSAPAGEPPAPVRLRKNVCYVVLAVFLSEQDEVLLIQEAKRECRGSWYLPAGRMEPGETIVEALQREVKEEAGLHCEPETLLSVEERGPSWVRFVFLARPTGGILKTSKEADAESLQAAWYPRTSLPTPLRAHDILHLVELAAQYRQQARHPLILPQELPCDLVCQRLVATFTSAQTVWVLVGTVGMPHLPVTACGLDPMEQRGGMKMAVLRLLQECLTLHHLVVEIKGLLGLQHLGRDHSDGICLNVLVTVAFRSPGIQDEPPKVRGENFSWWKVMEEDLQSQLLQRLQGSSVVPVNR

SEQ ID NO: 31311 - protein, 223 aa, Homo sapiens
MSVDSARAALLSTQTLPAPSPTSPPGGILKTSKEADAESLQAAWYPRTSLPTPLRAHDILHLVELAAQYRQQARHPLILPQELPCDLVCQRLVATFTSAQTVWVLVGTVGMPHLPVTACGLDPMEQRGGMKMAVLRLLQECLTLHHLVVEIKGLLGLQHLGRDHSDGICLNVLVTVAFRSPGIQDEPPKVRGENFSWWKVMEEDLQSQLLQRLQGSSVVPVNR

SEQ ID NO: 31312 - protein, 304 aa, Homo sapiens
MLQKPRNRGRSGGQAERDRDWSHSGNPGASRAGEDARVLRDGFAEEAPSTSRGPGGSQGSQGPSPQGARRAQAAPAVGPRSQKQLELKVSELVQFLLIKDQKKIPIKRADILKHVIGDYKDIFPDLFKRAAERLQYVFGYKLVELEPKSNTYILINTLEPVEEDAEMRGDQGTPTTGLLMIVLGLIFMKGNTIKETEAWDFLRRLGVYPTKKHLIFGDPKKLITEDFVRQRYLEYRRIPHTDPVDYEFQWGPRTNLETSKMKVLKFVAKVHNQDPKDWPAQYCEALADEENRARPQPSGPAPSS

SEQ ID NO: 31313 - protein, 219 aa, Homo sapiens
MKLLLWACIVCVAFARKRRFPFIGEDDNDDGHPLHPSLNIPYGIRNLPPPLYYRPVNTVPSYPGNTYTDTGLPSYPWILTSPGFPYVYHIRGFPLATQLNVPPLPPRGFPFVPPSRFFSAAAAPAAPPIAAEPAAAAPLTATPVAAEPAAGAPVAAEPAAEAPVGAEPAAEAPVAAEPAAEAPVGVEPAAEEPSPAEPATAKPAAPEPHPSPSLEQANQ

SEQ ID NO: 31314 - protein, 568 aa, Homo sapiens
MVLGPEQKMSDDSVSGDHGESASLGNINPAYSNPSLSQSPGDSEEYFATYFNEKISIPEEEYSCFSFRKLWAFTGPGFLMSIAYLDPGNIESDLQSGAVAGFKLLWILLLATLVGLLLQRLAARLGVVTGLHLAEVCHRQYPKVPRVILWLMVELAIIGSDMQEVIGSAIAINLLSVGRIPLWGGVLITIADTFVFLFLDKYGLRKLEAFFGFLITIMALTFGYEYVTVKPSQSQVLKGMFVPSCSGCRTPQIEQAVGIVGAVIMPHNMYLHSALVKSRQVNRNNKQEVREANKYFFIESCIALFVSFIINVFVVSVFAEAFFGKTNEQVVEVCTNTSSPHAGLFPKDNSTLAVDIYKGGVVLGCYFGPAALYIWAVGILAAGQSSTMTGTYSGQFVMEGFLNLKWSRFARVVLTRSIAIIPTLLVAVFQDVEHLTGMNDFLNVLQSLQLPFALIPILTFTSLRPVMSDFANGLGWRIAGGILVLIICSINMYFVVVYVRDLGHVALYVVAAVVSVAYLGFVFYLGWQCLIALGMSFLDCGHTCHLGLTAQPELYLLNTMDADSLVSR

SEQ ID NO: 31315 - protein, 561 aa, Homo sapiens
MVLGPEQKMSDDSVSGDHGESASLGNINPAYSNPSLSQSPGDSEEYFATYFNEKISIPEEEYSCFSFRKLWAFTGPGFLMSIAYLDPGNIESDLQSGAVAGFKLLWILLLATLVGLLLQRLAARLGVVTGLHLAEVCHRQYPKVPRVILWLMVELAIIGSDMQEVIGSAIAINLLSVGRIPLWGGVLITIADTFVFLFLDKYGLRKLEAFFGFLITIMALTFGYEYVTVKPSQSQVLKGMFVPSCSGCRTPQIEQAVGIVGAVIMPHNMYLHSALVKSRQVNRNNKQEVREANKYFFIESCIALFVSFIINVFVVSVFAEAFFGKTNEQVVEVCTNTSSPHAGLFPKDNSTLAVDIYKGGVVLGCYFGPAALYIWAVGILAAGQSSTMTGTYSGQFVMEGFLNLKWSRFARVVLTRSIAIIPTLLVAVFQDVEHLTGMNDFLNVLQSLQLPFALIPILTFTSLRPVMSDFANGLGWRIAGGILVLIICSINMYFVVVYVRDLGHVALYVVAAVVSVAYLGFVFYLGWQCLIALGMSFLDCGHTVSISKGLLTEEATRGYVK

SEQ ID NO: 31316 - protein, 590 aa, Homo sapiens
MRKKQLKTEAAPHCELKSYSKNSATQVSTMVLGPEQKMSDDSVSGDHGESASLGNINPAYSNPSLSQSPGDSEEYFATYFNEKISIPEEEYSCFSFRKLWAFTGPGFLMSIAYLDPGNIESDLQSGAVAGFKLLWILLLATLVGLLLQRLAARLGVVTGLHLAEVCHRQYPKVPRVILWLMVELAIIGSDMQEVIGSAIAINLLSVGRIPLWGGVLITIADTFVFLFLDKYGLRKLEAFFGFLITIMALTFGYEYVTVKPSQSQVLKGMFVPSCSGCRTPQIEQAVGIVGAVIMPHNMYLHSALVKSRQVNRNNKQEVREANKYFFIESCIALFVSFIINVFVVSVFAEAFFGKTNEQVVEVCTNTSSPHAGLFPKDNSTLAVDIYKGGVVLGCYFGPAALYIWAVGILAAGQSSTMTGTYSGQFVMEGFLNLKWSRFARVVLTRSIAIIPTLLVAVFQDVEHLTGMNDFLNVLQSLQLPFALIPILTFTSLRPVMSDFANGLGWRIAGGILVLIICSINMYFVVVYVRDLGHVALYVVAAVVSVAYLGFVFYLGWQCLIALGMSFLDCGHTVSISKGLLTEEATRGYVK

SEQ ID NO: 31317 - protein, 597 aa, Homo sapiens
MRKKQLKTEAAPHCELKSYSKNSATQVSTMVLGPEQKMSDDSVSGDHGESASLGNINPAYSNPSLSQSPGDSEEYFATYFNEKISIPEEEYSCFSFRKLWAFTGPGFLMSIAYLDPGNIESDLQSGAVAGFKLLWILLLATLVGLLLQRLAARLGVVTGLHLAEVCHRQYPKVPRVILWLMVELAIIGSDMQEVIGSAIAINLLSVGRIPLWGGVLITIADTFVFLFLDKYGLRKLEAFFGFLITIMALTFGYEYVTVKPSQSQVLKGMFVPSCSGCRTPQIEQAVGIVGAVIMPHNMYLHSALVKSRQVNRNNKQEVREANKYFFIESCIALFVSFIINVFVVSVFAEAFFGKTNEQVVEVCTNTSSPHAGLFPKDNSTLAVDIYKGGVVLGCYFGPAALYIWAVGILAAGQSSTMTGTYSGQFVMEGFLNLKWSRFARVVLTRSIAIIPTLLVAVFQDVEHLTGMNDFLNVLQSLQLPFALIPILTFTSLRPVMSDFANGLGWRIAGGILVLIICSINMYFVVVYVRDLGHVALYVVAAVVSVAYLGFVFYLGWQCLIALGMSFLDCGHTCHLGLTAQPELYLLNTMDADSLVSR

SEQ ID NO: 31318 - protein, 557 aa, Homo sapiens
MSTVDYLNSVSGDHGESASLGNINPAYSNPSLSQSPGDSEEYFATYFNEKISIPEEEYSCFSFRKLWAFTGPGFLMSIAYLDPGNIESDLQSGAVAGFKLLWILLLATLVGLLLQRLAARLGVVTGLHLAEVCHRQYPKVPRVILWLMVELAIIGSDMQEVIGSAIAINLLSVGRIPLWGGVLITIADTFVFLFLDKYGLRKLEAFFGFLITIMALTFGYEYVTVKPSQSQVLKGMFVPSCSGCRTPQIEQAVGIVGAVIMPHNMYLHSALVKSRQVNRNNKQEVREANKYFFIESCIALFVSFIINVFVVSVFAEAFFGKTNEQVVEVCTNTSSPHAGLFPKDNSTLAVDIYKGGVVLGCYFGPAALYIWAVGILAAGQSSTMTGTYSGQFVMEGFLNLKWSRFARVVLTRSIAIIPTLLVAVFQDVEHLTGMNDFLNVLQSLQLPFALIPILTFTSLRPVMSDFANGLGWRIAGGILVLIICSINMYFVVVYVRDLGHVALYVVAAVVSVAYLGFVFYLGWQCLIALGMSFLDCGHTVSISKGLLTEEATRGYVK

SEQ ID NO: 31319 - protein, 237 aa, Homo sapiens
MALPPSPLAMEYVNDFDLMKFEVKREPSEGRPGPPTASLGSTPYSSVPPSPTFSEPGMVGATEGTRPGLEELYWLATLQQQLGAGEALGLSPEEAMELLQGQGPVPVDGPHGYYPGSPEETGAQHVQLAERFSDAALVSMSVRELNRQLRGCGRDEALRLKQRRRTLKNRGYAQACRSKRLQQRRGLEAERARLAAQLDALRAEVARLARERDLYKARCDRLTSSGPGSGDPSHLFL

SEQ ID NO: 31320 - protein, 98 aa, Homo sapiens
MSVRELNRQLRGCGRDEALRLKQRRRTLKNRGYAQACRSKRLQQRRGLEAERARLAAQLDALRAEVARLARERDLYKARCDRLTSSGPGSGDPSHLFL

SEQ ID NO: 31321 - protein, 281 aa, Homo sapiens
MLFIFPLSLPWRPSCWKESCSTGQRQAGRSREDSVTPPPSSPWPTPPAGAMSTKQEARRDEGEARTRGQEAQLRDRAHLSQQRRLKQATQFLHKDSADLLPLDSLKRLGTSKDLQPRSVIQRRLVEGNPNWLQGEPPRMQDLIHGQESRRKTSRTEIPALLVNCKCQDQLLRVAVDTGTQYNRISAGCLSRLGLEKRVLKASAGDLAPGPPTQVEQLELQLGQETVVCSAQVVDAESPEFCLGLQTLLSLKCCIDLEHGVLRLKAPFSELPFLPLYQEPGQ

SEQ ID NO: 31322 - protein, 270 aa, Homo sapiens
MLFIFPLSLPWRPSCWKESCSTGQRQAGRSREDSVTPPPSSPWPTPPAGAMSTKQEARRDEGEARTRGQEAQLRDRAHLSLHKDSADLLPLDSLKRLGTSKDLQPRSVIQRRLVEGNPNWLQGEPPRMQDLIHGQESRRKTSRTEIPALLVNCKCQDQLLRVAVDTGTQYNRISAGCLSRLGLEKRVLKASAGDLAPGPPTQVEQLELQLGQETVVCSAQVVDAESPEFCLGLQTLLSLKCCIDLEHGVLRLKAPFSELPFLPLYQEPGQ

SEQ ID NO: 31323 - protein, 199 aa, Homo sapiens
MKTFIIGISGVTNSGKTTLAKNLQKHLPNCSVISQDDFFKPESEIETDKNGFLQYDVLEALNMEKMMSAISCWMESARHSVVSTDQESAEEIPILIIEGFLLFNYKPLDTIWNRSYFLTIPYEECKRRRSTRVYQPPDSPGYFDGHVWPMYLKYRQEMQDITWEVVYLDGTKSEEDLFLQVYEDLIQELAKQKCLQVTA

SEQ ID NO: 31324 - protein, 175 aa, Homo sapiens
MKTFIIGISGVTNSGKTTLAKNLQKHLPNCSVISQDDFFKPESEIETDKNGFLQYDVLEALNMEKMMSAISCWMESARHSVVSTDQESAEEIPILIIEGFLLFNYNTRVYQPPDSPGYFDGHVWPMYLKYRQEMQDITWEVVYLDGTKSEEDLFLQVYEDLIQELAKQKCLQVTA

SEQ ID NO: 31325 - protein, 142 aa, Homo sapiens
MGLKLNGRYISLILAVQIAYLVQAVRAAGKCDAVFKGFSDCLLKLGDSMANYPQGLDDKTNIKTVCTYWEDFHSCTVTALTDCQEGAKDMWDKLRKESKNLNIQGSLFELCGSGNGAAGSLLPAFPVLLVSLSAALATWLSF

SEQ ID NO: 31326 - protein, 68 aa, Homo sapiens
MVYYPELFVWVSQEPFPNKDMEGRLPKGRLPVPKEVNRKKNDETNAASLTPLGSSELRSPRISYLHFF

SEQ ID NO: 31327 - protein, 112 aa, Homo sapiens
MKGVWNYSALSRREDETRTQRSRMTDRVPCSKCFQVHCQISVLNCVYYPELFVWVSQEPFPNKDMEGRLPKGRLPVPKEVNRKKNDETNAASLTPLGSSELRSPRISYLHFF

SEQ ID NO: 31328 - protein, 262 aa, Homo sapiens
MAPALLLIPAALASFILAFGTGVEFVRFTSLRPLLGGIPESGGPDARQGWLAALQDRSILAPLAWDLGLLLLFVGQHSLMAAERVKAWTSRYFGVLQRSLYVACTALALQLVMRYWEPIPKGPVLWEARAEPWATWVPLLCFVLHVISWLLIFSILLVFDYAELMGLKQVYYHVLGLGEPLALKSPRALRLFSHLRHPVCVELLTVLWVVPTLGTDRLLLAFLLTLYLGLAHGLDQQDLRYLRAQLQRKLHLLSRPQDGEAE

SEQ ID NO: 31329 - protein, 203 aa, Homo sapiens
MAPALLLIPAALASFILAFGTGVEFVRFTSLRPLLGGIPESGGPDARQGWLAALQDRSILAPLAWDLGLLLLFVGQHSLMAAERVKAWTSRYFGVLQRSLYVACTALALQVYYHVLGLGEPLALKSPRALRLFSHLRHPVCVELLTVLWVVPTLGTDRLLLAFLLTLYLGLAHGLDQQDLRYLRAQLQRKLHLLSRPQDGEAE

SEQ ID NO: 31330 - protein, 109 aa, Homo sapiens
MAPALLLIPAALASFILAFGTGVEFVRFTSLRPLLGGIPESGGPGILPCAGAGRASGPEVSPGSQTLLPPAPPSVCGAADSAVGGAYPGHGPSPPCFPPYPLPGPGSRA

SEQ ID NO: 31331 - protein, 839 aa, Homo sapiens
MDVSLCPAKCSFWRIFLLGSVWLDYVGSVLACPANCVCSKTEINCRRPDDGNLFPLLEGQDSGNSNGNASINITDISRNITSIHIENWRSLHTLNAVDMELYTGLQKLTIKNSGLRSIQPRAFAKNPHLRYINLSSNRLTTLSWQLFQTLSLRELQLEQNFFNCSCDIRWMQLWQEQGEAKLNSQNLYCINADGSQLPLFRMNISQCDLPEISVSHVNLTVREGDNAVITCNGSGSPLPDVDWIVTGLQSINTHQTNLNWTNVHAINLTLVNVTSEDNGFTLTCIAENVVGMSNASVALTVYYPPRVVSLEEPELRLEHCIEFVVRGNPPPTLHWLHNGQPLRESKIIHVEYYQEGEISEGCLLFNKPTHYNNGNYTLIAKNPLGTANQTINGHFLKEPFPESTDNFILFDEVSPTPPITVTHKPEEDTFGVSIAVGLAAFACVLLVVLFVMINKYGRRSKFGMKGPVAVISGEEDSASPLHHINHGITTPSSLDAGPDTVVIGMTRIPVIENPQYFRQGHNCHKPDTYVQHIKRRDIVLKRELGEGAFGKVFLAECYNLSPTKDKMLVAVKALKDPTLAARKDFQREAELLTNLQHEHIVKFYGVCGDGDPLIMVFEYMKHGDLNKFLRAHGPDAMILVDGQPRQAKGELGLSQMLHIASQIASGMVYLASQHFVHRDLATRNCLVGANLLVKIGDFGMSRDVYSTDYYRLFNPSGNDFCIWCEVGGHTMLPIRWMPPESIMYRKFTTESDVWSFGVILWEIFTYGKQPWFQLSNTEVIECITQGRVLERPRVCPKEVYDVMLGCWQREPQQRLNIKEIYKILHALGKATPIYLDILG

SEQ ID NO: 31332 - protein, 612 aa, Homo sapiens
MDVSLCPAKCSFWRIFLLGSVWLDYVGSVLACPANCVCSKTEINCRRPDDGNLFPLLEGQDSGNSNGNASINITDISRNITSIHIENWRSLHTLNAVDMELYTGLQKLTIKNSGLRSIQPRAFAKNPHLRYINLSSNRLTTLSWQLFQTLSLRELQLEQNFFNCSCDIRWMQLWQEQGEAKLNSQNLYCINADGSQLPLFRMNISQCDLPEISVSHVNLTVREGDNAVITCNGSGSPLPDVDWIVTGLQSINTHQTNLNWTNVHAINLTLVNVTSEDNGFTLTCIAENVVGMSNASVALTVYYPPRVVSLEEPELRLEHCIEFVVRGNPPPTLHWLHNGQPLRESKIIHVEYYQEGEISEGCLLFNKPTHYNNGNYTLIAKNPLGTANQTINGHFLKEPFPESTDNFILFDEVSPTPPITVTHKPEEDTFGVSIAVGLAAFACVLLVVLFVMINKYGRRSKFGMKGPVAVISGEEDSASPLHHINHGITTPSSLDAGPDTVVIGMTRIPVIENPQYFRQGHNCHKPDTWVFSNIDNHGILNLKDNRDHLVPSTHYIYEEPEVQSGEVSYPRSHGFREIMLNPISLPGHSKPLNHGIYVEDVNVYFSKGRHGF

SEQ ID NO: 31333 - protein, 825 aa, Homo sapiens
MDVSLCPAKCSFWRIFLLGSVWLDYVGSVLACPANCVCSKTEINCRRPDDGNLFPLLEGQDSGNSNGNASINITDISRNITSIHIENWRSLHTLNAVDMELYTGLQKLTIKNSGLRSIQPRAFAKNPHLRYINLSSNRLTTLSWQLFQTLSLRELQLEQNFFNCSCDIRWMQLWQEQGEAKLNSQNLYCINADGSQLPLFRMNISQCDLPEISVSHVNLTVREGDNAVITCNGSGSPLPDVDWIVTGLQSINTHQTNLNWTNVHAINLTLVNVTSEDNGFTLTCIAENVVGMSNASVALTVYYPPRVVSLEEPELRLEHCIEFVVRGNPPPTLHWLHNGQPLRESKIIHVEYYQEGEISEGCLLFNKPTHYNNGNYTLIAKNPLGTANQTINGHFLKEPFPESTDNFILFDEVSPTPPITVTHKPEEDTFGVSIAVGLAAFACVLLVVLFVMINKYGRRSKFGMKGPVAVISGEEDSASPLHHINHGITTPSSLDAGPDTVVIGMTRIPVIENPQYFRQGHNCHKPDTYVQHIKRRDIVLKRELGEGAFGKVFLAECYNLSPTKDKMLVAVKALKDPTLAARKDFQREAELLTNLQHEHIVKFYGVCGDGDPLIMVFEYMKHGDLNKFLRAHGPDAMILVDGQPRQAKGELGLSQMLHIASQIASGMVYLASQHFVHRDLATRNCLVGANLLVKIGDFGMSRDVYSTDYYRVGGHTMLPIRWMPPESIMYRKFTTESDVWSFGVILWEIFTYGKQPWFQLSNTEVIECITQGRVLERPRVCPKEVYDVMLGCWQREPQQRLNIKEIYKILHALGKATPIYLDILG

SEQ ID NO: 31334 - protein, 831 aa, Homo sapiens
MDVSLCPAKCSFWRIFLLGSVWLDYVGSVLACPANCVCSKTEINCRRPDDGNLFPLLEGQDSGNSNGNASINITDISRNITSIHIENWRSLHTLNAVDMELYTGLQKLTIKNSGLRSIQPRAFAKNPHLRYINLSSNRLTTLSWQLFQTLSLRELQLEQNFFNCSCDIRWMQLWQEQGEAKLNSQNLYCINADGSQLPLFRMNISQCDLPEISVSHVNLTVREGDNAVITCNGSGSPLPDVDWIVTGLQSINTHQTNLNWTNVHAINLTLVNVTSEDNGFTLTCIAENVVGMSNASVALTVYYPPRVVSLEEPELRLEHCIEFVVRGNPPPTLHWLHNGQPLRESKIIHVEYYQEGEISEGCLLFNKPTHYNNGNYTLIAKNPLGTANQTINGHFLKEPFPVDEVSPTPPITVTHKPEEDTFGVSIAVGLAAFACVLLVVLFVMINKYGRRSKFGMKGPVAVISGEEDSASPLHHINHGITTPSSLDAGPDTVVIGMTRIPVIENPQYFRQGHNCHKPDTYVQHIKRRDIVLKRELGEGAFGKVFLAECYNLSPTKDKMLVAVKALKDPTLAARKDFQREAELLTNLQHEHIVKFYGVCGDGDPLIMVFEYMKHGDLNKFLRAHGPDAMILVDGQPRQAKGELGLSQMLHIASQIASGMVYLASQHFVHRDLATRNCLVGANLLVKIGDFGMSRDVYSTDYYRLFNPSGNDFCIWCEVGGHTMLPIRWMPPESIMYRKFTTESDVWSFGVILWEIFTYGKQPWFQLSNTEVIECITQGRVLERPRVCPKEVYDVMLGCWQREPQQRLNIKEIYKILHALGKATPIYLDILG

SEQ ID NO: 31335 - protein, 817 aa, Homo sapiens
MDVSLCPAKCSFWRIFLLGSVWLDYVGSVLACPANCVCSKTEINCRRPDDGNLFPLLEGQDSGNSNGNASINITDISRNITSIHIENWRSLHTLNAVDMELYTGLQKLTIKNSGLRSIQPRAFAKNPHLRYINLSSNRLTTLSWQLFQTLSLRELQLEQNFFNCSCDIRWMQLWQEQGEAKLNSQNLYCINADGSQLPLFRMNISQCDLPEISVSHVNLTVREGDNAVITCNGSGSPLPDVDWIVTGLQSINTHQTNLNWTNVHAINLTLVNVTSEDNGFTLTCIAENVVGMSNASVALTVYYPPRVVSLEEPELRLEHCIEFVVRGNPPPTLHWLHNGQPLRESKIIHVEYYQEGEISEGCLLFNKPTHYNNGNYTLIAKNPLGTANQTINGHFLKEPFPVDEVSPTPPITVTHKPEEDTFGVSIAVGLAAFACVLLVVLFVMINKYGRRSKFGMKGPVAVISGEEDSASPLHHINHGITTPSSLDAGPDTVVIGMTRIPVIENPQYFRQGHNCHKPDTYVQHIKRRDIVLKRELGEGAFGKVFLAECYNLSPTKDKMLVAVKALKDPTLAARKDFQREAELLTNLQHEHIVKFYGVCGDGDPLIMVFEYMKHGDLNKFLRAHGPDAMILVDGQPRQAKGELGLSQMLHIASQIASGMVYLASQHFVHRDLATRNCLVGANLLVKIGDFGMSRDVYSTDYYRVGGHTMLPIRWMPPESIMYRKFTTESDVWSFGVILWEIFTYGKQPWFQLSNTEVIECITQGRVLERPRVCPKEVYDVMLGCWQREPQQRLNIKEIYKILHALGKATPIYLDILG

SEQ ID NO: 31336 - protein, 275 aa, Homo sapiens
MPALRPALLWALLALWLCCATPAHALQCRDGYEPCVNEGMCVTYHNGTGYCKCPEGFLGEYCQHRDPCEKNRCQNGGTCVAQAMLGKATCRCASGFTGEDCQYSTSHPCFVSRPCLNGGTCHMLSRDTYECTCQVGFTGKECQWTDACLSHPCANGSTCTTVANQFSCKCLTGFTGQKCETDVNECDIPGHCQHGGICLNLPGSYQCQCLQGFTGQYCDSLYVPCAPSPCVNGGTCRQTGDFTFECNCLPETVRRGTELWERDREVWNGKEHDEN

SEQ ID NO: 31337 - protein, 249 aa, Homo sapiens
MCRDGYEPCVNEGMCVTYHNGTGYCKCPEGFLGEYCQHRDPCEKNRCQNGGTCVAQAMLGKATCRCASGFTGEDCQYSTSHPCFVSRPCLNGGTCHMLSRDTYECTCQVGFTGKECQWTDACLSHPCANGSTCTTVANQFSCKCLTGFTGQKCETDVNECDIPGHCQHGGICLNLPGSYQCQCLQGFTGQYCDSLYVPCAPSPCVNGGTCRQTGDFTFECNCLPETVRRGTELWERDREVWNGKEHDEN

SEQ ID NO: 31338 - protein, 478 aa, Homo sapiens
MWLAAAAPSLARRLLFLGPPPPPLLLLVFSRSSRRRLHSLGLAAMPEKRPFERLPADVSPINCSLCLKPDLLDFTFEGKLEAAAQVRQATNQIVMNCADIDIITASYAPEGDEEIHATGFNYQNEDEKVTLSFPSTLQTGTGTLKIDFVGELNDKMKGFYRSKYTTPSGEVRYAAVTQFEATDARRAFPCWDERAIKATFDISLVVPKDRVALSNMNVIDRKPYPDDENLVEVKFARTPVTSTYLVAFVVGEYDFVETRSKDGVCVCVYTPVGKAEQGKFALEVAAKTLPFYKDYFNVPYPLPKIDLIAIADFAAGAMENWDLVTYRETALLIDPKNSCSSSRQWVALVVGHELAHQWFGNLVTMEWWTHLRLNEGFASWIEYLCVDHCFPEYDIWTQFVSADYTRAQELDALDNSHPIEVSVGHPSEVDEIFDAISYSKGASVIRMLHDYIGDKDFKKGMNMYLTKFQQKNAAAGNL

SEQ ID NO: 31339 - protein, 263 aa, Homo sapiens
MNVIDRKPYPDDENLVEVKFARTPVTSTYLVAFVVGEYDFVETRSKDGVCVCVYTPVGKAEQGKFALEVAAKTLPFYKDYFNVPYPLPKIDLIAIADFAAGAMENWDLVTYRETALLIDPKNSCSSSRQWVALVVGHELAHQWFGNLVTMEWWTHLRLNEGFASWIEYLCVDHCFPEYDIWTQFVSADYTRAQELDALDNSHPIEVSVGHPSEVDEIFDAISYSKGASVIRMLHDYIGDKDFKKGMNMYLTKFQQKNAAAGNL

SEQ ID NO: 31340 - protein, 163 aa, Homo sapiens
MWLAAAAPSLARRLLFLGPPPPPLLLLVFSRSSRRRLHSLGLAAMPEKRPFERLPADVSPINCSLCLKPDLLDFTFEGKLEAAAQVRQATNQIVMNCADIDIITASYAPEGDEEIHATGFNYQNEDEKVTLSFPSTLQTGTGTLKIDFVGELNDKMKGFYRSY

SEQ ID NO: 31341 - protein, 479 aa, Homo sapiens
MGAFLDKPKTEKHNAHGAGNGLRYGLSSMQGWRVEMEDAHTAVVGIPHGLEDWSFFAVYDGHAGSRVANYCSTHLLEHITTNEDFRAAGKSGSALELSVENVKNGIRTGFLKIDEYMRNFSDLRNGMDRSGSTAVGVMISPKHIYFINCGDSRAVLYRNGQVCFSTQDHKPCNPREKERIQNAGGSVMIQRVNGSLAVSRALGDYDYKCVDGKGPTEQLVSPEPEVYEILRAEEDEFIILACDGIWDVMSNEELCEYVKSRLEVSDDLENVCNWVVDTCLHKGSRDNMSIVLVCFSNAPKVSDEAVKKDSELDKHLESRVEEIMEKSGEEGMPDLAHVMRILSAENIPNLPPGGGLAGKRNVIEAVYSRLNPHRESDGASDEAEESGSQGKLVEALRQMRINHRGNYRQLLEEMLTSYRLAKVEGEESPAEPAATATSSNSDAGNPVTMQESHTESESGLAELDSSNEDAGTKMSGEKI

SEQ ID NO: 31342 - protein, 387 aa, Homo sapiens
MGAFLDKPKTEKHNAHGAGNGLRYGLSSMQGWRVEMEDAHTAVVGIPHGLEDWSFFAVYDGHAGSRVANYCSTHLLEHITTNEDFRAAGKSGSALELSVENVKNGIRTGFLKIDEYMRNFSDLRNGMDRSGSTAVGVMISPKHIYFINCGDSRAVLYRNGQVCFSTQDHKPCNPREKERIQNAGGSVMIQRVNGSLAVSRALGDYDYKCVDGKGPTEQLVSPEPEVYEILRAEEDEFIILACDGIWDVMSNEELCEYVKSRLEVSDDLENVCNWVVDTCLHKGSRDNMSIVLVCFSNAPKVSDEAVKKDSELDKHLESRVEEIMEKSGEEGMPDLAHVMRILSAENIPNLPPGGGLAGKRNVIEAVYSRLNPHRESDGGAGDLEDPW

SEQ ID NO: 31343 - protein, 192 aa, Homo sapiens
MSIVLVCFSNAPKVSDEAVKKDSELDKHLESRVEEIMEKSGEEGMPDLAHVMRILSAENIPNLPPGGGLAGKRNVIEAVYSRLNPHRESDGASDEAEESGSQGKLVEALRQMRINHRGNYRQLLEEMLTSYRLAKVEGEESPAEPAATATSSNSDAGNPVTMQESHTESESGLAELDSSNEDAGTKMSGEKI

SEQ ID NO: 31344 - protein, 380 aa, Homo sapiens
MGAFLDKPKTEKHNAHGAGNGLRYGLSSMQGWRVEMEDAHTAVVGIPHGLEDWSFFAVYDGHAGSRVANYCSTHLLEHITTNEDFRAAGKSGSALELSVENVKNGIRTGFLKIDEYMRNFSDLRNGMDRSGSTAVGVMISPKHIYFINCGDSRAVLYRNGQVCFSTQDHKPCNPREKERIQNAGGSVMIQRVNGSLAVSRALGDYDYKCVDGKGPTEQLVSPEPEVYEILRAEEDEFIILACDGIWDVMSNEELCEYVKSRLEVSDDLENVCNWVVDTCLHKGSRDNMSIVLVCFSNAPKVSDEAVKKDSELDKHLESRVEEIMEKSGEEGMPDLAHVMRILSAENIPNLPPGGGLAGKRNVIEAVYSRLNPHRESDGQK

SEQ ID NO: 31345 - protein, 327 aa, Homo sapiens
MGAFLDKPKTEKHNAHGAGNGLRYGLSSMQGWRVEMEDAHTAVVGIPHGLEDWSFFAVYDGHAGSRVANYCSTHLLEHITTNEDFRAAGKSGSALELSVENVKNGIRTGFLKIDEYMRNFSDLRNGMDRSGSTAVGVMISPKHIYFINCGDSRAVLYRNGQVCFSTQDHKPCNPREKERIQNAGGSVMIQRVNGSLAVSRALGDYDYKCVDGKGPTEQLVSPEPEVYEILRAEEDEFIILACDGIWDVMSNEELCEYVKSRLEVSDDLENVCNWVVDTCLHKGSRDNMSIVLVCFSNAPKVSDEAVKKDSELDKHLESRVEGKTNAF

SEQ ID NO: 31346 - protein, 666 aa, Homo sapiens
MPPGGSGPGGCPRRPPALAGPLPPPPPPPPPPLLPLLPLLLLLLLGAAEGARVSSSLSTTHHVHHFHSKHGTVPIAINRMPFLTRGGHAGTTYIFGKGGALITYTWPPNDRPSTRMDRLAVGFSTHQRSAVLVRVDSASGLGDYLQLHIDQGTVGVIFNVGTDDITIDEPNAIVSDGKYHVVRFTRSGGNATLQVDSWPVNERYPAGNFDNERLAIARQRIPYRLGRVVDEWLLDKGRQLTIFNSQAAIKIGGRDQGRPFQGQVSGLYYNGLKVLALAAESDPNVRTEGHLRLVGEGPSVLLSAETTATTLLADMATTIMETTTTMATTTTRRGRSPTLRDSTTQNTDDLLVASAECPSDDEDLEECEPSTGGELILPIITEDSLDPPPVATRSPFVPPPPTFYPFLTGVGATQDTLPPPAARRPPSGGPCQAERDDSDCEEPIEASGFASGEVFDSSLPPTDDEDFYTTFPLVTDRTTLLSPRKPAPRPNLRTDGATGAPGVLFAPSAPAPNLPAGKMNHRDPLQPLLENPPLGPGAPTSFEPRRPPPLRPGVTSAPGFPHLPTANPTGPGERGPPGAVEVIRESSSTTGMVVGIVAAAALCILILLYAMYKYRNRDEGSYQVDQSRNYISNSAQSNGAVVKEKAPAAPKTPSKAKKNKDKEYYV

SEQ ID NO: 31347 - protein, 261 aa, Homo sapiens
MSRRYDSRTTIFSPEGRLYQVEYAMEAIGHAGTCLGILANDGVLLAAERRNIHKLLDEVFFSEKIYKLNEDMACSVAGITSDANVLTNELRLIAQRYLLQYQEPIPCEQLVTALCDIKQAYTQFGGKRPFGVSLLYIGWDKHYGFQLYQSDPSGNYGGWKATCIGNNSAAAVSMLKQDYKEGEMTLKSALALAIKVLNKTMDVSKLSAEKVEIATLTRENGKTVIRVLKQKEVEQLIKKHEEEEAKAEREKKEKEQKEKDK

SEQ ID NO: 31348 - protein, 190 aa, Homo sapiens
MACSVAGITSDANVLTNELRLIAQRYLLQYQEPIPCEQLVTALCDIKQAYTQFGGKRPFGVSLLYIGWDKHYGFQLYQSDPSGNYGGWKATCIGNNSAAAVSMLKQDYKEGEMTLKSALALAIKVLNKTMDVSKLSAEKVEIATLTRENGKTVIRVLKQKEVEQLIKKHEEEEAKAEREKKEKEQKEKDK

SEQ ID NO: 31349 - protein, 1138 aa, Homo sapiens
MVKLSIVLTPQFLSHDQGQLTKELQQHVKSVTCPCEYLRKVINTLADHHHRGTDFGGSPWLHVIIAFPTSYKVVITLWIVYLWVSLLKTIFWSRNGHDGSTDVQQRAWRSNRRRQEGLRSICMHTKKRVSSFRGNKIVLKDVITLRRHVETKVRAKIRKRKVTTKINHHDKINGKRKTARKQKMFQRAQELRRRAEDYHKCKIPPSARKALCNWVRMAAAEHRHSSGLPYWPYLTAETLKNRMGHQPPPPTQQHSITDNSLSLKTPPECLLTPLPPSADDNLKTPPECVLTPLPPSADDNLKTPPECVLTPLPPSADDNLKTPPECLLTPLPPSADDKLKTPPECLLTPLPPSALPSAPPSADDNLKTRAECLLHPLPPSADDNLKTPSERQLTPLPPSAPPSADDNIKTPAERLRGPLPPSADDNLKTPSERQLTPLPPSAPPSADDNIKTPAERLRGPLPPSADDNLKTPSERQLTPLPPSAPPSADDNIKTPAERLRGPLPPSADDNLKTPSERQLTPLPPSAPPSADDNIKTPAERLRGPLPPSADDNLKTPSERQLTPLPPSAPPSADDNIKTPAERLRGPLPPSADDNLKTPSERQLTPLPPSAPPSADDNIKTPAFHPQRMIISRHLPSVSSLPFHPQLHPQQMIISRYLLSVCGFRFHHQPMIISRHLPSVSSLPFHPQLHPQQMIISRHLPSVCGGRFHPQRMIISRHLPSVSSLPFHPQLHPQQMIISRHLPSVCGGRFHPQRMIISRHLPSVSSLPFHPQLHPQQMIISRHLPSVCGGRFHPQRMIISRHLPSVSSLPFHPQLHPQQMIISRHLPSVCGGRFHPQRMIISRHLPSVSSLPFHPQLHPQQMIISRHLPSVCGERLRGPLPPSADDNLKTPSERQLTPLPPSAPPSADDNIKTPAERLRGPLPPSADDNLKTPSERQLTPLPPSAPPSADDNIKTPAERLRGPLPPSADDNLKTPSERQLTPLPPSAPPSADDNIKTPAERLRGPLPPSADDNLKTPPLATQEAEAEKPRKPKRQRAAEMEPPPEPKRRRVGDVEPSRKPKRRRAADVEPSSPEPKRRRVGDVEPSRKPKRRRAADVEPSSPEPKRRRVGDVEPSRKPKRRRAADVEPSLPEPKRRRLS

SEQ ID NO: 31350 - protein, 439 aa, Homo sapiens
MDGKPATRKGPDFCSLRYGLALIMHFSNFTMITQRVSLSIAIIAMVNTTQQQGLSNASTEGPVADAFNNSSISIKEFDTKASVYQWSPETQGIIFSSINYGIILTLIPSGYLAGIFGAKKMLGAGLLISSLLTLFTPLAADFGVILVIMVRTVQGMAQGMAWTGQFTIWAKWAPPLERSKLTTIAGSGSAFGSFIILCVGGLISQALSWPFIFYIFGSTGCVCCLLWFTVIYDDPMHHPCISVREKEHILSSLAQQPSSPGRAVPIKAMVTCLPLWAIFLGFFSHFWLCTIILTYLPTYISTLLHVNIRDSGVLSSLPFIAAASCTILGGQLADFLLSRNLLRLITVRKLFSSLGLLLPSICAVALPFVASSYVITIILLILIPGTSNLCDSGFIINTLDIAPRYASFLMGISRGFGLIAGIISSTATGFLISQVGPVY

SEQ ID NO: 31351 - protein, 436 aa, Homo sapiens
MDGKPATRKGPDFCSLRYGLALIMHFSNFTMITQRVSLSIAIIAMVNTTQQQGLSNASTEGPVADAFNNSSISIKEFDTKASVYQWSPETQGIIFSSINYGIILTLIPSGYLAGIFGAKKMLGAGLLISSLLTLFTPLAADFGVILVIMVRTVQGMAQGMAWTGQFTIWAKWAPPLERSKLTTIAGSGSAFGSFIILCVGGLISQALSWPFIFYIFGSTGCVCCLLWFTVIYDDPMHHPCISVREKEHILSSLAQQPSSPGRAVPIKAMVTCLPLWAIFLGFFSHFWLCTIILTYLPTYISTLLHVNIRDSGVLSSLPFIAAASCTILGGQLADFLLSRNLLRLITVRKLFSSLDMQVSSWESQGDLGSSQESSLPLPLDSSSVRILSLVGGMSFSCLLQSTCLAWSFTSRLDKQNFKTGPKRGPLPASEDIKLQT

SEQ ID NO: 31352 - protein, 478 aa, Homo sapiens
MDGKPATRKGPDFCSLRYGLALIMHFSNFTMITQRVSLSIAIIAMVNTTQQQGLSNASTEGPVADAFNNSSISIKEFDTKASVYQWSPETQGIIFSSINYGIILTLIPSGYLAGIFGAKKMLGAGLLISSLLTLFTPLAADFGVILVIMVRTVQGMAQGMAWTGQFTIWAKWAPPLERSKLTTIAGSGSAFGSFIILCVGGLISQALSWPFIFYIFGSTGCVCCLLWFTVIYDDPMHHPCISVREKEHILSSLAQQPSSPGRAVPIKAMVTCLPLWAIFLGFFSHFWLCTIILTYLPTYISTLLHVNIRDSGVLSSLPFIAAASCTILGGQLADFLLSRNLLRLITVRKLFSSLGLLLPSICAVALPFVASSYVITIILLILIPGTSNLCDSGFIINTLDIAPRYASFLMGISRGFGLIAGIISSTATGFLISQDFESGWRNVFFLSAAVNMFGLVFYLTFGQAELQDWAKERTLTRL

SEQ ID NO: 31353 - protein, 522 aa, Homo sapiens
MNSFFGTPAASWCLLESDVSSAPDKEAGRERRALSVQQRGGPAWSGSLEWSRQSAGDRRRLGLSRQTAKSSWSRSRDRTCCCRRAWWILVPAADRARRERFIMNEKWDTNSSENWHPIWNVNDTKHHLYSDINITYVNYYLHQPQVAAIFIISYFLIFFLCMMGNTVVCFIVMRNKHMHTVTNLFILNLAISDLLVGIFCMPITLLDNIIAGWPFGNTMCKISGLVQGISVAASVFTLVAIAVDRFQCVVYPFKPKLTIKTAFVIIMIIWVLAITIMSPSAVMLHVQEEKYYRVRLNSQNKTSPVYWCREDWPNQEMRKIYTTVLFANIYLAPLSLIVIMYGRIGISLFRAAVPHTGRKNQEQWHVVSRKKQKIIKMLLIVALLFILSWLPLWTLMMLSDYADLSPNELQIINIYIYPFAHWLAFGNSSVNPIIYGFFNENFRRGFQEAFQLQLCQKRAKPMEAYALKAKSHVLINTSNQLVQESTFQNPHGETLLYRKSAEKPQQELVMEELKETTNSSEI

SEQ ID NO: 31354 - protein, 420 aa, Homo sapiens
MNEKWDTNSSENWHPIWNVNDTKHHLYSDINITYVNYYLHQPQVAAIFIISYFLIFFLCMMGNTVVCFIVMRNKHMHTVTNLFILNLAISDLLVGIFCMPITLLDNIIAGWPFGNTMCKISGLVQGISVAASVFTLVAIAVDRFQCVVYPFKPKLTIKTAFVIIMIIWVLAITIMSPSAVMLHVQEEKYYRVRLNSQNKTSPVYWCREDWPNQEMRKIYTTVLFANIYLAPLSLIVIMYGRIGISLFRAAVPHTGRKNQEQWHVVSRKKQKIIKMLLIVALLFILSWLPLWTLMMLSDYADLSPNELQIINIYIYPFAHWLAFGNSSVNPIIYGFFNENFRRGFQEAFQLQLCQKRAKPMEAYALKAKSHVLINTSNQLVQESTFQNPHGETLLYRKSAEKPQQELVMEELKETTNSSEI

SEQ ID NO: 31355 - protein, 423 aa, Homo sapiens
MFIMNEKWDTNSSENWHPIWNVNDTKHHLYSDINITYVNYYLHQPQVAAIFIISYFLIFFLCMMGNTVVCFIVMRNKHMHTVTNLFILNLAISDLLVGIFCMPITLLDNIIAGWPFGNTMCKISGLVQGISVAASVFTLVAIAVDRFQCVVYPFKPKLTIKTAFVIIMIIWVLAITIMSPSAVMLHVQEEKYYRVRLNSQNKTSPVYWCREDWPNQEMRKIYTTVLFANIYLAPLSLIVIMYGRIGISLFRAAVPHTGRKNQEQWHVVSRKKQKIIKMLLIVALLFILSWLPLWTLMMLSDYADLSPNELQIINIYIYPFAHWLAFGNSSVNPIIYGFFNENFRRGFQEAFQLQLCQKRAKPMEAYALKAKSHVLINTSNQLVQESTFQNPHGETLLYRKSAEKPQQELVMEELKETTNSSEI

SEQ ID NO: 31356 - protein, 132 aa, Homo sapiens
MNSFFGTPAASWCLLESDVSSAPDKEAGRERRALSVQQRGGPAWSGSLEWSRQSAGDRRRLGLSRQTAKSSWSRSRDRTCCCRRAWWILVPAADRARRERMAIWKHDVQDQWIGPGNICRSFSLYVSCNCCR

SEQ ID NO: 31357 - protein, 425 aa, Homo sapiens
MVKLSIVLTPQFLSHDQSQLTKELQQHVKSVTCPCEYLRKVINSLAVYRHRETDFGVGVRDHPGQHGKTPSPQKLDNLIIIIIGFLRRYTFNILFCTSCLCVSFLKTIFWSRNGHDGSMDVQQRAWRSNRSRQKGLRSICMHTKKRVSSFRGNKIGLKDVITLRRHVETKVRAKIRKRKVTTKINRHDKINGKRKTARKQKMFQRAQELRRRAEDYHKCKIPPSARKPLCNWVRMVAAEHRHSSGLPYWPYLTAETLKNRMGRQPPPPTQQHSITDNSLSLKTPTECLLTPLPPSVDDNIKECPLAPLPPSPLPPSVDDNLKECLFVPLPPSPLPPSVDDNLKTPPLATQEAEVEKPPKPKRWRVDEVEQSPKPKRRRVDEVEQSPKPKRQREAEAQQLPKPKRRRLSKLRTRHCTQAWAIRINP

SEQ ID NO: 31358 - protein, 402 aa, Homo sapiens
MMVALRGASALLVLFLAAFLPPPQCTQDPAMVHYIYQRFRVLEQGLEKCTQATRAYIQEFQEFSKNISVMLGRCQTYTSEYKSAVGNLALRVERAQREIDYIQYLREADECIESEDKTLAEMLLQEAEEEKKIRTLLNASCDNMLMGIKSLKIVKKMMDTHGSWMKDAVYNSPKVYLLIGSRNNTVWEFANIRAFMEDNTKPAPRKQILTLSWQGTGQVIYKGFLFFHNQATSNEIIKYNLQKRTVEDRMLLPGGVGRALVYQHSPSTYIDLAVDEHGLWAIHSGPGTHSHLVLTKIEPGTLGVEHSWDTPCRSQDAEASFLLCGVLYVVYSTGGQGPHRITCIYDPLGTISEEDLPNLFFPKRPRSHSMIHYNPRDKQLYAWNEGNQIIYKLQTKRKLPLK

SEQ ID NO: 31359 - protein, 312 aa, Homo sapiens
MKNRTSVTDFILLGLTDNPQLQVVIFSFLFLTYVLSVTGNLTIISLTLLDSHLKTPMYFFLRNFSLEISFTSVCNPRFLISILTGDKSISYNACAAQLFFFIFLGSTEFFLLASMSYDCYVAICKPLHYTTIMSDRICYQLIISSWLAGFLVIFPPLAMGLQLDFCDSNVIDHFTCDSAPLLQISCTDTSTLELMSFILALFTLISTLILVILSYTYIIRTILRIPSAQQRKKAFSTCSSHVIVVSISYGSCIFMYVKTSAKEGVALTKGVAILNTSVAPMLNPFIYTLRNQQVKQAFKDVLRKISHKKKKH

SEQ ID NO: 31360 - protein, 310 aa, Homo sapiens
MAEMNLTLVTEFLLIAFTEYPEWALPLFLLFLFMYLITVLGNLEMIILILMDHQLHAPMYFLLSHLAFMDVCYSSITVPQMLAVLLEHGAALSYTRCAAQFFLFTFFGSIDCYLLALMAYDRYLAVCQPLLYVTILTQQARLSLVAGAYVAGLISALVRTVSAFTLSFCGTSEIDFIFCDLPPLLKLTCGESYTQEVLIIMFAIFVIPASMVVILVSYLFIIVAIMGIPAGSQAKTFSTCTSHLTAVSLFFGTLIFMYLRGNSDQSSEKNRVVSVLYTEVIPMLNPLIYSLRNKEVKEALRKILNRAKLS

SEQ ID NO: 31361 - protein, 316 aa, Homo sapiens
MKIANNTVVTEFILLGLTQSQDIQLLVFVLILIFYLIILPGNFLIIFTIRSDPGLTAPLYLFLGNLAFLDASYSFIVAPRMLVDFLSEKKVISYRGCITQLFFLHFLGGGEGLLLVVMAFDRYIAICRPLHCSTVMNPRACYAMMLALWLGGFVHSIIQVVLILRLPFCGPNQLDNFFCDVRQVIKLACTDMFVVELLMVFNSGLMTLLCFLGLLASYAVILCHVRRAASEGKNKAMSTCTTRVIIILLMFGPAIFIYICPFRALPADKMVSLFHTVIFPLMNPMIYTLRNQEVKTSMKRLLSRHVVCQVDFIIRN

SEQ ID NO: 31362 - protein, 295 aa, Homo sapiens [sequence omitted]

SEQ ID NO: 31363 - protein, 140 aa, Homo sapiens
MASVDFKTYVDQACRAAEEFVNVYYTTMDKRRRLLSRLYMGTATLVWNGNAVSGQESLSEFFEMLPSSEFQISVVDCQPVHDEATPSQTTVLVVICGSVKFEGNKQRDFNQNFILTAQASPSNTVWKIASDCFRFQDWAS

SEQ ID NO: 31364 - protein, 316 aa, Homo sapiens
MPSQNYSIISEFNLFGFSAFPQHLLPILFLLYLLMFLFTLLGNLLIMATIWIEHRLHTPMYLFLCTLSVSEILFTVAITPRMLADLLSTHHSITFVACANQMFFSFMFGFTHSFLLLVMGYDRYVAICHPLRYNVLMSPRDCAHLVACTWAGGSVMGMMVTTIVFHLTFCGSNVIHHFFCHVLSLLKLACENKTSSVIMGVMLVCVTALIGCLFLIILSYVFIVAAILRIPSAEGRHKTFSTCVSHLTVVVTHYSFASFIYLKPKGLHSMYSDALMATTYTVFTPFLSPIIFSLRNKELKNAINKNFYRKFCPPSS

SEQ ID NO: 31365 - protein, 1564 aa, Homo sapiens
MQRGKPCRALPTLKCQTFCQRHGLMFEVVDLRWGIRNIEATDHLTTELCLEEVDRCWKTSIGPAFVALIGDQYGPCLIPSRIDEKEWEVLRDHLTARPSDLELVARYFQRDENAFPPTYVLQAPGTGEACEPEEATLTSVLRSGAQEARRLGLITQEQWQHYHRSVIEWEIERSLLSSEDREQGATVFLREIQDLHKHILEDCALRMVDRLADGCLDADAQNLLSSLKSHITDMHPGVLKTHRLPWSRDLVNPKNKTHACYLKELGEQFVVRANHQVLTRLRELDTAGQELAWLYQEIRHHLWQSSEVIQTFCGRQELLARLGQQLRHDDSKQHTPLVLFGPPGIGKTALMCKLAEQMPRLLGHKTVTVLRLLGTSQMSSDARGLLKSICFQVCLAYGLPLPPAQVLDAHTRVVQFFHTLLHTVSCRNFESLVLLLDAMDDLDSVRHARRVPWLPLNCPPRVHLILSACSGALGVLDTLQRVLLDPEAYWEVKPLSGNQGQQMIQLLLAAARRTLSPVHTDLLWASLPECGNPGRLRLAFEEARKWASFTVPVPLATTAEEATHQLCTRLEQTHGQLLVAHVLGYIVSSRHGLSEAELKDVLSLDDEVLQDVYRDWTPPSKELLRFPPLLWVRLRRDLGYYLARRPVDGFTLLAIAHRQLVEVVRERYLSGSERAKRHGVLADFFSGTWSQGTKKLITLPLVGKPLNLDRKVAPQPLWFSHTVANLRKLKELPYHLLHSGRLEELKQEVLGSMSWISCRGISGGIEDLLDDFDLCAPHLDSPEVGLVREALQLCRPAVELRGMERSLLYTELLARLHFFATSHPALVGQLCQQAQSWFQLCAHPVLVPLGGFLQPPGGPLRATLSGCHKGITAMAWGVEEKLLVIGTQDGIMAVWDMEEQHVIHMLTGHTGEVRCVKIFAKGTLANSASKDYTLHLWNLLSGQEKFTIWDGGSKNPAEPQIWNLHVDEAHKVVYSASGSKINAWNLETAEPVFHILGDASDPWMCMAVLASQATLLTVSRDGVVSLWSSATGKLQGKQHMSSIKEETPTCAVSVQKQGKLVTGFSNGSISLVSSKGDRLLEKLPDAVRFLVVSEDESLLAAGFGRSVRIFLADSRGFRRFMAMDLEHEDMVETAVFGTENNLIITGSLDALIQVWSLSEQGTLLDILEGVGAPVSLLARGGALVASASPQSSSFKVWDLSDAHRSRVPAPFLDRTGLTAVSHNGSYVYFPKIGDKNKVTIWDLAEGEEQDSLDTSSEIRCLEVAEQRKLLFTGLVSGVVLVFPLNSRQDVICIPPPEARKAINCMSLSKCEDRLAIAYDNIVLVLDITSGDPCPVIDGPRYTFYTQLPETLSSVAILTDYRVVYSMTNGDLFLYECATSKAFPLETHRSRVACVEVSHKEQLVVSGSEDALLCLWDLQARKWKFEMSYTSSYCRGVQCACFSKDDKYVYVGLKDRSILVWSVLDGTLLTVQFVHAVVNRIIPTTSGFIAPTRHGYLIRENFQCLSAKASPQDPLKNFKKAMWMVKSRQREELVAAAGAPQDLESESAQGNETKSNKCSQVCLIV

SEQ ID NO: 31366 - protein, 76 aa, Homo sapiens
MQRGKPCRALPTLKCQTFCQRHGLMFEVVDLRWGIRNIEATDHLTTELCLEEVDRCWKTSIGPAFVEKCADPCPGQ

SEQ ID NO: 31367 - protein, 1432 aa, Homo sapiens
MQRGKPCRALPTLKCQTFCQRHGLMFEVVDLRWGIRNIEATDHLTTELCLEEVDRCWKTSIGPAFVALIGDQYGPCLIPSRIDEKEWEVLRDHLTARPSDLELVARYFQRDENAFPPTYVLQAPGTGEACEPEEATLTSVLRSGAQEARRLGLITQEQWQHYHRSVIEWEIERSLLSSEDREQGATVFLREIQDLHKHILEDCALRMVDRLADGCLDADAQNLLSSLKSHITDMHPGVLKTHRLPWSRDLVNPKNKTHACYLKELGEQFVVRANHQVLTRLRELDTAGQELAWLYQEIRHHLWQSSEVIQTFCGRQELLARLGQQLRHDDSKQHTPLVLFGPPGIGKTALMCKLAEQMPRLLGHKTVTVLRLLGTSQMSSDARGLLKSICFQVCLAYGLPLPPAQVLDAHTRVVQFFHTLLHTVSCRNFESLVLLLDAMDDLDSVRHARRVPWLPLNCPPRVHLILSACSGALGVLDTLQRVLLDPEAYWEVKPLSGNQGQQMIQLLLAAARRTLSPVHTDLLWASLPECGNPGRLRLAFEEARKWASFTVPVPLATTAEEATHQLCTRLEQTHGQLLVAHVLGYIVSSRHGLSEAELKDVLSLDDEVLQDVYRDWTPPSKELLRFPPLLWVRLRRDLGYYLARRPVDGFTLLAIAHRQLVEVVRERYLSGSERAKRHGVLADFFSGTWSQGTKKLITLPLVGKPLNLDRKVAPQPLWFSHTVANLRKLKELPYHLLHSGRLEELKQEVLGSMSWISCRGISGGIEDLLDDFDLCAPHLDSPEVGLVREALQLCRPAVELRGMERSLLYTELLARLHFFATSHPALVGQLCQQAQSWFQLCAHPVLVPLGGFLQPPGGPLRATLSGCHKGITAMAWGVEEKLLVIGTQDGIMAVWDMEEQHVIHMLTGHTGEVRCVKIFAKGTLANSASKDYTLHLWNLLSGQEKFTIWDGGSKNPAEPQIWNLHVDEAHKVVYSASGSKINAWNLETAEPVFHILGDASDPWMCMAVLASQATLLTVSRDGVVSLWSSATGKLQGKQHMSSIKEETPTCAVSVQKQGKLVTGFSNGSISLVSSKGDRLLEKLPDAVRFLVVSEDESLLAAGFGRSVRIFLADSRGFRRFMAMDLEHEDMVETAVFGTENNLIITGSLDALIQVWSLSEQGTLLDILEGVGAPVSLLARGGALVASASPQSSSFKVWDLSDAHRSRVPAPFLDRTGLTAVSHNGSYVYFPKIGDKNKVTIWDLAEGEEQDSLDTSSEIRCLEVAEQRKLLFTGLVSGVVLVFPLNSRQDVICIPPPEARKAINCMSLSKCEDRLAIAYDNIVLVLDITSGDPCPVIDGPRYTFYTQLPETLSSVAILTDYRVVYSMTNGDLFLYECATSKAFPLETHRSRVACVEVSHKEQLVVSGSEDALLCLWDLQARKWKFEMSYTAPC

SEQ ID NO: 31368 - protein, 337 aa, Homo sapiens
MLRNNLGNSSDSKNEDGSVFSQTEHNIVATYLIMAGMISIISNIIVLGIFIKYKELRTPTNAIIINLAVTDIGVSSIGYPMSAASDLYGSWKFGYAGCQVYAGLNIFFGMASIGLLTVVAVDRYLTICLPDVGRRMTTNTYIGLILGAWINGLFWALMPIIGWASYAPDPTGATCTINWRKNDRSFVSYTMTVIAINFIVPLTVMFYCYYHVTLSIKHHTTSDCTESLNRDWSDQIDVTKMSVIMICMFLVAWSPYSIVCLWASFGDPKKIPPPMAIIAPLFAKSSTFYNPCIYVVANKKFRRAMLAMFKCQTHQTMPVTSILPMDVSQNPLASGRI

SEQ ID NO: 31369 - protein, 343 aa, Homo sapiens
MKQYSVGNQHSNYRSLLFPFLCSQMTQLTASGNQTMVTEFLFSMFPHAHRGGLLFFIPLLLIYGFILTGNLIMFIVIQVGMALHTPLYFFISVLSFLEICYTTTTIPKMLSCLISEQKSISVAGCLLQMYFFHSLGITESCVLTAMAIDRYIAICNPLRYPTIMIPKLCIQLTVGSCFCGFLLVLPEIAWISTLPFCGSNQIHQIFCDFTPVLSLACTDTFLVVIVDAIHAAEIVASFLVIALSYIRIIIVILGMHSAEGHHKAFSTCAAHLAVFLLFFGSVAVMYLRFSATYSVFWDTAIAVTFVILAPFFNPIIYSLKNKDMKEAIGRLFHYQKRAGWAGK

SEQ ID NO: 31370 - protein, 319 aa, Homo sapiens
MPVGKLVFNQSEPTEFVFRAFTTATEFQVLLFLLFLLLYLMILCGNTAIIWVVCTHSTLRTPMYFFLSNLSFLELCYTTVVVPLMLSNILGAQKPISLAGCGAQMFFFVTLGSTDCFLLAIMAYDRYVAICHPLHYTLIMTRELCTQMLGGALGLALFPSLQLTALIFTLPFCGHHQEINHFLCDVPPVLRLACADIRVHQAVLYVVSILVLTIPFLLICVSYVFITCAILSIRSAEGRRRAFSTCSFHLTVVLLQYGCCSLVYLRPRSSTSEDEDSQIALVYTFVTPLLNPLLYSLRNKDVKGALRSAIIRKAASDAN

SEQ ID NO: 31371 - protein, 315 aa, Homo sapiens
MMWENWTIVSEFVLVSFSALSTELQALLFLLFLTIYLVTLMGNVLIILVTIADSALQSPMYFFLRNLSFLEIGFNLVIVPKMLGTLIIQDTTISFLGCATQMYFFFFFGAAECCLLATMAYDRYVAICDPLHYPVIMGHISCAQLAAASWFSGFSVATVQTTWIFSFPFCGPNRVNHFFCDSPPVIALVCADTSVFELEALTATVLFILFPFLLILGSYVRILSTIFRMPSAEGKHQAFSTCSAHLLVVSLFYSTAILTYFRPQSSASSESKKLLSLSSTVVTPMLNPIIYSSRNKEVKAALKRLIHRTLGSQKL

SEQ ID NO: 31372 - protein, 514 aa, Homo sapiens
MALMQELYSTPASRLDSFVAQWLQPHREWKEEVLDAVRTVEEFLRQEHFQGKRGLDQDVRVLKVVKVGSFGNGTVLRSTREVELVAFLSCFHSFQEAAKHHKDVLRLIWKTMWQSQDLLDLGLEDLRMEQRVPDALVFTIQTRGTAEPITVTIVPAYRALGPSLPNSQPPPEVYVSLIKACGGPGNFCPSFSELQRNFVKHRPTKLKSLLRLVKHWYQQYVKARSPRANLPPLYALELLTIYAWEMGTEEDENFMLDEGFTTVMDLLLEYEVICIYWTKYYTLHNAIIEDCVRKQLKKERPIILDPADPTLNVAEGYRWDIVAQRASQCLKQDCCYDNRENPISSWNVKRARDIHLTVEQRGYPDFNLIVNPYEPIRKVKEKIRRTRGYSGLQRLSFQVPGSERQLLSSRCSLAKYGIFSHTHIYLLETIPSEIQVFVKNPDGGSYAYAINPNSFILGLKQQIEDQQGLPKKQQQLEFQGQVLQDWLGLGIYGIQDSDTLILSKKKGEALFPAS

SEQ ID NO: 31373 - protein, 255 aa, Homo sapiens
MALMQELYSTPASRLDSFVAQWLQPHREWKEEVLDAVRTVEEFLRQEHFQGKRGLDQDVRVLKVVKVGSFGNGTVLRSTREVELVAFLSCFHSFQEAAKHHKDVLRLIWKTMWQSQDLLDLGLEDLRMEQRVPDALVFTIQTRGTAEPITVTIVPAYRALGPSLPNSQPPPEVYVSLIKACGGPGNFCPSFSELQRNFVKHRPTKLKSLLRLVKHWYQQAHHPGSGRPHPQRGRRVQMGHRCSEGLPVPETGLLL

SEQ ID NO: 31374 - protein, 384 aa, Homo sapiens
MALMQELYSTPASRLDSFVAQWLQPHREWKEEVLDAVRTVEEFLRQEHFQGKRGLDQDVRVLKVVKVGSFGNGTVLRSTREVELVAFLSCFHSFQEAAKHHKDVLRLIWKTMWQSQDLLDLGLEDLRMEQRVPDALVFTIQTRGTAEPITVTIVPAYRALGPSLPNSQPPPEVYVSLIKACGGPGNFCPSFSELQRNFVKHRPTKLKSLLRLVKHWYQQRARDIHLTVEQRGYPDFNLIVNPYEPIRKVKEKIRRTRGYSGLQRLSFQVPGSERQLLSSRCSLAKYGIFSHTHIYLLETIPSEIQVFVKNPDGGSYAYAINPNSFILGLKQQIEDQQGLPKKQQQLEFQGQVLQDWLGLGIYGIQDSDTLILSKKKGEALFPAS

SEQ ID NO: 31375 - protein, 310 aa, Homo sapiens
MGDNITSITEFLLLGFPVGPRIQMLLFGLFSLFYVFTLLGNGTILGLISLDSRLHAPMYFFLSHLAVVDIAYACNTVPRMLVNLLHPAKPISFAGRMMQTFLFSTFAVTECLLLVVMSYDLYVAICHPLRYLAIMTWRVCITLAVTSWTTGVLLSLIHLVLLLPLPFCRPQKIYHFFCEILAVLKLACADTHINENMVLAGAISGLVGPLSTIVVSYMCILCAILQIQSREVQRKAFCTCFSHLCVIGLFYGTAIIMYVGPRYGNPKEQKKYLLLFHSLFNPMLNPLICSLRNSEVKNTLKRVLGVERAL

SEQ ID NO: 31376 - protein, 647 aa, Homo sapiens
MWRVCARRAQNVAPWAGLEARWTALQEVPGTPRVTSRSGPAPARRNSVTTGYGGVRALCGWTPSSGATPRNRLLLQLLGSPGRRYYSLPPHQKVPLPSLSPTMQAGTIARWEKKEGDKINEGDLIAEVETDKATVGFESLEECYMAKILVAEGTRDVPIGAIICITVGKPEDIEAFKNYTLDSSAAPTPQAAPAPTPAATASPPTPSAQAPGSSYPPHMQVLLPALSPTMTMGTVQRWEKKVGEKLSEGDLLAEIETDKATIGFEVQEEGYLAKILVPEGTRDVPLGTPLCIIVEKEADISAFADYRPTEVTDLKPQVPPPTPPPVAAVPPTPQPLAPTPSAPCPATPAGPKGRVFVSPLAKKLAVEKGIDLTQVKGTGPDGRITKKDIDSFVPSKVAPAPAAVVPPTGPGMAPVPTGVFTDIPISNIRRVIAQRLMQSKQTIPHYYLSIDVNMGEVLLVRKELNKILEGRSKISVNDFIIKASALACLKVPEANSSWMDTVIRQNHVVDVSVAVSTPAGLITPIVFNAHIKGVETIANDVVSLATKAREGKLQPHEFQGGTFTISNLGMFGIKNFSAIINPPQACILAIGASEDKLVPADNEKGFDVASMMSVTLSCDHRVVDGAVGAQWLAEFRKYLEKPITMLL

SEQ ID NO: 31377 - protein, 290 aa, Homo sapiens
MLKREMKPESDRPRKVRFRIASSHSGRVLKEVYEDGQPSGSLDSECASICGIDGLGDSDGQQNGHIESEGDENENDQDSLLVLARAASEKGFGTRRVNILSKNGTVRGVKYKVSAGQALFNNLTKVLQQPSTDLEFDRVVIYTTCLRVVRTTFERCELVRKIFQNHRVKFEEKNIALNGEYGKELDERCRRVSEAPSLPVVFIDGHYLGGAEKILSMNESGELQDILTKIERVQHPHECPSCGGFGFLPCSVCHGSKMSMFRNCFTDSFKALKCTACNENGLQRCKNCAG

SEQ ID NO: 31378 - protein, 908 aa, Homo sapiens
MKIIFPILSNPVFRRTVKLLLCLLWIGYSQGTTHVLRFGGIFEYVESGPMGAEELAFRFAVNTINRNRTLLPNTTLTYDTQKINLYDSFEASKKACDQLSLGVAAIFGPSHSSSANAVQSICNALGVPHIQTRWKHQVSDNKDSFYVSLYPDFSSLSRAILDLVQFFKWKTVTVVYDDSTGLIRLQELIKAPSRYNLRLKIRQLPADTKDAKPLLKEMKRGKEFHVIFDCSHEMAAGILKQALAMGMMTEYYHYIFTTLDLFALDVEPYRYSGVNMTGFRILNTENTQVSSIIEKWSMERLQAPPKPDSGLLDGFMTTDAALMYDAVHVVSVAVQQFPQMTVSSLQCNRHKPWRFGTRFMSLIKEAHWEGLTGRITFNKTNGLRTDFDLDVISLKEEGLEKIGTWDPASGLNMTESQKGKPANITDSLSNRSLIVTTILEEPYVLFKKSDKPLYGNDRFEGYCIDLLRELSTILGFTYEIRLVEDGKYGAQDDANGQWNGMVRELIDHKADLAVAPLAITYVREKVIDFSKPFMTLGISILYRKPNGTNPGVFSFLNPLSPDIWMYILLAYLGVSCVLFVIARFSPYEWYNPHPCNPDSDVVENNFTLLNSFWFGVGALMQQGSELMPKALSTRIVGGIWWFFTLIIISSYTANLAAFLTVERMESPIDSADDLAKQTKIEYGAVEDGATMTFFKKSKISTYDKMWAFMSSRRQSVLVKSNEEGIQRVLTSDYAFLMESTTIEFVTQRNCNLTQIGGLIDSKGYGVGTPMGSPYRDKITIAILQLQEEGKLHMMKEKWWRGNGCPEEESKEASALGVQNIGGIFIVLAAGLVLSVFVAVGEFLYKSKKNAQLEKRSFCSAMVEELRMSLKCQRRLKHKPQAPVIVKTEEVINMHTFNDRRLPGKETMA

SEQ ID NO: 31379 - protein, 869 aa, Homo sapiens
MKIIFPILSNPVFRRTVKLLLCLLWIGYSQGTTHVLRFGGIFEYVESGPMGAEELAFRFAVNTINRNRTLLPNTTLTYDTQKINLYDSFEASKKACDQLSLGVAAIFGPSHSSSANAVQSICNALGVPHIQTRWKHQVSDNKDSFYVSLYPDFSSLSRAILDLVQFFKWKTVTVVYDDSTGLIRLQELIKAPSRYNLRLKIRQLPADTKDAKPLLKEMKRGKEFHVIFDCSHEMAAGILKQALAMGMMTEYYHYIFTTLDLFALDVEPYRYSGVNMTGFRILNTENTQVSSIIEKWSMERLQAPPKPDSGLLDGFMTTDAALMYDAVHVVSVAVQQFPQMTVSSLQCNRHKPWRFGTRFMSLIKEAHWEGLTGRITFNKTNGLRTDFDLDVISLKEEGLEKIGTWDPASGLNMTESQKGKPANITDSLSNRSLIVTTILEEPYVLFKKSDKPLYGNDRFEGYCIDLLRELSTILGFTYEIRLVEDGKYGAQDDANGQWNGMVRELIDHKADLAVAPLAITYVREKVIDFSKPFMTLGISILYRKPNGTNPGVFSFLNPLSPDIWMYILLAYLGVSCVLFVIARFSPYEWYNPHPCNPDSDVVENNFTLLNSFWFGVGALMQQGSELMPKALSTRIVGGIWWFFTLIIISSYTANLAAFLTVERMESPIDSADDLAKQTKIEYGAVEDGATMTFFKKSKISTYDKMWAFMSSRRQSVLVKSNEEGIQRVLTSDYAFLMESTTIEFVTQRNCNLTQIGGLIDSKGYGVGTPMGSPYRDKITIAILQLQEEGKLHMMKEKWWRGNGCPEEESKEASALGVQNIGGIFIVLAAGLVLSVFVAVGEFLYKSKKNAQLEKESSIWLVPPYHPDTV

SEQ ID NO: 31380 - protein, 584 aa, Homo sapiens
MKIIFPILSNPVFRRTVKLLLCLLWIGYSQGTTHVLRFGGIFEYVESGPMGAEELAFRFAVNTINRNRTLLPNTTLTYDTQKINLYDSFEASKKACDQLSLGVAAIFGPSHSSSANAVQSICNALGVPHIQTRWKHQVSDNKDSFYVSLYPDFSSLSRAILDLVQFFKWKTVTVVYDDSTGLIRLQELIKAPSRYNLRLKIRQLPADTKDAKPLLKEMKRGKEFHVIFDCSHEMAAGILKQALAMGMMTEYYHYIFTTLDLFALDVEPYRYSGVNMTGFRILNTENTQVSSIIEKWSMERLQAPPKPDSGLLDGFMTTDAALMYDAVHVVSVAVQQFPQMTVSSLQCNRHKPWRFGTRFMSLIKEAHWEGLTGRITFNKTNGLRTDFDLDVISLKEEGLEKIGTWDPASGLNMTESQKGKPANITDSLSNRSLIVTTILEEPYVLFKKSDKPLYGNDRFEGYCIDLLRELSTILGFTYEIRLVEDGKYGAQDDANGQWNGMVRELIDHKADLAVAPLAITYVREKVIDFSKPFMTLGISILYRKPNGTNPGVFSFLNPLSPDIWMYILLAYLGVSCVLFVIARF

SEQ ID NO: 31381 - protein, 832 aa, Homo sapiens
MKIIFPILSNPVFRRTVKLLLCLLWIGYSQGTTHVLRFGGIFEYVESGPMGAEELAFRFAVNTINRNRTLLPNTTLTYDTQKINLYDSFEASKKACDQLSLGVAAIFGPSHSSSANAVQSICNALGVPHIQTRWKHQVSDNKDSFYVSLYPDFSSLSRAILDLVQFFKWKTVTVVYDDSTGLIRLQELIKAPSRYNLRLKIRQLPADTKDAKPLLKEMKRGKEFHVIFDCSHEMAAGILKQALAMGMMTEYYHYIFTTLDLFALDVEPYRYSGVNMTGFRILNTENTQVSSIIEKWSMERLQAPPKPDSGLLDGFMTTDAALMYDAVHVVSVAVQQFPQMTVSSLQCNRHKPWRFGTRFMSLIKEAHWEGLTGRITFNKTNGLRTDFDLDVISLKEEGLEKIGTWDPASGLNMTESQKGKPANITDSLSNRSLIVTTILEEPYVLFKKSDKPLYGNDRFEGYCIDLLRELSTILGFTYEIRLVEDGKYGAQDDANGQWNGMVRELIDHKADLAVAPLAITYVREKVIDFSKPFMTLGISILYRKPNGSELMPKALSTRIVGGIWWFFTLIIISSYTANLAAFLTVERMESPIDSADDLAKQTKIEYGAVEDGATMTFFKKSKISTYDKMWAFMSSRRQSVLVKSNEEGIQRVLTSDYAFLMESTTIEFVTQRNCNLTQIGGLIDSKGYGVGTPMGSPYRDKITIAILQLQEEGKLHMMKEKWWRGNGCPEEESKEASALGVQNIGGIFIVLAAGLVLSVFVAVGEFLYKSKKNAQLEKRSFCSAMVEELRMSLKCQRRLKHKPQAPVIVKTEEVINMHTFNDRRLPGKETMA

SEQ ID NO: 31382 - protein, 892 aa, Homo sapiens
MKIIFPILSNPVFRRTVKLLLCLLWIGYSQGTTHVLRFGGIFEYVESGPMGAEELAFRFAVNTINRNRTLLPNTTLTYDTQKINLYDSFEASKKACDQLSLGVAAIFGPSHSSSANAVQSICNALGVPHIQTRWKHQVSDNKDSFYVSLYPDFSSLSRAILDLVQFFKWKTVTVVYDDSTGLIRLQELIKAPSRYNLRLKIRQLPADTKDAKPLLKEMKRGKEFHVIFDCSHEMAAGILKQALAMGMMTEYYHYIFTTLDLFALDVEPYRYSGVNMTGFRILNTENTQVSSIIEKWSMERLQAPPKPDSGLLDGFMTTDAALMYDAVHVVSVAVQQFPQMTVSSLQCNRHKPWRFGTRFMSLIKEAHWEGLTGRITFNKTNGLRTDFDLDVISLKEEGLEKIGTWDPASGLNMTESQKGKPANITDSLSNRSLIVTTILEEPYVLFKKSDKPLYGNDRFEGYCIDLLRELSTILGFTYEIRLVEDGKYGAQDDANGQWNGMVRELIDHKADLAVAPLAITYVREKVIDFSKPFMTLGISILYRKPNGTNPGVFSFLNPLSPDIWMYILLAYLGVSCVLFVIARFSPYEWYNPHPCNPDSDVVENNFTLLNSFWFGVGALMQQGSELMPKALSTRIVGGIWWFFTLIIISSYTANLAAFLTVERMESPIDSADDLAKQTKIEYGAVEDGATMTFFKKSKISTYDKMWAFMSSRRQSVLVKSNEEGIQRVLTSDYAFLMESTTIEFVTQRNCNLTQIGGLIDSKGYGVGTPMGSPYRDKITIAILQLQEEGKLHMMKEKWWRGNGCPEEESKEASALGVQNIGGIFIVLAAGLVLSVFVAVGEFLYKSKKNAQLEKRAKTKLPQDYVFLPILESVSISTVLSSSPSSSSLSSCS

SEQ ID NO: 31383 - protein, 682 aa, Homo sapiens
MKIIFPILSNPVFRRTVKLLLCLLWIGYSQGTTHVLRFGGIFEYVESGPMGAEELAFRFAVNTINRNRTLLPNTTLTYDTQKINLYDSFEASKKACDQLSLGVAAIFGPSHSSSANAVQSICNALGVPHIQTRWKHQVSDNKDSFYVSLYPDFSSLSRAILDLVQFFKWKTVTVVYDDSTGLIRLQELIKAPSRYNLRLKIRQLPADTKDAKPLLKEMKRGKEFHVIFDCSHEMAAGILKQALAMGMMTEYYHYIFTTLDLFALDVEPYRYSGVNMTGFRILNTENTQVSSIIEKWSMERLQAPPKPDSGLLDGFMTTDAALMYDAVHVVSVAVQQFPQMTVSSLQCNRHKPWRFGTRFMSLIKEAHWEGLTGRITFNKTNGLRTDFDLDVISLKEEGLEKIGTWDPASGLNMTESQKGKPANITDSLSNRSLIVTTILEEPYVLFKKSDKPLYGNDRFEGYCIDLLRELSTILGFTYEIRLVEDGKYGAQDDANGQWNGMVRELIDHKSKISTYDKMWAFMSSRRQSVLVKSNEEGIQRVLTSDYAFLMESTTIEFVTQRNCNLTQIGGLIDSKGYGVGTPMGSPYRDKITIAILQLQEEGKLHMMKEKWWRGNGCPEEESKEASALGVQNIGGIFIVLAAGLVLSVFVAVGEFLYKSKKNAQLEKESSIWLVPPYHPDTV

SEQ ID NO: 31384 - protein, 687 aa, Homo sapiens
MKIIFPILSNPVFRRTVKLLLCLLWIGYSQGTTHVLRFGGIFEYVESGPMGAEELAFRFAVNTINRNRTLLPNTTLTYDTQKINLYDSFEASKKACDQLSLGVAAIFGPSHSSSANAVQSICNALGVPHIQTRWKHQVSDNKDSFYVSLYPDFSSLSRAILDLVQFFKWKTVTVVYDDSTGLIRLQELIKAPSRYNLRLKIRQLPADTKDAKPLLKEMKRGKEFHVIFDCSHEMAAGILKQALAMGMMTEYYHYIFTTLDLFALDVEPYRYSGVNMTGFRILNTENTQVSSIIEKWSMERLQAPPKPDSGLLDGFMTTDAALMYDAVHVVSVAVQQFPQMTVSSLQCNRHKPWRFGTRFMSLIKEAHWEGLTGRITFNKTNGLRTDFDLDVISLKEEGLEKIGTWDPASGLNMTESQKGKPANITDSLSNRSLIVTTILEEPYVLFKKSDKPLYGNDRFEGYCIDLLRELSTILGFTYEIRLVEDGKYGAQDDANGQWNGMVRELIDHKSVLVKSNEEGIQRVLTSDYAFLMESTTIEFVTQRNCNLTQIGGLIDSKGYGVGTPMGSPYRDKITIAILQLQEEGKLHMMKEKWWRGNGCPEEESKEASALGVQNIGGIFIVLAAGLVLSVFVAVGEFLYKSKKNAQLEKRAKTKLPQDYVFLPILESVSISTVLSSSPSSSSLSSCS

SEQ ID NO: 31385 - protein, 197 aa, Homo sapiens
  MOD_RES (73)..(73): Selenocysteine
MSLGRLCRLLKPALLCGALAAPGLAGTMCASRDDWRCARSMHEFSAKDIDGHMVNLDKYRGFVCIVTNVASQXGKTEVNYTQLVDLHARYAECGLRILAFPCNQFGKQEPGSNEEIKEFAAGYNVKFDMFSKICVNGDDAHPLWKWMKIQPKGKGILGNAIKWNFTKFLIDKNGCVVKRYGPMEEPLVIEKDLPHYF

SEQ ID NO: 31386 - protein, 170 aa, Homo sapiens
  MOD_RES (46)..(46): Selenocysteine
MCASRDDWRCARSMHEFSAKDIDGHMVNLDKYRGFVCIVTNVASQXGKTEVNYTQLVDLHARYAECGLRILAFPCNQFGKQEPGSNEEIKEFAAGYNVKFDMFSKICVNGDDAHPLWKWMKIQPKGKGILGNAIKWNFTKFLIDKNGCVVKRYGPMEEPLVIEKDLPHYF

SEQ ID NO: 31387 - protein, 328 aa, Homo sapiens
MRPVRLMKVFVTRRIPAEGRVALARAADCEVEQWDSDEPIPAKELERGVAGAHGLLCLLSDHVDKRILDAAGANLKVISTMSVGIDHLALDEIKKRGIRVGYTPDVLTDTTAELAVSLLLTTCRRLPEAIEEVKNGGWTSWKPLWLCGYGLTQSTVGIIGLGRIGQAIARRLKPFGVQRFLYTGRQPRPEEAAEFQAEFVSTPELAAQSDFIVVACSLTPATEGLCNKDFFQKMKETAVFINISRGDVVNQDDLYQALASGKIAAAGLDVTSPEPLPTNHPLLTLKNCVILPHIGSATHRTRNTMSLLAANNLLAGLRGEPMPSELKL

SEQ ID NO: 31388 - protein, 252 aa, Homo sapiens
MLGGVPTLCGTGNETWTLLALGQAIARRLKPFGVQRFLYTGRQPRPEEAAEFQAEFVSTPELAAQSDFIVVACSLTPATEGLCNKDFFQKMKETAVFINISRYPRATLPSKPGEEPSPLLPSGDFLPRGLLVRPQAELAGFHKPNNQLRNSWEYTRPPYREEEPSEWAWPVCFSAVAPTRRGLAHSSVASGSVPREPLQAHYPPPQRAGLEDLKGPLEAASHTAEPGFVWLWFSDTLNLMLLGGQTLKLTWS

SEQ ID NO: 31389 - protein, 595 aa, Homo sapiens
MRAARAAPLLQLLLLLGPWLEAAGVAESPLPAVVLAILARNAEHSLPHYLGALERLDYPRARMALWCATDHNVDNTTEMLQEWLAAVGDDYAAVVWRPEGEPRFYPDEEGPKHWTKERHQFLMELKQEALTFARNWGADYILFADTDNILTNNQTLRLLMGQGLPVVAPMLDSQTYYSNFWCGITPQGYYRRTAEYFPTKNRQRRGCFRVPMVHSTFLASLRAEGADQLAFYPPHPNYTWPFDDIIVFAYACQAAGVSVHVCNEHRYGYMNVPVKSHQGLEDERVNFIHLILEALVDGPRMQASAHVTRPSKRPSKIGFDEVFVISLARRPDRRERMLASLWEMEISGRVVDAVDGWMLNSSAIRNLGVDLLPGYQDPYSGRTLTKGEVGCFLSHYSIWEEVVARGLARVLVFEDDVRFESNFRGRLERLMEDVEAEKLSWDLIYLGRKQVNPEKETAVEGLPGLVVAGYSYWTLAYALRLAGARKLLASQPLRRMLPVDEFLPIMFDQHPNEQYKAHFWPRDLVAFSAQPLLAAPTHYAGDAEWLSDTETSSPWDDDSGRLISWSGSQKTLRSPRLDLTGSSGHSLQPQPRDEL

SEQ ID NO: 31390 - protein, 517 aa, Homo sapiens
MLQEWLAAVGDDYAAVVWRPEGEPRFYPDEEGPKHWTKERHQFLMELKQEALTFARNWGADYILFADTDNILTNNQTLRLLMGQGLPVVAPMLDSQTYYSNFWCGITPQGYYRRTAEYFPTKNRQRRGCFRVPMVHSTFLASLRAEGADQLAFYPPHPNYTWPFDDIIVFAYACQAAGVSVHVCNEHRYGYMNVPVKSHQGLEDERVNFIHLILEALVDGPRMQASAHVTRPSKRPSKIGFDEVFVISLARRPDRRERMLASLWEMEISGRVVDAVDGWMLNSSAIRNLGVDLLPGYQDPYSGRTLTKGEVGCFLSHYSIWEEVVARGLARVLVFEDDVRFESNFRGRLERLMEDVEAEKLSWDLIYLGRKQVNPEKETAVEGLPGLVVAGYSYWTLAYALRLAGARKLLASQPLRRMLPVDEFLPIMFDQHPNEQYKAHFWPRDLVAFSAQPLLAAPTHYAGDAEWLSDTETSSPWDDDSGRLISWSGSQKTLRSPRLDLTGSSGHSLQPQPRDEL

SEQ ID NO: 31391 - protein, 194 aa, Homo sapiens
MEEKLKKTKIIFVVGGPGSGKGTQCEKIVQKYGYTHLSTGDLLRSEVSSGSARGKKLSEIMEKGQLVPLETVLDMLRDAMVAKVNTSKGFLIDGYPREVQQGEEFERRIGQPTLLLYVDAGPETMTQRLLKRGETSGRVDDNEETIKKRLETYYKATEPVIAFYEKRGIVRKVNAEGSVDSVFSQVCTHLDALK

SEQ ID NO: 31392 - protein, 393 aa, Homo sapiens
MGKSDFLTPKAIANRIKSKGLQKLRWYCQMCQKQCRDENGFKCHCMSESHQRQLLLASENPQQFMDYFSEEFRNDFLELLRRRFGTKRVHNNIVYNEYISHREHIHMNATQWETLTDFTKWLGREGLCKVDETPKGWYIQYIDRDPETIRRQLELEKKKKQDLDDEEKTAKFIEEQVRRGLEGKEQEVPTFTELSRENDEEKVTFNLSKGACSSSGATSSKSSTLGPSALKTIGSSASVKRKESSQSSTQSKEKKKKKSALDEIMEIEEEKKRTARTDYWLQPEIIVKIITKKLGEKYHKKKAIVKEVIDKYTAVVKMIDSGDKLKLDQTHLETVIPAPGKRILVLNGGYRGNEGTLESINEKTFSATIVIETGPLKGRRVEGIQYEDISKLA

SEQ ID NO: 31393 - protein, 374 aa, Homo sapiens
MGKSDFLTPKAIANRIKSKGLQKLRWYCQMCQKQCRDENGFKCHCMSESHQRQLLLASENPQQFMDYFSEEFRNDFLELLRRRFGTKRVHNNIVYNEYISHREHIHMNATQWETLTDFTKWLGREGLCKVDETPKGWYIQYIDRDPETIRRQLELEKKKKQDLDDEEKTAKFIEEQVRRGLEGKEQEVPTFTELSRENDEEKVTFNLSKGACSSSGATSSKSSTLGPSALKTIGSSASVKRKESSQSSTQSKEKKKKKSALDEIMEIEEEKKRTARTDYWLQPEIIVKIITKKLGEKYHKKKAIVKEVIDKYTAVVKMIDSGDKLKLDQTHLETVIPAPGKRILVLNGGYRGNEGTLESINEKTFSATIVIETV

SEQ ID NO: 31394 - protein, 538 aa, Homo sapiens
MELSYQTLKFTHQAREACEMRTEARRKNLLILISHYLTQEGYIDTANALEQETKLGLRRFEVCDNIDLETILMEYESYYFVKFQKYPKIVKKSSDTAENNLPQRSRGKTRRMMNDSCQNLPKINQQRPRSKTTAGKTGDTKSLNKEHPNQEVVDNTRLESANFGLHISRIRKDSGEENAHPRRGQIIDFQGLLTDAIKGATSELALNTFDHNPDPSERLLKPLSAFIGMNSEMRELAAVVSRDIYLHNPNIKWNDIIGLDAAKQLVKEAVVYPIRYPQLFTGILSPWKGLLLYGPPGTGKTLLAKAVATECKTTFFNISASTIVSKWRGDSEKLVRVLFELARYHAPSTIFLDELESVMSQRGTASGGEHEGSLRMKTELLVQMDGLARSEDLVFVLAASNLPWELDCAMLRRLEKRILVDLPSREARQAMIYHWLPPVSKSRALELHTELEYSVLSQETEGYSGSDIKLVCREAAMRPVRKIFDALENHQSESSDLPRIQLDIVTTADFLDVLTHTKPSAKNLAQRYSDWQREFESV

SEQ ID NO: 31395 - protein, 466 aa, Homo sapiens
MEYESYYFVKFQKYPKIVKKSSDTAENNLPQRSRGKTRRMMNDSCQNLPKINQQRPRSKTTAGKTGDTKSLNKEHPNQEVVDNTRLESANFGLHISRIRKDSGEENAHPRRGQIIDFQGLLTDAIKGATSELALNTFDHNPDPSERLLKPLSAFIGMNSEMRELAAVVSRDIYLHNPNIKWNDIIGLDAAKQLVKEAVVYPIRYPQLFTGILSPWKGLLLYGPPGTGKTLLAKAVATECKTTFFNISASTIVSKWRGDSEKLVRVLFELARYHAPSTIFLDELESVMSQRGTASGGEHEGSLRMKTELLVQMDGLARSEDLVFVLAASNLPWELDCAMLRRLEKRILVDLPSREARQAMIYHWLPPVSKSRALELHTELEYSVLSQETEGYSGSDIKLVCREAAMRPVRKIFDALENHQSESSDLPRIQLDIVTTADFLDVLTHTKPSAKNLAQRYSDWQREFESV

SEQ ID NO: 31396 - protein, 1210 aa, Homo sapiens
MASQLQVFSPPSVSSSAFCSAKKLKIEPSGWDVSGQSSNDKYYTHSKTLPATQGQANSSHQVANFNIPAYDQGLLLPAPAVEHIVVTAADSSGSAATSTFQSSQTLTHRSNVSLLEPYQKCGLKRKSEEVDSNGSVQIIEEHPPLMLQNRTVVGAAATTTTVTTKSSSSSGEGDYQLVQHEILCSMTNSYEVLEFLGRGTFGQVAKCWKRSTKEIVAIKILKNHPSYARQGQIEVSILSRLSSENADEYNFVRSYECFQHKNHTCLVFEMLEQNLYDFLKQNKFSPLPLKYIRPILQQVATALMKLKSLGLIHADLKPENIMLVDPVRQPYRVKVIDFGSASHVSKAVCSTYLQSRYYRAPEIILGLPFCEAIDMWSLGCVIAELFLGWPLYPGASEYDQIRYISQTQGLPAEYLLSAGTKTTRFFNRDPNLGYPLWRLKTPEEHELETGIKSKEARKYIFNCLDDMAQVNMSTDLEGTDMLAEKADRREYIDLLKKMLTIDADKRITPLKTLNHQFVTMTHLLDFPHSNHVKSCFQNMEICKRRVHMYDTVSQIKSPFTTHVAPNTSTNLTMSFSNQLNTVHNQASVLASSSTAAAATLSLANSDVSLLNYQSALYPSSAAPVPGVAQQGVSLQPGTTQICTQTDPFQQTFIVCPPAFQTGLQATTKHSGFPVRMDNAVPIVPQAPAAQPLQIQSGVLTQGSCTPLMVATLHPQVATITPQYAVPFTLSCAAGRPALVEQTAAVLQAWPGGTQQILLPSTWQQLPGVALHNSVQPTAMIPEAMGSGQQLADWRNAHSHGNQYSTIMQQPSLLTNHVTLATAQPLNVGVAHVVRQQQSSSLPSKKNKQSAPVSSKSSLDVLPSQVYSLVGSSPLRTTSSYNSLVPVQDQHQPIIIPDTPSPPVSVITIRSDTDEEEDNKYKPSSSGLKPRSNVISYVTVNDSPDSDSSLSSPYSTDTLSALRGNSGSVLEGPGRVVADGTGTRTIIVPPLKTQLGDCTVATQASGLLSNKTKPVASVSGQSSGCCITPTGYRAQRGGTSAAQPLNLSQNQQSSAAPTSQERSSNPAPRRQQAFVAPLSQAPYTFQHGSPLHSTGHPHLAPAPAHLPSQAHLYTYAAPTSAAALGSTSSIAHLFSPQGSSRHAAAYTTHPSTLVHQVPVSVGPSLLTSASVAPAQYQHQFATQSYIGSSRGSTIYTGYPLSPTKISQYSYL

SEQ ID NO: 31397 - protein, 1075 aa, Homo sapiens
MASQLQVFSPPSVSSSAFCSAKKLKIEPSGWDVSGQSSNDKYYTHSKTLPATQGQANSSHQVANFNIPAYDQGLLLPAPAVEHIVVTAADSSGSAATSTFQSSQTLTHRSNVSLLEPYQKCGLKRKSEEVDSNGSVQIIEEHPPLMLQNRTVVGAAATTTTVTTKSSSSSGEGDYQLVQHEILCSMTNSYEVLEFLGRGTFGQVAKCWKRSTKEIVAIKILKNHPSYARQGQIEVSILSRLSSENADEYNFVRSYECFQHKNHTCLVFEMLEQNLYDFLKQNKFSPLPLKYIRPILQQVATALMKLKSLGLIHADLKPENIMLVDPVRQPYRVKVIDFGSASHVSKAVCSTYLQSRYYRAPEIILGLPFCEAIDMWSLGCVIAELFLGWPLYPGASEYDQIRYISQTQGLPAEYLLSAGTKTTRFFNRDPNLGYPLWRLKTPEEHELETGIKSKEARKYIFNCLDDMAQVNMSTDLEGTDMLAEKADRREYIDLLKKMLTIDADKRITPLKTLNHQFVTMTHLLDFPHSNHVKSCFQNMEICKRRVHMYDTVSQIKSPFTTHVAPNTSTNLTMSFSNQLNTVHNQASVLASSSTAAAATLSLANSDVSLLNYQSALYPSSAAPVPGVAQQGVSLQPGTTQICTQTDPFQQTFIVCPPAFQTGLQATTKHSGFPVRMDNAVPIVPQAPAAQPLQIQSGVLTQGSCTPLMVATLHPQVATITPQYAVPFTLSCAAGRPALVEQTAAVLQAWPGGTQQILLPSTWQQLPGVALHNSVQPTAMIPEAMGSGQQLADWRNAHSHGNQYSTIMQQPSLLTNHVTLATAQPLNVGVAHVVRQQQSSSLPSKKNKQSAPVSSKSSLDVLPSQVYSLVGSSPLRTTSSYNSLVPVQDQHQPIIIPDTPSPPVSVITIRSDTDEEEDNKYKPSSSGLKPRSNVISYVTVNDSPDSDSSLSSPYSTDTLSALRGNSGSVLEGPGRVVADGTGTRTIIVPPLKTQLGDCTVATQASGLLSNKTKPVASVSGQSSGCCITPTGYRAQRGGTSAAQPLNLSQVSAMGYCLLFGPCTVVTFWRTLLLAGC

SEQ ID NO: 31398 - protein, 836 aa, Homo sapiens
MWSLGCVIAELFLGWPLYPGASEYDQIRYISQTQGLPAEYLLSAGTKTTRFFNRDPNLGYPLWRLKTPEEHELETGIKSKEARKYIFNCLDDMAQVNMSTDLEGTDMLAEKADRREYIDLLKKMLTIDADKRITPLKTLNHQFVTMTHLLDFPHSNHVKSCFQNMEICKRRVHMYDTVSQIKSPFTTHVAPNTSTNLTMSFSNQLNTVHNQASVLASSSTAAAATLSLANSDVSLLNYQSALYPSSAAPVPGVAQQGVSLQPGTTQICTQTDPFQQTFIVCPPAFQTGLQATTKHSGFPVRMDNAVPIVPQAPAAQPLQIQSGVLTQGSCTPLMVATLHPQVATITPQYAVPFTLSCAAGRPALVEQTAAVLQAWPGGTQQILLPSTWQQLPGVALHNSVQPTAMIPEAMGSGQQLADWRNAHSHGNQYSTIMQQPSLLTNHVTLATAQPLNVGVAHVVRQQQSSSLPSKKNKQSAPVSSKSSLDVLPSQVYSLVGSSPLRTTSSYNSLVPVQDQHQPIIIPDTPSPPVSVITIRSDTDEEEDNKYKPSSSGLKPRSNVISYVTVNDSPDSDSSLSSPYSTDTLSALRGNSGSVLEGPGRVVADGTGTRTIIVPPLKTQLGDCTVATQASGLLSNKTKPVASVSGQSSGCCITPTGYRAQRGGTSAAQPLNLSQNQQSSAAPTSQERSSNPAPRRQQAFVAPLSQAPYTFQHGSPLHSTGHPHLAPAPAHLPSQAHLYTYAAPTSAAALGSTSSIAHLFSPQGSSRHAAAYTTHPSTLVHQVPVSVGPSLLTSASVAPAQYQHQFATQSYIGSSRGSTIYTGYPLSPTKISQYSYL

SEQ ID NO: 31399 - protein, 816 aa, Homo sapiens
MVLMFQIRYISQTQGLPAEYLLSAGTKTTRFFNRDPNLGYPLWRLKTPEEHELETGIKSKEARKYIFNCLDDMAQVNMSTDLEGTDMLAEKADRREYIDLLKKMLTIDADKRITPLKTLNHQFVTMTHLLDFPHSNHVKSCFQNMEICKRRVHMYDTVSQIKSPFTTHVAPNTSTNLTMSFSNQLNTVHNQASVLASSSTAAAATLSLANSDVSLLNYQSALYPSSAAPVPGVAQQGVSLQPGTTQICTQTDPFQQTFIVCPPAFQTGLQATTKHSGFPVRMDNAVPIVPQAPAAQPLQIQSGVLTQGSCTPLMVATLHPQVATITPQYAVPFTLSCAAGRPALVEQTAAVLQAWPGGTQQILLPSTWQQLPGVALHNSVQPTAMIPEAMGSGQQLADWRNAHSHGNQYSTIMQQPSLLTNHVTLATAQPLNVGVAHVVRQQQSSSLPSKKNKQSAPVSSKSSLDVLPSQVYSLVGSSPLRTTSSYNSLVPVQDQHQPIIIPDTPSPPVSVITIRSDTDEEEDNKYKPSSSGLKPRSNVISYVTVNDSPDSDSSLSSPYSTDTLSALRGNSGSVLEGPGRVVADGTGTRTIIVPPLKTQLGDCTVATQASGLLSNKTKPVASVSGQSSGCCITPTGYRAQRGGTSAAQPLNLSQNQQSSAAPTSQERSSNPAPRRQQAFVAPLSQAPYTFQHGSPLHSTGHPHLAPAPAHLPSQAHLYTYAAPTSAAALGSTSSIAHLFSPQGSSRHAAAYTTHPSTLVHQVPVSVGPSLLTSASVAPAQYQHQFATQSYIGSSRGSTIYTGYPLSPTKISQYSYL

SEQ ID NO: 31400 - protein, 616 aa, Homo sapiens
MSTIQSETDCYDIIEVLGKGTFGEVAKGWRRSTGEMVAIKILKNDAYRNRIIKNELKLLHCMRGLDPEEAHVIRFLEFFHDALKFYLVFELLEQNLFEFQKENNFAPLPARHIRTVTLQVLTALARLKELAIIHADLKPENIMLVDQTRCPFRVKVIDFGSASIFSEVRYVKEPYIQSRFYRAPEILLGLPFCEKVDVWSLGCVMAELHLGWPLYPGNNEYDQVRYICETQGLPKPHLLHAACKAHHFFKRNPHPDAANPWQLKSSADYLAETKVRPLERRKYMLKSLDQIETVNGGSVASRLTFPDREALAEHADLKSMVELIKRMLTWESHERISPSAALRHPFVSMQQLRSAHETTHYYQLSLRSYRLSLQVEGKPPTPVVAAEDGTPYYCLAEEKEAAGMGSVAGSSPFFREEKAPGMQRAIDQLDDLSLQEAGHGLWGETCTNAVSDMMVPLKAAITGHHVPDSGPEPILAFYSSRLAGRHKARKPPAGSKSDSNFSNLIRLSQVSPEDDRPCRGSSWEEGEHLGASAEPLAILQRDEDGPNIDNMTMEAERPDPELFDPSSCPGEWLSEPDCTLESVRGPRAQGLPPRRSHQHGPPRGATSFLQHVTGHH

SEQ ID NO: 31401 - protein, 963 aa, Homo sapiens
MADLAECNIKVMCRFRPLNESEVNRGDKYIAKFQGEDTVVIASKPYAFDRVFQSSTSQEQVYNDCAKKIVKDVLEGYNGTIFAYGQTSSGKTHTMEGKLHDPEGMGIIPRIVQDIFNYIYSMDENLEFHIKVSYFEIYLDKIRDLLDVSKTNLSVHEDKNRVPYVKGCTERFVCSPDEVMDTIDEGKSNRHVAVTNMNEHSSRSHSIFLINVKQENTQTEQKLSGKLYLVDLAGSEKVSKTGAEGAVLDEAKNINKSLSALGNVISALAEGSTYVPYRDSKMTRILQDSLGGNCRTTIVICCSPSSYNESETKSTLLFGQRAKTIKNTVCVNVELTAEQWKKKYEKEKEKNKILRNTIQWLENELNRWRNGETVPIDEQFDKEKANLEAFTVDKDITLTNDKPATAIGVIGNFTDAERRKCEEEIAKLYKQLDDKDEEINQQSQLVEKLKTQMLDQEELLASTRRDQDNMQAELNRLQAENDASKEEVKEVLQALEELAVNYDQKSQEVEDKTKEYELLSDELNQKSATLASIDAELQKLKEMTNHQKKRAAEMMASLLKDLAEIGIAVGNNDVKQPEGTGMIDEEFTVARLYISKMKSEVKTMVKRCKQLESTQTESNKKMEENEKELAACQLRISQHEAKIKSLTEYLQNVEQKKRQLEESVDALSEELVQLRAQEKVHEMEKEHLNKVQTANEVKQAVEQQIQSHRETHQKQISSLRDEVEAKAKLITDLQDQNQKMMLEQERLRVEHEKLKATDQEKSRKLHELTVMQDRREQARQDLKGLEETVAKELQTLHNLRKLFVQDLATRVKKSAEIDSDDTGGSAAQKQKISFLENNLEQLTKVHKQLVRDNADLRCELPKLEKRLRATAERVKALESALKEAKENASRDRKRYQQEVDRIKEAVRSKNMARRGHSAQIAKPIRPGQHPAASPTHPSAIRGGGAFVQNSQPVAVRGGGGKQV

SEQ ID NO: 31402 - protein, 1017 aa, Homo sapiens
MKLLKPTWVNHNGKPIFSVDIHPDGTKFATGGQGQDSGKVVIWNMSPVLQEDDEKDENIPKMLCQMDNHLACVNCVRWSNSGMYLASGGDDKLIMVWKRATYIGPSTVFGSSGKLANVEQWRCVSILRNHSGDVMDVAWSPHDAWLASCSVDNTVVIWNAVKFPEILATLRGHSGLVKGLTWDPVGKYIASQADDRSLKVWRTLDWQLETSITKPFDECGGTTHVLRLSWSPDGHYLVSAHAMNNSGPTAQIIEREGWKTNMDFVGHRKAVTVVKFNPKIFKKKQKNGSSAKPSCPYCCCAVGSKDRSLSVWLTCLKRPLVVIHELFDKSIMDISWTLNGLGILVCSMDGSVAFLDFSQDELGDPLSEEEKSRIHQSTYGKSLAIMTEAQLSTAVIENPEMLKYQRRQQQQQLDQKSAATREMGSATSVAGVVNGESLEDIRKNLLKKQVETRTADGRRRITPLCIAQLDTGDFSTAFFNSIPLSGSLAGTMLSSHSSPQLLPLDSSTPNSFGASKPCTEPVVAASARPAGDSVNKDSMNATSTPAALSPSVLTTPSKIEPMKAFDSRFTERSKATPGAPALTSMTPTAVERLKEQNLVKELRPRDLLESSSDSDEKVPLAKASSLSKRKLELEVETVEKKKKGRPRKDSRLMPVSLSVQSPAALTAEKEAMCLSAPALALKLPIPSPQRAFTLQVSSDPSMYIEVENEVTVVGGVKLSRLKCNREGKEWETVLTSRILTAAGSCDVVCVACEKRMLSVFSTCGRRLLSPILLPSPISTLHCTGSYVMALTAAATLSVWDVHRQVVVVKEESLHSILAGSDMTVSQILLTQHGIPVMNLSDGKAYCFNPSLSTWNLVSDKQDSLAQCADFRSSLPSQDAMLCSGPLAIIQGRTSNSGRQAARLFSVPHVVQQETTLAYLENQVAAALTLQSSHEYRHWLLVYARYLVNEGFEYRLREICKDLLGPVHYSTGSQWESTVVGLRKRELLKELLPVIGQNLRFQRLFTECQEQLDILRDK

SEQ ID NO: 31403 - protein, 810 aa, Homo sapiens
MKLLKPTWVNHNGKPIFSVDIHPDGTKFATGGQGQDSGKVVIWNMSPVLQEDDEKDENIPKMLCQMDNHLACVNCVRWSNSGMYLASGGDDKLIMVWKRATYIGPSTVFGSSGKLANVEQWRCVSILRNHSGDVMDVAWSPHDAWLASCSVDNTVVIWNAVKFPEILATLRGHSGLVKGLTWDPVGKYIASQADDRSLKVWRTLDWQLETSITKPFDECGGTTHVLRLSWSPDGHYLVSAHAMNNSGPTAQIIEREGWKTNMDFVGHRKAVTVVKFNPKIFKKKQKNGSSAKPSCPYCCCAVGSKDRSLSVWLTCLKRPLVVIHELFDKSIMDISWTLNGLGILVCSMDGSVAFLDFSQDELGDPLSEEEKSRIHQSTYGKSLAIMTEAQLSTAVIENPEMLKYQRRQQQQQLDQKSAATREMGSATSVAGVVNGESLEDIRKNLLKKQVETRTADGRRRITPLCIAQLDTGDFSTAFFNSIPLSGSLAGTMLSSHSSPQLLPLDSSTPNSFGASKPCTEPVVAASARPAGDSVNKDSMNATSTPAALSPSVLTTPSKIEPMKAFDSRFTERSKATPGAPALTSMTPTAVERDVHRQVVVVKEESLHSILAGSDMTVSQILLTQHGIPVMNLSDGKAYCFNPSLSTWNLVSDKQDSLAQCADFRSSLPSQDAMLCSGPLAIIQGRTSNSGRQAARLFSVPHVVQQETTLAYLENQVAAALTLQSSHEYRHWLLVYARYLVNEGFEYRLREICKDLLGPVHYSTGSQWESTVVGLRKRELLKELLPVIGQNLRFQRLFTECQEQLDILRDK

SEQ ID NO: 31404 - protein, 445 aa, Homo sapiens
MERAPPDGPLNASGALAGEAAAAGGARGFSAAWTAVLAALMALLIVATVLGNALVMLAFVADSSLRTQNNFFLLNLAISDFLVGAFCIPLYVPYVLTGRWTFGRGLCKLWLVVDYLLCTSSAFNIVLISYDRFLSVTRAVSYRAQQGDTRRAVRKMLLVWVLAFLLYGPAILSWEYLSGGSSIPEGHCYAEFFYNWYFLITASTLEFFTPFLSVTFFNLSIYLNIQRRTRLRLDGAREAAGPEPPPEAQPSPPPPPGCWGCWQKGHGEAMPLHRYGVGEAAVGAEAGEATLGGGGGGGSVASPTSSSGSSSRGTERPRSLKRGSKPSASSASLEKRMKMVSQSFTQRFRLSRDRKVAKSLAVIVSIFGLCWAPYTLLMIIRAACHGHCVPDYWYETSFWLLWANSAVNPVLYPLCHHSFRRAFTKLLCPQKLKIQPHSSLEHCWK

SEQ ID NO: 31405 - protein, 453 aa, Homo sapiens
MERAPPDGPLNASGALAGEAAAAGGARGFSAAWTAVLAALMALLIVATVLGNALVMLAFVADSSLRTQNNFFLLNLAISDFLVGAFCIPLYVPYVLTGRWTFGRGLCKLWLVVDYLLCTSSAFNIVLISYDRFLSVTRAVSYRAQQGDTRRAVRKMLLVWVLAFLLYGPAILSWEYLSGGSSIPEGHCYAEFFYNWYFLITASTLEFFTPFLSVTFFNLSIYLNIQRRTRLRLDGAREAAGPEPPPEAQPSPPPPPGCWGCWQKGHGEAMPLHRYGVGEAAVGAEAGEATLGGGGGGGSVASPTSSSGSSSRGTERPRSLKRGSKPSASSASLEKRMKMVSQSFTQRFRLSRDRKVAKSLAVIVSIFGLCWAPYTLLMIIRAACHGHCVPDYWYETSFWLLWANSAVNPVLYPLCHHSFRRAFTKLLCPQKLKIQPHSSLEHCWKKMKKKTCL

SEQ ID NO: 31406 - protein, 365 aa, Homo sapiens
MERAPPDGPLNASGALAGEAAAAGGARGFSAAWTAVLAALMALLIVATVLGNALVMLAFVADSSLRTQNNFFLLNLAISDFLVGAFCIPLYVPYVLTGRWTFGRGLCKLWLVVDYLLCTSSAFNIVLISYDRFLSVTRAVSYRAQQGDTRRAVRKMLLVWVLAFLLYGPAILSWEYLSGGSSIPEGHCYAEFFYNWYFLITASTLEFFTPFLSVTFFNLSIYLNIQRRTRLRLDGAREAAGPEPPPEAQPSPPPPPGCWGCWQKGHGEAMPLHRKVAKSLAVIVSIFGLCWAPYTLLMIIRAACHGHCVPDYWYETSFWLLWANSAVNPVLYPLCHHSFRRAFTKLLCPQKLKIQPHSSLEHCWK

SEQ ID NO: 31407 - protein, 431 aa, Homo sapiens
MERAPPDGPLNASGALAGEAAAAGGARGFSAAWTAVLAALMALLIVATVLGNALVMLAFVADSSLRTQNNFFLLNLAISDFLVGRWTFGRGLCKLWLVVDYLLCTSSAFNIVLISYDRFLSVTRAVSYRAQQGDTRRAVRKMLLVWVLAFLLYGPAILSWEYLSGGSSIPEGHCYAEFFYNWYFLITASTLEFFTPFLSVTFFNLSIYLNIQRRTRLRLDGAREAAGPEPPPEAQPSPPPPPGCWGCWQKGHGEAMPLHRYGVGEAAVGAEAGEATLGGGGGGGSVASPTSSSGSSSRGTERPRSLKRGSKPSASSASLEKRMKMVSQSFTQRFRLSRDRKVAKSLAVIVSIFGLCWAPYTLLMIIRAACHGHCVPDYWYETSFWLLWANSAVNPVLYPLCHHSFRRAFTKLLCPQKLKIQPHSSLEHCWK

SEQ ID NO: 31408 - protein, 326 aa, Homo sapiens
MERAPPDGPLNASGALAGEAAAAGGARGFSAAWTAVLAALMALLIVATVLGNALVMLAFVADSSLRTQNNFFLLNLAISDFLVGAFCIPLYVPYVLTGRWTFGRGLCKLWLVVDYLLCTSSAFNIVLISYDRFLSVTRAVSYRAQQGDTRRAVRKMLLVWVLAFLLYGPAILSWEYLSGGSSIPEGHCYAEFFYNWRPRSLKRGSKPSASSASLEKRMKMVSQSFTQRFRLSRDRKVAKSLAVIVSIFGLCWAPYTLLMIIRAACHGHCVPDYWYETSFWLLWANSAVNPVLYPLCHHSFRRAFTKLLCPQKLKIQPHSSLEHCWK

SEQ ID NO: 31409 - protein, 329 aa, Homo sapiens
MERAPPDGPLNASGALAGEAAAAGGARGFSAAWTAVLAALMALLIVATVLGNALVMLAFVADSSLRTQNNFFLLNLAISDFLVGAFCIPLYVPYVLTGRWTFGRGLCKLWLVVDYLLCTSSAFNIVLISYDRFLSVTRAVSYRAQQGDTRRAVRKMLLVWVLAFLLYGPAILSWEYLSGGSSIPEGHCYAEFFYNWYFLITASTLEFFTPFLSVTFFNLSIYLNIQSFTQRFRLSRDRKVAKSLAVIVSIFGLCWAPYTLLMIIRAACHGHCVPDYWYETSFWLLWANSAVNPVLYPLCHHSFRRAFTKLLCPQKLKIQPHSSLEHCWK

SEQ ID NO: 31410 - protein, 415 aa, Homo sapiens
MERAPPDGPLNASGALAGEAAAAGGARGFSAAWTAVLAALMALLIVATVLGNALVMLAFVADSSLRTQNNFFLLNLAISDFLVGAFCIPLYVPYVLTGRWTFGRGLCKLWLVVDYLLCTSSAFNIVLISYDRFLSVTRAVSYRAQQGDTRRAVRKMLLVWVLAFLLYGPAILSWEYLSGGSSIPEGHCYAEFFYNWYFLITASTLEFFTPFLSVTFFNLSIYLNIQRRTRLRLKGHGEAMPLHRYGVGEAAVGAEAGEATLGGGGGGGSVASPTSSSGSSSRGTERPRSLKRGSKPSASSASLEKRMKMVSQSFTQRFRLSRDRKVAKSLAVIVSIFGLCWAPYTLLMIIRAACHGHCVPDYWYETSFWLLWANSAVNPVLYPLCHHSFRRAFTKLLCPQKLKIQPHSSLEHCWK

SEQ ID NO: 31411 - protein, 173 aa, Homo sapiens
MGLPRRAGDAAELRKSLKPLLEKRRRARINQSLSQLKGLILPLLGRENSNCSKLEKADVLEMTVRFLQELPASSWPTAAPLPCDSYREGYSACVARLARVLPACRVLEPAVSARLLEHLWRRAASATLDGGRAGDSSGPSAPAPAPASAPEPASAPVPSPPSPPCGPGLWRPW

SEQ ID NO: 31412 - protein, 76 aa, Homo sapiens
MGLPRRAGDAAELRKSLKPLLEKRRRARINQSLSQLKGLILPLLGREDASGWHTWLPLHAQNCFLLYIQAPEQPPA

SEQ ID NO: 31413 - protein, 414 aa, Homo sapiens
MKAQTALSFFLILITSLSGSQGIFPLAFFIYVPMNEQIVIGRLDEDIILPSSFERGSEVVIHWKYQDSYKVHSYYKGSDHLESQDPRYANRTSLFYNEIQNGNASLFFRRVSLLDEGIYTCYVGTAIQVITNKVVLKVGVFLTPVMKYEKRNTNSFLICSVLSVYPRPIITWKMDNTPISENNMEETGSLDSFSINSPLNITGSNSSYECTIENSLLKQTWTGRWTMKDGLHKMQSEHVSLSCQPVNDYFSPNQDFKVTWSRMKSGTFSVLAYYLSSSQNTIINESRFSWNKELINQSDFSMNLMDLNLSDSGEYLCNISSDEYTLLTIHTVHVEPSQETASHNKGLWILVPSAILAAFLLIWSVKCCRAQLEARRSRHPADGAQQERCCVPPGERCPSAPDNGEENVPLSGKV

SEQ ID NO: 31414 - protein, 350 aa, Homo sapiens
MVMWNILKPRTHLLCMTNMFCTRHEGTDSTVFLPHSHNISEWISRRVSLLDEGIYTCYVGTAIQVITNKVVLKVGVFLTPVMKYEKRNTNSFLICSVLSVYPRPIITWKMDNTPISENNMEETGSLDSFSINSPLNITGSNSSYECTIENSLLKQTWTGRWTMKDGLHKMQSEHVSLSCQPVNDYFSPNQDFKVTWSRMKSGTFSVLAYYLSSSQNTIINESRFSWNKELINQSDFSMNLMDLNLSDSGEYLCNISSDEYTLLTIHTVHVEPSQETASHNKGLWILVPSAILAAFLLIWSVKCCRAQLEARRSRHPADGAQQERCCVPPGERCPSAPDNGEENVPLSGKV

SEQ ID NO: 31415 - protein, 700 aa, Homo sapiens
MLKMLSFKLLLLAVALGFFEGDAKFGERNEGSGARRRRCLNGNPPKRLKRRDRRMMSQLELLSGGEMLCGGFYPRLSCCLRSDSPGLGRLENKIFSVTNNTECGKLLEEIKCALCSPHSQSLFHSPEREVLERDLVLPLLCKDYCKEFFYTCRGHIPGFLQTTADEFCFYYARKDGGLCFPDFPRKQVRGPASNYLDQMEEYDKVEEISRKHKHNCFCIQEVVSGLRQPVGALHSGDGSQRLFILEKEGYVKILTPEGEIFKEPYLDIHKLVQSGIKGGDERGLLSLAFHPNYKKNGKLYVSYTTNQERWAIGPHDHILRVVEYTVSRKNPHQVDLRTARVFLEVAELHRKHLGGQLLFGPDGFLYIILGDGMITLDDMEEMDGLSDFTGSVLRLDVDTDMCNVPYSIPRSNPHFNSTNQPPEVFAHGLHDPGRCAVDRHPTDININLTILCSDSNGKNRSSARILQIIKGKDYESEPSLLEFKPFSNGPLVGGFVYRGCQSERLYGSYVFGDRNGNFLTLQQSPVTKQWQEKPLCLGTSGSCRGYFSGHILGFGEDELGEVYILSSSKSMTQTHNGKLYKIVDPKRPLMPEECRATVQPAQTLTSECSRLCRNGYCTPTGKCCCSPGWEGDFCRTAKCEPACRHGGVCVRPNKCLCKKGYLGPQCEQVDRNIRRVTRAGILDQIIDMTSYLLDLTSYIV

SEQ ID NO: 31416 - protein, 320 aa, Homo sapiens
MLKMLSFKLLLLAVALGFFEGDAKFGERNEGSGARRRRCLNGNPPKRLKRRDRRMMSQLELLSGGEMLCGGFYPRLSCCLRSDSPGLGRLENKIFSVTNNTECGKLLEEIKCALCSPHSQSLFHSPEREVLERDLVLPLLCKDYCKEFFYTCRGHIPGFLQTTADEFCFYYARKDGGLCFPDFPRKQVRGPASNYLDQMEEYDKVEEISRKHKHNCFCIQEVVSGLRQPVGALHSGDGSQRLFILEKEGYVKILTPEGEIFKEPYLDIHKLVQSGIKVGFLNFIYFCAGYVNFILVLPSSLKVFLCNKRKNLAGENKGAT

SEQ ID NO: 31417 - protein, 501 aa, Homo sapiens
MGSRPPCGATSSARRACQFPAPMAAAREPELPQEAPATEPAPPPACRFFLEGRCRFGARCRQPHPGAPAPPGREAQPEAGAKKPPLRTAADVIQRIRWDPRLDPADFSVGYVDRFLGVREEPFSAFCWDQPLAALGPGVLAVPQHRVRFFRFHGRLVWDRASRTDLVFGSGSAAGRGPTILDAPNTEGAHGAEGAEWTLAGTGQEAQAAPKRGSTRPLCTGHQEPGVEEPGELEAAQERALGTAADLGTLAPRGRLAGVTEEALKPTAATRTTLLGGKEAQALGVPGGSAETTEAEWGPAAWPEDKRARLSVAAPCQPRPTHFVALMVTEPGLQAEVTKAQEYLVHVAPHCANFLVPSQNLHLTLALLRLAGAGEEAAAIGALRRALLAPGLNAPPRLSFRKLVLLGPHVLCAPPSPTLESMAQVLSQRLEAEGLSTLQSPGQLHPHLTVAKVPHGSQVHLPKLEFTLSQEVGCQPLQTLWLCRIGRTGGPFQPLAEIRLE

SEQ ID NO: 31418 - protein, 615 aa, Homo sapiens
MVSGPLALRWCAWAGRGDMGPDMELPSHSKQLLLQLNQQRTKGFLCDVIIMVENSIFRAHKNVLAASSIYFKSLVLHDNLINLDTDMVSSTVFQQILDFIYTGKLLPSDQPAEPNFSTLLTAASYLQLPELAALCRRKLKRAGKPFGSGRAGSTGMGRPPRSQRLSTASVIQARYQGLVDGRKGAHAPQELPQAKGSDDELFLGGSNQDSVQGLGRAVCPAGGEAGLGGCSSSTNGSSGGCEQELGLDLSKKSPPLPPATPGPHLTPDDAAQLSDSQHGSPPAASAPPVANSASYSELGGTPDEPMDLEGAEDNHLSLLEAPGGQPRKSLRHSTRKKEWGKKEPVAGSPFERREAGPKGPCPGEEGEGVGDRVPNGILASGAGPSGPYGEPPYPCKEEEENGKDASEDSAQSGSEGGSGHASAHYMYRQEGYETVSYGDNLYVCIPCAKGFPSSEQLNAHVETHTEEELFIKEEGAYETGSGGAEEEAEDLSAPSAAYTAEPRPFKCSVCEKTYKDPATLRQHEKTHWLTRPFPCNICGKMFTQRGTMTRHMRSHLGLKPFACDECGMRFTRQYRLTEHMRVHSGEKPYECQLCGGKFTQQRNLISHLRMHTSPS

SEQ ID NO: 31419 - protein, 597 aa, Homo sapiens
MGPDMELPSHSKQLLLQLNQQRTKGFLCDVIIMVENSIFRAHKNVLAASSIYFKSLVLHDNLINLDTDMVSSTVFQQILDFIYTGKLLPSDQPAEPNFSTLLTAASYLQLPELAALCRRKLKRAGKPFGSGRAGSTGMGRPPRSQRLSTASVIQARYQGLVDGRKGAHAPQELPQAKGSDDELFLGGSNQDSVQGLGRAVCPAGGEAGLGGCSSSTNGSSGGCEQELGLDLSKKSPPLPPATPGPHLTPDDAAQLSDSQHGSPPAASAPPVANSASYSELGGTPDEPMDLEGAEDNHLSLLEAPGGQPRKSLRHSTRKKEWGKKEPVAGSPFERREAGPKGPCPGEEGEGVGDRVPNGILASGAGPSGPYGEPPYPCKEEEENGKDASEDSAQSGSEGGSGHASAHYMYRQEGYETVSYGDNLYVCIPCAKGFPSSEQLNAHVETHTEEELFIKEEGAYETGSGGAEEEAEDLSAPSAAYTAEPRPFKCSVCEKTYKDPATLRQHEKTHWLTRPFPCNICGKMFTQRGTMTRHMRSHLGLKPFACDECGMRFTRQYRLTEHMRVHSGEKPYECQLCGGKFTQQRNLISHLRMHTSPS

SEQ ID NO: 31420 - protein, 348 aa, Homo sapiens
MGPRARPALLLLMLLQTAVLQGRLLRSHSLHYLFMGASEQDLGLSLFEALGYVDDQLFVFYDHESRRVEPRTPWVSSRISSQMWLQLSQSLKGWDHMFTVDFWTIMENHNHSKESHTLQVILGCEMQEDNSTEGYWKYGYDGQDHLEFCPDTLDWRAAEPRAWPTKLEWERHKIRARQNRAYLERDCPAQLQQLLELGRGVLDQQVPPLVKVTHHVTSSVTTLRCRALNYYPQNITMKWLKDKQPMDAKEFEPKDVLPNGDGTYQGWITLAVPPGEEQRYTCQVEHPGLDQPLIVIWEPSPSGTLVIGVISGIAVFVVILFIGILFIILRKRQGSRGAMGHYVLAERE

SEQ ID NO: 31421 - protein, 260 aa, Homo sapiens
MGPRARPALLLLMLLQTAVLQGRLLQSHTLQVILGCEMQEDNSTEGYWKYGYDGQDHLEFCPDTLDWRAAEPRAWPTKLEWERHKIRARQNRAYLERDCPAQLQQLLELGRGVLDQQVPPLVKVTHHVTSSVTTLRCRALNYYPQNITMKWLKDKQPMDAKEFEPKDVLPNGDGTYQGWITLAVPPGEEQRYTCQVEHPGLDQPLIVIWEPSPSGTLVIGVISGIAVFVVILFIGILFIILRKRQGSRGAMGHYVLAERE

SEQ ID NO: 31422 - protein, 334 aa, Homo sapiens
MGPRARPALLLLMLLQTAVLQGRLLRSHSLHYLFMGASEQDLGLSLFEALGYVDDQLFVFYDHESRRVEPRTPWVSSRISSQMWLQLSQSLKGWDHMFTVDFWTIMENHNHSKESHTLQVILGCEMQEDNSTEGYWKYGYDGQDHLEFCPDTLDWRAAEPRAWPTKLEWERHKIRARQNRAYLERDCPAQLQQLLELGRGVLDQQVTTLRCRALNYYPQNITMKWLKDKQPMDAKEFEPKDVLPNGDGTYQGWITLAVPPGEEQRYTCQVEHPGLDQPLIVIWEPSPSGTLVIGVISGIAVFVVILFIGILFIILRKRQGSRGAMGHYVLAERE

SEQ ID NO: 31423 - protein, 246 aa, Homo sapiens
MGPRARPALLLLMLLQTAVLQGRLLQSHTLQVILGCEMQEDNSTEGYWKYGYDGQDHLEFCPDTLDWRAAEPRAWPTKLEWERHKIRARQNRAYLERDCPAQLQQLLELGRGVLDQQVTTLRCRALNYYPQNITMKWLKDKQPMDAKEFEPKDVLPNGDGTYQGWITLAVPPGEEQRYTCQVEHPGLDQPLIVIWEPSPSGTLVIGVISGIAVFVVILFIGILFIILRKRQGSRGAMGHYVLAERE

SEQ ID NO: 31424 - protein, 325 aa, Homo sapiens
MGPRARPALLLLMLLQTAVLQGRLLPLGYVDDQLFVFYDHESRRVEPRTPWVSSRISSQMWLQLSQSLKGWDHMFTVDFWTIMENHNHSKESHTLQVILGCEMQEDNSTEGYWKYGYDGQDHLEFCPDTLDWRAAEPRAWPTKLEWERHKIRARQNRAYLERDCPAQLQQLLELGRGVLDQQVPPLVKVTHHVTSSVTTLRCRALNYYPQNITMKWLKDKQPMDAKEFEPKDVLPNGDGTYQGWITLAVPPGEEQRYTCQVEHPGLDQPLIVIWEPSPSGTLVIGVISGIAVFVVILFIGILFIILRKRQGSRGAMGHYVLAERE

SEQ ID NO: 31425 - protein, 168 aa, Homo sapiens
MGPRARPALLLLMLLQTAVLQGRLLLPPLVKVTHHVTSSVTTLRCRALNYYPQNITMKWLKDKQPMDAKEFEPKDVLPNGDGTYQGWITLAVPPGEEQRYTCQVEHPGLDQPLIVIWEPSPSGTLVIGVISGIAVFVVILFIGILFIILRKRQGSRGAMGHYVLAERE

SEQ ID NO: 31426 - protein, 256 aa, Homo sapiens
MGPRARPALLLLMLLQTAVLQGRLLRSHSLHYLFMGASEQDLGLSLFEALGYVDDQLFVFYDHESRRVEPRTPWVSSRISSQMWLQLSQSLKGWDHMFTVDFWTIMENHNHSKVPPLVKVTHHVTSSVTTLRCRALNYYPQNITMKWLKDKQPMDAKEFEPKDVLPNGDGTYQGWITLAVPPGEEQRYTCQVEHPGLDQPLIVIWEPSPSGTLVIGVISGIAVFVVILFIGILFIILRKRQGSRGAMGHYVLAERE

SEQ ID NO: 31427 - protein, 276 aa, Homo sapiens
MGPRARPALLLLMLLQTAVLQGRLLRSHSLHYLFMGASEQDLGLSLFEALGYVDDQLFVFYDHESRRVEPRTPWVSSRISSQMWLQLSQSLKGWDHMFTVDFWTIMENHNHSKESHTLQVILGCEMQEDNSTEGYWKYGYDGQDHLEFCPDTLDWRAAEPRAWPTKLEWERHKIRARQNRAYLERDCPAQLQQLLELGRGVLDQQVPPLVKVTHHVTSSVTTLRCRALNYYPQNITMKWLKDKQPMDAKEFEPKDVLPNGDGTYQGWITLAVPPKY

SEQ ID NO: 31428 - protein, 161 aa, Homo sapiens
MGPRARPALLLLMLLQTAVLQGRLLRSHSLHYLFMGASEQDLGLSLFEALGYVDDQLFVFYDHESRRVEPRTPWVSSRISSQMWLQLSQSLKGWDHMFTVDFWTIMENHNHSKESHTLQVILGCEMQEDNSTEGYWKYGYDGQVLQDTIYSSEVSSLGIKF

SEQ ID NO: 31429 - protein, 242 aa, Homo sapiens
MGPRARPALLLLMLLQTAVLQGRLLRSHSLHYLFMGASEQDLGLSLFEALGYVDDQLFVFYDHESRRVEPRTPWVSSRISSQMWLQLSQSLKGWDHMFTVDFWTIMENHNHSKVTTLRCRALNYYPQNITMKWLKDKQPMDAKEFEPKDVLPNGDGTYQGWITLAVPPGEEQRYTCQVEHPGLDQPLIVIWEPSPSGTLVIGVISGIAVFVVILFIGILFIILRKRQGSRGAMGHYVLAERE

SEQ ID NO: 31430 - protein, 76 aa, Homo sapiens
MGPRARPALLLLMLLQTAVLQGRLLQPSPSGTLVIGVISGIAVFVVILFIGILFIILRKRQGSRGAMGHYVLAERE

SEQ ID NO: 31431 - protein, 139 aa, Homo sapiens
MTGKNVYFQSQLEAFHCLQYELFPSRLTINLLVTTHIPFPQTKPHIARCVFTESSKILLGLWVQDGECSEIMTGAWSCRALRRKSRNLFSEQLKIIPKDLHFRNTMLSSCIRNQLGGPFLLEVENNERLNYRSGEGRQL

SEQ ID NO: 31432 - protein, 182 aa, Homo sapiens
MAEEQVNRSAGLAPDCEASATAETTVSSVGTCEAAGKSPEPKDYDSTCVFCRIAGRQDPGTELLHCENEDLICFKDIKPAATHHYLVVPKKHIGNCRTLRKDQVELVENMVTVGKTILERNNFTDFTNVRMGFHMPPFCSISHLHLHVLAPVDQLGFLSKLVYRVNSYWFITADHLIEKLRT

SEQ ID NO: 31433 - protein, 3142 aa, Homo sapiens
MATLEKLMKAFESLKSFQQQQQQQQQQQQQQQQQQQQQPPPPPPPPPPPQLPQPPPQAQPLLPQPQPPPPPPPPPPGPAVAEEPLHRPKKELSATKKDRVNHCLTICENIVAQSVRNSPEFQKLLGIAMELFLLCSDDAESDVRMVADECLNKVIKALMDSNLPRLQLELYKEIKKNGAPRSLRAALWRFAELAHLVRPQKCRPYLVNLLPCLTRTSKRPEESVQETLAAAVPKIMASFGNFANDNEIKVLLKAFIANLKSSSPTIRRTAAGSAVSICQHSRRTQYFYSWLLNVLLGLLVPVEDEHSTLLILGVLLTLRYLVPLLQQQVKDTSLKGSFGVTRKEMEVSPSAEQLVQVYELTLHHTQHQDHNVVTGALELLQQLFRTPPPELLQTLTAVGGIGQLTAAKEESGGRSRSGSIVELIAGGGSSCSPVLSRKQKGKVLLGEEEALEDDSESRSDVSSSALTASVKDEISGELAASSGVSTPGSAGHDIITEQPRSQHTLQADSVDLASCDLTSSATDGDEEDILSHSSSQVSAVPSDPAMDLNDGTQASSPISDSSQTTTEGPDSAVTPSDSSEIVLDGTDNQYLGLQIGQPQDEDEEATGILPDEASEAFRNSSMALQQAHLLKNMSHCRQPSDSSVDKFVLRDEATEPGDQENKPCRIKGDIGQSTDDDSAPLVHCVRLLSASFLLTGGKNVLVPDRDVRVSVKALALSCVGAAVALHPESFFSKLYKVPLDTTEYPEEQYVSDILNYIDHGDPQVRGATAILCGTLICSILSRSRFHVGDWMGTIRTLTGNTFSLADCIPLLRKTLKDESSVTCKLACTAVRNCVMSLCSSSYSELGLQLIIDVLTLRNSSYWLVRTELLETLAEIDFRLVSFLEAKAENLHRGAHHYTGLLKLQERVLNNVVIHLLGDEDPRVRHVAAASLIRLVPKLFYKCDQGQADPVVAVARDQSSVYLKLLMHETQPPSHFSVSTITRIYRGYNLLPSITDVTMENNLSRVIAAVSHELITSTTRALTFGCCEALCLLSTAFPVCIWSLGWHCGVPPLSASDESRKSCTVGMATMILTLLSSAWFPLDLSAHQDALILAGNLLAASAPKSLRSSWASEEEANPAATKQEEVWPALGDRALVPMVEQLFSHLLKVINICAHVLDDVAPGPAIKAALPSLTNPPSLSPIRRKGKEKEPGEQASVPLSPKKGSEASAASRQSDTSGPVTTSKSSSLGSFYHLPSYLKLHDVLKATHANYKVTLDLQNSTEKFGGFLRSALDVLSQILELATLQDIGKCVEEILGYLKSCFSREPMMATVCVQQLLKTLFGTNLASQFDGLSSNPSKSQGRAQRLGSSSVRPGLYHYCFMAPYTHFTQALADASLRNMVQAEQENDTSGWFDVLQKVSTQLKTNLTSVTKNRADKNAIHNHIRLFEPLVIKALKQYTTTTCVQLQKQVLDLLAQLVQLRVNYCLLDSDQVFIGFVLKQFEYIEVGQFRESEAIIPNIFFFLVLLSYERYHSKQIIGIPKIIQLCDGIMASGRKAVTHAIPALQPIVHDLFVLRGTNKADAGKELETQKEVVVSMLLRLIQYHQVLEMFILVLQQCHKENEDKWKRLSRQIADIILPMLAKQQMHIDSHEALGVLNTLFEILAPSSLRPVDMLLRSMFVTPNTMASVSTVQLWISGILAILRVLISQSTEDIVLSRIQELSFSPYLISCTVINRLRDGDSTSTLEEHSEGKQIKNLPEETFSRFLLQLVGILLEDIVTKQLKVEMSEQQHTFYCQELGTLLMCLIHIFKSGMFRRITAAATRLFRSDGCGGSFYTLDSLNLRARSMITTHPALVLLWCQILLLVNHTDYRWWAEVQQTPKRHSLSSTKLLSPQMSGEEEDSDLAAKLGMCNREIVRRGALILFCDYVCQNLHDSEHLTWLIVNHIQDLISLSHEPPVQDFISAVHRNSAASGLFIQAIQSRCENLSTPTMLKKTLQCLEGIHLSQSGAVLTLYVDRLLCTPFRVLARMVDILACRRVEMLLAANLQSSMAQLPMEELNRIQEYLQSSGLAQRHQRLYSLLDRFRLSTMQDSLSPSPPVSSHPLDGDGHVSLETVSPDKDWYVHLVKSQCWTRSDSALLEGAELVNRIPAEDMNAFMMNSEFNLSLLAPCLSLGMSEISGGQKSALFEAAREVTLARVSGTVQQLPAVHHVFQPELPAEPAAYWSKLNDLFGDAALYQSLPTLARALAQYLVVVSKLPSHLHLPPEKEKDIVKFVVATLEALSWHLIHEQIPLSLDLQAGLDCCCLALQLPGLWSVVSSTEFVTHACSLIYCVHFILEAVAVQPGEQLLSPERRTNTPKAISEEEEEVDPNTQNPKYITAACEMVAEMVESLQSVLALGHKRNSGVPAFLTPLLRNIIISLARLPLVNSYTRVPPLVWKLGWSPKPGGDFGTAFPEIPVEFLQEKEVFKEFIYRINTLGWTSRTQFEETWATLLGVLVTQPLVMEQEESPPEEDTERTQINVLAVQAITSLVLSAMTVPVAGNPAVSCLEQQPRNKPLKALDTRFGRKLSIIRGIVEQEIQAMVSKRENIATHHLYQAWDPVPSLSPATTGALISHEKLLLQINPERELGSMSYKLGQVSIHSVWLGNSITPLREEEWDEEEEEEADAPAPSSPPTSPVNSRKHRAGVDIHSCSQFLLELYSRWILPSSSARRTPAILISEVVRSLLVVSDLFTERNQFELMYVTLTELRRVHPSEDEILAQYLVPATCKAAAVLGMDKAVAEPVSRLLESTLRSSHLPSRVGALHGVLYVLECDLLDDTAKQLIPVISDYLLSNLKGIAHCVNIHSQQHVLVMCATAFYLIENYPLDVGPEFSASIIQMCGVMLSGSEESTPSIIYHCALRGLERLLLSEQLSRLDAESLVKLSVDRVNVHSPHRAMAALGLMLTCMYTGKEKVSPGRTSDPNPAAPDSESVIVAMERVSVLFDRIRKGFPCEARVVARILPQFLDDFFPPQDIMNKVIGEFLSNQQPYPQFMATVVYKVFQTLHSTGQSSMVRDWVMLSLSNFTQRAPVAMATWSLSCFFVSASTSPWVAAILPHVISRMGKLEQVDVNLFCLVATDFYRHQIEEELDRRAFQSVLEVVAAPGSPYHRLLTCLRNVHKVTTC

SEQ ID NO: 31434 - protein, 1068 aa, Homo sapiens
MNSIKNVPARVLSRRPGHSLEAEREQFDKTQAISISKAINTQEAPVKEKHARRIILGTHHEKGAFTFWSYAIGLPLPSSSILSWKFCHVLHKVLRDGHPNVLHDCQRYRSNIREIGDLWGHLHDRYGQLVNVYTKLLLTKISFHLKHPQFPAGLEVTDEVLEKAAGTDVNNIFQLTVEMFDYMDCELKLSESVFRQLNTAIAVSQMSSGQCRLAPLIQVIQDCSHLYHYTVKLLFKLHSCLPADTLQGHRDRFHEQFHSLRNFFRRASDMLYFKRLIQIPRLPEGPPNFLRASALAEHIKPVVVIPEEAPEDEEPENLIEISTGPPAGEPVVVADLFDQTFGPPNGSVKDDRDLQIESLKREVEMLRSELEKIKLEAQRYIAQLKSQVNALEGELEEQRKQKQKALVDNEQLRHELAQLRAAQLEGERSQGLREEAERKASATEARYNKLKEKHSELVHVHAELLRKNADTAKQLTVTQQSQEEVARVKEQLAFQVEQVKRESELKLEEKSDQLEKLKRELEAKAGELARAQEALSHTEQSKSELSSRLDTLSAEKDALSGAVRQREADLLAAQSLVRETEAALSREQQRSSQEQGELQGRLAERESQEQGLRQRLLDEQFAVLRGAAAEAAGILQDAVSKLDDPLHLRCTSSPDYLVSRAQEALDAVSTLEEGHAQYLTSLADASALVAALTRFSHLAADTIINGGATSHLAPTDPADRLIDTCRECGARALELMGQLQDQQALRHMQASLVRTPLQGILQLGQELKPKSLDVRQEELGAVVDKEMAATSAAIEDAVRRIEDMMNQARHASSGVKLEVNERILNSCTDLMKAIRLLVTTSTSLQKEIVESGRGAATQQEFYAKNSRWTEGLISASKAVGWGATQLVEAADKVVLHTGKYEELIVCSHEIAASTAQLVAASKVKANKHSPHLSRLQECSRTVNERAANVVASTKSGQEQIEDRDTMDFSGLSLIKLKKQEMETQVRVLELEKTLEAERMRLGELRKQHYVLAGASGSPGEEVAIRPSTAPRSVTTKKPPLAQKPSVAPRQDHQLDKKDGIYPAQLVNY

SEQ ID NO: 31435 - protein, 615 aa, Homo sapiens
MNSIKNVPARVLSRRPGHSLEAEREQFDKTQAISISKAINTQEAPVKEKHARRIILGTHHEKGAFTFWSYAIGLPLPSSSILSWKFCHVLHKVLRDGHPNVLHDCQRYRSNIREIGDLWGHLHDRYGQLVNVYTKLLLTKISFHLKHPQFPAGLEVTDEVLEKAAGTDVNNIFQLTVEMFDYMDCELKLSESVFRQLNTAIAVSQMSSGQCRLAPLIQVIQDCSHLYHYTVKLLFKLHSCLPADTLQGHRDRFHEQFHSLRNFFRRASDMLYFKRLIQIPRLPEGPPNFLRASALAEHIKPVVVIPEEAPEDEEPENLIEISTGPPAGEPVVVADLFDQTFGPPNGSVKDDRDLQIESLKREVEMLRSELEKIKLEAQRYIAQLKSQVNALEGELEEQRKQKQKALVDNEQLRHELAQLRAAQLEGERSQGLREEAERKASATEARYNKLKEKHSELVHVHAELLRKNADTAKQLTVTQQSQEEVARVKEQLAFQVEQVKRESELKLEEKSDQLEKLKRELEAKAGELARAQEALSHTEQSKSELSSRLDTLSAEKDALSGAVRQREADLLAAQSLVRETEAALSREQQRSSQEQGELQGRLAERVWPPQMQQHH

SEQ ID NO: 31436 - protein, 655 aa, Homo sapiens
MGRWAWVPSPWPPPGLGPFLLLLLLLLLLPRGFQPQPGGNRTESPEPNATATPAIPTILVTSVTSETPATSAPEAEGPQSGGLPPPPRAVPSSSSPQAQALTEDGRPCRFPFRYGGRMLHACTSEGSAHRKWCATTHNYDRDRAWGYCVEATPPPGGPAALDPCASGPCLNGGSCSNTQDPQSYHCSCPRAFTGKDCGTEKCFDETRYEYLEGGDRWARVRQGHVEQCECFGGRTWCEGTRHTACLSSPCLNGGTCHLIVATGTTVCACPPGFAGRLCNIEPDERCFLGNGTGYRGVASTSASGLSCLAWNSDLLYQELHVDSVGAAALLGLGPHAYCRNPDNDERPWCYVVKDSALSWEYCRLEACESLTRVQLSPDLLATLPEPASPGRQACGRRHKKRTFLRPRIIGGSSSLPGSHPWLAAIYIGDSFCAGSLVHTCWVVSAAHCFSHSPPRDSVSVVLGQHFFNRTTDVTQTFGIEKYIPYTLYSVFNPSDHDLVLIRLKKKGDRCATRSQFVQPICLPEPGSTFPAGHKCQIAGWGHLDENVSGYSSSLREALVPLVADHKCSSPEVYGADISPNMLCAGYFDCKSDACQGDSGGPLACEKNGVAYLYGIISWGDGCGRLHKPGVYTRVANYVDWINDRIRPPRRLVAPS

SEQ ID NO: 31437 - protein, 663 aa, Homo sapiens
MTGARASAAEQRRAGRSGQARAAERAAGMSGAGRALAALLLAASVLSAALLAPGGSSGRDAQAAPPRDLDKKRHAELKMDQALLLIHNELLWTNLTVYWKSECCYHCLFQVLVNVPQSPKAGKPSAAAASVSTQHGSILQLNDTLEEKEVCRLEYRFGEFGNYSLLVKNIHNGVSEIACDLAVNEDPVDSNLPVSIAFLIGLAVIIVISFLRLLLSLDDFNNWISKAISSRETDRLINSELGSPSRTDPLDGDVQPATWRLSALPPRLRSVDTFRGIALILMVFVNYGGGKYWYFKHASWNGLTVADLVFPWFVFIMGSSIFLSMTSILQRGCSKFRLLGKIAWRSFLLICIGIIIVNPNYCLGPLSWDKVRIPGVLQRLGVTYFVVAVLELLFAKPVPEHCASERSCLSLRDITSSWPQWLLILVLEGLWLGLTFLLPVPGCPTGYLGPGGIGDFGKYPNCTGGAAGYIDRLLLGDDHLYQHPSSAVLYHTEVAYDPEGILGTINSIVMAFLGVQAGKILLYYKARTKDILIRFTAWCCILGLISVALTKVSENEGFIPVNKNLWSLSYVTTLSSFAFFILLVLYPVVDVKGLWTGTPFFYPGMNSILVYVGHEVFENYFPFQWKLKDNQSHKEHLTQNIVATALWVLIAYILYRKKIFWKI

SEQ ID NO: 31438 - protein, 635 aa, Homo sapiens
MSGAGRALAALLLAASVLSAALLAPGGSSGRDAQAAPPRDLDKKRHAELKMDQALLLIHNELLWTNLTVYWKSECCYHCLFQVLVNVPQSPKAGKPSAAAASVSTQHGSILQLNDTLEEKEVCRLEYRFGEFGNYSLLVKNIHNGVSEIACDLAVNEDPVDSNLPVSIAFLIGLAVIIVISFLRLLLSLDDFNNWISKAISSRETDRLINSELGSPSRTDPLDGDVQPATWRLSALPPRLRSVDTFRGIALILMVFVNYGGGKYWYFKHASWNGLTVADLVFPWFVFIMGSSIFLSMTSILQRGCSKFRLLGKIAWRSFLLICIGIIIVNPNYCLGPLSWDKVRIPGVLQRLGVTYFVVAVLELLFAKPVPEHCASERSCLSLRDITSSWPQWLLILVLEGLWLGLTFLLPVPGCPTGYLGPGGIGDFGKYPNCTGGAAGYIDRLLLGDDHLYQHPSSAVLYHTEVAYDPEGILGTINSIVMAFLGVQAGKILLYYKARTKDILIRFTAWCCILGLISVALTKVSENEGFIPVNKNLWSLSYVTTLSSFAFFILLVLYPVVDVKGLWTGTPFFYPGMNSILVYVGHEVFENYFPFQWKLKDNQSHKEHLTQNIVATALWVLIAYILYRKKIFWKI

SEQ ID NO: 31439 - protein, 1158 aa, Homo sapiens
MESGHLLWALLFMQSLWPQLTDGATRVYYLGIRDVQWNYAPKGRNVITNQPLDSDIVASSFLKSDKNRIGGTYKKTIYKEYKDDSYTDEVAQPAWLGFLGPVLQAEVGDVILIHLKNFATRPYTIHPHGVFYEKDSEGSLYPDGSSGPLKADDSVPPGGSHIYNWTIPEGHAPTDADPACLTWIYHSHVDAPRDIATGLIGPLITCKRGALDGNSPPQRQDVDHDFFLLFSVVDENLSWHLNENIATYCSDPASVDKEDETFQESNRMHAINGFVFGNLPELNMCAQKRVAWHLFGMGNEIDVHTAFFHGQMLTTRGHHTDVANIFPATFVTAEMVPWEPGTWLISCQVNSHFRDGMQALYKVKSCSMAPPVDLLTGKVRQYFIEAHEIQWDYGPMGHDGSTGKNLREPGSISDKFFQKSSSRIGGTYWKVRYEAFQDETFQEKMHLEEDRHLGILGPVIRAEVGDTIQVVFYNRASQPFSMQPHGVFYEKDYEGTVYNDGSSYPGLVAKPFEKVTYRWTVPPHAGPTAQDPACLTWMYFSAADPIRDTNSGLVGPLLVCRAGALGADGKQKGVDKEFFLLFTVLDENKSWYSNANQAAAMLDFRLLSEDIEGFQDSNRMHAINGFLFSNLPRLDMCKGDTVAWHLLGLGTETDVHGVMFQGNTVQLQGMRKGAAMLFPHTFVMAIMQPDNLGTFEIYCQAGSHREAGMRAIYNVSQCPGHQATPRQRYQAARIYYIMAEEVEWDYCPDRSWEREWHNQSEKDSYGYIFLSNKDGLLGSRYKKAVFREYTDGTFRIPRPRTGPEEHLGILGPLIKGEVGDILTVVFKNNASRPYSVHAHGVLESTTVWPLAAEPGEVVTYQWNIPERSGPGPNDSACVSWIYYSAVDPIKDMYSGLVGPLAICQKGILEPHGGRSDMDREFALLFLIFDENKSWYLEENVATHGSQDPGSINLQDETFLESNKMHAINGKLYANLRGLTMYQGERVAWYMLAMGQDVDLHTIHFHAESFLYRNGENYRADVVDLFPGTFEVVEMVASNPGTWLMHCHVTDHVHAGMETLFTVFSRTEHLSPLTVITKETEKAVPPRDIEEGNVKMLGMQIPIKNVEMLASVLVAISVTLLLVVLALGGVVWYQHRQRKLRRNRRSILDDSFKLLSFKQ

SEQ ID NO: 31440 - protein, 1157 aa, Homo sapiens
MESGHLLWALLFMQSLWPQLTDGATRVYYLGIRDVQWNYAPKGRNVITNQPLDSDIVASSFLKSDKNRIGGTYKKTIYKEYKDDSYTDEVAQPAWLGFLGPVLQAEVGDVILIHLKNFATRPYTIHPHGVFYEKDSEGSLYPDGSSGPLKADDSVPPGGSHIYNWTIPEGHAPTDADPACLTWIYHSHVDAPRDIATGLIGPLITCKRGALDGNSPPQRQDVDHDFFLLFSVVDENLSWHLNENIATYCSDPASVDKEDETFQESNRMHAINGFVFGNLPELNMCAQKRVAWHLFGMGNEIDVHTAFFHGQMLTTRGHHTDVANIFPATFVTAEMVPWEPGTWLISCQVNSHFRDGMQALYKVKSCSMAPPVDLLTGKVRQYFIEAHEIQWDYGPMGHDGSTGKNLREPGSISDKFFQKSSSRIGGTYWKVRYEAFQDETFQEKMHLEEDRHLGILGPVIRAEVGDTIQVVFYNRASQPFSMQPHGVFYEKDYEGTVYNDGSSYPGLVAKPFEKVTYRWTVPPHAGPTAQDPACLTWMYFSAADPIRDTNSGLVGPLLVCRAGALGADGKQKGVDKEFFLLFTVLDENKSWYSNANQAAAMLDFRLLSEDIEGFQDSNRMHAINGFLFSNLPRLDMCKGDTVAWHLLGLGTETDVHGVMFQGNTVQLQGMRKGAAMLFPHTFVMAIMQPDNLGTFEIYCQAGSHREAGMRAIYNVSQCPGHQATPRQRYQAARIYYIMAEEVEWDYCPDRSWEREWHNQSEKDSYGYIFLSNKDGLLGSRYKKAVFREYTDGTFRIPRPRTGPEEHLGILGPLIKGEVGDILTVVFKNNASRPYSVHAHGVLESTTVWPLAAEPGEVVTYQWNIPERSGPGPNDSACVSWIYYSAVDPIKDMYSGLVGPLAICQKGILEPHGGRSDMDREFALLFLIFDENKSWYLEENVATHGSQDPGSINLQDETFLESNKMHAINGKLYANLRGLTMYQGERVAWYMLAMGQDVDLHTIHFHAESFLYRNGENYRADVVDLFPGTFEVVEMVASNPGTWLMHCHVTDHVHAGMETLFTVFSRTEHLSPLTVITKETEKVPPRDIEEGNVKMLGMQIPIKNVEMLASVLVAISVTLLLVVLALGGVVWYQHRQRKLRRNRRSILDDSFKLLSFKQ

SEQ ID NO: 31441 - protein, 1212 aa, Homo sapiens
MTQTLPYHLSLLNVLFPGPCSRHFKFRRGKCAQPAWRKVSAPSQDLLITKVMWAMESGHLLWALLFMQSLWPQLTDGATRVYYLGIRDVQWNYAPKGRNVITNQPLDSDIVASSFLKSDKNRIGGTYKKTIYKEYKDDSYTDEVAQPAWLGFLGPVLQAEVGDVILIHLKNFATRPYTIHPHGVFYEKDSEGSLYPDGSSGPLKADDSVPPGGSHIYNWTIPEGHAPTDADPACLTWIYHSHVDAPRDIATGLIGPLITCKRGALDGNSPPQRQDVDHDFFLLFSVVDENLSWHLNENIATYCSDPASVDKEDETFQESNRMHAINGFVFGNLPELNMCAQKRVAWHLFGMGNEIDVHTAFFHGQMLTTRGHHTDVANIFPATFVTAEMVPWEPGTWLISCQVNSHFRDGMQALYKVKSCSMAPPVDLLTGKVRQYFIEAHEIQWDYGPMGHDGSTGKNLREPGSISDKFFQKSSSRIGGTYWKVRYEAFQDETFQEKMHLEEDRHLGILGPVIRAEVGDTIQVVFYNRASQPFSMQPHGVFYEKDYEGTVYNDGSSYPGLVAKPFEKVTYRWTVPPHAGPTAQDPACLTWMYFSAADPIRDTNSGLVGPLLVCRAGALGADGKQKGVDKEFFLLFTVLDENKSWYSNANQAAAMLDFRLLSEDIEGFQDSNRMHAINGFLFSNLPRLDMCKGDTVAWHLLGLGTETDVHGVMFQGNTVQLQGMRKGAAMLFPHTFVMAIMQPDNLGTFEIYCQAGSHREAGMRAIYNVSQCPGHQATPRQRYQAARIYYIMAEEVEWDYCPDRSWEREWHNQSEKDSYGYIFLSNKDGLLGSRYKKAVFREYTDGTFRIPRPRTGPEEHLGILGPLIKGEVGDILTVVFKNNASRPYSVHAHGVLESTTVWPLAAEPGEVVTYQWNIPERSGPGPNDSACVSWIYYSAVDPIKDMYSGLVGPLAICQKGILEPHGGRSDMDREFALLFLIFDENKSWYLEENVATHGSQDPGSINLQDETFLESNKMHAINGKLYANLRGLTMYQGERVAWYMLAMGQDVDLHTIHFHAESFLYRNGENYRADVVDLFPGTFEVVEMVASNPGTWLMHCHVTDHVHAGMETLFTVFSRTEHLSPLTVITKETEKAVPPRDIEEGNVKMLGMQIPIKNVEMLASVLVAISVTLLLVVLALGGVVWYQHRQRKLRRNRRSILDDSFKLLSFKQ

SEQ ID NO: 31442 - protein, 891 aa, Homo sapiens
MHAINGFVFGNLPELNMCAQKRVAWHLFGMGNEIDVHTAFFHGQMLTTRGHHTDVANIFPATFVTAEMVPWEPGTWLISCQVNSHFRDGMQALYKVKSCSMAPPVDLLTGKVRQYFIEAHEIQWDYGPMGHDGSTGKNLREPGSISDKFFQKSSSRIGGTYWKVRYEAFQDETFQEKMHLEEDRHLGILGPVIRAEVGDTIQVVFYNRASQPFSMQPHGVFYEKDYEGTVYNDGSSYPGLVAKPFEKVTYRWTVPPHAGPTAQDPACLTWMYFSAADPIRDTNSGLVGPLLVCRAGALGADGKQKGVDKEFFLLFTVLDENKSWYSNANQAAAMLDFRLLSEDIEGFQDSNRMHAINGFLFSNLPRLDMCKGDTVAWHLLGLGTETDVHGVMFQGNTVQLQGMRKGAAMLFPHTFVMAIMQPDNLGTFEIYCQAGSHREAGMRAIYNVSQCPGHQATPRQRYQAARIYYIMAEEVEWDYCPDRSWEREWHNQSEKDSYGYIFLSNKDGLLGSRYKKAVFREYTDGTFRIPRPRTGPEEHLGILGPLIKGEVGDILTVVFKNNASRPYSVHAHGVLESTTVWPLAAEPGEVVTYQWNIPERSGPGPNDSACVSWIYYSAVDPIKDMYSGLVGPLAICQKGILEPHGGRSDMDREFALLFLIFDENKSWYLEENVATHGSQDPGSINLQDETFLESNKMHAINGKLYANLRGLTMYQGERVAWYMLAMGQDVDLHTIHFHAESFLYRNGENYRADVVDLFPGTFEVVEMVASNPGTWLMHCHVTDHVHAGMETLFTVFSRTEHLSPLTVITKETEKAVPPRDIEEGNVKMLGMQIPIKNVEMLASVLVAISVTLLLVVLALGGVVWYQHRQRKLRRNRRSILDDSFKLLSFKQ

SEQ ID NO: 31443 - protein, 792 aa, Homo sapiens
MAAPSLLNWRRVSSFTGPVPRARHGHRAVAIRELMIIFGGGNEGIADELHVYNTATNQWFLPAVRGDIPPGCAAHGFVCDGTRILVFGGMVEYGRYSNELYELQASRWLWKKVKPHPPPSGLPPCPRLGHSFSLYGNKCYLFGGLANESEDSNNNVPRYLNDFYELELQHGSGVVGWSIPVTKGVVPSPRESHTAVIYCKKDSGSPKMYVFGGMCGARLDDLWQLDLETMSWSKPETKGTVPLPRSLHTASVIGNKMYIFGGWVPHKGENTETSPHDCEWRCTSSFSYLNLDTTEWTTLVSDSQEDKKNSRPRPRAGHCAVAIGTRLYFWSGRDGYKKALNSQVCCKDLWYLDTEKPPAPSQVQLIKATTNSFHVKWDEVSTVEGYLLQLSTDLPYQAASSDSSAAPNMQGVRMDPHRQGSNNIVPNSINDTINSTKTEQPATKETSMKNKPDFKALTDSNAILYPSLASNASNHNSHVVDMLRKNEGPHTSANVGVLSSCLDVRTVIPETSVSSTVSSTQTMVTQQTIKTESSSTNGAVVKDETSLTTFSTKSEVDETYALPATKISRVETHATATPFSKETPSNPVATVKAGERQWCDVGIFKNNTALVSQFYLLPKGKQSISKVGNADVPDYSLLKKQDLVPGTGYRFRVAAINGCGIGPFSKISEFKTCIPGFPGAPSAVRISKNVEGIHLSWEPPTSPSGNILEYSAYLAIRTAQIQDNPSQLVFMRIYCGLKTSCIVTAGQLANAHIDYTSRPAIVFRISAKNEKGYGPATQVRWLQGNNKKAPLN

SEQ ID NO: 31444 - protein, 412 aa, Homo sapiens
MAAPSLLNWRRVSSFTGPVPRARHGHRAVAIRELMIIFGGGNEGIADELHVYNTATNQWFLPAVRGDIPPGCAAHGFVCDGTRILVFGGMVEYGRYSNELYELQASRWLWKKVKPHPPPSGLPPCPRLGHSFSLYGNKCYLFGGLANESEDSNNNVPRYLNDFYELELQHGSGVVGWSIPVTKGVVPSPRESHTAVIYCKKDSGSPKMYVFGGMCGARLDDLWQLDLETMSWSKPETKGTVPLPRSLHTASVIGNKMYIFGGWVPHKGENTETSPHDCEWRCTSSFSYLNLDTTEWTTLVSDSQEDKKNSRPRPRAGHCAVAIGTRLYFWSGRDGYKKALNSQVCCKDLWYLDTEKPPAPSQVQLIKATTNSFHVKWDEVSTVEGYLLQLSTDLPYQAASSDSSAAPNMQDQ

SEQ ID NO: 31445 - protein, 88 aa, Homo sapiens
MGNWGLGIAPWVDGESELEFRRLGMQGPLEALRRREWNTQRASFSFSFLIALSPHTVDYCHSYELFNRRWHGHVLATQRPSLFILMLV

SEQ ID NO: 31446 - protein, 1087 aa, Homo sapiens
MARSSPYLRQLQGPLLPPRDLVEEDDDYLNDDVEEDEESVFIDAEELCSGGVKAGSLPGCLRVSICDENTQETCKVFGRFPITGAWWRVKVQVKPVVGSRSYQYQVQGFPSYFLQSDMSPPNQKHICALFLKECEVSSDDVNKFLTWVKEVSNYKNLNFENLRETLRTFHKETGRKDQKQPTQNGQEELFLDNEMSLPLENTIPFRNVMTALQFPKIMEFLPVLLPRHFKWIIGSGSKEMLKEIEEILGTHPWKLGFSKITYREWKLLRCEASWIAFCQCESLLQLMTDLEKNALIMYSRLKQICREDGHTYVEVNDLTLTLSNHMSFHAASESLKFLKDIGVVTYEKSCVFPYDLYHAERAIAFSICDLMKKPPWHLCVDVEKVLASIHTTKPENSSDDALNESKPDEVRLENPVDVVDTQDNGDHIWTNGENEINAEISEVQLDQDQVEVPLDRDQVAALEMICSNPVTVISGKGGCGKTTIVSRLFKHIEQLEEREVKKACEDFEQDQNASEEWITFTEQSQLEADKAIEVLLTAPTGKAAGLLRQKTGLHAYTLCQVNYSFYSWTQTMMTTNKPWKFSSVRVLVVDEGSLVSVGIFKSVLNLLCEHSKLSKLIILGDIRQLPSIEPGNLLKDLFETLKSRNCAIELKTNHRAESQLIVDNATRISRRQFPKFDAELNISDNPTLPISIQDKTFIFVRLPEEDASSQSSKTNHHSCLYSAVKTLLQENNLQNAKTSQFIAFRRQDCDLINDCCCKHYTGHLTKDHQSRLVFGIGDKICCTRNAYLSDLLPENISGSQQNNDLDASSEDFSGTLPDFAKNKRDFESNVRLCNGEIFFITNDVTDVTFGKRRSLTINNMAGLEVTVDFKKLMKYCRIKHAWARTIHTFQGSEEQTVVYVVGKAGRQHWQHVYTAVTRGRCRVYVIAEESQLRNAIMKNSFPRKTRLKHFLQSKLSSSGAPPADFPSPRKSSGDSGGPSTPSASPLPVVTDHAMTNDVTWSEASSPDERTLTFAERWQLSSPDGVDTDDDLPKSRASKRTCGVNDDESPSKIFMVGESPQVSSRLQNLRLNNLIPRQLFKPTDNQET

SEQ ID NO: 31447 - protein, 574 aa, Homo sapiens
MARSSPYLRQLQGPLLPPRDLVEEDDDYLNDDVEEDEESVFIDAEELCSGGVKAGSLPGCLRVSICDENTQETCKVFGRFPITGAWWRVKVQVKPVVGSRSYQYQVQGFPSYFLQSDMSPPNQKHICALFLKECEVSSDDVNKFLTWVKEVSNYKNLNFENLRETLRTFHKETGRKDQKQPTQNGQEELFLDNEMSLPLENTIPFRNVMTALQFPKIMEFLPVLLPRHFKWIIGSGSKEMLKEIEEILGTHPWKLGFSKITYREWKLLRCEASWIAFCQCESLLQLMTDLEKNALIMYSRLKQICREDGHTYVEVNDLTLTLSNHMSFHAASESLKFLKDIGVVTYEKSCVFPYDLYHAERAIAFSICDLMKKPPWHLCVDVEKVLASIHTTKPENSSDDALNESKPDEVRLENPVDVVDTQDNGDHIWTNGENEINAEISEVQLDQDQVEVPLDRDQVAALEMICSNPVTVISGKGGCGKTTIVSRLFKHIEQLEEREVKKACEDFEQDQNASEEWITFTEQSQLEADKAIEVLLTAPTGKAAGLLRQKTGLHAYTLCQVTLDSYPVLNLVTC

SEQ ID NO: 31448 - protein, 92 aa, Homo sapiens
MSCQQNQQQCQPPPKCPSPKCPPKSPVQCLPPASSGCAPSSGGCGPSSEGGCFLNHHRRHHRCRRQRPNSCDRGSGQQGGGSGCGHGSGGCC

SEQ ID NO: 31449 - protein, 92 aa, Homo sapiens
MSCQQNQKQCQPPPKCPSPKCPPKNPVQCLPPASSGCAPSSGGCGPSSEGGCFLNHHRRHHRCRRQRSNSCDRGSGQQGGGSGCCHGSGGCC

SEQ ID NO: 31450 - protein, 99 aa, Homo sapiens
MSCQQNQQQCQPPPKCPIPKYPPKCPSKCASSCPPPISSCCGSSSGGCGCCSSEGGGCCLSHHRHHRSHCHRPKSSNCYGSGSGQQSGGSGCCSGGGCC

SEQ ID NO: 31451 - protein, 118 aa, Homo sapiens
MSCQQSQQQCQPPPKCTPKCPPKCTPKCPPKCPPKCPPQCSAPCPPPVSSCCGSSSGGCCSSEGGGCCLSHHRPRQSLRRRPQSSSCCGSGSGQQSGGSSCCHSSGGSGCCHSSGGCC

SEQ ID NO: 31452 - protein, 417 aa, Homo sapiens
MAAPGSARRPLLLLLLLLLLGLMHCASAAMFMVKNGNGTACIMANFSAAFSVNYDTKSGPKNMTFDLPSDATVVLNRSSCGKENTSDPSLVIAFGRGHTLTLNFTRNATRYSVQLMSFVYNLSDTHLFPNASSKEIKTVESITDIRADIDKKYRCVSGTQVHMNNVTVTLHDATIQAYLSNSSFSRGETRCEQDRPSPTTAPPAPPSPSPSPVPKSPSVDKYNVSGTNGTCLLASMGLQLNLTYERKDNTTVTRLLNINPNKTSASGSCGAHLVTLELHSEGTTVLLFQFGMNASSSRFFLQGIQLNTILPDARDPAFKAANGSLRALQATVGNSYKCNAEEHVRVTKAFSVNIFKVWVQAFKVEGGQFGSVEECLLDENSMLIPIAVGGALAGLVLIVLIAYLVGRKRSHAGYQTI

SEQ ID NO: 31453 - protein, 364 aa, Homo sapiens
MAAPGSARRPLLLLLLLLLLGLMHCASAAMFMVKNGNGTACIMANFSAAFSVNYDTKSGPKNMTFDLPSDATVVLNRSSCGKENTSDPSLVIAFGRGHTLTLNFTRNATRYSVQLMSFVYNLSDTHLFPNASSKETRCEQDRPSPTTAPPAPPSPSPSPVPKSPSVDKYNVSGTNGTCLLASMGLQLNLTYERKDNTTVTRLLNINPNKTSASGSCGAHLVTLELHSEGTTVLLFQFGMNASSSRFFLQGIQLNTILPDARDPAFKAANGSLRALQATVGNSYKCNAEEHVRVTKAFSVNIFKVWVQAFKVEGGQFGSVEECLLDENSMLIPIAVGGALAGLVLIVLIAYLVGRKRSHAGYQTI

SEQ ID NO: 31454 - protein, 450 aa, Homo sapiens
MGETMSKRLKLHLGGEAEMEERAFVNPFPDYEAAAGALLASGAAEETGCVRPPATTDEPGLPFHQDGKIIHNFIRRIQTKIKDLLQQMEEGLKTADPHDCSAYTGWTGIALLYLQLYRVTCDQTYLLRSLDYVKRTLRNLNGRRVTFLCGDAGPLAVGAVIYHKLRSDCESQECVTKLLQLQRSVVCQESDLPDELLYGRAGYLYALLYLNTEIGPGTVCESAIKEVVNAIIESGKTLSREERKTERCPLLYQWHRKQYVGAAHGMAGIYYMLMQPAAKVDQETLTEMVKPSIDYVRHKKFRSGNYPSSLSNETDRLVHWCHGAPGVIHMLMQAYKVFKEEKYLKEAMECSDVIWQRGLLRKGYGICHGTAGNGYSFLSLYRLTQDKKYLYRACKFAEWCLDYGAHGCRIPDRPYSLFEGMAGAIHFLSDVLGPETSRFPAFELDSSKRD

SEQ ID NO: 31455 - protein, 334 aa, Homo sapiens
MATLKEKLIAPVAEEEATVPNNKITVVGVGQVGMACAISILGKSLADELALVDVLEDKLKGEMMDLQHGSLFLQTPKIVADKDYSVTANSKIVVVTAGVRQQEGESRLNLVQRNVNVFKFIIPQIVKYSPDCIIIVVSNPVDILTYVTWKLSGLPKHRVIGSGCNLDSARFRYLMAEKLGIHPSSCHGWILGEHGDSSVAVWSGVNVAGVSLQELNPEMGTDNDSENWKEVHKMVVESAYEVIKLKGYTNWAIGLSVADLIESMLKNLSRIHPVSTMVKGMYGIENEVFLSLPCILNARGLTSVINQKLKDDEVAQLKKSADTLWDIQKDLKDL

SEQ ID NO: 31456 - protein, 414 aa, Homo sapiens [sequence omitted]

SEQ ID NO: 31457 - protein, 308 aa, Homo sapiens
MHSRGREIVVLLNPWSINEAVSSYCTYFIKQDSKSFGIMVSWKGIYFILTLFWGSFFGSIFMLSPFLPLMFVNPSWYRWINNRLVATWLTLPVALLETMFGVKVIITGDAFVPGERSVIIMNHRTRMDWMFLWNCLMRYSYLRLEKICLKASLKGVPGFGWAMQAAAYIFIHRKWKDDKSHFEDMIDYFCDIHEPLQLLIFPEGTDLTENSKSRSNAFAEKNGLQKYEYVLHPRTTGFTFVVDRLREGRRQSEGSKGPLQGELQITAQGNQRGHKQMEKHSMLMDWKNQYREIGHTAQSNLQIQCYSH

SEQ ID NO: 31458 - protein, 376 aa, Homo sapiens
MVSWKGIYFILTLFWGSFFGSIFMLSPFLPLMFVNPSWYRWINNRLVATWLTLPVALLETMFGVKVIITGDAFVPGERSVIIMNHRTRMDWMFLWNCLMRYSYLRLEKICLKASLKGVPGFGWAMQAAAYIFIHRKWKDDKSHFEDMIDYFCDIHEPLQLLIFPEGTDLTENSKSRSNAFAEKNGLQKYEYVLHPRTTGFTFVVDRLREGKNLDAVHDITVAYPHNIPQSEKHLLQGDFPREIHFHVHRYPIDTLPTSKEDLQLWCHKRWEEKEERLRSFYQGEKNFYFTGQSVIPPCKSELRVLVVKLLSILYWTLFSPAMCLLIYLYSLVKWYFIITIVIFVLQERIFGGLEIIELACYRLLHKQPHLNSKKNE

SEQ ID NO: 31459 - protein, 192 aa, Homo sapiens
MRLLCGLWLWLSLLKVLQAQTPTPLPLPPPMQSFQGNQFQGEWFVLGLAGNSFRPEHRALLNAFTATFELSDDGRFEVWNAMTRGQHCDTWSYVLIPAAQPGQFTVDHGVEPGADREETRVVDSDYTQFALMLSRRHTSRLAVLRISLLGRSWLLPPGTLDQFICLGRAQGLSDDNIVFPDVTGWSPQASVC

SEQ ID NO: 31460 - protein, 129 aa, Homo sapiens
MAKSLRSKWKRKMRAEKRKKNAPKEASRLKSILKLDGDVLMKDVQEIATVVVPKPKHCQEKMQCEVKDEKDDMKMETDIKRNKKTLLDQHGQYPIWMNQRQRKRLKAKREKRKGKSKAKAVKVAKGLAW

SEQ ID NO: 31461 - protein, 356 aa, Homo sapiens
MAAEGWIWRWGWGRRCLGRPGLLGPGPGPTTPLFLLLLLGSVTADITDGNSEHLKREHSLIKPYQGVGSSSMPLWDFQGSTMLTSQYVRLTPDERSKEGSIWNHQPCFLKDWEMHVHFKVHGTGKKNLHGDGIALWYTRDRLVPGPVFGSKDNFHGLAIFLDTYPNDETTERVFPYISVMVNNGSLSYDHSKDGRWTELAGCTADFRNRDHDTFLAVRYSRGRLTVMTDLEDKNEWKNCIDITGVRLPTGYYFGASAGTGDLSDNHDIISMKLFQLMVEHTPDEESIDWTKIEPSVNFLKSPKDNVDDPTGNFRSGPLTGWRVFLLLLCALLGIVVCAVVGAVVFQKRQERNKRFY

SEQ ID NO: 31462 - protein, 307 aa, Homo sapiens
MATAQLSHCITIHKASKETVFPSQITNEHESLKMVKKLFATSISCITYLRGLFPESSYGERHLDDLSLKILREDKKCPGSLHIIRWIQGCFDALEKRYLRMAVLTLYTDPMGSEKVTEMYQFKFKYTKEGATMDFDSHSSSTSFESGTNNEDIKKASVLLIRKLYILMQDLEPLPNNVVLTMKLHYYNAVTPHDYQPLGFKEGVNSHFLLFDKEPINVQVGFVSTGFHSMKVKVMTEATKVIDLENNLFRENSTTEIAHQGLDCDEEEECNDHIQRMNFVCSQQSSECSRKKRKVSEPVKVFIPNRK

SEQ ID NO: 31463 - protein, 2071 aa, Homo sapiens
MELAHSLLLNEEALAQITEAKRPVFIFEWLRFLDKVLVAANKTDVKEKQKKLVEQLTGLISSSPGPPTRKLLAKNLAALYSIGDTFTVFQTLDKCNDIIRNKDDTAAYLPTKLAAVACVGAFYEKMGRMLGSAFPETVNNLLKSLKSAESQGRSEILMSLQKVLSGLGGAAASSHRDIYKNARSLLTDRSMAVRCAVAKCLLELQNEAVFMWTAELENIATLCFKALENSNYGVRVAVSKLLGTVMATALMPKQATVMRQNVKRATFDEVLELMATGFLRGGSGFLKSGGEMLKVGGSVNREVRVGVTQAYVVFVTTLGGQWLERSFATFLSHVLDLVSHPRATQTHVEAVYSRRCVSFILRATVGSLLGEKAQIAAAKEICQAIGKQMKAVEAVVNDTSGENKSGAADIAASQHVMVCALQELGSLVQSLNATASPLIQEASIGLLEIVTSVLLHPSMAARLAAAWCLRCVAVALPFQLTPFLDRCAERLNNLKTSPEAVSGYSFAMAALLGGVHQCPLGIPHAKGKMVVSIAEDLLRTAAQNSRLSLQRTQAGWLLLGALMTLGPSVVRYHLPKMLLLWRNVFPRSLKELEAEKARGDSFTWQVTLEGRAGALCAMRSFVAHCPELLTEDVIRKLMTPIECAMTMMSHIPSVMKAHGAHLKASAAMVRLRLYDILALLPPKTYEGSFNALLRELVAEFTLTDNSANTTTSLLRSLCHYDDSVLLGSWLQETDHKSIEDQLQPNSASGSGALEHDPSSIYLRIPAGEAVPGPLPLGVSVIDASVALFGVVFPHVSYKHRLQMLDHFAECVKQAKGVRQQAVQLNIFTAVLSALKGLAENKSTLGPEEVRKSALTLVMGPLDNPNPILRCAAGEALGRMAQVVGEATFIARMAQYSFDKLKSARDVVSRTGHSLALGCLHRYVGGIGSGQHLKTSVSILLALAQDGTSPEVQTWSLHSLALIVDSSGPMYRGYVEPTLSLVLTLLLTVPPSHTEVHQCLGRCLGAIITTVGPELQGNGATTSTIRSSCLVGCAITQDHSDSLVQAAAISCLQQLHMFAPRHVNLSSLVPSLCVHLCSSHLLLRRAAVACLRQLAQREAAEVCEYAMSLAKNTGDKESSSANVSPFAPGVSSRTDIHCRHQGVNITETGLEGLLFGMLDRETDRKLCSDIHDTLGHMLSSLAVEKLSHWLMLCKDVLAASSDMSTATLLSSGKDEEAEKKDEMDDDTMFTTLGEEDKSKPFVAPRWATRVFAADCLCRIINLCENADQAHFDLALARSAKLRNPTNDLLVLHLSDLIRMAFMAATDHSNQLRMAGLQALEDIIKKFASVPEPEFPGHVILEQYQANVGAALRPAFSQDTPSDIIAKACQVCSTWIGSGVVSDLNDLRRVHNLLVSSLDKVQAGKGSSSQLYRESATTMEKLAVLKAWAEVYVVAMNIKKEAESKPKRAIKNTDDDDDDCGTIDELPPDSLITLVQPELPTLSRLWLAALKDYALLTLPAEFSSQLPPDGGAFYTPETIDTARLHYRNSWAPILHAVALWLNSTGFTCSESTEAAAISGLQKRSTSVNLNQASGAVGSAKSLPEINKDRMHLILGVSIQFLCSPRPEEPIEHVTACLQALHTLLDSPYARVHIAEDQLIGVELLSVLHRLLLTWNPSSVQLLVTGVVQQIVRAAQDYLQEKRNTLNEDDMEKEACTVLGEGGDSGGLIPGKSLVFATMELLMFILVRHMPHLSTKVSDSPSHIATKTRLSEESARLVAATVTILSDLPSLCSPAGCMTILPTILFLIARILKDTAIKSADNQVPPPVSAALQGIKSIVTLSMAKTEAGVQKQWTALIRSTLACILEYSQPEDSVPTPDEVSMLTAIALFLWSASNEIIGVQSLQNGCMNRFKNALNSCDPWVQAKCYQLLLSVFQHSNRALSTPYIHSLAPIVVEKLKAVERNRPASNIELLAVQEGIKVLETLVALGEEQNRVQLLALLVPTLISYLLDENSFASASSASKDLHEFALQNLMHIGPLYPHAFKTVMGAAPELKVRLETAVRASQASKAKAAARQPAPAIHSAPTIKLKTSFF

SEQ ID NO: 31464 - protein, 768 aa, Homo sapiens
MELAHSLLLNEEALAQITEAKRPVFIFEWLRFLDKVLVAANKTDVKEKQKKLVEQLTGLISSSPGPPTRKLLAKNLAALYSIGDTFTVFQTLDKCNDIIRNKDDTAAYLPTKLAAVACVGAFYEKMGRMLGSAFPETVNNLLKSLKSAESQGRSEILMSLQKVLSGLGGAAASSHRDIYKNARSLLTDRSMAVRCAVAKCLLELQNEAVFMWTAELENIATLCFKALENSNYGVRVAVSKLLGTVMATALMPKQATVMRQNVKRATFDEVLELMATGFLRGGSGFLKSGGEMLKVGGSVNREVRVGVTQAYVVFVTTLGGQWLERSFATFLSHVLDLVSHPRATQTHVEAVYSRRCVSFILRATVGSLLGEKAQIAAAKEICQAIGKQMKAVEAVVNDTSGENKSGAADIAASQHVMVCALQELGSLVQSLNATASPLIQEASIGLLEIVTSVLLHPSMAARLAAAWCLRCVAVALPFQLTPFLDRCAERLNNLKTSPEAVSGYSFAMAALLGGVHQCPLGIPHAKGKMVVSIAEDLLRTAAQNSRLSLQRTQAGWLLLGALMTLGPSVVRYHLPKMLLLWRNVFPRSLKELEAEKARGDSFTWQVTLEGRAGALCAMRSFVAHCPELLTEDVIRKLMTPIECAMTMMSHIPSVMKAHGAHLKASAAMVRLRLYDILALLPPKTYEGSFNALLRELVAEFTLTDNSANTTTSLLRSLCHYDDSVLLGSWLQETDHKSIEDQLQPNSASGSGALEHDPSSIYLLLFLVH

SEQ ID NO: 31465 - protein, 1982 aa, Homo sapiens
MELAHSLLLNEEALAQITEAKRPVFIFEWLRFLDKVLVAANKTDVKEKQKKLVEQLTGLISSSPGPPTRKLLAKNLAALYSIGDTFTVFQTLDKCNDIIRNKDDTAAYLPTKLAAVACVGAFYEKMGRMLGSAFPETVNNLLKSLKSAESQGRSEILMSLQKVLSGLGGAAASSHRDIYKNARSLLTDRSMAVRCAVAKCLLELQNEAVFMWTAELENIATLCFKALENSNYGVRVAVSKLLGTVMATALMPKQATVMRQNVKRATFDEVLELMATGFLRGGSGFLKSGGEMLKVGGSVNREVRVGVTQAYVVFVTTLGGQWLERSFATFLSHVLDLVSHPRATQTHVEAVYSRRCVSFILRATVGSLLGEKAQIAAAKEICQAIGKQMKAVEAVVNDTSGENKSGAADIAASQHVMVCALQELGSLVQSLNATASPLIQEASIGLLEIVTSVLLHPSMAARLAAAWCLRCVAVALPFQLTPFLDRCAERLNNLKTSPEAVSGYSFAMAALLGGVHQCPLGIPHAKGKMVVSIAEDLLRTAAQNSRLSLQRTQAGWLLLGALMTLGPSVVRYHLPKMLLLWRNVFPRSLKELEAEKARGDSFTWQVTLEGRAGALCAMRSFVAHCPELLTEDVIRKLMTPIECAMTMMSHIPSVMKAHGAHLKASAAMVRLRLYDILALLPPKTYEGSFNALLRELVAEFTLTDNSANTTTSLLRSLCHYDDSVLLGSWLQETDHKSIEDQLQPNSASGSGALEHDPSSIYLRIPAGEAVPGPLPLGVSVIDASVALFGVVFPHVSYKHRLQMLDHFAECVKQAKGVRQQAVQLNIFTAVLSALKGLAENKSTLGPEEVRKSALTLVMGPLDNPNPILRCAAGEALGRMAQVVGEATFIARMAQYSFDKLKSARDVVSRTGHSLALGCLHRYVGGIGSGQHLKTSVSILLALAQDGTSPEVQTWSLHSLALIVDSSGPMYRGYVEPTLSLVLTLLLTVPPSHTEVHQCLGRCLGAIITTVGPELQGNGATTSTIRSSCLVGCAITQDHSDSLVQAAAISCLQQLHMFAPRHVNLSSLVPSLCVHLCSSHLLLRRAAVACLRQLAQREAAEVCEYAMSLAKNTGDKESSSANVSPFAPGVSSRTDIHCRHQGVNITETGLEGLLFGMLDRETDRKLCSDIHDTLGHMLSSLAVEKLSHWLMLCKDVLAASSDMSTATLLSSGKDEEAEKKDEMDDDTMFTTLGEEDKSKPFVAPRWATRVFAADCLCRIINLCENADQAHFDLALARSAKLRNPTNDLLVLHLSDLIRMAFMAATDHSNQLRMAGLQALEDIIKKFASVPEPEFPGHVILEQYQANVGAALRPAFSQDTPSDIIAKACQVCSTWIGSGVVSDLNDLRRVHNLLVSSLDKVQAGKGSSSQLYRESATTMEKLAVLKAWAEVYVVAMNIKKEAESKPKRAIKNTDDDDDDCGTIDELPPDSLITLVQPELPTLSRLWLAALKDYALLTLPAEFSSQLPPDGGAFYTPETIDTARLHYRNSWAPILHAVALWLNSTGFTCSESTEAAAISGLQKRSTSVNLNQASGAVGSAKSLPEINKDRMHLILGVSIQFLCSPRPEEPIEHVTACLQALHTLLDSPYARVHIAEDQLIGVELLSVLHRLLLTWNPSSVQLLVTGVVQQIVRAAQDYLQEKRNTLRCMTILPTILFLIARILKDTAIKSADNQVPPPVSAALQGIKSIVTLSMAKTEAGVQKQWTALIRSTLACILEYSQPEDSVPTPDEVSMLTAIALFLWSASNEIIGVQSLQNGCMNRFKNALNSCDPWVQAKCYQLLLSVFQHSNRALSTPYIHSLAPIVVEKLKAVERNRPASNIELLAVQEGIKVLETLVALGEEQNRVQLLALLVPTLISYLLDENSFASASSASKDLHEFALQNLMHIGPLYPHAFKTVMGAAPELKVRLETAVRASQASKAKAAARQPAPAIHSAPTIKLKTSFF

SEQ ID NO: 31466 - protein, 63 aa, Homo sapiens
MKHVLNLYLLGVVLTLLSIFVRVMESLEGLLESPSPGTSWTTRSQLANTEPTKGLPDHPSRSM

SEQ ID NO: 31467 - protein, 406 aa, Homo sapiens
MAPPGPASALSTSAEPLSRSIFRKFLLMLCSLLTSLYVFYCLAERCQTLSGPVVGLSGGGEEAGAPGGGVLAGGPRELAVWPAAAQRKRLLQLPQWRRRRPPAPRDDGEEAAWEEESPGLSGGPGGSGAGSTVAEAPPGTLALLLDEGSKQLPQAIIIGVKKGGTRALLEFLRVHPDVRAVGAEPHFFDRSYDKGLAWYRDLMPRTLDGQITMEKTPSYFVTREAPARISAMSKDTKLIVVVRDPVTRAISDYTQTLSKRPDIPTFESLTFKNRTAGLIDTSWSAIQIGIYAKHLEHWLRHFPIRQMLFVSGERLISDPAGELGRVQDFLGLKRIITDKHFYFNKTKGFPCLKKAEGSSRPHCLGKTKGRTHPEIDREVVRRLREFYRPFNLKFYQMTGHDFGWDG

SEQ ID NO: 31468 - protein, 342 aa, Homo sapiens
MAGSGGLGGGAGGGQGAGAGQGAALRASRAPMLLVALVLGAYCLCALPGRCPPAARAPAPAPAPSEPSSSVHRPGAPGLPLASGPGRRRFPQALIVGVKKGGTRALLEFLRLHPDVRALGSEPHFFDRCYERGLAWYRSLMPRTLDGQITMEKTPSYFVTREAPRRIHAMSPDTKLIVVVRNPVTRAISDYAQTLSKTPGLPSFRALAFRHGLGPVDTAWSAVRIGLYAQHLDHWLRYFPLSHFLFVSGERLVSDPAGEVGRVQDFLGLKRVVTDKHFYFNATKGFPCLKKAQGGSRPRCLGKSKGRPHPRVPQALVRRLQEFYRPFNRRFYQMTGQDFGWG

SEQ ID NO: 31469 - protein, 347 aa, Homo sapiens
MVGGGWKRRPGAGAGPQCEKTVDVKKSKFCEADVSSDLRKEVENHYTLSLPEDFYHFWKFCEELDSEKPADPLSASLGLQLVDPYNILAGKHKMKKKSTVPNFNLHWRFYYDPPEFQTIIIRDKLSATWGISDRDSPDELPVYVGINEAKKNCIIVPNGDNVFAAVKLYLMKKLKEVTDKKKTNLFKNVDEKLTETARELGYSLEQRTMKMKQRDKKVVTKTFHGTGLVPPVDKNVVGYRELPETDADLKRICKTIVEAASDDERRKAFAPIQEMMTFVQFANDECDYGMGLELGMDLFCYGSHYFHKVAGQLLPLAYNLLKRNLFAEIMKDHLANRRKENIDQFAA

SEQ ID NO: 31470 - protein, 557 aa, Homo sapiens
MVSKLTSLQQELLSALLSSGVTKEVLVQALEELLPSPNFGVKLETLPLSPGSGAEPDTKPVFHTLTNGHAKGRLSGDEGSEDGDDYDTPPILKELQALNTEEAAEQRAEVDRMLSEDPWRAAKMIKGYMQQHNIPQREVVDVTGLNQSHLSQHLNKGTPMKTQKRAALYTWYVRKQREILRQFNQTVQSSGNMTDKSSQDQLLFLFPEFSQQSHGPGQSDDACSEPTNKKMRRNRFKWGPASQQILYQAYDRQKNPSKEEREALVEECNRAECLQRGVSPSKAHGLGSNLVTEVRVYNWFANRRKEEAFRQKLAMDAYSSNQTHSLNPLLSHGSPHHQPSSSPPNKLSGVRYSQQGNNEITSSSTISHHGNSAMVTSQSVLQQVSPASLDPGHNLLSPDGKMISVSGGGLPPVSTLTNIHSLSHHNPQQSQNLIMTPLSGVMAIAQSLNTSQAQSVPVINSVAGSLAALQPVQFSQQLHSPHQQPLMQQSPGSHMAQQPFMAAVTQLQNSHMYAHKQEPPQYSHTSRFPSAMVVTDTSSISTLTNMSSSKQCPLQAW

SEQ ID NO: 31471 - protein, 531 aa, Homo sapiens
MVSKLTSLQQELLSALLSSGVTKEVLVQALEELLPSPNFGVKLETLPLSPGSGAEPDTKPVFHTLTNGHAKGRLSGDEGSEDGDDYDTPPILKELQALNTEEAAEQRAEVDRMLSEDPWRAAKMIKGYMQQHNIPQREVVDVTGLNQSHLSQHLNKGTPMKTQKRAALYTWYVRKQREILRQFSQQSHGPGQSDDACSEPTNKKMRRNRFKWGPASQQILYQAYDRQKNPSKEEREALVEECNRAECLQRGVSPSKAHGLGSNLVTEVRVYNWFANRRKEEAFRQKLAMDAYSSNQTHSLNPLLSHGSPHHQPSSSPPNKLSGVRYSQQGNNEITSSSTISHHGNSAMVTSQSVLQQVSPASLDPGHNLLSPDGKMISVSGGGLPPVSTLTNIHSLSHHNPQQSQNLIMTPLSGVMAIAQSLNTSQAQSVPVINSVAGSLAALQPVQFSQQLHSPHQQPLMQQSPGSHMAQQPFMAAVTQLQNSHMYAHKQEPPQYSHTSRFPSAMVVTDTSSISTLTNMSSSKQCPLQAW

SEQ ID NO: 31472 - protein, 399 aa, Homo sapiens
MVSKLTSLQQELLSALLSSGVTKEVLVQALEELLPSPNFGVKLETLPLSPGSGAEPDTKPVFHTLTNGHAKGRLSGDEGSEDGDDYDTPPILKELQALNTEEAAEQRAEVDRMLSEDPWRAAKMIKGYMQQHNIPQREVVDVTGLNQSHLSQHLNKGTPMKTQKRAALYTWYVRKQREILRQFNQTVQSSGNMTDKSSQDQLLFLFPEFSQQSHGPGQSDDACSEPTNKKMRRNRFKWGPASQQILYQAYDRQKNPSKEEREALVEECNRAECLQRGVSPSKAHGLGSNLVTEVRVYNWFANRRKEEAFRQKLAMDAYSSNQTHSLNPLLSHGSPHHQPSSSPPNKLSGKQRLGLTASATQPSWFLPRILSGLRVFRGANAFEMILGPLSHCQNILPWK

SEQ ID NO: 31473 - protein, 427 aa, Homo sapiens
MVSKLTSLQQELLSALLSSGVTKEVLVQALEELLPSPNFGVKLETLPLSPGSGAEPDTKPVFHTLTNGHAKGRLSGDEGSEDGDDYDTPPILKELKGYMQQHNIPQREVVDVTGLNQSHLSQHLNKGTPMKTQKRAALYTWYVRKQREILRQFSQQSHGPGQSDDACSEPTNKKMRRNRFKWGPASQQILYQAYDRQKNPSKEEREALVEECNRAECLQRGVSPSKAHGLGSNLVTEVRVYNWFANRRKEEAFRQKLAMDAYSSNQTHSLNPLLSHGSPHHQPSSSPPNKLSGVRYSQQGNNEITSSSTISHHGNSAMVTSQSVLQQVSPASLDPGHNLLSPDGKMISVSGGGLPPVSTLTNIHSLSHHNPQQSQNLIMTPLSGVMAIAQMSSTSLVMPTHHLLRAQQQGPCFPHHHPLGSCHGKAQ

SEQ ID NO: 31474 - protein, 354 aa, Homo sapiens
MKSLLLLVLISICWADHLSDNYTLDHDRAIHIQAENGPHLLVEAEQAKVFSHRGGNVTLPCKFYRDPTAFGSGIHKIRIKWTKLTSDYLKEVDVFVSMGYHKKTYGGYQGRVFLKGGSDSDASLVITDLTLEDYGRYKCEVIEGLEDDTVVVALDLQGVVFPYFPRLGRYNLNFHEAQQACLDQDAVIASFDQLYDAWRGGLDWCNAGWLSDGSVQYPITKPREPCGGQNTVPGVRNYGFWDKDKSRYDVFCFTSNFNGRFYYLIHPTKLTYDEAVQACLNDGAQIAKVGQIFAAWKILGYDRCDAGWLADGSVRYPISRPRRRCSPTEAAVRFVGFPDKKHKLYGVYCFRAYN

SEQ ID NO: 31475 - protein, 732 aa, Homo sapiens
MPEETQTQDQPMEEEEVETFAFQAEIAQLMSLIINTFYSNKEIFLRELISNSSDALDKIRYESLTDPSKLDSGKELHINLIPNKQDRTLTIVDTGIGMTKADLINNLGTIAKSGTKAFMEALQAGADISMIGQFGVGFYSAYLVAEKVTVITKHNDDEQYAWESSAGGSFTVRTDTGEPMGRGTKVILHLKEDQTEYLEERRIKEIVKKHSQFIGYPITLFVEKERDKEVSDDEAEEKEDKEEEKEKEEKESEDKPEIEDVGSDEEEEKKDGDKKKKKKIKEKYIDQEELNKTKPIWTRNPDDITNEEYGEFYKSLTNDWEDHLAVKHFSVEGQLEFRALLFVPRRAPFDLFENRKKKNNIKLYVRRVFIMDNCEELIPEYLNFIRGVVDSEDLPLNISREMLQQSKILKVIRKNLVKKCLELFTELAEDKENYKKFYEQFSKNIKLGIHEDSQNRKKLSELLRYYTSASGDEMVSLKDYCTRMKENQKHIYYITGETKDQVANSAFVERLRKHGLEVIYMIEPIDEYCVQQLKEFEGKTLVSVTKEGLELPEDEEEKKKQEEKKTKFENLCKIMKDILEKKVEKVVVSNRLVTSPCCIVTSTYGWTANMERIMKAQALRDNSTMGYMAAKKHLEINPDHSIIETLRQKAEADKNDKSVKDLVILLYETALLSSGFSLEDPQTHANRIYRMIKLGLGIDEDDPTADDTSAAVTEEMPPLEGDDDTSRMEEVD

SEQ ID NO: 31476 - protein, 854 aa, Homo sapiens
MPPCSGGDGSTPPGPSLRDRDCPAQSAEYPRDRLDPRPGSPSEASSPPFLRSRAPVNWYQEKAQVFLWHLMVSGSTTLLCLWKQPFHVSAFPVTASLAFRQSQGAGQHLYKDLQPFILLRLLMPEETQTQDQPMEEEEVETFAFQAEIAQLMSLIINTFYSNKEIFLRELISNSSDALDKIRYESLTDPSKLDSGKELHINLIPNKQDRTLTIVDTGIGMTKADLINNLGTIAKSGTKAFMEALQAGADISMIGQFGVGFYSAYLVAEKVTVITKHNDDEQYAWESSAGGSFTVRTDTGEPMGRGTKVILHLKEDQTEYLEERRIKEIVKKHSQFIGYPITLFVEKERDKEVSDDEAEEKEDKEEEKEKEEKESEDKPEIEDVGSDEEEEKKDGDKKKKKKIKEKYIDQEELNKTKPIWTRNPDDITNEEYGEFYKSLTNDWEDHLAVKHFSVEGQLEFRALLFVPRRAPFDLFENRKKKNNIKLYVRRVFIMDNCEELIPEYLNFIRGVVDSEDLPLNISREMLQQSKILKVIRKNLVKKCLELFTELAEDKENYKKFYEQFSKNIKLGIHEDSQNRKKLSELLRYYTSASGDEMVSLKDYCTRMKENQKHIYYITGETKDQVANSAFVERLRKHGLEVIYMIEPIDEYCVQQLKEFEGKTLVSVTKEGLELPEDEEEKKKQEEKKTKFENLCKIMKDILEKKVEKVVVSNRLVTSPCCIVTSTYGWTANMERIMKAQALRDNSTMGYMAAKKHLEINPDHSIIETLRQKAEADKNDKSVKDLVILLYETALLSSGFSLEDPQTHANRIYRMIKLGLGIDEDDPTADDTSAAVTEEMPPLEGDDDTSRMEEVD

SEQ ID NO: 31477 - protein, 589 aa, Homo sapiens
MSRRLLPRAEKRRRRLEQRQQPDEQRRRSGAMVKMAAAGGGGGGGRYYGGGSEGGRAPKRLKTDNAGDQHGGGGGGGGGAGAAGGGGGGENYDDPHKTPASPVVHIRGLIDGVVEADLVEALQEFGPISYVVVMPKKRQALVEFEDVLGACNAVNYAADNQIYIAGHPAFVNYSTSQKISRPGDSDDSRSVNSVLLFTILNPIYSITTDVLYTICNPCGPVQRIVIFRKNGVQAMVEFDSVQSAQRAKASLNGADIYSGCCTLKIEYAKPTRLNVFKNDQDTWDYTNPNLSGQGDPGSNPNKRQRQPPLLGDHPAEYGGPHGGYHSHYHDEGYGPPPPHYEGRRMGPPVGGHRRGPSRYGPQYGHPPPPPPPPEYGPHADSPVLMVYGLDQSKMNCDRVFNVFCLYGNVEKVKFMKSKPGAAMVEMADGYAVDRAITHLNNNFMFGQKLNVCVSKQPAIMPGQSYGLEDGSCSYKDFSESRNNRFSTPEQAAKNRIQHPSNVLHFFNAPLEVTEENFFEICDELGVKRPSSVKVFSGKSERSSSGLLEWESKSDALETLGFLNHYQMKNPNGPYPYTLKLCFSTAQHAS

SEQ ID NO: 31478 - protein, 456 aa, Homo sapiens
MPKKRQALVEFEDVLGACNAVNYAADNQIYIAGHPAFVNYSTSQKISRPGDSDDSRSVNSVLLFTILNPIYSITTDVLYTICNPCGPVQRIVIFRKNGVQAMVEFDSVQSAQRAKASLNGADIYSGCCTLKIEYAKPTRLNVFKNDQDTWDYTNPNLSGQGDPGSNPNKRQRQPPLLGDHPAEYGGPHGGYHSHYHDEGYGPPPPHYEGRRMGPPVGGHRRGPSRYGPQYGHPPPPPPPPEYGPHADSPVLMVYGLDQSKMNCDRVFNVFCLYGNVEKVKFMKSKPGAAMVEMADGYAVDRAITHLNNNFMFGQKLNVCVSKQPAIMPGQSYGLEDGSCSYKDFSESRNNRFSTPEQAAKNRIQHPSNVLHFFNAPLEVTEENFFEICDELGVKRPSSVKVFSGKSERSSSGLLEWESKSDALETLGFLNHYQMKNPNGPYPYTLKLCFSTAQHAS

SEQ ID NO: 31479 - protein, 1129 aa, Homo sapiens
MAFVPVIPESYSHVLAEFESLDPLLSALRLDSSRLKCTSIAVSRKWLALGSSGGGLHLIQKEGWKHRLFLSHREGAISQVACCLHDDDYVAVATSQGLVVVWELNQERRGKPEQMYVSSEHKGRRVTALCWDTAILRVFVGDHAGKVSAIKLNTSKQAKAAAAFVMFPVQTITTVDSCVVQLDYLDGRLLISSLTRSFLCDTEREKFWKIGNKERDGEYGACFFPGRCSGGQQPLIYCARPGSRMWEVNFDGEVISTHQFKKLLSLPPLPVITLRSEPQYDHTAGSSQSLSFPKLLHLSEHCVLTWTERGIYIFIPQNVQVLLWSEVKDIQDVAVCRNELFCLHLNGKVSHLSLISVERCVERLLRRGLWNLAARTCCLFQNSVIASRARKTLTADKLEHLKSQLDHGTYNDLISQLEELILKFEPLDSACSSRRSSISSHESFSILDSGIYRIISSRRGSQSDEDSCSLHSQTLSEDERFKEFTSQQEEDLPDQCCGSHGNEDNVSHAPVMFETDKNETFLPFGIPLPFRSPSPLVSLQAVKESVSSFVRKTTEKIGTLHTSPDLKVRPELRGDEQSCEEDVSSDTCPKEEDTEEEKEVTSPPPEEDRFQELKVATAEAMTKLQDPLVLFESESLRMVLQEWLSHLEKTFAMKDFSGVSDTDNSSMKLNQDVLLVNESKKGILDEDNEKEKRDSLGNEESVDKTACECVRSPRESLDDLFQICSPCAIASGLRNDLAELTTLCLELNVLNSKIKSTSGHVDHTLQQYSPEILACQFLKKYFFLLNLKRAKESIKLSYSNSPSVWDTFIEGLKEMASSNPVYMEMEKGDLPTRLKLLDDEVPFDSPLLVVYATRLYEKFGESALRSLIKFFPSILPSDIIQLCHHHPAEFLAYLDSLVKSRPEDQRSSFLESLLQPESLRLDWLLLAVSLDAPPSTSTMDDEGYPRPHSHLLSWGYSQLILHLIKLPADFITKEKMTDICRSCGFWPGYLILCLELERRREAFTNIVYLNDMSLMEGDNGWIPETVEEWKLLLHLIQSKSTRPAPQESLNGSLSDGPSPINVENVALLLAKAMGPDRAWSLLQECGLALELSEKFTRTCDILRIAEKRQRALIQSMLEKCDRFLWSQQA

SEQ ID NO: 31480 - protein, 1015 aa, Homo sapiens
MYVSSEHKGRRVTALCWDTAILRVFVGDHAGKVSAIKLNTSKQAKAAAAFVMFPVQTITTVDSCVVQLDYLDGRLLISSLTRSFLCDTEREKFWKIGNKERDGEYGACFFPGRCSGGQQPLIYCARPGSRMWEVNFDGEVISTHQFKKLLSLPPLPVITLRSEPQYDHTAGSSQSLSFPKLLHLSEHCVLTWTERGIYIFIPQNVQVLLWSEVKDIQDVAVCRNELFCLHLNGKVSHLSLISVERCVERLLRRGLWNLAARTCCLFQNSVIASRARKTLTADKLEHLKSQLDHGTYNDLISQLEELILKFEPLDSACSSRRSSISSHESFSILDSGIYRIISSRRGSQSDEDSCSLHSQTLSEDERFKEFTSQQEEDLPDQCCGSHGNEDNVSHAPVMFETDKNETFLPFGIPLPFRSPSPLVSLQAVKESVSSFVRKTTEKIGTLHTSPDLKVRPELRGDEQSCEEDVSSDTCPKEEDTEEEKEVTSPPPEEDRFQELKVATAEAMTKLQDPLVLFESESLRMVLQEWLSHLEKTFAMKDFSGVSDTDNSSMKLNQDVLLVNESKKGILDEDNEKEKRDSLGNEESVDKTACECVRSPRESLDDLFQICSPCAIASGLRNDLAELTTLCLELNVLNSKIKSTSGHVDHTLQQYSPEILACQFLKKYFFLLNLKRAKESIKLSYSNSPSVWDTFIEGLKEMASSNPVYMEMEKGDLPTRLKLLDDEVPFDSPLLVVYATRLYEKFGESALRSLIKFFPSILPSDIIQLCHHHPAEFLAYLDSLVKSRPEDQRSSFLESLLQPESLRLDWLLLAVSLDAPPSTSTMDDEGYPRPHSHLLSWGYSQLILHLIKLPADFITKEKMTDICRSCGFWPGYLILCLELERRREAFTNIVYLNDMSLMEGDNGWIPETVEEWKLLLHLIQSKSTRPAPQESLNGSLSDGPSPINVENVALLLAKAMGPDRAWSLLQECGLALELSEKFTRTCDILRIAEKRQRALIQSMLEKCDRFLWSQQA

SEQ ID NO: 31481 - protein, 162 aa, Homo sapiens
MRISKPHLRSISIQCYLCLLLNSHFLTEAGIHVFILGCFSAGLPKTEANWVNVISDLKKIEDLIQSMHIDATLYTESDVHPSCKVTAMKCFLLELQVISLESGDASIHDTVENLIILANNSLSSNGNVTESGCKECEELEEKNIKEFLQSFVHIVQMFINTS

SEQ ID NO: 31482 - protein, 135 aa, Homo sapiens
MVLGTIDLCSCFSAGLPKTEANWVNVISDLKKIEDLIQSMHIDATLYTESDVHPSCKVTAMKCFLLELQVISLESGDASIHDTVENLIILANNSLSSNGNVTESGCKECEELEEKNIKEFLQSFVHIVQMFINTS

SEQ ID NO: 31483 - protein, 311 aa, Homo sapiens
MQTFTMVLEEIWTSLFMWFFYALIPCLLTDEVAILPAPQNLSVLSTNMKHLLMWSPVIAPGETVYYSVEYQGEYESLYTSHIWIPSSWCSLTEGPECDVTDDITATVPYNLRVRATLGSQTSAWSILKHPFNRNSTILTRPGMEITKDGFHLVIELEDLGPQFEFLVAYWRREPGAEEHVKMVRSGGIPVHLETMEPGAAYCVKAQTFVKAIGRYSAFSQTECVEVQGEAIPLVLALFAFVGFMLILVVVPLFVWKMGRLLQYSCCPVVVLPDTLKITNSPQKLISCRREEVDACATAVMSPEELLRAWIS

SEQ ID NO: 31484 - protein, 147 aa, Homo sapiens
MKHLLMWSPVIAPGETVYYSVEYQGEYESLYTSHIWIPSSWCSLTEGPECDVTDDITATVPYNLRVRATLGSQTSAWSILKHPFNRNSTILTRPGMEITKDGFHLVIELEDLGPQFEFLVAYWRREPGAEERPFPWYWPCLPLLASC

SEQ ID NO: 31485 - protein, 553 aa, Homo sapiens
MRAPGRPALRPLPLPPLLLLLLAAPWGRAVPCVSGGLPKPANITFLSINMKNVLQWTPPEGLQGVKVTYTVQYFIYGQKKWLNKSECRNINRTYCDLSAETSDYEHQYYAKVKAIWGTKCSKWAESGRFYPFLETQIGPPEVALTTDEKSISVVLTAPEKWKRNPEDLPVSMQQIYSNLKYNVSVLNTKSNRTWSQCVTNHTLVLTWLEPNTLYCVHVESFVPGPPRRAQPSEKQCARTLKDQSSEFKAKIIFWYVLPVSITVFLFSVMGYSIYRYIHVGKEKHPANLILIYGNEFDKRFFVPAEKIVINFITLNISDDSKISHQDMSLLGKSSDVSSLNDPQPSGNLRPPQEEEEVKHLGYASHLMEIFCDSEENTEGTSLTQQESLSRTIPPDKTVIEYEYDVRTTDICAGPEEQELSLQEEVSTQGTLLESQAALAVLGPQTLQYSYTPQLQDLDPLAQEHTDSEEGPEEEPSTTLVDWDPQTGRLCIPSLSSFDQDSEGCEPSEGDGLGEEGLLSRLYEEPAPDRPPGENETYLMQFMEEWGLYVQMEN

SEQ ID NO: 31486 - protein, 442 aa, Homo sapiens
MSYNGLHQRVFKELKLLTLCSISSQIGPPEVALTTDEKSISVVLTAPEKWKRNPEDLPVSMQQIYSNLKYNVSVLNTKSNRTWSQCVTNHTLVLTWLEPNTLYCVHVESFVPGPPRRAQPSEKQCARTLKDQSSEFKAKIIFWYVLPVSITVFLFSVMGYSIYRYIHVGKEKHPANLILIYGNEFDKRFFVPAEKIVINFITLNISDDSKISHQDMSLLGKSSDVSSLNDPQPSGNLRPPQEEEEVKHLGYASHLMEIFCDSEENTEGTSLTQQESLSRTIPPDKTVIEYEYDVRTTDICAGPEEQELSLQEEVSTQGTLLESQAALAVLGPQTLQYSYTPQLQDLDPLAQEHTDSEEGPEEEPSTTLVDWDPQTGRLCIPSLSSFDQDSEGCEPSEGDGLGEEGLLSRLYEEPAPDRPPGENETYLMQFMEEWGLYVQMEN

SEQ ID NO: 31487 - protein, 504 aa, Homo sapiens
MKNVLQWTPPEGLQGVKVTYTVQYFIYGQKKWLNKSECRNINRTYCDLSAETSDYEHQYYAKVKAIWGTKCSKWAESGRFYPFLETQIGPPEVALTTDEKSISVVLTAPEKWKRNPEDLPVSMQQIYSNLKYNVSVLNTKSNRTWSQCVTNHTLVLTWLEPNTLYCVHVESFVPGPPRRAQPSEKQCARTLKDQSSEFKAKIIFWYVLPVSITVFLFSVMGYSIYRYIHVGKEKHPANLILIYGNEFDKRFFVPAEKIVINFITLNISDDSKISHQDMSLLGKSSDVSSLNDPQPSGNLRPPQEEEEVKHLGYASHLMEIFCDSEENTEGTSLTQQESLSRTIPPDKTVIEYEYDVRTTDICAGPEEQELSLQEEVSTQGTLLESQAALAVLGPQTLQYSYTPQLQDLDPLAQEHTDSEEGPEEEPSTTLVDWDPQTGRLCIPSLSSFDQDSEGCEPSEGDGLGEEGLLSRLYEEPAPDRPPGENETYLMQFMEEWGLYVQMEN

SEQ ID NO: 31488 - protein, 152 aa, Homo sapiens
MCSLPMARYYIIKYADQKALYTRDGQLLVGDPVADNCCAEKICILPNRGLARTKVPIFLGIQGGSRCLACVETEEGPSLQLEDVNIEELYKGGEEATRFTFFQSSSGSAFRLEAAAWPGWFLCGPAEPQQPVQLTKESEPSARTKFYFEQSW

SEQ ID NO: 31489 - protein, 152 aa, Homo sapiens
MCSLPMARMSSSFLPEPLPAKSLQHGVPLSLDSSLSSLLEKICILPNRGLARTKVPIFLGIQGGSRCLACVETEEGPSLQLEDVNIEELYKGGEEATRFTFFQSSSGSAFRLEAAAWPGWFLCGPAEPQQPVQLTKESEPSARTKFYFEQSW

SEQ ID NO: 31490 - protein, 328 aa, Homo sapiens
MSSYLEYVSCSSSGGVGGDVLSLAPKFCRSDARPVALQPAFPLGNGDGAFVSCLPLAAARPSPSPPAAPARPSVPPPAAPQYAQCTLEGAYEPGAAPAAAAGGADYGFLGSGPAYDFPGVLGRAADDGGSHVHYATSAVFSGGGSFLLSGQVDYAAFGEPGPFPACLKASADGHPGAFQTASPAPGTYPKSVSPASGLPAAFSTFEWMKVKRNASKKGKLAEYGAASPSSAIRTNFSTKQLTELEKEFHFNKYLTRARRIEIANCLHLNDTQVKIWFQNRRMKQKKREREGLLATAIPVAPLQLPLSGTTPTKFIKNPGSPSQSQEPS

SEQ ID NO: 31491 - protein, 569 aa, Homo sapiens
MKVLLRLICFIALLISSLEADKCKEREEKIILVSSANEIDVRPCPLNPNEHKGTITWYKDDSKTPVSTEQASRIHQHKEKLWFVPAKVEDSGHYYCVVRNSSYCLRIKISAKFVENEPNLCYNAQAIFKQKLPVAGDGGLVCPYMEFFKNENNELPKLQWYKDCKPLLLDNIHFSGVKDRLIVMNVAEKHRGNYTCHASYTYLGKQYPITRVIEFITLEENKPTRPVIVSPANETMEVDLGSQIQLICNVTGQLSDIAYWKWNGSVIDEDDPVLGEDYYSVENPANKRRSTLITVLNISEIESRFYKHPFTCFAKNTHGIDAAYIQLIYPVTNFQKHMIGICVTLTVIIVCSVFIYKIFKIDIVLWYRDSCYDFLPIKASDGKTYDAYILYPKTVGEGSTSDCDIFVFKVLPEVLEKQCGYKLFIYGRDDYVGEDIVEVINENVKKSRRLIIILVRETSGFSWLGGSSEEQIAMYNALVQDGIKVVLLELEKIQDYEKMPESIKFIKQKHGAIRWSGDFTQGPQSAKTRFWKNVRYHMPVQRRSPSSKHQLLSPATKEKLQREAHVPLG

SEQ ID NO: 31492 - protein, 778 aa, Homo sapiens
MSKRKLIPKLSIQSPVLHTNLNVQSTHPPLKKEDLHRISKDSLESDSESLTQEIMCHSEFDDRIRGNGMEPDSLDEEESPRWGSLHEMEEEASGKAAQMAREQNHHTWDQGANNRQQPIEDKYSDLRYDPNWKSKKEEGQLLSVEALPESTDSSLENLPLAPLYPSQETSMELSGGKGEQKESPQSAASLLGSEFLSPNYEHGARRSKPFSELSDSDLEEKSSSLSPYVKSSSSHNEVFLPGSRGPRRRKSKQHFVEKNKLTLGLPTPKTDSYLQLHNKKRGESHPEQISYPVRVTDKTSIQNAKEMENAAIDPEDKWHQRAQQLKNYQEHWSQYESTKSSNVPRGQPSDMVNDHQPSRRPAKLKIRKQCKHQNGLKSSTTEEVTASQGNQNNPPRQQQNQNKPLDTSTKPESIVIMHASNNDVQASRALRSHNLKETSNTFAPPKQAFDKVLSKNSTGCDSGLNVNKERGHKDQEEKRFSYQQLHTLSDMDLNNLNELSKRHVLLSQKGSQFVYHINTHGSTKNKKQLKQPYTETKYRNLEMLWKFHSSSDSQTVRASPDSWLTQIMEQHQQALVQLTDVQPSEGALSSVTLPPILSRVESESQLSSERSQRNQVKISRSNSEGYLFQLEKGKKHKKRSSSKNTKLKGYQKRDVKLGGLGPDFESIRDKTQKLIQQKEYAKQVKEYNMKTLSILSKPQTEKTQKKSAIPRQKALEYAKTIPKPKPSNLTHQASKEQKNPTYAGKEESLPEISLLEILQNRHEREKQAVAAFKVLHIV

SEQ ID NO: 31493 - protein, 307 aa, Homo sapiens
MSKRKLIPKLSIQSPVLHTNLNVQSTHPPLKKEDLHRISKDSLESDSESLTQEIMCHSEFDDRIRGNGMEPDSLDEEESPRWGSLHEMEEEASGKAAQMAREQNHHTWDQGANNRQQPIEDKYSDLRYDPNWKSKKEEGQLLSVEALPESTDSSLENLPLAPLYPSQETSMELSGGKGEQKESPQSAASLLGSEFLSPNYEHGARRSKPFSELSDSDLEEKSSSLSPYVKSSSSHNEVFLPGSRGPRRRKSKQHFVEKNKLTLGLPTPKTDSYLQLHNKKRGESHPEQVILRVNSLPRDGFKTFWSQ

SEQ ID NO: 31494 - protein, 406 aa, Homo sapiens
MQLFLLLCLVLLSPQGASLHRHHPREMKKRVEDLHVGATVAPSSRRDFTFDLYRALASAAPSQSIFFSPVSISMSLAMLSLGAGSSTKMQILEGLGLNLQKSSEKELHRGFQQLLQELNQPRDGFQLSLGNALFTDLVVDLQDTFVSAMKTLYLADTFPTNFRDSAGAMKQINDYVAKQTKGKIVDLLKNLDSNAVVIMVNYIFFKAKWETSFNHKGTQEQDFYVTSETVVRVPMMSREDQYHYLLDRNLSCRVVGVPYQGNATALFILPSEGKMQQVENGLSEKTLRKWLKMFKKRQLELYLPKFSIEGSYQLEKVLPSLGISNVFTSHADLSGISNHSNIQVSEMVHKAVVEVDESGTRAAAATGTIFTFRSARLNSQRLVFNRPFLMFIVDNNILFLGKVNRP

SEQ ID NO: 31495 - protein, 810 aa, Homo sapiens
MSKKGRNKGEKPEALIVALQAANEDLRTKLTDIQIELHQEKSKVSKLEREKTQEAKRIRELEQRKHTVLVTELKAKLHEEKMKELQAVRENLIKQHEQEMSRTVKVRDGEIQRLKSALCALRDGSSDKVRTALTIEAREEARKLFDTERLKLLQEIADLKTAKKQVDEALSNMIQADKIKAGDLRSEHQSHQEAISKIKWESERDIRRLMDEIKAKDRIIFSLEKELETQTGYVQKLQLQKEALDEQLFLVKEAECNMSSPKREIPGRAGDGSEHCSSPDLRRNQKRIAELNATIRKLEDRNTLLGDERNELLKRVRETEKQCKPLLERNKCLAKRNDELMVSLQRMEEKLKAVTKENSEMREKITSHPPLKKLKSLNDLDQANEEQETEFLKLQVIEQQNIIDELTRDREKLIRRRKHRRSSKPIKRPVLDPFIGYDEDSMDSETSSMASFRTDRTPATPDDDLDESLAAEESELRFRQLTKEYQALQRAYALLQEQTGGIIDAEREAKAQEQLQAEVLRYKAKIEDLEATLAQKGQDSHWVEDKQLFIKRNQELLEKIEKQEAENHRLQQELQDARDQNELLEFRNLELEERERRSPPFNLQIHPFSDGVSALQIYCMKEGVKDVNIPDLIKQLDILGDNGNLRNEEQVAIIQASTVLSLAEKWIQQIEGAEAALHQKMMELESDMEQFCKIKGYLEEELDYRKQALDQAYMRIQELEATLYNALQQETVIKFGELLSEKQQEELRTAVEKLRRQMLRKSREYDCQILQERMELLQQAHQRIRDLEDKTDIQKRQIKDLEEKSNRKHG

SEQ ID NO: 31496 - protein, 799 aa, Homo sapiens
MSKKGRNKGEKPEALIVALQAANEDLRTKLTDIQIELHQEKSKVSKLEREKTQEAKRIRELEQRKHTVLVTELKAKLHEEKMKELQAVRENLIKQHEQEMSRTVKVRDGEIQRLKSALCALRDGSSDKVRTALTIEAREEARKLFDTERLKLLQEIADLKTAKKQVDEALSNMIQADKIKAGDLRSEHQSHQEAISKIKWESERDIRRLMDEIKAKDRIIFSLEKELETQTGYVQKLQLQKEALDEQLFLVKEAECNMSSPKREIPGRAGDGSEHCSSPDLRRNQKRIAELNATIRKLEDRNTLLGDERNELLKRVRETEKQCKPLLERNKCLAKRNDELMVSLQRMEEKLKAVTKENSEMREKITSHPPLKKLKSLNDLDQANEEQETEFLKLQVIEQQNIIDELTRDREKLIRRRKHRRSSKPIKRPVLDPFIGYDEDSMDSETSSMASFRTDRTPATPDDDLDESLAAEESELRFRQLTKEYQALQRAYALLQEQTGGIIDAEREAKAQEQLQAEVLRYKAKIEDLEATLAQKGQIEKQEAENHRLQQELQDARDQNELLEFRNLELEERERRSPPFNLQIHPFSDGVSALQIYCMKEGVKDVNIPDLIKQLDILGDNGNLRNEEQVAIIQASTVLSLAEKWIQQIEGAEAALHQKMMELESDMEQFCKIKGYLEEELDYRKQALDQAYMRIQELEATLYNALQQETVIKFGELLSEKQQEELRTAVEKLRRQMLRKSREYDCQILQERMELLQQAHQRIRDLEDKTDIQKRQIKDLEEKFLFLFLFFSLAFILWP

SEQ ID NO: 31497 - protein, 820 aa, Homo sapiens
MSKKGRNKGEKPEALIVALQAANEDLRTKLTDIQIELHQEKSKVSKLEREKTQEAKRIRELEQRKHTVLVTELKAKLHEEKMKELQAVRENLIKQHEQEMSRTVKVRDGEIQRLKSALCALRDGSSDKVRTALTIEAREEARKLFDTERLKLLQEIADLKTAKKQVDEALSNMIQADKIKAGDLRSEHQSHQEAISKIKWESERDIRRLMDEIKAKDRIIFSLEKELETQTGYVQKLQLQKEALDEQLFLVKEAECNMSSPKREIPGRAGDGSEHCSSPDLRRNQKRIAELNATIRKLEDRNTLLGDERNELLKRVRETEKQCKPLLERNKCLAKRNDELMVSLQRMEEKLKAVTKENSEMREKITSHPPLKKLKSLNDLDQANEEQETEFLKLQVIEQQNIIDELTRDREKLIRRRKHRRSSKPIKRPVLDPFIGYDEDSMDSETSSMASFRTDRTPATPDDDLDESLAAEESELRFRQLTKEYQALQRAYALLQEQTGGIIDAEREAKAQEQLQAEVLRYKAKIEDLEATLAQKGQDSHWVEDKQLFIKRNQELLEKIEKQEAENHRLQQELQDARDQNELLEFRNLELEERERRSPPFNLQIHPFSDGVSALQIYCMKEGVKDVNIPDLIKQLDILGDNGNLRNEEQVAIIQASTVLSLAEKWIQQIEGAEAALHQKMMELESDMEQFCKIKGYLEEELDYRKQALDQAYMRIQELEATLYNALQQETVIKFGELLSEKQQEELRTAVEKLRRQMLRKSREYDCQILQERMELLQQAHQRIRDLEDKTDIQKRQIKDLEEKFLFLFLFFSLAFILWP

SEQ ID NO: 31498 - protein, 778 aa, Homo sapiens
MVSKLEREKTQEAKRIRELEQRKHTVLVTELKAKLHEEKMKELQAVRENLIKQHEQEMSRTVKVRDGEIQRLKSALCALRDGSSDKVRTALTIEAREEARKLFDTERLKLLQEIADLKTAKKQVDEALSNMIQADKIKAGDLRSEHQSHQEAISKIKWESERDIRRLMDEIKAKDRIIFSLEKELETQTGYVQKLQLQKEALDEQLFLVKEAECNMSSPKREIPGRAGDGSEHCSSPDLRRNQKRIAELNATIRKLEDRNTLLGDERNELLKRVRETEKQCKPLLERNKCLAKRNDELMVSLQRMEEKLKAVTKENSEMREKITSHPPLKKLKSLNDLDQANEEQETEFLKLQVIEQQNIIDELTRDREKLIRRRKHRRSSKPIKRPVLDPFIGYDEDSMDSETSSMASFRTDRTPATPDDDLDESLAAEESELRFRQLTKEYQALQRAYALLQEQTGGIIDAEREAKAQEQLQAEVLRYKAKIEDLEATLAQKGQDSHWVEDKQLFIKRNQELLEKIEKQEAENHRLQQELQDARDQNELLEFRNLELEERERRSPPFNLQIHPFSDGVSALQIYCMKEGVKDVNIPDLIKQLDILGDNGNLRNEEQVAIIQASTVLSLAEKWIQQIEGAEAALHQKMMELESDMEQFCKIKGYLEEELDYRKQALDQAYMRIQELEATLYNALQQETVIKFGELLSEKQQEELRTAVEKLRRQMLRKSREYDCQILQERMELLQQAHQRIRDLEDKTDIQKRQIKDLEEKFLFLFLFFSLAFILWP

SEQ ID NO: 31499 - protein, 844 aa, Homo sapiens
MSKRGMSSRAKGDKAEALAALQAANEDLRAKLTDIQIELQQEKSKVSKVEREKNQELRQVREHEQHKTAVLLTELKTKLHEEKMKELQAVRETLLRQHEAELLRVIKIKDNENQRLQALLSALRDGGPEKVKTVLLSEAKEEAKKGFEVEKVKMQQEISELKGAKRQVEEALTLVIQADKIKAAEIRSVYHLHQEEITRIKKECEREIRRLMEEIKFKDRAVFVLERELGVQAGHAQRLQLQKEALDEQLSQVREADRHPGSPRRELPHAAGAGDASDHSGSPEQQLDEKDARRFQLKIAELSAIIRKLEDRNALLSEERNELLKRVREAESQYKPLLDKNKRLSRKNEDLSHALRRMENKLKFVTQENIEMRQRAGIIRRPSSLNDLDQSQDEREVDFLKLQIVEQQNLIDELSKTLETAGYVKSVLERDKLLRFRKQRKKMAKLPKPVVVETFFGYDEEASLESDGSSVSYQTDRTDQTPCTPDDDLEEGMAKEETELRFRQLTMEYQALQRAYALLQEQVGGTLDAEREVKTREQLQAEVQRAQARIEDLEKALAEQGQDMKWIEEKQALYRRNQELVEKIKQMETEEARLRHEVQDARDQNELLEFRILELEERERKSPAISFHHTPFVDGKSPLQVYCEAEGVTDIVVAELMKKLDILGDNANLTNEEQVVVIQARTVLTLAEKWLQQIEETEAALQRKMVDLESEKELFSKQKGYLDEELDYRKQALDQANKHILELEAMLYDALQQEAGAKVAELLSEEEREKLKVAVEQWKRQVMSELRERDAQILRERMELLQLAQQRIKELEERIEAQKRQIKELEEKFLFLFLFFSLAFILWS

SEQ ID NO: 31500 - protein, 704 aa, Homo sapiens
MESKPSRIPRRISVQPSSSLSARMMSGSRGSSLNDTYHSRDSSFRLDSEYQSTSASASASPFQSAWYSESEITQGARSRSQNQQRDHDSKRPKLSCTNCTTSAGRNVGNGLNTLSDSSWRHSQVPRSSSMVLGSFGTDLMRERRDLERRTDSSISNLMDYSHRSGDFTTSSYVQDRVPSYSQGARPKENSMSTLQLNTSSTNHQLPSEHQTILSSRDSRNSLRSNFSSRESESSRSNTQPGFSYSSSRDEAPIISNSERVVSSQRPFQESSDNEGRRTTRRLLSRIASSMSSTFFSRRSSQDSLNTRSLNSENSYVSPRILTASQSRSNVPSASEVPDNRASEASQGFRFLRRRWGLSSLSHNHSSESDSENFNQESEGRNTGPWLSSSLRNRCTPLFSRRRREGRDESSRIPTSDTSSRSHIFRRESNEVVHLEAQNDPLGAAANRPQASAASSSATTGGSTSDSAQGGRNTGISGILPGSLFRFAVPPALGSNLTDNVMITVDIIPSGWNSADGKSDKTKSAPSRDPERLQKIKESLLLEDSEEEEGDLCRICQMAAASSSNLLIEPCKCTGSLQYVHQDCMKKWLQAKINSGSSLEAVTTCELCKEKLELNLEDFDIHELHRAHANEQAEYEFISSGLYLVVLLHLCEQSFSDMMGNTNEPSTRVRFINLARTLQAHMEDLETSEDDSEEDGDHNRTFDIA

SEQ ID NO: 31501 - protein, 666 aa, Homo sapiens
MIGNYDHLMSLVTSTSASASASPFQSAWYSESEITQGARSRSQNQQRDHDSKRPKLSCTNCTTSAGRNVGNGLNTLSDSSWRHSQVPRSSSMVLGSFGTDLMRERRDLERRTDSSISNLMDYSHRSGDFTTSSYVQDRVPSYSQGARPKENSMSTLQLNTSSTNHQLPSEHQTILSSRDSRNSLRSNFSSRESESSRSNTQPGFSYSSSRDEAPIISNSERVVSSQRPFQESSDNEGRRTTRRLLSRIASSMSSTFFSRRSSQDSLNTRSLNSENSYVSPRILTASQSRSNVPSASEVPDNRASEASQGFRFLRRRWGLSSLSHNHSSESDSENFNQESEGRNTGPWLSSSLRNRCTPLFSRRRREGRDESSRIPTSDTSSRSHIFRRESNEVVHLEAQNDPLGAAANRPQASAASSSATTGGSTSDSAQGGRNTGISGILPGSLFRFAVPPALGSNLTDNVMITVDIIPSGWNSADGKSDKTKSAPSRDPERLQKIKESLLLEDSEEEEGDLCRICQMAAASSSNLLIEPCKCTGSLQYVHQDCMKKWLQAKINSGSSLEAVTTCELCKEKLELNLEDFDIHELHRAHANEQAEYEFISSGLYLVVLLHLCEQSFSDMMGNTNEPSTRVRFINLARTLQAHMEDLETSEDDSEEDGDHNRTFDIA

SEQ ID NO: 31502 - protein, 876 aa, Homo sapiens
MELITILEKTVSPDRLELEAAQKFLERAAVENLPTFLVELSRVLANPGNSQVARVAAGLQIKNSLTSKDPDIKAQYQQRWLAIDANARREVKNYVLQTLGTETYRPSSASQCVAGIACAEIPVNQWPELIPQLVANVTNPNSTEHMKESTLEAIGYICQDIDPEQLQDKSNEILTAIIQGMRKEEPSNNVKLAATNALLNSLEFTKANFDKESERHFIMQVVCEATQCPDTRVRVAALQNLVKIMSLYYQYMETYMGPALFAITIEAMKSDIDEVALQGIEFWSNVCDEEMDLAIEASEAAEQGRPPEHTSKFYAKGALQYLVPILTQTLTKQDENDDDDDWNPCKAAGVCLMLLATCCEDDIVPHVLPFIKEHIKNPDWRYRDAAVMAFGCILEGPEPSQLKPLVIQAMPTLIELMKDPSVVVRDTAAWTVGRICELLPEAAINDVYLAPLLQCLIEGLSAEPRVASNVCWAFSSLAEAAYEAADVADDQEEPATYCLSSSFELIVQKLLETTDRPDGHQNNLRSSAYESLMEIVKNSAKDCYPAVQKTTLVIMERLQQVLQMESHIQSTSDRIQFNDLQSLLCATLQNVLRKVQHQDALQISDVVMASLLRMFQSTAGSGGVQEDALMAVSTLVEVLGGEFLKYMEAFKPFLGIGLKNYAEYQVCLAAVGLVGDLCRALQSNIIPFCDEVMQLLLENLGNENVHRSVKPQILSVFGDIALAIGGEFKKYLEVVLNTLQQASQAQVDKSDYDMVDYLNELRESCLEAYTGIVQGLKGDQENVHPDVMLVQPRVEFILSFIDHIAGDEDHTDGVVACAAGLIGDLCTAFGKDVLKLVEARPMIHELLTEGRRSKTNKAKTLATWATKELRKLKNQA

SEQ ID NO: 31503 - protein, 731 aa, Homo sapiens
MKESTLEAIGYICQDIDPEQLQDKSNEILTAIIQGMRKEEPSNNVKLAATNALLNSLEFTKANFDKESERHFIMQVVCEATQCPDTRVRVAALQNLVKIMSLYYQYMETYMGPALFAITIEAMKSDIDEVALQGIEFWSNVCDEEMDLAIEASEAAEQGRPPEHTSKFYAKGALQYLVPILTQTLTKQDENDDDDDWNPCKAAGVCLMLLATCCEDDIVPHVLPFIKEHIKNPDWRYRDAAVMAFGCILEGPEPSQLKPLVIQAMPTLIELMKDPSVVVRDTAAWTVGRICELLPEAAINDVYLAPLLQCLIEGLSAEPRVASNVCWAFSSLAEAAYEAADVADDQEEPATYCLSSSFELIVQKLLETTDRPDGHQNNLRSSAYESLMEIVKNSAKDCYPAVQKTTLVIMERLQQVLQMESHIQSTSDRIQFNDLQSLLCATLQNVLRKVQHQDALQISDVVMASLLRMFQSTAGSGGVQEDALMAVSTLVEVLGGEFLKYMEAFKPFLGIGLKNYAEYQVCLAAVGLVGDLCRALQSNIIPFCDEVMQLLLENLGNENVHRSVKPQILSVFGDIALAIGGEFKKYLEVVLNTLQQASQAQVDKSDYDMVDYLNELRESCLEAYTGIVQGLKGDQENVHPDVMLVQPRVEFILSFIDHIAGDEDHTDGVVACAAGLIGDLCTAFGKDVLKLVEARPMIHELLTEGRRSKTNKAKTLATWATKELRKLKNQA

SEQ ID NO: 31504 - protein, 188 aa, Homo sapiens
MSQAPGAQPSPPTVYHERQRLELCAVHALNNVLQQQLFSQEAADEICKRLAPDSRLNPHRSLLGTGNYDVNVIMAALQGLGLAAVWWDRRRPLSQLALPQVLGLILNLPSPVSLGLLSLPLRRRHWVALRQVDGVYYNLDSKLRAPEALGDEDGVRAFLAAALAQGLCEVLLVVTKEVEEKGSWLRTD

SEQ ID NO: 31505 - protein, 146 aa, Homo sapiens
MSQAPGAQPSPPTVYHERQRLELCAVHALNNVLQQQLFSQEAADEICKRPLSQLALPQVLGLILNLPSPVSLGLLSLPLRRRHWVALRQVDGVYYNLDSKLRAPEALGDEDGVRAFLAAALAQGLCEVLLVVTKEVEEKGSWLRTD

SEQ ID NO: 31506 - protein, 123 aa, Homo sapiens
MALTPLLLLLLSHCTGSLSRPVLTQPPSLSASPGATARLPCTLSSDLSVGGKNMFWYQQKLGSSPRLFLYHYSDSDKQLGPGVPSRVSGSKETSSNTAFLLISGLQPEDEADYYCQVYESSAN

SEQ ID NO: 31507 - protein, 331 aa, Homo sapiens
MSMTTRAWEELDGGLGSCQALEDHSALAETQEDRASATPRLADSGSVPHDSQVAEGPSVDTRPKKMEKEPAARGTPGTGKERLKAGASPRSVPARKKAQTAPPLQPPPPPPALSEELPWGDLSLNKCLVLASLVALLGSAFQLCRDAVPGEAALQARVPEPWVPPSSAPREPSSPLPKFEAQAPPSAPPAPRAEAEVRPKIPGSREAAENDEEEPGEATGEAVREDRVTLADRGPKERPRREGKPRKEKPRKEERPKKERPRKEERPRAAREPREALPQRWESREGGHRPWARDSRDAEPRKKQAWVSPRRPDEEQRPGSRQKLRAGKGRD

SEQ ID NO: 31508 - protein, 563 aa, Homo sapiens
MRLEELKRLQNPLEQVNDGKYSFENHQLAMDAENNIEKYPLNLQPLESKVKIIQRAWREYLQRQEPLGKRSPSPPSVSSEKLSSSVSMNTFSDSSTPDYREDGMDLGSDAGSSSSSSRASSQSNSTKVTPCSECKSSSSPGGSLDLVSALEDYEEPFPVYQKKVIDEWAPEEDGEEEEEEDERDQRGYRDDRSPAREPGDVSARTRSGGGGGRSATTAMPPPVPNGNLHQHDPQDLRHNGNVVVAGRPSCSRGPRRAIQKPQPAGGRRSGRGPAAGGLCLQPPDGGTCVPEEPPVPPMDWEALEKHLAGLQFREQEVRNQGQARTNSTSAQKNERESIRQKLALGSFFDDGPGIYTSCSKSGKPSLSSRLQSGMNLQICFVNDSGSDKDSDADDSKTETSLDTPLSPMSKQSSSYSDRDTTEEESESLDDMDFLTRQKKLQAEAKMALAMAKPMAKMQVEVEKQNRKKSPVADLLPHMPHISECLMKRSLKPTDLRDMTIGQLQVIVNDLHSQIESLNEELVQLLLIRDELHTEQDAMLVDIEDLTRHAESQQKHMAEKMPAK

SEQ ID NO: 31509 - protein, 536 aa, Homo sapiens
MRLEELKRLQNPLEQVNDGKYSFENIQRAWREYLQRQEPLGKRSPSPPSVSSEKLSSSVSMNTFSDSSTPDYREDGMDLGSDAGSSSSSSRASSQSNSTKVTPCSECKSSSSPGGSLDLVSALEDYEEPFPVYQKKVIDEWAPEEDGEEEEEEDERDQRGYRDDRSPAREPGDVSARTRSGGGGGRSATTAMPPPVPNGNLHQHDPQDLRHNGNVVVAGRPSCSRGPRRAIQKPQPAGGRRSGRGPAAGGLCLQPPDGGTCVPEEPPVPPMDWEALEKHLAGLQFREQEVRNQGQARTNSTSAQKNERESIRQKLALGSFFDDGPGIYTSCSKSGKPSLSSRLQSGMNLQICFVNDSGSDKDSDADDSKTETSLDTPLSPMSKQSSSYSDRDTTEEESESLDDMDFLTRQKKLQAEAKMALAMAKPMAKMQVEVEKQNRKKSPVADLLPHMPHISECLMKRSLKPTDLRDMTIGQLQVIVNDLHSQIESLNEELVQLLLIRDELHTEQDAMLVDIEDLTRHAESQQKHMAEKMPAK

SEQ ID NO: 31510 - protein, 347 aa, Homo sapiens
MCTKMEQPFYHDDSYTATGYGRAPGGLSLHDYKLLKPSLAVNLADPYRSLKAPGARGPGPEGGGGGSYFSGQGSDTGASLKLASSELERLIVPNSNGVITTTPTPPGQYFYPRGGGSGGGAGGAGGGVTEEQEGFADGFVKALDDLHKMNHVTPPNVSLGATGGPPAGPGGVYAGPEPPPVYTNLSSYSPASASSGGAGAAVGTGSSYPTTTISYLPHAPPFAGGHPAQLGLGRGASTFKEEPQTVPEARSRDATPPVSPINMEDQERIKVERKRLRNRLAATKCRKRKLERIARLEDKVKTLKAENAGLSSTAGLLREQVAQLKQKVMTHVSNGCQLLLGVKGHAF

SEQ ID NO: 31511 - protein, 347 aa, Homo sapiens
METPFYGDEALSGLGGGASGSGGSFASPGRLFPGAPPTAAAGSMMKKDALTLSLSEQVAAALKPAAAPPPTPLRADGAPSAAPPDGLLASPDLGLLKLASPELERLIIQSNGLVTTTPTSSQFLYPKVAASEEQEFAEGFVKALEDLHKQNQLGAGAAAAAAAAAAGGPSGTATGSAPPGELAPAAAAPEAPVYANLSSYAGGAGGAGGAATVAFAAEPVPFPPPPPPGALGPPRLAALKDEPQTVPDVPSFGESPPLSPIDMDTQERIKAERKRLRNRIAASKCRKRKLERISRLEEKVKTLKSQNTELASTASLLREQVAQLKQKVLSHVNSGCQLLPQHQVPAY

SEQ ID NO: 31512 - protein, 291 aa, Homo sapiens
MSMPLHQISAIPSQDAISARVYRSKTKEKEREEQNEKTLGHFMSHSSNISKAGSPPSASAPAPVSSFSRTSITPSSQDICRICHCEGDDESPLITPCHCTGSLHFVHQACLQQWIKSSDTRCCELCKYEFIMETKLKPLRKWEKLQMTSSERRKIMCSVTFHVIAITCVVWSLYVLIDRTAEEIKQGQATGILEWPFWTKLVVVAIGFTGGLLFMYVQCKVYVQLWKRLKAYNRVIYVQNCPETSKKNIFEKSPLTEPNFENKHGYGICHSDTNSSCCTEPEDTGAEIIHV

SEQ ID NO: 31513 - protein, 573 aa, Homo sapiens
MSMPLHQISAIPSQDAISARVYRSKTKEKEREEQNEKTLGHFMSHSSNISKAGSPPSASAPAPVSSFSRTSITPSSQDICSSSAVFSECCHHSSVQSAVVSKAPHCQSSLTQGLTVTVICKDTLQASKRNSFGSEWAQALKPAKNTKARRTLKFSRSLNDVGEKAQDTSESFAYVERTCSEGKLILPQDTCLRTNRFHHKEKRTLNHKPLGNSKHSCVSCLSAGRSTASEVEAGKGGRPGLLLEEKADGEATSRSRQLLQYLFSLSHGLSASSLHRFHELESCAARLHTAKSSSGLAGSMGFCSDEMGDDDVFEDSTSAKLKSRVLRAPLCSTEKDSDLDCPSPFSEKLPPISPVSTSGDVCRICHCEGDDESPLITPCHCTGSLHFVHQACLQQWIKSSDTRCCELCKYEFIMETKLKPLRKWEKLQMTSSERRKIMCSVTFHVIAITCVVWSLYVLIDRTAEEIKQGQATGILEWPFWTKLVVVAIGFTGGLLFMYVQCKVYVQLWKRLKAYNRVIYVQNCPETSKKNIFEKSPLTEPNFENKHGYGICHSDTNSSCCTEPEDTGAEIIHV

SEQ ID NO: 31514 - protein, 80 aa, Homo sapiens
MKLSGMFLLLSLALFCFLTGVFSQGGQVDCGEFQDPKVYCTRESNPHCGSDGQTYGNKCAFCKAIVKSGGKISLKHPGKC

SEQ ID NO: 31515 - protein, 287 aa, Homo sapiens
MDMHSARLDSFLSQLRWELLCGRDTGSPSMPGPLQPTSQTGPDVQPSHQLRASGALEEDSVCCVEEEEEEEEEAVVTEDRDAALGGPREHALDWDSGFSEVSGSTWREEELPVSQRPAPSAQPLRRQCLSVSGLPMPSRAPVASVPPVHHPRPKSTPDACLEHWQGLEAEDWTAALLNRGRSRQPLVLGDNCFADLVHNWMELPETGSEGGDGGGHRARARPPQFLLGLSEQLRRRLARARRTAMAGKRLSCPPRPEPELPADVSRFAALMSCRSRQPIICNDVSYL

SEQ ID NO: 31516 - protein, 520 aa, Homo sapiens
MAGPERWGPLLLCLLQAAPGRPRLAPPQNVTLLSQNFSVYLTWLPGLGNPQDVTYFVAYQSSPTRRRWREVEECAGTKELLCSMMCLKKQDLYNKFKGRVRTVSPSSKSPWVESEYLDYLFEVEPAPPVLVLTQTEEILSANATYQLPPCMPPLDLKYEVAFWKEGAGNKTLFPVTPHGQPVQITLQPAASEHHCLSARTIYTFSVPKYSKFSKPTCFLLEVPEANWAFLVLPSLLILLLVIAAGGVIWKTLMGNPWFQRAKMPRALDFSGHTHPVATFQPSRPESVNDLFLCPQKELTRGVRPTPRVRAPATQQTRWKKDLAEDEEEEDEEDTEDGVSFQPYIEPPSFLGQEHQAPGHSEAGGVDSGRPRAPLVPSEGSSAWDSSDRSWASTVDSSWDRAGSSGYLAEKGPGQGPGGDGHQESLPPPEFSKDSGFLEELPEDNLSSWATWGTLPPEPNLVPGGPPVSLQTLTFCWESSPEEEEEARESEIEDSDAGSWGAESTQRTEDRGRTLGHYMAR

SEQ ID NO: 31517 - protein, 491 aa, Homo sapiens
MAGPERWGPLLLCLLQAAPGRPRLAPPQNVTLLSQNFSVYLTWLPGLGNPQDVTYFVAYQSSPTRRRWREVEECAGTKELLCSMMCLKKQDLYNKFKGRVRTVSPSSKSPWVESEYLDYLFEVEPAPPVLVLTQTEEILSANATYQLPPCMPPLDLKYEVAFWKEGAGNKTLFPVTPHGQPVQITLQPAASEHHCLSARTIYTFSVPKYSKFSKPTCFLLEVPEANWAFLVLPSLLILLLVIAAGGVIWKTLMGNPWFQRAKMPRALELTRGVRPTPRVRAPATQQTRWKKDLAEDEEEEDEEDTEDGVSFQPYIEPPSFLGQEHQAPGHSEAGGVDSGRPRAPLVPSEGSSAWDSSDRSWASTVDSSWDRAGSSGYLAEKGPGQGPGGDGHQESLPPPEFSKDSGFLEELPEDNLSSWATWGTLPPEPNLVPGGPPVSLQTLTFCWESSPEEEEEARESEIEDSDAGSWGAESTQRTEDRGRTLGHYMAR

SEQ ID NO: 31518 - protein, 211 aa, Homo sapiens
MAGPERWGPLLLCLLQAAPGRPRLAPPQNVTLLSQNFSVYLTWLPGLGNPQDVTYFVAYQSSPTRRRWREVEECAGTKELLCSMMCLKKQDLYNKFKGRVRTVSPSSKSPWVESEYLDYLFEVEPAPPVLVLTQTEEILSANATYQLPPCMPPLDLKYEVAFWKEGAGNKVGSSFPAPRLGPLLHPFLLRFFSPSQPAPAPLLQEVFPVHS

SEQ ID NO: 31519 - protein, 244 aa, Homo sapiens
MAGPERWGPLLLCLLQAAPGRPRLAPPQNVTLLSQNFSVYLTWLPGLGNPQDVTYFVAYQSSPTRRRWREVEECAGTKELLCSMMCLKKQDLYNKFKGRVRTVSPSSKSPWVESEYLDYLFEVEPAPPVLVLTQTEEILSANATYQLPPCMPPLDLKYEVAFWKEGAGNKTLFPVTPHGQPVQITLQPAASEHHCLSARTIYTFSVPKYSKFSKPTCFLLEVPGLFWTHTPCGNLSAQQTRVRE

SEQ ID NO: 31520 - protein, 460 aa, Homo sapiens
MNKPITPSTYVRCLNVGLIRKLSDFIDPQEGWKKLAVAIKKPSGDDRYNQFHIRRFEALLQTGKSPTSELLFDWGTTNCTVGDLVDLLIQNEFFAPASLLLPDAVPKTANTLPSKEAITVQQKQMPFCDKDRTLMTPVQNLEQSYMPPDSSSPENKSLEVSDTRFHSFSFYELKNVTNNFDERPISVGGNKMGEGGFGVVYKGYVNNTTVAVKKLAAMVDITTEELKQQFDQEIKVMAKCQHENLVELLGFSSDGDDLCLVYVYMPNGSLLDRLSCLDGTPPLSWHMRCKIAQGAANGINFLHENHHIHRDIKSANILLDEAFTAKISDFGLARASEKFAQTVMTSRIVGTTAYMAPEALRGEITPKSDIYSFGVVLLEIITGLPAVDEHREPQLLLDIKEEIEDEEKTIEDYIDKKMNDADSTSVEAMYSVASQCLHEKKNKRPDIKKVQQLLQEMTAS

SEQ ID NO: 31521 - protein, 336 aa, Homo sapiens
MPFCDKDRTLMTPVQNLEQSYMPPDSSSPENKSLEVSDTRFHSFSFYELKNVTNNFDERPISVGGNKMGEGGFGVVYKGYVNNTTVAVKKLAAMVDITTEELKQQFDQEIKVMAKCQHENLVELLGFSSDGDDLCLVYVYMPNGSLLDRLSCLDGTPPLSWHMRCKIAQGAANGINFLHENHHIHRDIKSANILLDEAFTAKISDFGLARASEKFAQTVMTSRIVGTTAYMAPEALRGEITPKSDIYSFGVVLLEIITGLPAVDEHREPQLLLDIKEEIEDEEKTIEDYIDKKMNDADSTSVEAMYSVASQCLHEKKNKRPDIKKVQQLLQEMTAS

SEQ ID NO: 31522 - protein, 184 aa, Homo sapiens
MVRKLKFHEQKLLKQVDFLNWEVTDHNLHELRVLRRYRLQRREDYTRYNQLSRAVRELARRLRDLPERDQFRVRASAALLDKLYALGLVPTRGSLELCDFVTASSFCRRRLPTVLLKLRMAQHLQAAVAFVEQGHVRVGPDVVTDPAFLVTRSMEDFVTWVDSSKIKRHVLEYNEERDDFDLEA

SEQ ID NO: 31523 - protein, 517 aa, Homo sapiens
MGLGQPQAWLLGLPTAVVYGSLALFTTILHNVFLLYYVDTFVSVYKINKMAFWVGETVFLLWNSLNDPLFGWLSDRQFLSSQPRSGAGLSSRAVVLARVQALGWHGPLLALSFLAFWVPWAPAGLQFLLCLCLYDGFLTLVDLHHHALLADLALSAHDRTHLNFYCSLFSAAGSLSVFASYAFWNKEDFSSFRAFCVTLAVSSGLGFLGATQLLRRRVEAARKDPGCSGLVVDSGLCGEELLVGSEEADSITLGRYLRQLARHRNFLWFVSMDLVQVFHCHFNSNFFPLFLEHLLSDHISLSTGSILLGLSYVAPHLNNLYFLSLCRRWGVYAVVRGLFLLKLGLSLLMLLAGPDHLSLLCLFIASNRVFTEGTCKLLTLVVTDLVDEDLVLNHRKQAASALLFGMVALVTKPGQTFAPLLGTWLLCFYTGHDLFQQSLITPVGSAHPWPEPPAPAPAQAPTLRQGCFYLLVLVPITCALLQLFTWSQFTLHGRRLHMVKAQRQNLSQAQTLDVKMV

SEQ ID NO: 31524 - protein, 924 aa, Homo sapiens
MEIKEEGASEEGQHFLPTAQANDPGDCQFTSIQKTPNEPQLEFILACKDLVAPVRDRKLNTLVQISVIHPVEQSLTRYSSTEIVEGTRDPLFLTGVTFPSEYPIYEETKIKLTVYDVKDKSHDTVRTSVLPEHKDPPPEVGRSFLGYASFKVGELLKSKEQLLVLSLRTSDGGKVVGTIEVSVVKMGEIEDGEADHITTDVQGQKCALVCECTAPESVSGKDNLPFLNSVLKNPVCKLYRFPTSDNKWMRIREQMSESILSFHIPKELISLHIKEDLCRNQEIKELGELSPHWDNLRKNVLTHCDQMVNMYQDILTELSKETGSSFKSSSSKGEKTLEFVPINLHLQRMQVHSPHLKDALYDVITVGAPAAHFQGFKNGGLRKLLHRFETERRNTGYQFIYYSPENTAKAKEVLSNINQLQPLIATHADLLLNSASQHSPDSLKNSLKMLSEKTELFVHAFKDQLVRSALLALYTARPGGILKKPPSPKSSTEESSPQDQPPVMRGQDSIPHHSDYDEEEWDRVWANVGKSLNCIIAMVDKLIERDGGSEGSGGNNDGEKEPSLTDAIPSHPREDWYEQLYPLILTLKDCMGEVVNRAKQSLTFVLLQELAYSLPQCLMLTLRRDIVFSQALAGLVCGFIIKLQTSLYDPGFLQQLHTVGLIVQYEGLLSTYSDEIGMLEDMAVGISDLKKVAFKIIEAKSNDVLPVITGRREHYVVEVKLPARMFESLPLQIKEGQLLHVYPVLFNVGINEQQTLAERFGDVSLQESINQENFELLQEYYKIFMEKMPPDYISHFQEQNDLKALLENLLQNIQSKKRKNVEIMWLAATICRKLNGIRFTCCKSAKDRTSMSVTLEQCSILRDEHQLHKDFFIRALDCMRREGCRIENVLKNIKCRKYAFNMLQLMAFPKYYRPPEGTYGKADT

SEQ ID NO: 31525 - protein, 131 aa, Homo sapiens
MEIKEEGASEEGQHFLPTAQANDPGDCQFTSIQKTPNEPQLEFILACKDLVAPVRDRKLNTLVQISVIHPVEQSLTRYSSTEIVEGTRDPLFLTGVTFPSEYPIYEETKIKLTVYDVKDKSHDTIANSSRI

SEQ ID NO: 31526 - protein, 349 aa, Homo sapiens
MPVERMRMRPWLEEQINSNTIPGLKWLNKEKKIFQIPWMHAARHGWDVEKDAPLFRNWAIHTGKHQPGVDKPDPKTWKANFRCAMNSLPDIEEVKDKSIKKGNNAFRVYRMLPLSERPSKKGKKPKTEKEDKVKHIKQEPVESSLGLSNGVSDLSPEYAVLTSTIKNEVDSTVNIIVVGQSHLDSNIENQEIVTNPPDICQVVEVTTESDEQPVSMSELYPLQISPVSSYAESETTDSVPSDEESAEGRPHWRKRNIEGKQYLSNMGTRGSYLLPGMASFVTSNKPDLQVTIKEESNPVPYNSSWPPFQDLPLSSSMTPASSSSRPDRETRASVIKKTSDITQARVKSC

SEQ ID NO: 31527 - protein, 347 aa, Homo sapiens
MPVERMRMRPWLEEQINSNTIPGLKWLNKEKKIFQIPWMHAARHGWDVEKDAPLFRNWAIHTGKHQPGVDKPDPKTWKANFRCAMNSLPDIEEVKDKSIKKGNNAFRVYRMLPLSERPSKKGKKPKTEKEDKVKHIKQEPVESSLGLSNGVSDLSPEYAVLTSTIKNEVDSTVNIIGQSHLDSNIENQEIVTNPPDICQVVEVTTESDEQPVSMSELYPLQISPVSSYAESETTDSVPSDEESAEGRPHWRKRNIEGKQYLSNMGTRGSYLLPGMASFVTSNKPDLQVTIKEESNPVPYNSSWPPFQDLPLSSSMTPASSSSRPDRETRASVIKKTSDITQARVKSC

SEQ ID NO: 31528 - protein, 1044 aa, Homo sapiens
MMAQKSQGSDNLQEGQEKSKREILKCTKSAWAPLDEWLPPDPEEESQSLTIPMLEDSKQESIQQWLDSGFFVSANENFQQVIDRTVSLYEQGMVQMTVKDYMRSLHQFSETPILSRGTSFNSCYSTASVPQSIPEWLEFWEIDPVEILLDLGFGADEPDICMQIPARFLGCGSAARGINIRVFLEAQKQRMDIENPNLYGRFRQLEILDHVTNAFSSLLSDVSILPNRAEEKAGGESVQRTSVSAAKEHRRRMGKLLRRASKQNIRRDCNPEVSESFKVKDEVFVPFTKPWDCGAELAATSINHKQNHLSLSVEHQSLQACDDLLPYPPHGLLSKQWPCSSMPAKQAPPSCVSEGSVKGRTQKENLFQTNKLKSLSHLAGKGPDSFEMEEVQSFEEETGNPLDMTSGTVGARVDRANSCQSDSSGFLEEPLEPLPLQMPSLPNSQSPAENGGRKPRDQSHSLVSSQDCQLESDGPDSKSRASMSFSSQEANALEQRASVSVMEEEFLLEAMEGPPELYIPDMACAKTTTRGECPRKDSHLWQLLPMPHAEYEVTRPTATSKYDHPLGFMVTHVTEMQDSFVRPEGAGKVQSHHNESQRSPGNDHTQDKFLHVDSEAPREEESSGFCPHTNHSLLVPESSSQCIPKHSEITPYATDLAQTSEKLIPHLHKLPGDPAQVKSRSGTLGQILPGTEAEMENLPLNTGSSRSVMTQMSSSLVSAAQRAVALGTGPRGTSLECTVCDPVTATETRLGTKARQLNDASIQTSALSNKTLTHGPQPLTKSVSLDSGFSSICPMGTCHAIPAHCCICCHHHPHCHGERQSPGPEPSVCRHCLCSLTGHQEAQFMTTLKALQDTTVRELCSCTVHEMEAMKTICQSFREYLEEIEQHLMGQQALFSRDMSEEEREEAEQLQTLREALRQQVAELEFQLGDRAQQIREGILLQLEVLTAEPPEHYSNLHQYNWIEESNGQTSCSKIHPGMAPRTVFPPDDGQEAPCSGGTQLAAFTPPTLENSTRMSPSSSAWAKLGPTPLSNCPVGEKDADVFL

SEQ ID NO: 31529 - protein, 896 aa, Homo sapiens
MMAQKSQGSDNLQEGQEKSKREILKCTKSAWAPLDEWLPPDPEEESQSLTIPMLEDSKQESIQQWLDSGFFVSANENFQQVIDRTVSLYEQGMVQMTVKDYMRSLHQFSETPILSRGTSFNSCYSTASVPQSIPEWLEFWEIDPVEILLDLGFGADEPDICMQIPARFLGCGSAARGINIRVFLEAQKQRMDIENPNLYGRFRQLEILDHVTNAFSSLLSDVSILPNRAEEKAGGESVQRTSVQSFEEETGNPLDMTSGTVGARVDRANSCQSDSSGFLEEPLEPLPLQMPSLPNSQSPAENGGRKPRDQSHSLVSSQDCQLESDGPDSKSRASMSFSSQEANALEQRASVSVMEEEFLLEAMEGPPELYIPDMACAKTTTRGECPRKDSHLWQLLPMPHAEYEVTRPTATSKYDHPLGFMVTHVTEMQDSFVRPEGAGKVQSHHNESQRSPGNDHTQDKFLHVDSEAPREEESSGFCPHTNHSLLVPESSSQCIPKHSEITPYATDLAQTSEKLIPHLHKLPGDPAQVKSRSGTLGQILPGTEAEMENLPLNTGSSRSVMTQMSSSLVSAAQRAVALGTGPRGTSLECTVCDPVTATETRLGTKARQLNDASIQTSALSNKTLTHGPQPLTKSVSLDSGFSSICPMGTCHAIPAHCCICCHHHPHCHGERQSPGPEPSVCRHCLCSLTGHQEAQFMTTLKALQDTTVRELCSCTVHEMEAMKTICQSFREYLEEIEQHLMGQQALFSRDMSEEEREEAEQLQTLREALRQQVAELEFQLGDRAQQIREGILLQLEVLTAEPPEHYSNLHQYNWIEESNGQTSCSKIHPGMAPRTVFPPDDGQEAPCSGGTQLAAFTPPTLENSTRMSPSSSAWAKLGPTPLSNCPVGEKDADVFL

SEQ ID NO: 31530 - protein, 952 aa, Homo sapiens
MVQMTVKDYMRSLHQFSETPILSRGTSFNSCYSTASVPQSIPEWLEFWEIDPVEILLDLGFGADEPDICMQIPARFLGCGSAARGINIRVFLEAQKQRMDIENPNLYGRFRQLEILDHVTNAFSSLLSDVSILPNRAEEKAGGESVQRTSVSAAKEHRRRMGKLLRRASKQNIRRDCNPEVSESFKVKDEVFVPFTKPWDCGAELAATSINHKQNHLSLSVEHQSLQACDDLLPYPPHGLLSKQWPCSSMPAKQAPPSCVSEGSVKGRTQKENLFQTNKLKSLSHLAGKGPDSFEMEEVQSFEEETGNPLDMTSGTVGARVDRANSCQSDSSGFLEEPLEPLPLQMPSLPNSQSPAENGGRKPRDQSHSLVSSQDCQLESDGPDSKSRASMSFSSQEANALEQRASVSVMEEEFLLEAMEGPPELYIPDMACAKTTTRGECPRKDSHLWQLLPMPHAEYEVTRPTATSKYDHPLGFMVTHVTEMQDSFVRPEGAGKVQSHHNESQRSPGNDHTQDKFLHVDSEAPREEESSGFCPHTNHSLLVPESSSQCIPKHSEITPYATDLAQTSEKLIPHLHKLPGDPAQVKSRSGTLGQILPGTEAEMENLPLNTGSSRSVMTQMSSSLVSAAQRAVALGTGPRGTSLECTVCDPVTATETRLGTKARQLNDASIQTSALSNKTLTHGPQPLTKSVSLDSGFSSICPMGTCHAIPAHCCICCHHHPHCHGERQSPGPEPSVCRHCLCSLTGHQEAQFMTTLKALQDTTVRELCSCTVHEMEAMKTICQSFREYLEEIEQHLMGQQALFSRDMSEEEREEAEQLQTLREALRQQVAELEFQLGDRAQQIREGILLQLEVLTAEPPEHYSNLHQYNWIEESNGQTSCSKIHPGMAPRTVFPPDDGQEAPCSGGTQLAAFTPPTLENSTRMSPSSSAWAKLGPTPLSNCPVGEKDADVFL

SEQ ID NO: 31531 - protein, 1062 aa, Homo sapiens
MPTTASCKTISLLKLLYSVSLQNYSPMMAQKSQGSDNLQEGQEKSKREILKCTKSAWAPLDEWLPPDPEEESQSLTIPMLEDSKQESIQQWLDSGFFVSANENFQQVIDRTVSLYEQGMVQMTVKDYMRSLHQFSETPILSRGTSFNSCYSTASVPQSIPEWLEFWEIDPVEILLDLGFGADEPDICMQIPARFLGCGSAARGINIRVFLEAQKQRMDIENPNLYGRFRQLEILDHVTNAFSSLLSDVSILPNRAEEKAGGESVQRTSVSAAKEHRRRMGKLLRRASKQNIRRDCNPEVSESFKVKDEVFVPFTKPWDCGAELAATSINHKQNHLSLSVEHQSLQACDDLLPYPPHGLLSKQWPCSSMPAKQAPPSCVSEGSVKGRTQKENLFQTNKLKSLSHLAGKGPDSFEMEEVQSFEEETGNPLDMTSGTVGARVDRANSCQSDSSGFLEEPLEPLPLQMPSLPNSQSPAENGGRKPRDQSHSLVSSQDCQLESDGPDSKSRASMSFSSQEANALEQRASVSVMEEEFLLEAMEGPPELYIPDMACAKTTTRGECPRKDSHLWQLLPMPHAEYEVTRPTATSKYDHPLGFMVTHVTEMQDSFVRPEGAGKVQSHHNESQRSPGNDHTQDKFLHVDSEAPREEESSGFCPHTNHSLLVPESSSQCIPKHSEITPYATDLAQTSEKLIPHLHKLPGDPAQVKSRSGTLGQILPGTEAEMENLPLNTGSSRSVMTQMSSSLVSAAQRAVALGTGPRGTSLECTVCDPVTATETRLGTKARQLNDASIQTSALSNKTLTHGPQPLTKSVSLDSGFSSICPMGTCHAIPAHCCICCHHHPHCHGERQSPGPEPSVCRHCLCSLTGHQEAQFMTTLKALQDTTVRELCSCTVHEMEAMKTICQSFREYLEEIEQHLMGQQALFSRDMSEEEREEAEQLQTLREALRQQVAELEFQLGDRAQQIREGILLQLEVLTAEPPEHYSNLHQYNWIEESNGQTSCSKIHPGMAPRTVFPPDDGQEAPCSGELLSAELDPFFFSSKANNSAKDEKIKSKDFLKTQDSGLL

SEQ ID NO: 31532 - protein, 78 aa, Homo sapiens
MRTDSSKMTDVESGVANFASSARAGRRNALPDIQSSAATDGTSDLPLKLEALSVKEDAKEKDEKTTQDQLEKPQNEEK

SEQ ID NO: 31533 - protein, 85 aa, Homo sapiens
MSHQDVAMRTDSSKMTDVESGVANFASSARAGRRNALPDIQSSAATDGTSDLPLKLEALSVKEDAKEKDEKTTQDQLEKPQNEEK

SEQ ID NO: 31534 - protein, 1359 aa, Homo sapiens
MYSVEDLLISHGYKLSRDPPASREDNPKGRQAARTGTRAGQGLQNGHEDGPAALAHRKTSAGKGHVSDSESRRSTPRGHGEPQSTSASRTSEAGFCNQPPSAWSSHPPTGNDQAYRRRGRQEARSQKPREHENLEARGMAQAHSLPVHVREGPWEVGGRSEHVMKKPVWEEELRMSGPAKWQNVSLESWNQPRKLGRQMSDGDGERLFQDLYPFIQGEHVLNSQNKGKSRSLPRVLSPESLSCTEIPIPLNERHSPKMPPYPPTCAPNLDSTRNSEKSGCSAPFPRPKFGRPLKPPSYSSHQQSRGGADSSDSQDSQQMDAYVPRHELCLSDPGLEPPVYVPPPSYRSPPQNIPNPYLEDTVPINVCGGHSQQQSPTEKAGASGQPPSGPPGTGNEYGVSPRLPQGLPAHPRPVTAYDGFVQYIPFDDPRLRHFKLAQPQGFCEDIKLDDKSYNSSPVTAQEPAHGGMQPDGAIWNPQSLIPPSGDERGLVLADSSPRWLWGQPPGDGENSGLPNQRDRCVARGQWPDVRGSQHGHTGRQVSSPYSQGESTCETQTKLKKFQTGTRTKKSSKKKMNETIFCLVSIPVKSESHLPDRDMDNNDLKPSADQKNGSDKSPALQEQSLLSMSSTDLELQALTGSMGGRTEFQKQDLGEPEEDRQTNDLSFIHLTKHRELKHSGSWPGHRYRDQQTQTSFSEEPQSSQLLPGAKLGGPSRAALSPKCSDPAASEAQTHTAFPTGDHKQRPSARNLKGHRSLSPSSNSAFSRTSLSVDQAPTPKAGRSQPCVDVHGLGAHPGPKREVVKGEPTGPCNSKQLFGQFLLKPVSRRPWDLISQLESFNKELQEEEESSSSSSSSSSSSEESEAEPQQENRAHCRQEDVGFRGNSPEMRVEPQPRMWVPESPVCRSGRGESKSESWSEELQPGHPRAWPPSPGRFRVEEGGGAPFCSADGSTSAEKRHLEVSNGMDELAGSPFPVTRMSSRSSDAKPLPASYPAEPREPQESPKITSAFSSVKPSEAVPRKFDSGGERGAGLPLSLSNKNRGLSAPDLRSVGLTPGQEQGASELEGSLGEASTIEIPPGESLQARAARILGIEVAVESLLPGIRRAGQNQPAEPDASACTPESPQEELLSRPAPADVPRVSTDAFYGRRKCGWTKSPLFVGDRDSARRAPQAFEHSDVDGVVTSTDPVPEPEPSPLESKFFEQKDVETKPPFRSTLFHFVERTPSVAGSEKRLRSPSKVIESLQEKLASPPRRADPDRLMRMKEVSSVSRMRVLSFRNADSQEDAEELKATTRGQAGLPGGLVSPGSGDRAQRLGHSLSVSKDSISREEKEHPAAQKEKSMDQDFWCPDSYDPSRVERV

SEQ ID NO: 31535 - protein, 1241 aa, Homo sapiens
MIMFPLFGKISLGILIFVLIEGDFPSLTAQTYLSIEEIQEPKSAVSFLLPEESTDLSLATKKKQPLDRRETERQWLIRRRRSILFPNGVKICPDESVAEAVANHVKYFKVRVCQEAVWEAFRTFWDRLPGREEYHYWMNLCEDGVTSIFEMGTNFSESVEHRSLIMKKLTYAKETVSSSELSSPVPVGDTSTLGDTTLSVPHPEVDAYEGASESSLERPEESISNEIENVIEEATKPAGEQIAEFSIHLLGKQYREELQDSSSFHHQHLEEEFISEVENAFTGLPGYKEIRVLEFRSPKENDSGVDVYYAVTFNGEAISNTTWDLISLHSNKVENHGLVELDDKPTVVYTISNFRDYIAETLQQNFLLGNSSLNPDPDSLQLINVRGVLRHQTEDLVWNTQSSSLQATPSSILDNTFQAAWPSADESITSSIPPLDFSSGPPSATGRELWSESPLGDLVSTHKLAFPSKMGLSSSPEVLEVSSLTLHSVTPAVLQTGLPVASEERTSGSHLVEDGLANVEESEDFLSIDSLPSSSFTQPVPKETIPSMEDSDVSLTSSPYLTSSIPFGLDSLTSKVKDQLKVSPFLPDASMEKELIFDGGLGSGSGQKVDLITWPWSETSSEKSAEPLSKPWLEDDDSLLPAEIEDKKLVLVDKMDSTDQISKHSKYEHDDRSTHFPEEEPLSGPAVPIFADTAAESASLTLPKHISEVPGVDDYSVTKAPLILTSVAISASTDKSDQADAILREDMEQITESSNYEWFDSEVSMVKPDMQTLWTILPESERVWTRTSSLEKLSRDILASTPQSADRLWLSVTQSTKLPPTTISTLLEDEVIMGVQDISLELDRIGTDYYQPEQVQEQNGKVGSYVEMSTSVHSTEMVSVAWPTEGGDDLSYTQTSGALVVFFSLRVTNMMFSEDLFNKNSLEYKALEQRFLELLVPYLQSNLTGFQNLEILNFRNGSIVVNSRMKFANSVPPNVNNAVYMILEDFCTTAYNTMNLAIDKYSLDVESGDEANPCKFQACNEFSECLVNPWSGEAKCRCFPGYLSVEERPCQSLCDLQPDFCLNDGKCDIMPGHGAICRCRVGENWWYRGKHCEEFVSEPVIIGITIASVVGLLVIFSAIIYFFIRTLQAHHDRSERESPFSGSSRQPDSLSSIENAVKYNPVYESHRAGCEKYEGPYPQHPFYSSASGDVIGGLSREEIRQMYESSELSREEIQERMRVLELYANDPEFAAFVREQQVEEV

SEQ ID NO: 31536 - protein, 799 aa, Homo sapiens
MPRAPAPLYACLLGLCALLPRLAGLNICTSGSATSCEECLLIHPKCAWCSKEDFGSPRSITSRCDLRANLVKNGCGGEIESPASSFHVLRSLPLSSKGSGSAGWDVIQMTPQEIAVNLRPGDKTTFQLQVRQVEDYPVDLYYLMDLSLSMKDDLDNIRSLGTKLAEEMRKLTSNFRLGFGSFVDKDISPFSYTAPRYQTNPCIGYKLFPNCVPSFGFRHLLPLTDRVDSFNEEVRKQRVSRNRDAPEGGFDAVLQAAVCKEKIGWRKDALHLLVFTTDDVPHIALDGKLGGLVQPHDGQCHLNEANEYTASNQMDYPSLALLGEKLAENNINLIFAVTKNHYMLYKNFTALIPGTTVEILDGDSKNIIQLIINAYNSIRSKVELSVWDQPEDLNLFFTATCQDGVSYPGQRKCEGLKIGDTASFEVSLEARSCPSRHTEHVFALRPVGFRDSLEVGVTYNCTCGCSVGLEPNSARCNGSGTYVCGLCECSPGYLGTRCECQDGENQSVYQNLCREAEGKPLCSGRGDCSCNQCSCFESEFGKIYGPFCECDNFSCARNKGVLCSGHGECHCGECKCHAGYIGDNCNCSTDISTCRGRDGQICSERGHCLCGQCQCTEPGAFGEMCEKCPTCPDACSTKRDCVECLLLHSGKPDNQTCHSLCRDEVITWVDTIVKDDQEAVLCFYKTAKDCVMMFTYVELPSGKSNLTVLREPECGNTPNAMTILLAVVGSILLVGLALLAIWKLLVTIHDRREFAKFQSERSRARYEMASNPLYRKPISTHTVDFTFNKFNKSYNGTVD

SEQ ID NO: 31537 - protein, 456 aa, Homo sapiens
MTTTFLQTSSSTFGGGSTRGGSLLAGGGGFGGGSLSGGGGSRSISASSARFVSSGSGGGYGGGMRVCGFGGGAGSVFGGGFGGGVGGGFGGGFGGGDGGLLSGNEKITMQNLNDRLASYLDKVRALEEANADLEVKIHDWYQKQTPTSPECDYSQYFKTIEELRDKIMATTIDNSRVILEIDNARLAADDFRLKYENELALRQGVEADINGLRRVLDELTLARTDLEMQIEGLNEELAYLKKNHEEEMKEFSSQLAGQVNVEMDAAPGVDLTRVLAEMREQYEAMAEKNRRDVEAWFFSKTEELNKEVASNTEMIQTSKTEITDLRRTMQELEIELQSQLSMKAGLENSLAETECRYATQLQQIQGLIGGLEAQLSELRCEMEAQNQEYKMLLDIKTRLEQEIATYRSLLEGQDAKMAGIAIREASSGGGGSSSNFHINVEESVDGQVVSSHKREI

SEQ ID NO: 31538 - protein, 251 aa, Homo sapiens
MTGTRSRPQPAQNATTANTSRPLKSSGTRYENELALRQGVEADINGLRRVLDELTLARTDLEMQIEGLNEELAYLKKNHEEEMKEFSSQLAGQVNVEMDAAPGVDLTRVLAEMREQYEAMAEKNRRDVEAWFFSKTEELNKEVASNTEMIQTSKTEITDLRRTMQELEIELQSQLSMKAGLENSLAETECRYATQLQQIQGLIGGLEAQLSELRCEMEAQNQEYKMLLDIKTRLEQEIATYRSLLEGQDAK

SEQ ID NO: 31539 - protein, 347 aa, Homo sapiens
MSLLCRNKGCGQHFDPNTNLPDSCCHHPGVPIFHDALKGWSCCRKRTVDFSEFLNIKGCTMGPHCAEKLPEAPQPEGPATSSSLQEQKPLNVIPKSAETLRRERPKSELPLKLLPLNISQALEMALEQKELDQEPGAGLDSLIRTGSSCQNPGCDAVYQGPESDATPCTYHPGAPRFHEGMKSWSCCGIQTLDFGAFLAQPGCRVGRHDWGKQLPASCRHDWHQTDSLVVVTVYGQIPLPAFNWVKASQTELHVHIVFDGNRVFQAQMKLWGVINVEQSSVFLMPSRVEISLVKADPGSWAQLEHPDALAKKARAGVVLEMDEEESDDSDDDLSWTEEEEEEEAMGE

SEQ ID NO: 31540 - protein, 329 aa, Homo sapiens
MSTDSCCHHPGVPIFHDALKGWSCCRKRTVDFSEFLNIKGCTMGPHCAEKLPEAPQPEGPATSSSLQEQKPLNVIPKSAETLRRERPKSELPLKLLPLNISQALEMALEQKELDQEPGAGLDSLIRTGSSCQNPGCDAVYQGPESDATPCTYHPGAPRFHEGMKSWSCCGIQTLDFGAFLAQPGCRVGRHDWGKQLPASCRHDWHQTDSLVVVTVYGQIPLPAFNWVKASQTELHVHIVFDGNRVFQAQMKLWGVINVEQSSVFLMPSRVEISLVKADPGSWAQLEHPDALAKKARAGVVLEMDEEESDDSDDDLSWTEEEEEEEAMGE

SEQ ID NO: 31541 - protein, 5005 aa, Homo sapiens
MDQRKNESIVPSITQLEDFLTEHNSNVVWLLVATILSCGWIIYLTYYNSRNVGLILTLVLNRLYKHGYIHIGSFSFSVLSGKVMVREIYYITEDMSIRIQDGFIIFRWWKMYNPKQKQHDPKAETRLYITVNDFEFHVYNRSDLYGRLQELFGLEPTIIPPKKDDDKTREIGRTRTQSKIERVKVKTESQDPTSSWRSLIPVIKVNVSTGRLAFGNHYQPQTLCINFDDAFLTYTTKPPSSHLDQFMHIVKGKLENVRVMLVPSPRYVGLQNDEPPRLMGEGFVVMQSNDVDIYYYMDEPGLVPEETEENIEGEMSSEDCKLQDLPPCWGLDIVCGKGTDFNYGPWADRQRDCLWKFFFPPDYQVLKVSEIAQPGRPRQILAFELRMNIIADATIDLLFTKNRETNAVHVNVGAGSYLEINIPMTVEENGYTPAIKGQLLHVDATTSMQYRTLLEAEMLAFHINASYPRIWNMPQTWQCELEVYKATYHFIFAQKNFFTDLIQDWSSDSPPDIFSFVPYTWNFKIMFHQFEMIWAANQHNWIDCSTKQQENVYLAACGETLNIDFSLPFTDFVPATCNTKFSLRGEDVDLHLFLPDCHPSKYSLFMLVKNCHPNKMIHDTGIPAECQSGQKTVKPKWRNVTQEKSGWVECWTVPSVMLTIDYTWHPIYPQKADEQLKQSLSEMEETMLSVLRPSQKTSDRVVSSPSTSSRPPIDPSELPPDKLHVEMELSPDSQITLYGPLLNAFLCIKENYFGEDDMYMDFEEVISSPVLSLSTSSSSGWTAVGMENDKKENEGSAKSIHPLALRPWDITVLVNLYKVHGRLPVHGTTDGPECPTAFLERLCFEMKKGFRETMLQLILSPLNVFVSDNYQQRPPVDEVLREGHINLSGLQLRAHAMFSAEGLPLGSDSLEYAWLIDVQAGSLTAKVTAPQLACLLEWGQTFVFHVVCREYELERPKSVIICQHGIDRRFCESKLSCIPGPCPTSDDLKYTMIRLAVDGADIYIVEHGCATNIKMGAIRVANCNLHNQSVGEGISAAIQDFQVRQYIEQLNNCRIGLQPAVLRRAYWLEAGSANLGLITVDIALAADHHSKHEAQRHFLETHDARTKRLWFLWPDDILKNKRCRNKCGCLGGCRFFGGTVTGLDFFKLEELTPSSSSAFSSTSAESDMYYGQSLLQPGEWIITKEIPKIIDGNVNGMKRKEWENKSVGIEVERKTQHLSLQVPLRSHSSSSSSEENSSSSAAQPLLAGEKESPSSVADDHLVQKEFLHGTKRDDGQASIPTEISGNSPVSPNTQDKSVGQSPLRSPLKRQASVCSTRLGSTKSLTAAFYGDKQPVTVGVQFSSDVSRSDENVLDSPKQRRSFGSFPYTPSADSNSFHQYRSMDSSMSMADSEAYFSAAEEFEPISSDEGPGTYPGRKKKKKQTQQIDYSRGSIYHSVEGPLTGHGESIQDSRTLPFKTHPSQASFVSALGGEDDVIEHLYIVEGEKTVESEQITPQQPVMNCYQTYLTQFQVINWSVKHPTNKRTSKSSLHRPLDLDTPTSEESSSSFEQLSVPTFKVIKQGLTANSLLDRGMQLSGSTSNTPYTPLEKKLADNTDDETLTEEWTLDQPVSQTRTTAIVEVKGTVDIVLTPLVAEALDRYIEAMVHCASTRHPAAIVDDLHAKVLREAVQNSKTTFSENLSSKQDIRGTKTEQSTIGTTNQGQAQTNLTMKQDNVTIKGLQTNVSIPKVNLCLLQASVEESPTTAPSRSVTHVSLVALCFDRIATQVRMNRGVVEETSNNAEPGRTSNFDRYVHATKMQPQSSGSLRSNAGAEKGKEIAAKLNIHRVHGQLRGLDTTDIGTCAITAIPFEKSKVLFTLEELDEFTFVDETDQQAVPDVTRIGPSQEKWGWIMFECGLENLTIKGGRQSGAVLYNSFGIMGKASDTERGGVLTSNNSSDSPTGSGYNTDVSDDNLPCDRTSPSSDLNGNSVSDEQDEGVESDDLKKDLPLMPPPPDSCSMKLTIKEIWFSFAAPTNVRSHTHAFSRQLNLLSTATPAVGAWLVPIDQLKSSLNKLETEGTLRICAVMGCIMTEALENKSVHFPLRSKYNRLTKVARFLQENPSCLLCNILHHYLHQANYSIIDDATMSDGLPALVTLKKGLVALARQWMKFIVVTPAFKGVSLHRPAQPLKPQIAMDHEHEDGLGLDNGGGLQSDTSADGAEFEFDAATVSEHTMLLEGTANRPPPGSSGPVTGAEIMRKLSKTHTHSDSALKIKGIHPYHSLSYTSGDTATDSPVHVGRAGMPVKDSPRKESLLSYLTGSFPSLHNLLEGTPQRSSAAVKSSSLTRTGNTVATDMLSEHPLLSEPSSVSFYNWMSNAVGNRGSVLQESPVTKSGHNSLPTGVAPNLPTIPSASDFNTVLSSDQNTLDGTHSQHSTSQDDVAGVEEANQGFPAVQLADAQVVFKPLLSHTGIQSQDTMPFCYRMYFGEHLSFSGTLDCLRADIVDSDTAKERKGKRARRQGHVNLPPLEFKPALMLGTFSISAVVMEKSVCTPQNSTSALSFHDLSKRYYNTFHCNFTISCQSISQHVDMALVRLIHQFSTMIDDIKATQTDIKLSRYTAGSASPTPTFKTRKHRDFRSSDFSRSSRGSLNGGNRVNNAKNKRTNNENNKKESRNKNSLGRSERRTSKVSRKGSKDVVDHMTIHMDDSDSITVSEQSEPSAECWQNMYKLLNFYSLISDPTGILEKSSETFGPAGVRSPTEPTCKVVFENEQDNSSLTKTQRKRSLVTSEPQHVTLIVFGIGMVNRTHLEADIGGLTMESELKRIHGSFTLKEKMKDVLHQKMTETCATAHIGGVNIVLLEGITPNIQLEDFPTSPTSTAKQEFLTVVKCSIAKSQALYSAQRGLKTNNAAVFKVGAISINIPQHPATLHSMMVRSSHQLSKQISDLIRQPSTAPQPVKEDIATPLPSEKTPTSVNQTPVETNEFPQLPEGLEKKPIVLKFSAMLDGIAIGAALLPSLKAEYKMGRMRSHGMTGAQTRFTFELPNHRLRFTSKVSATDMSTIPPSASLNLPPVTMSGKYIMEEHDSYSDQVWSIDELPSKQGYYLQGNYLRCVAEVGSFEHNLTTDLLNHLVFVQKVFMKEVNEVIQKVSGGEQPIPLWNEHDGTADGDKPKILLYSLNLQFKGIQVTATTPSMRAVRFETGLIELELSNRLQTKASPGSSSYLKLFGKCQVDLNLALGQIVKHQVYEEAGSDFHQVAYFKTRIGLRNALREEISGSSDREAVLITLNRPIVYAQPVAFDRAVLFWLNYKAAYDNWNEQRMALHKDIHMATKEVVDMLPGIQQTSAQAFGTLFLQLTVNDLGICLPITNTAQSNHTGDLDTGSALVLTIESTLITACSSESLVSKGHFKNFCIRFADGFETSWDDWKPEIHGDLVMNACVVPDGTYEVCSRTTGQAAAESSSAGTWTLNVLWKMCGIDVHMDPNIGKRLNALGNTLTTLTGEEDIDDIADLNSVNIADLSDEDEVDTMSPTIHTEATDYRRQAASASQPGELRGRKIMKRIVDIRELNEQAKVIDDLKKLGASEGTINQEIQRYQQLESVAVNDIRRDVRKKLRRSSMRAASLKDKWGLSYKPSYSRSKSISASGRPPLKRMERASSRVGETEELPEIRVDAASPGPRVTFNIQDTFPEETELDLLSVTIEGPSHYSSNSEGSCSVFSSPKTPGGFSPGIPFQTEEGRRDDSLSSTSEDSEKDEKDEDHERERFYIYRKPSHTSRKKATGFAAVHQLFTERWPTTPVNRSLSGTATERNIDFELDIRVEIDSGKCVLHPTTLLQEHDDISLRRSYDRSSRSLDQDSPSKKKKFQTNYASTTHLMTGKKVPSSLQTKPSDLETTVFYIPGVDVKLHYNSKTLKTESPNASRGSSLPRTLSKESKLYGMKDSATSPPSPPLPSTVQSKTNTLLPPQPPPIPAAKGKGSGGVKTAKLYAWVALQSLPEEMVISPCLLDFLEKALETIPITPVERNYTAVSSQDEDMGHFEIPDPMEESTTSLVSSSTSAYSSFPVDVVVYVRVQPSQIKFSCLPVSRVECMLKLPSLDLVFSSNRGELETLGTTYPAETLSPGGNATQSGTKTSASKTGIPGSSGLGSPLGRSRHSSSQSDLTSSSSSSSGLSFTACMSDFSLYVFHPYGAGKQKTAVSGLTPGSGGLGNVDEEPTSVTGRKDSLSINLEFVKVSLSRIRRSGGASFFESQSVSKSASKMDTTLINISAVCDIGSASFKYDMRRLSEILAFPRAWYRRSIARRLFLGDQTINLPTSGPGTPDSIEGVSQHLSPESSRKAYCKTWEQPSQSASFTHMPQSPNVFNEHMTNSTMSPGTVGQSLKSPASIRSRSVSDSSVPRRDSLSKTSTPFNKSNKAASQQGTPWETLVVFAINLKQLNVQMNMSNVMGNTTWTTSGLKSQGRLSVGSNRDREISMSVGLGRSQLDSKGGVVGGTIDVNALEMVAHISEHPNQQPSHKIQITMGSTEARVDYMGSSILMGIFSNADLKLQDEWKVNLYNTLDSSITDKSEIFVHGDLKWDIFQVMISRSTTPDLIKIGMKLQEFFTQQFDTSKRALSTWGPVPYLPPKTMTSNLEKSSQEQLLDAAHHRHWPGVLKVVSGCHISLFQIPLPEDGMQFGGSMSLHGNHMTLACFHGPNFRSKSWALFHLEEPNIAFWTEAQKIWEDGSSDHSTYIVQTLDFHLGHNTMVTKPCGALESPMATITKITRRRHENPPHGVASVKEWFNYVTATRNEELNLLRNVDANNTENSTTVKNSSLLSGFRGGSSYNHETETIFALPRMQLDFKSIHVQEPQEPSLQDASLKPKVECSVVTEFTDHICVTMDAELIMFLHDLVSAYLKEKEKAIFPPRILSTRPGQKSPIIIHDDNSSDKDREDSITYTTVDWRDFMCNTWHLEPTLRLISWTGRKIDPVGVDYILQKLGFHHARTTIPKWLQRGVMDPLDKVLSVLIKKLGTALQDEKEKKGKDKEEH

SEQ ID NO: 31542 - protein, 2873 aa, Homo sapiens
MDQRKNESIVPSITQLEDFLTEHNSNVVWLLVATILSCGWIIYLTYYNSRNVGLILTLVLNRLYKHGYIHIGSFSFSVLSGKVMVREIYYITEDMSIRIQDGFIIFRWWKMYNPKQKQHDPKAETRLYITVNDFEFHVYNRSDLYGRLQELFGLEPTIIPPKKDDDKTREIGRTRTQSKIERVKVKTESQDPTSSWRSLIPVIKVNVSTGRLAFGNHYQPQTLCINFDDAFLTYTTKPPSSHLDQFMHIVKGKLENVRVMLVPSPRYVGLQNDEPPRLMGEGFVVMQSNDVDIYYYMDEPGLVPEETEENIEGEMSSEDCKLQDLPPCWGLDIVCGKGTDFNYGPWADRQRDCLWKFFFPPDYQVLKVSEIAQPGRPRQILAFELRMNIIADATIDLLFTKNRETNAVHVNVGAGSYLEINIPMTVEENGYTPAIKGQLLHVDATTSMQYRTLLEAEMLAFHINASYPRIWNMPQTWQCELEVYKATYHFIFAQKNFFTDLIQDWSSDSPPDIFSFVPYTWNFKIMFHQFEMIWAANQHNWIDCSTKQQENVYLAACGETLNIDFSLPFTDFVPATCNTKFSLRGEDVDLHLFLPDCHPSKYSLFMLVKNCHPNKMIHDTGIPAECQSGQKTVKPKWRNVTQEKSGWVECWTVPSVMLTIDYTWHPIYPQKADEQLKQSLSEMEETMLSVLRPSQKTSDRVVSSPSTSSRPPIDPSELPPDKLHVEMELSPDSQITLYGPLLNAFLCIKENYFGEDDMYMDFEEVISSPVLSLSTSSSSGWTAVGMENDKKENEGSAKSIHPLALRPWDITVLVNLYKVHGRLPVHGTTDGPECPTAFLERLCFEMKKGFRETMLQLILSPLNVFVSDNYQRPPVDEVLREGHINLSGLQLRAHAMFSAEGLPLGSDSLEYAWLIDVQAGSLTAKVTAPQLACLLEWGQTFVFHVVCREYELERPKSVIICQHGIDRRFCESKLSCIPGPCPTSDDLKYTMIRLAVDGADIYIVEHGCATNIKMGAIRVANCNLHNQSVGEGISAAIQDFQVRQYIEQLNNCRIGLQPAVLRRAYWLEAGSANLGLITVDIALAADHHSKHEAQRHFLETHDARTKRLWFLWPDDILKNKRCRNKCGCLGGCRFFGGTVTGLDFFKLEELTPSSSSAFSSTSAESDMYYGQSLLQPGEWIITKEIPKIIDGNVNGMKRKEWENKSVGIEVERKTQHLSLQVPLRSHSSSSSSEENSSSSAAQPLLAGEKESPSSVADDHLVQKEFLHGTKRDDGQASIPTEISGNSPVSPNTQDKSVGQSPLRSPLKRQASVCSTRLGSTKSLTAAFYGDKQPVTVGVQFSSDVSRSDENVLDSPKQRRSFGSFPYTPSADSNSFHQYRSMDSSMSMADSEAYFSAAEEFEPISSDEGPGTYPGRKKKKKQTQQIDYSRGSIYHSVEGPLTGHGESIQDSRTLPFKTHPSQASFVSALGGEDDVIEHLYIVEGEKTVESEQITPQQPVMNCYQTYLTQFQVINWSVKHPTNKRTSKSSLHRPLDLDTPTSEESSSSFEQLSVPTFKVIKQGLTANSLLDRGMQLSGSTSNTPYTPLEKKLADNTDDETLTEEWTLDQPVSQTRTTAIVEVKGTVDIVLTPLVAEALDRYIEAMVHCASTRHPAAIVDDLHAKVLREAVQNSKTTFSENLSSKQDIRGTKTEQSTIGTTNQGQAQTNLTMKQDNVTIKGLQTNVSIPKVNLCLLQASVEESPTTAPSRSVTHVSLVALCFDRIATQVRMNRGVVEETSNNAEPGRTSNFDRYVHATKMQPQSSGSLRSNAGAEKGKEIAAKLNIHRVHGQLRGLDTTDIGTCAITAIPFEKSKVLFTLEELDEFTFVDETDQQAVPDVTRIGPSQEKWGWIMFECGLENLTIKGGRQSGAVLYNSFGIMGKASDTERGGVLTSNNSSDSPTGSGYNTDVSDDNLPCDRTSPSSDLNGNSVSDEQDEGVESDDLKKDLPLMPPPPDSCSMKLTIKEIWFSFAAPTNVRSHTHAFSRQLNLLSTATPAVGAWLVPIDQLKSSLNKLETEGTLRICAVMGCIMTEALENKSVHFPLRSKYNRLTKVARFLQENPSCLLCNILHHYLHQANYSIIDDATMSDGLPALVTLKKGLVALARQWMKFIVVTPAFKGVSLHRPAQPLKPQIAMDHEHEDGLGLDNGGGLQSDTSADGAEFEFDAATVSEHTMLLEGTANRPPPGSSGPVTGAEIMRKLSKTHTHSDSALKIKGIHPYHSLSYTSGDTATDSPVHVGRAGMPVKDSPRKESLLSYLTGSFPSLHNLLEGTPQRSSAAVKSSSLTRTGNTVATDMLSEHPLLSEPSSVSFYNWMSNAVGNRGSVLQESPVTKSGHNSLPTGVAPNLPTIPSASDFNTVLSSDQNTLDGTHSQHSTSQDDVAGVEEANQGFPAVQLADAQVVFKPLLSHTGIQSQDTMPFCYRMYFGEHLSFSGTLDCLRADIVDSDTAKERKGKRARRQGHVNLPPLEFKPALMLGTFSISAVVMEKSVCTPQNSTSALSFHDLSKRYYNTFHCNFTISCQSISQHVDMALVRLIHQFSTMIDDIKATQTDIKLSRYTAGSASPTPTFKTRKHRDFRSSDFSRSSRGSLNGGNRVNNAKNKRTNNENNKKESRNKNSLGRSERRTSKVSRKGSKDVVDHMTIHMDDSDSITVSEQSEPSAECWQNMYKLLNFYSLISDPTGILEKSSETFGPAGVRSPTEPTCKVVFENEQDNSSLTKTQRKRSLVTSEPQHVTLIVFGIGMVNRTHLEADIGGLTMESELKRIHGSFTLKEKMKDVLHQKMTETCATAHIGGVNIVLLEGITPNIQLEDFPTSPTSTAKQEFLYVILFFFMAL

SEQ ID NO: 31543 - protein, 5004 aa, Homo sapiens
MDQRKNESIVPSITQLEDFLTEHNSNVVWLLVATILSCGWIIYLTYYNSRNVGLILTLVLNRLYKHGYIHIGSFSFSVLSGKVMVREIYYITEDMSIRIQDGFIIFRWWKMYNPKQKQHDPKAETRLYITVNDFEFHVYNRSDLYGRLQELFGLEPTIIPPKKDDDKTREIGRTRTQSKIERVKVKTESQDPTSSWRSLIPVIKVNVSTGRLAFGNHYQPQTLCINFDDAFLTYTTKPPSSHLDQFMHIVKGKLENVRVMLVPSPRYVGLQNDEPPRLMGEGFVVMQSNDVDIYYYMDEPGLVPEETEENIEGEMSSEDCKLQDLPPCWGLDIVCGKGTDFNYGPWADRQRDCLWKFFFPPDYQVLKVSEIAQPGRPRQILAFELRMNIIADATIDLLFTKNRETNAVHVNVGAGSYLEINIPMTVEENGYTPAIKGQLLHVDATTSMQYRTLLEAEMLAFHINASYPRIWNMPQTWQCELEVYKATYHFIFAQKNFFTDLIQDWSSDSPPDIFSFVPYTWNFKIMFHQFEMIWAANQHNWIDCSTKQQENVYLAACGETLNIDFSLPFTDFVPATCNTKFSLRGEDVDLHLFLPDCHPSKYSLFMLVKNCHPNKMIHDTGIPAECQSGQKTVKPKWRNVTQEKSGWVECWTVPSVMLTIDYTWHPIYPQKADEQLKQSLSEMEETMLSVLRPSQKTSDRVVSSPSTSSRPPIDPSELPPDKLHVEMELSPDSQITLYGPLLNAFLCIKENYFGEDDMYMDFEEVISSPVLSLSTSSSSGWTAVGMENDKKENEGSAKSIHPLALRPWDITVLVNLYKVHGRLPVHGTTDGPECPTAFLERLCFEMKKGFRETMLQLILSPLNVFVSDNYQRPPVDEVLREGHINLSGLQLRAHAMFSAEGLPLGSDSLEYAWLIDVQAGSLTAKVTAPQLACLLEWGQTFVFHVVCREYELERPKSVIICQHGIDRRFCESKLSCIPGPCPTSDDLKYTMIRLAVDGADIYIVEHGCATNIKMGAIRVANCNLHNQSVGEGISAAIQDFQVRQYIEQLNNCRIGLQPAVLRRAYWLEAGSANLGLITVDIALAADHHSKHEAQRHFLETHDARTKRLWFLWPDDILKNKRCRNKCGCLGGCRFFGGTVTGLDFFKLEELTPSSSSAFSSTSAESDMYYGQSLLQPGEWIITKEIPKIIDGNVNGMKRKEWENKSVGIEVERKTQHLSLQVPLRSHSSSSSSEENSSSSAAQPLLAGEKESPSSVADDHLVQKEFLHGTKRDDGQASIPTEISGNSPVSPNTQDKSVGQSPLRSPLKRQASVCSTRLGSTKSLTAAFYGDKQPVTVGVQFSSDVSRSDENVLDSPKQRRSFGSFPYTPSADSNSFHQYRSMDSSMSMADSEAYFSAAEEFEPISSDEGPGTYPGRKKKKKQTQQIDYSRGSIYHSVEGPLTGHGESIQDSRTLPFKTHPSQASFVSALGGEDDVIEHLYIVEGEKTVESEQITPQQPVMNCYQTYLTQFQVINWSVKHPTNKRTSKSSLHRPLDLDTPTSEESSSSFEQLSVPTFKVIKQGLTANSLLDRGMQLSGSTSNTPYTPLEKKLADNTDDETLTEEWTLDQPVSQTRTTAIVEVKGTVDIVLTPLVAEALDRYIEAMVHCASTRHPAAIVDDLHAKVLREAVQNSKTTFSENLSSKQDIRGTKTEQSTIGTTNQGQAQTNLTMKQDNVTIKGLQTNVSIPKVNLCLLQASVEESPTTAPSRSVTHVSLVALCFDRIATQVRMNRGVVEETSNNAEPGRTSNFDRYVHATKMQPQSSGSLRSNAGAEKGKEIAAKLNIHRVHGQLRGLDTTDIGTCAITAIPFEKSKVLFTLEELDEFTFVDETDQQAVPDVTRIGPSQEKWGWIMFECGLENLTIKGGRQSGAVLYNSFGIMGKASDTERGGVLTSNNSSDSPTGSGYNTDVSDDNLPCDRTSPSSDLNGNSVSDEQDEGVESDDLKKDLPLMPPPPDSCSMKLTIKEIWFSFAAPTNVRSHTHAFSRQLNLLSTATPAVGAWLVPIDQLKSSLNKLETEGTLRICAVMGCIMTEALENKSVHFPLRSKYNRLTKVARFLQENPSCLLCNILHHYLHQANYSIIDDATMSDGLPALVTLKKGLVALARQWMKFIVVTPAFKGVSLHRPAQPLKPQIAMDHEHEDGLGLDNGGGLQSDTSADGAEFEFDAATVSEHTMLLEGTANRPPPGSSGPVTGAEIMRKLSKTHTHSDSALKIKGIHPYHSLSYTSGDTATDSPVHVGRAGMPVKDSPRKESLLSYLTGSFPSLHNLLEGTPQRSSAAVKSSSLTRTGNTVATDMLSEHPLLSEPSSVSFYNWMSNAVGNRGSVLQESPVTKSGHNSLPTGVAPNLPTIPSASDFNTVLSSDQNTLDGTHSQHSTSQDDVAGVEEANQGFPAVQLADAQVVFKPLLSHTGIQSQDTMPFCYRMYFGEHLSFSGTLDCLRADIVDSDTAKERKGKRARRQGHVNLPPLEFKPALMLGTFSISAVVMEKSVCTPQNSTSALSFHDLSKRYYNTFHCNFTISCQSISQHVDMALVRLIHQFSTMIDDIKATQTDIKLSRYTAGSASPTPTFKTRKHRDFRSSDFSRSSRGSLNGGNRVNNAKNKRTNNENNKKESRNKNSLGRSERRTSKVSRKGSKDVVDHMTIHMDDSDSITVSEQSEPSAECWQNMYKLLNFYSLISDPTGILEKSSETFGPAGVRSPTEPTCKVVFENEQDNSSLTKTQRKRSLVTSEPQHVTLIVFGIGMVNRTHLEADIGGLTMESELKRIHGSFTLKEKMKDVLHQKMTETCATAHIGGVNIVLLEGITPNIQLEDFPTSPTSTAKQEFLTVVKCSIAKSQALYSAQRGLKTNNAAVFKVGAISINIPQHPATLHSMMVRSSHQLSKQISDLIRQPSTAPQPVKEDIATPLPSEKTPTSVNQTPVETNEFPQLPEGLEKKPIVLKFSAMLDGIAIGAALLPSLKAEYKMGRMRSHGMTGAQTRFTFELPNHRLRFTSKVSATDMSTIPPSASLNLPPVTMSGKYIMEEHDSYSDQVWSIDELPSKQGYYLQGNYLRCVAEVGSFEHNLTTDLLNHLVFVQKVFMKEVNEVIQKVSGGEQPIPLWNEHDGTADGDKPKILLYSLNLQFKGIQVTATTPSMRAVRFETGLIELELSNRLQTKASPGSSSYLKLFGKCQVDLNLALGQIVKHQVYEEAGSDFHQVAYFKTRIGLRNALREEISGSSDREAVLITLNRPIVYAQPVAFDRAVLFWLNYKAAYDNWNEQRMALHKDIHMATKEVVDMLPGIQQTSAQAFGTLFLQLTVNDLGICLPITNTAQSNHTGDLDTGSALVLTIESTLITACSSESLVSKGHFKNFCIRFADGFETSWDDWKPEIHGDLVMNACVVPDGTYEVCSRTTGQAAAESSSAGTWTLNVLWKMCGIDVHMDPNIGKRLNALGNTLTTLTGEEDIDDIADLNSVNIADLSDEDEVDTMSPTIHTEATDYRRQAASASQPGELRGRKIMKRIVDIRELNEQAKVIDDLKKLGASEGTINQEIQRYQQLESVAVNDIRRDVRKKLRRSSMRAASLKDKWGLSYKPSYSRSKSISASGRPPLKRMERASSRVGETEELPEIRVDAASPGPRVTFNIQDTFPEETELDLLSVTIEGPSHYSSNSEGSCSVFSSPKTPGGFSPGIPFQTEEGRRDDSLSSTSEDSEKDEKDEDHERERFYIYRKPSHTSRKKATGFAAVHQLFTERWPTTPVNRSLSGTATERNIDFELDIRVEIDSGKCVLHPTTLLQEHDDISLRRSYDRSSRSLDQDSPSKKKKFQTNYASTTHLMTGKKVPSSLQTKPSDLETTVFYIPGVDVKLHYNSKTLKTESPNASRGSSLPRTLSKESKLYGMKDSATSPPSPPLPSTVQSKTNTLLPPQPPPIPAAKGKGSGGVKTAKLYAWVALQSLPEEMVISPCLLDFLEKALETIPITPVERNYTAVSSQDEDMGHFEIPDPMEESTTSLVSSSTSAYSSFPVDVVVYVRVQPSQIKFSCLPVSRVECMLKLPSLDLVFSSNRGELETLGTTYPAETLSPGGNATQSGTKTSASKTGIPGSSGLGSPLGRSRHSSSQSDLTSSSSSSSGLSFTACMSDFSLYVFHPYGAGKQKTAVSGLTPGSGGLGNVDEEPTSVTGRKDSLSINLEFVKVSLSRIRRSGGASFFESQSVSKSASKMDTTLINISAVCDIGSASFKYDMRRLSEILAFPRAWYRRSIARRLFLGDQTINLPTSGPGTPDSIEGVSQHLSPESSRKAYCKTWEQPSQSASFTHMPQSPNVFNEHMTNSTMSPGTVGQSLKSPASIRSRSVSDSSVPRRDSLSKTSTPFNKSNKAASQQGTPWETLVVFAINLKQLNVQMNMSNVMGNTTWTTSGLKSQGRLSVGSNRDREISMSVGLGRSQLDSKGGVVGGTIDVNALEMVAHISEHPNQQPSHKIQITMGSTEARVDYMGSSILMGIFSNADLKLQDEWKVNLYNTLDSSITDKSEIFVHGDLKWDIFQVMISRSTTPDLIKIGMKLQEFFTQQFDTSKRALSTWGPVPYLPPKTMTSNLEKSSQEQLLDAAHHRHWPGVLKVVSGCHISLFQIPLPEDGMQFGGSMSLHGNHMTLACFHGPNFRSKSWALFHLEEPNIAFWTEAQKIWEDGSSDHSTYIVQTLDFHLGHNTMVTKPCGALESPMATITKITRRRHENPPHGVASVKEWFNYVTATRNEELNLLRNVDANNTENSTTVKNSSLLSGFRGGSSYNHETETIFALPRMQLDFKSIHVQEPQEPSLQDASLKPKVECSVVTEFTDHICVTMDAELIMFLHDLVSAYLKEKEKAIFPPRILSTRPGQKSPIIIHDDNSSDKDREDSITYTTVDWRDFMCNTWHLEPTLRLISWTGRKIDPVGVDYILQKLGFHHARTTIPKWLQRGVMDPLDKVLSVLIKKLGTALQDEKEKKGKDKEEH

SEQ ID NO: 31544 - protein, 984 aa, Homo sapiens
MDQRKNESIVPSITQLEDFLTEHNSNVVWLLVATILSCGWIIYLTYYNSRNVGLILTLVLNRLYKHGYIHIGSFSFSVLSGKVMVREIYYITEDMSIRIQDGFIIFRWWKMYNPKQKQHDPKAETRLYITVNDFEFHVYNRSDLYGRLQELFGLEPTIIPPKKDDDKTREIGRTRTQSKIERVKVKTESQDPTSSWRSLIPVIKVNVSTGRLAFGNHYQPQTLCINFDDAFLTYTTKPPSSHLDQFMHIVKGKLENVRVMLVPSPRYVGLQNDEPPRLMGEGFVVMQSNDVDIYYYMDEPGLVPEETEENIEGEMSSEDCKLQDLPPCWGLDIVCGKGTDFNYGPWADRQRDCLWKFFFPPDYQVLKVSEIAQPGRPRQILAFELRMNIIADATIDLLFTKNRETNAVHVNVGAGSYLEINIPMTVEENGYTPAIKGQLLHVDATTSMQYRTLLEAEMLAFHINASYPRIWNMPQTWQCELEVYKATYHFIFAQKNFFTDLIQDWSSDSPPDIFSFVPYTWNFKIMFHQFEMIWAANQHNWIDCSTKQQENVYLAACGETLNIDFSLPFTDFVPATCNTKFSLRGEDVDLHLFLPDCHPSKYSLFMLVKNCHPNKMIHDTGIPAECQSGQKTVKPKWRNVTQEKSGWVECWTVPSVMLTIDYTWHPIYPQKADEQLKQSLSEMEETMLSVLRPSQKTSDRVVSSPSTSSRPPIDPSELPPDKLHVEMELSPDSQITLYGPLLNAFLCIKENYFGEDDMYMDFEEVISSPVLSLSTSSSSGWTAVGMENDKKENEGSAKSIHPLALRPWDITVLVNLYKVHGRLPVHGTTDGPECPTAFLERLCFEMKKGFRETMLQLILSPLNVFVSDNYQQRPPVDEVLREGHINLSGLQLRAHAMFSAEGLPLGSDSLEYAWLIDVQAGSLTAKVTAPQVWFSEYYLLTYFLFPFSTHLLKNNLYACLNVHCISTDGILMGVILAIQNFSYR

SEQ ID NO: 31545 - protein, 3680 aa, Homo sapiens
MDQRKNESIVPSITQLEDFLTEHNSNVVWLLVATILSCGWIIYLTYYNSRNVGLILTLVLNRLYKHGYIHIGSFSFSVLSGKVMVREIYYITEDMSIRIQDGFIIFRWWKMYNPKQKQHDPKAETRLYITVNDFEFHVYNRSDLYGRLQELFGLEPTIIPPKKDDDKTREIGRTRTQSKIERVKVKTESQDPTSSWRSLIPVIKVNVSTGRLAFGNHYQPQTLCINFDDAFLTYTTKPPSSHLDQFMHIVKGKLENVRVMLVPSPRYVGLQNDEPPRLMGEGFVVMQSNDVDIYYYMDEPGLVPEETEENIEGEMSSEDCKLQDLPPCWGLDIVCGKGTDFNYGPWADRQRDCLWKFFFPPDYQVLKVSEIAQPGRPRQILAFELRMNIIADATIDLLFTKNRETNAVHVNVGAGSYLEINIPMTVEENGYTPAIKGQLLHVDATTSMQYRTLLEAEMLAFHINASYPRIWNMPQTWQCELEVYKATYHFIFAQKNFFTDLIQDWSSDSPPDIFSFVPYTWNFKIMFHQFEMIWAANQHNWIDCSTKQQENVYLAACGETLNIDFSLPFTDFVPATCNTKFSLRGEDVDLHLFLPDCHPSKYSLFMLVKNCHPNKMIHDTGIPAECQSGQKTVKPKWRNVTQEKSGWVECWTVPSVMLTIDYTWHPIYPQKADEQLKQSLSEMEETMLSVLRPSQKTSDRVVSSPSTSSRPPIDPSELPPDKLHVEMELSPDSQITLYGPLLNAFLCIKENYFGEDDMYMDFEEVISSPVLSLSTSSSSGWTAVGMENDKKENEGSAKSIHPLALRPWDITVLVNLYKVHGRLPVHGTTDGPECPTAFLERLCFEMKKGFRETMLQLILSPLNVFVSDNYQQRPPVDEVLREGHINLSGLQLRAHAMFSAEGLPLGSDSLEYAWLIDVQAGSLTAKVTAPQLACLLEWGQTFVFHVVCREYELERPKSVIICQHGIDRRFCESKLSCIPGPCPTSDDLKYTMIRLAVDGADIYIVEHGCATNIKMGAIRVANCNLHNQSVGEGISAAIQDFQVRQYIEQLNNCRIGLQPAVLRRAYWLEAGSANLGLITVDIALAADHHSKHEAQRHFLETHDARTKRLWFLWPDDILKNKRCRNKCGCLGGCRFFGGTVTGLDFFKLEELTPSSSSAFSSTSAESDMYYGQSLLQPGEWIITKEIPKIIDGNVNGMKRKEWENKSVGIEVERKTQHLSLQVPLRSHSSSSSSEENSSSSAAQPLLAGEKESPSSVADDHLVQKEFLHGTKRDDGQASIPTEISGNSPVSPNTQDKSVGQSPLRSPLKRQASVCSTRLGSTKSLTAAFYGDKQPVTVGVQFSSDVSRSDENVLDSPKQRRSFGSFPYTPSADSNSFHQYRSMDSSMSMADSEAYFSAAEEFEPISSDEGPGTYPGRKKKKKQTQQIDYSRGSIYHSVEGPLTGHGESIQDSRTLPFKTHPSQASFVSALGGEDDVIEHLYIVEGEKTVESEQITPQQPVMNCYQTYLTQFQVINWSVKHPTNKRTSKSSLHRPLDLDTPTSEESSSSFEQLSVPTFKVIKQGLTANSLLDRGMQLSGSTSNTPYTPLEKKLADNTDDETLTEEWTLDQPVSQTRTTAIVEVKGTVDIVLTPLVAEALDRYIEAMVHCASTRHPAAIVDDLHAKVLREAVQNSKTTFSENLSSKQDIRGTKTEQSTIGTTNQGQAQTNLTMKQDNVTIKGLQTNVSIPKVNLCLLQASVEESPTTAPSRSVTHVSLVALCFDRIATQVRMNRGVVEETSNNAEPGRTSNFDRYVHATKMQPQSSGSLRSNAGAEKGKEIAAKLNIHRVHGQLRGLDTTDIGTCAITAIPFEKSKVLFTLEELDEFTFVDETDQQAVPDVTRIGPSQEKWGWIMFECGLENLTIKGGRQSGAVLYNSFGIMGKASDTERGGVLTSNNSSDSPTGSGYNTDVSDDNLPCDRTSPSSDLNGNSVSDEQDEGVESDDLKKDLPLMPPPPDSCSMKLTIKEIWFSFAAPTNVRSHTHAFSRQLNLLSTATPAVGAWLVPIDQLKSSLNKLETEGTLRICAVMGCIMTEALENKSVHFPLRSKYNRLTKVARFLQENPSCLLCNILHHYLHQANYSIIDDATMSDGLPALVTLKKGLVALARQWMKFIVVTPAFKGVSLHRPAQPLKPQIAMDHEHEDGLGLDNGGGLQSDTSADGAEFEFDAATVSEHTMLLEGTANRPPPGSSGPVTGAEIMRKLSKTHTHSDSALKIKGIHPYHSLSYTSGDTATDSPVHVGRAGMPVKDSPRKESLLSYLTGSFPSLHNLLEGTPQRSSAAVKSSSLTRTGNTVATDMLSEHPLLSEPSSVSFYNWMSNAVGNRGSVLQESPVTKSGHNSLPTGVAPNLPTIPSASDFNTVLSSDQNTLDGTHSQHSTSQDDVAGVEEANQGFPAVQLADAQVVFKPLLSHTGIQSQDTMPFCYRMYFGEHLSFSGTLDCLRADIVDSDTAKERKGKRARRQGHVNLPPLEFKPALMLGTFSISAVVMEKSVCTPQNSTSALSFHDLSKRYYNTFHCNFTISCQSISQHVDMALVRLIHQFSTMIDDIKATQTDIKLSRYTAGSASPTPTFKTRKHRDFRSSDFSRSSRGSLNGGNRVNNAKNKRTNNENNKKESRNKNSLGRSERRTSKVSRKGSKDVVDHMTIHMDDSDSITVSEQSEPSAECWQNMYKLLNFYSLISDPTGILEKSSETFGPAGVRSPTEPTCKVVFENEQDNSSLTKTQRKRSLVTSEPQHVTLIVFGIGMVNRTHLEADIGGLTMESELKRIHGSFTLKEKMKDVLHQKMTETCATAHIGGVNIVLLEGITPNIQLEDFPTSPTSTAKQEFLTVVKCSIAKSQALYSAQRGLKTNNAAVFKVGAISINIPQHPATLHSMMVRSSHQLSKQISDLIRQPSTAPQPVKEDIATPLPSEKTPTSVNQTPVETNEFPQLPEGLEKKPIVLKFSAMLDGIAIGAALLPSLKAEYKMGRMRSHGMTGAQTRFTFELPNHRLRFTSKVSATDMSTIPPSASLNLPPVTMSGKYIMEEHDSYSDQVWSIDELPSKQGYYLQGNYLRCVAEVGSFEHNLTTDLLNHLVFVQKVFMKEVNEVIQKVSGGEQPIPLWNEHDGTADGDKPKILLYSLNLQFKGIQVTATTPSMRAVRFETGLIELELSNRLQTKASPGSSSYLKLFGKCQVDLNLALGQIVKHQVYEEAGSDFHQVAYFKTRIGLRNALREEISGSSDREAVLITLNRPIVYAQPVAFDRAVLFWLNYKAAYDNWNEQRMALHKDIHMATKEVVDMLPGIQQTSAQAFGTLFLQLTVNDLGICLPITNTAQSNHTGDLDTGSALVLTIESTLITACSSESLVSKGHFKNFCIRFADGFETSWDDWKPEIHGDLVMNACVVPDGTYEVCSRTTGQAAAESSSAGTWTLNVLWKMCGIDVHMDPNIGKRLNALGNTLTTLTGEEDIDDIADLNSVNIADLSDEDEVDTMSPTIHTEATDYRRQAASASQPGELRGRKIMKRIVDIRELNEQAKVIDDLKKLGASEGTINQEIQRYQQLESVAVNDIRRDVRKKLRRSSMRAASLKDKWGLSYKPSYSRSKSISASGRPPLKRMERASSRVGETEELPEIRVDAASPGPRVTFNIQDTIAEIRRKKISFKVVF

SEQ ID NO: 31546 - protein, 4251 aa, Homo sapiens
MDQRKNESIVPSITQLEDFLTEHNSNVVWLLVATILSCGWIIYLTYYNSRNVGLILTLVLNRLYKHGYIHIGSFSFSVLSGKVMVREIYYITEDMSIRIQDGFIIFRWWKMYNPKQKQHDPKAETRLYITVNDFEFHVYNRSDLYGRLQELFGLEPTIIPPKKDDDKTREIGRTRTQSKIERVKVKTESQDPTSSWRSLIPVIKVNVSTGRLAFGNHYQPQTLCINFDDAFLTYTTKPPSSHLDQFMHIVKGKLENVRVMLVPSPRYVGLQNDEPPRLMGEGFVVMQSNDVDIYYYMDEPGLVPEETEENIEGEMSSEDCKLQDLPPCWGLDIVCGKGTDFNYGPWADRQRDCLWKFFFPPDYQVLKVSEIAQPGRPRQILAFELRMNIIADATIDLLFTKNRETNAVHVNVGAGSYLEINIPMTVEENGYTPAIKGQLLHVDATTSMQYRTLLEAEMLAFHINASYPRIWNMPQTWQCELEVYKATYHFIFAQKNFFTDLIQDWSSDSPPDIFSFVPYTWNFKIMFHQFEMIWAANQHNWIDCSTKQQENVYLAACGETLNIDFSLPFTDFVPATCNTKFSLRGEDVDLHLFLPDCHPSKYSLFMLVKNCHPNKMIHDTGIPAECQSGQKTVKPKWRNVTQEKSGWVECWTVPSVMLTIDYTWHPIYPQKADEQLKQSLSEMEETMLSVLRPSQKTSDRVVSSPSTSSRPPIDPSELPPDKLHVEMELSPDSQITLYGPLLNAFLCIKENYFGEDDMYMDFEEVISSPVLSLSTSSSSGWTAVGMENDKKENEGSAKSIHPLALRPWDITVLVNLYKVHGRLPVHGTTDGPECPTAFLERLCFEMKKGFRETMLQLILSPLNVFVSDNYQQRPPVDEVLREGHINLSGLQLRAHAMFSAEGLPLGSDSLEYAWLIDVQAGSLTAKVTAPQLACLLEWGQTFVFHVVCREYELERPKSVIICQHGIDRRFCESKLSCIPGPCPTSDDLKYTMIRLAVDGADIYIVEHGCATNIKMGAIRVANCNLHNQSVGEGISAAIQDFQVRQYIEQLNNCRIGLQPAVLRRAYWLEAGSANLGLITVDIALAADHHSKHEAQRHFLETHDARTKRLWFLWPDDILKNKRCRNKCGCLGGCRFFGGTVTGLDFFKLEELTPSSSSAFSSTSAESDMYYGQSLLQPGEWIITKEIPKIIDGNVNGMKRKEWENKSVGIEVERKTQHLSLQVPLRSHSSSSSSEENSSSSAAQPLLAGEKESPSSVADDHLVQKEFLHGTKRDDGQASIPTEISGNSPVSPNTQDKSVGQSPLRSPLKRQASVCSTRLGSTKSLTAAFYGDKQPVTVGVQFSSDVSRSDENVLDSPKQRRSFGSFPYTPSADSNSFHQYRSMDSSMSMADSEAYFSAAEEFEPISSDEGPGTYPGRKKKKKQTQQIDYSRGSIYHSVEGPLTGHGESIQDSRTLPFKTHPSQASFVSALGGEDDVIEHLYIVEGEKTVESEQITPQQPVMNCYQTYLTQFQVINWSVKHPTNKRTSKSSLHRPLDLDTPTSEESSSSFEQLSVPTFKVIKQGLTANSLLDRGMQLSGSTSNTPYTPLEKKLADNTDDETLTEEWTLDQPVSQTRTTAIVEVKGTVDIVLTPLVAEALDRYIEAMVHCASTRHPAAIVDDLHAKVLREAVQNSKTTFSENLSSKQDIRGTKTEQSTIGTTNQGQAQTNLTMKQDNVTIKGLQTNVSIPKVNLCLLQASVEESPTTAPSRSVTHVSLVALCFDRIATQVRMNRGVVEETSNNAEPGRTSNFDRYVHATKMQPQSSGSLRSNAGAEKGKEIAAKLNIHRVHGQLRGLDTTDIGTCAITAIPFEKSKVLFTLEELDEFTFVDETDQQAVPDVTRIGPSQEKWGWIMFECGLENLTIKGGRQSGAVLYNSFGIMGKASDTERGGVLTSNNSSDSPTGSGYNTDVSDDNLPCDRTSPSSDLNGNSVSDEQDEGVESDDLKKDLPLMPPPPDSCSMKLTIKEIWFSFAAPTNVRSHTHAFSRQLNLLSTATPAVGAWLVPIDQLKSSLNKLETEGTLRICAVMGCIMTEALENKSVHFPLRSKYNRLTKVARFLQENPSCLLCNILHHYLHQANYSIIDDATMSDGLPALVTLKKGLVALARQWMKFIVVTPAFKGVSLHRPAQPLKPQIAMDHEHEDGLGLDNGGGLQSDTSADGAEFEFDAATVSEHTMLLEGTANRPPPGSSGPVTGAEIMRKLSKTHTHSDSALKIKGIHPYHSLSYTSGDTATDSPVHVGRAGMPVKDSPRKESLLSYLTGSFPSLHNLLEGTPQRSSAAVKSSSLTRTGNTVATDMLSEHPLLSEPSSVSFYNWMSNAVGNRGSVLQESPVTKSGHNSLPTGVAPNLPTIPSASDFNTVLSSDQNTLDGTHSQHSTSQDDVAGVEEANQGFPAVQLADAQVVFKPLLSHTGIQSQDTMPFCYRMYFGEHLSFSGTLDCLRADIVDSDTAKERKGKRARRQGHVNLPPLEFKPALMLGTFSISAVVMEKSVCTPQNSTSALSFHDLSKRYYNTFHCNFTISCQSISQHVDMALVRLIHQFSTMIDDIKATQTDIKLSRYTAGSASPTPTFKTRKHRDFRSSDFSRSSRGSLNGGNRVNNAKNKRTNNENNKKESRNKNSLGRSERRTSKVSRKGSKDVVDHMTIHMDDSDSITVSEQSEPSAECWQNMYKLLNFYSLISDPTGILEKSSETFGPAGVRSPTEPTCKVVFENEQDNSSLTKTQRKRSLVTSEPQHVTLIVFGIGMVNRTHLEADIGGLTMESELKRIHGSFTLKEKMKDVLHQKMTETCATAHIGGVNIVLLEGITPNIQLEDFPTSPTSTAKQEFLTVVKCSIAKSQALYSAQRGLKTNNAAVFKVGAISINIPQHPATLHSMMVRSSHQLSKQISDLIRQPSTAPQPVKEDIATPLPSEKTPTSVNQTPVETNEFPQLPEGLEKKPIVLKFSAMLDGIAIGAALLPSLKAEYKMGRMRSHGMTGAQTRFTFELPNHRLRFTSKVSATDMSTIPPSASLNLPPVTMSGKYIMEEHDSYSDQVWSIDELPSKQGYYLQGNYLRCVAEVGSFEHNLTTDLLNHLVFVQKVFMKEVNEVIQKVSGGEQPIPLWNEHDGTADGDKPKILLYSLNLQFKGIQVTATTPSMRAVRFETGLIELELSNRLQTKASPGSSSYLKLFGKCQVDLNLALGQIVKHQVYEEAGSDFHQVAYFKTRIGLRNALREEISGSSDREAVLITLNRPIVYAQPVAFDRAVLFWLNYKAAYDNWNEQRMALHKDIHMATKEVVDMLPGIQQTSAQAFGTLFLQLTVNDLGICLPITNTAQSNHTGDLDTGSALVLTIESTLITACSSESLVSKGHFKNFCIRFADGFETSWDDWKPEIHGDLVMNACVVPDGTYEVCSRTTGQAAAESSSAGTWTLNVLWKMCGIDVHMDPNIGKRLNALGNTLTTLTGEEDIDDIADLNSVNIADLSDEDEVDTMSPTIHTEATDYRRQAASASQPGELRGRKIMKRIVDIRELNEQAKVIDDLKKLGASEGTINQEIQRYQQLESVAVNDIRRDVRKKLRRSSMRAASLKDKWGLSYKPSYSRSKSISASGRPPLKRMERASSRVGETEELPEIRVDAASPGPRVTFNIQDTFPEETELDLLSVTIEGPSHYSSNSEGSCSVFSSPKTPGGFSPGIPFQTEEGRRDDSLSSTSEDSEKDEKDEDHERERFYIYRKPSHTSRKKATGFAAVHQLFTERWPTTPVNRSLSGTATERNIDFELDIRVEIDSGKCVLHPTTLLQEHDDISLRRSYDRSSRSLDQDSPSKKKKFQTNYASTTHLMTGKKVPSSLQTKPSDLETTVFYIPGVDVKLHYNSKTLKTESPNASRGSSLPRTLSKESKLYGMKDSATSPPSPPLPSTVQSKTNTLLPPQPPPIPAAKGKGSGGVKTAKLYAWVALQSLPEEMVISPCLLDFLEKALETIPITPVERNYTAVSSQDEDMGHFEIPDPMEESTTSLVSSSTSAYSSFPVDVVVYVRVQPSQIKFSCLPVSRVECMLKLPSLDLVFSSNRGELETLGTTYPAETLSPGGNATQSGTKTSASKTGIPGSSGLGSPLGRSRHSSSQSDLTSSSSSSSGLSFTACMSDFSLYVFHPYGAGKQKTAVSGLTPGSGGLGNVDEEPTSVTGRKDSLSINLEFVKVSLSRIRRSGGASFFESQSVSKSASKMDTTLINISGTQFYSF

SEQ ID NO: 31547 - protein, 564 aa, Homo sapiens
MASTSTTIRSHSSSRRGFSANSARLPGVSRSGFSSISVSRSRGSGGLGGACGGAGFGSRSLYGLGGSKRISIGGGSCAISGGYGSRAGGSYGFGGAGSGFGFGGGAGIGFGLGGGAGLAGGFGGPGFPVCPPGGIQEVTVNQSLLTPLNLQIDPAIQRVRAEEREQIKTLNNKFASFIDKVRFLEQQNKVLDTKWTLLQEQGTKTVRQNLEPLFEQYINNLRRQLDNIVGERGRLDSELRNMQDLVEDLKNKYEDEINKRTAAENEFVTLKKDVDAAYMNKVELQAKADTLTDEINFLRALYDAELSQMQTHISDTSVVLSMDNNRNLDLDSIIAEVKAQYEEIAQRSRAEAESWYQTKYEELQITAGRHGDDLRNTKQEIAEINRMIQRLRSEIDHVKKQCANLQAAIADAEQRGEMALKDAKNKLEGLEDALQKAKQDLARLLKEYQELMNVKLALDVEIATYRKLLEGEECRLNGEGVGQVNISVVQSTVSSGYGGASGVGSGLGLGGGSSYSYGSGLGVGGGFSSSSGRATGGGLSSVGGGSSTIKYTTTSSSSRKSYKH

SEQ ID NO: 31548 - protein, 590 aa, Homo sapiens
MSRQSSVSFRSGGSRSFSTASAITPSVSRTSFTSVSRSGGGGGGGFGRVSLAGACGVGGYGSRSLYNLGGSKRISISTSGGSFRNRFGAGAGGGYGFGGGAGSGFGFGGGAGGGFGLGGGAGFGGGFGGPGFPVCPPGGIQEVTVNQSLLTPLNLQIDPSIQRVRTEEREQIKTLNNKFASFIDKVRFLEQQNKVLDTKWTLLQEQGTKTVRQNLEPLFEQYINNLRRQLDSIVGERGRLDSELRNMQDLVEDFKNKYEDEINKRTTAENEFVMLKKDVDAAYMNKVELEAKVDALMDEINFMKMFFDAELSQMQTHVSDTSVVLSMDNNRNLDLDSIIAEVKAQYEEIANRSRTEAESWYQTKYEELQQTAGRHGDDLRNTKHEISEMNRMIQRLRAEIDNVKKQCANLQNAIADAEQRGELALKDARNKLAELEEALQKAKQDMARLLREYQELMNTKLALDVEIATYRKLLEGEECRLSGEGVGPVNISVVTSSVSSGYGSGSGYGGGLGGGLGGGLGGGLAGGSSGSYYSSSSGGVGLGGGLSVGGSGFSASSGRGLGVGFGSGGGSSSSVKFVSTTSSSRKSFKS

SEQ ID NO: 31549 - protein, 128 aa, Homo sapiens; identical to SEQ ID NO: 23304

SEQ ID NO: 31550 - protein, 890 aa, Homo sapiens
MSANNSPPSAQKSVLPTAIPAVLPAASPCSSPKTGLSARLSNGSFSAPSLTNSRGSVHTVSFLLQIGLTRESVTIEAQELSLSAVKDLVCSIVYQKFPECGFFGMYDKILLFRHDMNSENILQLITSADEIHEGDLVEVVLSALATVEDFQIRPHTLYVHSYKAPTFCDYCGEMLWGLVRQGLKCEGCGLNYHKRCAFKIPNNCSGVRKRRLSNVSLPGPGLSVPRPLQPEYVALPSEESHVHQEPSKRIPSWSGRPIWMEKMVMCRVKVPHTFAVHSYTRPTICQYCKRLLKGLFRQGMQCKDCKFNCHKRCASKVPRDCLGEVTFNGEPSSLGTDTDIPMDIDNNDINSDSSRGLDDTEEPSPPEDKMFFLDPSDLDVERDEEAVKTISPSTSNNIPLMRVVQSIKHTKRKSSTMVKEGWMVHYTSRDNLRKRHYWRLDSKCLTLFQNESGSKYYKEIPLSEILRISSPRDFTNISQGSNPHCFEIITDTMVYFVGENNGDSSHNPVLAATGVGLDVAQSWEKAIRQALMPVTPQASVCTSPGQGKDHKDLSTSISVSNCQIQENVDISTVYQIFADEVLGSGQFGIVYGGKHRKTGRDVAIKVIDKMRFPTKQESQLRNEVAILQNLHHPGIVNLECMFETPERVFVVMEKLHGDMLEMILSSEKSRLPERITKFMVTQILVALRNLHFKNIVHCDLKPENVLLASAEPFPQVKLCDFGFARIIGEKSFRRSVVGTPAYLAPEVLRSKGYNRSLDMWSVGVIIYVSLSGTFPFNEDEDINDQIQNAAFMYPPNPWREISGEAIDLINNLLQVKMRKRYSVDKSLSHPWLQDYQTWLDLREFETRIGERYITHESDDARWEIHAYTHNLVYPKHFIMAPNPDDMEEDP

SEQ ID NO: 31551 - protein, 611 aa, Homo sapiens
MSANNSPPSAQKSVLPTAIPAVLPAASPCSSPKTGLSARLSNGSFSAPSLTNSRGSVHTVSFLLQIGLTRESVTIEAQELSLSAVKDLVCSIVYQKFPECGFFGMYDKILLFRHDMNSENILQLITSADEIHEGDLVEVVLSALATVEDFQIRPHTLYVHSYKAPTFCDYCGEMLWGLVRQGLKCEGCGLNYHKRCAFKIPNNCSGVRKRRLSNVSLPGPGLSVPRPLQPEYVALPSEESHVHQEPSKRIPSWSGRPIWMEKMVMCRVKVPHTFAVHSYTRPTICQYCKRLLKGLFRQGMQCKDCKFNCHKRCASKVPRDCLGEVTFNGEPSSLGTDTDIPMDIDNNDINSDSSRGLDDTEEPSPPEDKMFFLDPSDLDVERDEEAVKTISPSTSNNIPLMRVVQSIKHTKRKSSTMVKEGWMVHYTSRDNLRKRHYWRLDSKCLTLFQNESGSKYYKEIPLSEILRISSPRDFTNISQGSNPHCFEIITDTMVYFVGENNGDSSHNPVLAATGVGLDVAQSWEKAIRQALMPVTPQASVCTSPGQGKDHKDLSTSISVSNCQIQENVDISTVYQIFADEVLGSGQFGIVYGGKQLQPFAYCTHYFKNWKM

SEQ ID NO: 31552 - protein, 205 aa, Homo sapiens
MVSSCCGSVCSDQGCGLETCCRPSCCQTTCCRTTCCRPSCCVSSCCRPQCCQSVCCQPTCCRPSCCPSCCQTTCCRTTCCRPSCCVSSCCRPQCCQSVCCQPTCCRPSCSISSCCRPSCCVSRCCRSQCCQSVCCQPTCCRPSCCISSCCRPSCCESSCCRPCCCRPCCCLRPVCGRVSCHTTCYRPTCVISTCPRPLCCASSCC

SEQ ID NO: 31553 - protein, 195 aa, Homo sapiens
MVNSCCGSVCSHQGCGRDLCQETCCRPSCCETTCCRTTYCRPSCCVSSCCRPQCCQSVCCQPTCCRPRCCISSCCRPSCCVSSCCKPQCCQSMCCQPTCCRPRCCISSCCRPSCCVSSCCRPQCCQSVCCQPTCCHPSCSISSCCRPSCCESSCCRPCCCLRPVCGRVSCHTTCYRPTCVISSCPRPLCCASSCC

SEQ ID NO: 31554 - protein, 250 aa, Homo sapiens
MTHCCSPCCQPTCCRTTCCRTTCWKPTTVTTCSSTPCCQPSCCVPSCCQPCCHPTCCQNTCCRTTCCQPTCVASCCQPSCCSTPCCQPTCCGSSCCGQTSCGSSCCQPICGSSCCQPCCHPTCYQTICFRTTCCQPTCCQPTCCRNTSCQPTCCGSSCCQPCCHPTCCQTICRSTCCQPSCVTRCCSTPCCQPTCGGSSCCSQTCNESSYCLPCCRPTCCQTTCYRTTCCRPSCCCSPCCVSSCCQPSCC

SEQ ID NO: 31555 - protein, 406 aa, Homo sapiens
MADGNEDLRADDLPGPAFESYESMELACPAERSGHVAVSDGRHMFVWGGYKSNQVRGLYDFYLPREELWIYNMETGRWKKINTEGDVPPSMSGSCAVCVDRVLYLFGGHHSRGNTNKFYMLDSRSTDRVLQWERIDCQGIPPSSKDKLGVWVYKNKLIFFGGYGYLPEDKVLGTFEFDETSFWNSSHPRGWNDHVHILDTETFTWSQPITTGKAPSPRAAHACATVGNRGFVFGGRYRDARMNDLHYLNLDTWEWNELIPQGICPVGRSWHSLTPVSSDHLFLFGGFTTDKQPLSDAWTYCISKNEWIQFNHPYTEKPRLWHTACASDEGEVIVFGGCANNLLVHHRAAHSNEILIFSVQPKSLVRLSLEAVICFKEMLANSWNCLPKHLLHSVNQRFGSNNTSGS

SEQ ID NO: 31556 - protein, 249 aa, Homo sapiens
MADGNEDLRADDLPGPAFESYESMELACPAERSGHVAVSDGRHMFVWGGYKSNQVRGLYDFYLPREELWIYNMETGRWKKINTEGDVPPSMSGSCAVCVDRVLYLFGGHHSRGNTNKFYMLDSRSTDRVLQWERIDCQGIPPSSKDKLGVWVYKNKLIFFGGYGYLPEDKVLGTFEFDETSFWNSSHPRGWNDHVHILDTETFTWSQPITTGKAPSPRAAHACATVGNRGFVFGGRYRVSIQTTSMTCF

SEQ ID NO: 31557 - protein, 210 aa, Homo sapiens
MVSSCCGSVCSDQGCGQDLCQETCCRPSCCETTCCRTTCCRPSCCVSSCCRPQCCQSVCCQPTCSRPSCCQTTCCRTTCYRPSCCVSSCCRPQCCQPACCQPTCCRPSCCETTCCHPRCCISSCCRPSCCVSSCCKPQCCQSVCCQPNCCRPSCSISSCCRPSCCESSCCRPCCCVRPVCGRVSCHTTCYRPTCVISSCPRPLCCASSCC

SEQ ID NO: 31558 - protein, 356 aa, Homo sapiens
MNAARTGYRVFSANSTAACTELAKRITERLGAELGKSVVYQETNGETRVEIKESVRGQDIFIIQTIPRDVNTAVMELLIMAYALKTACARNIIGVIPYFPYSKQSKMRKRGSIVCKLLASMLAKAGLTHIITMDLHQKEIQGFFSFPVDNLRASPFLLQYIQEEIPNYRNAVIVAKSPDAAKRAQSYAERLRLGLAVIHGEAQCTELDMDDGRHSPPMVKNATVHPGLELPLMMAKEKPPITVVGDVGGRIAIIVDDIIDDVESFVAAAEILKERGAYKIYVMATHGILSAEAPRLIEESSVDEVVVTNTVPHEVQKLQCPKIKTVDISLILSEAIRRIHNGESMAYLFRNITVDD

SEQ ID NO: 31559 - protein, 385 aa, Homo sapiens
MPKKLLLLPPPSASSAFRVPRARPVPPPAMNAARTGYRVFSANSTAACTELAKRITERLGAELGKSVVYQETNGETRVEIKESVRGQDIFIIQTIPRDVNTAVMELLIMAYALKTACARNIIGVIPYFPYSKQSKMRKRGSIVCKLLASMLAKAGLTHIITMDLHQKEIQGFFSFPVDNLRASPFLLQYIQEEIPNYRNAVIVAKSPDAAKRAQSYAERLRLGLAVIHGEAQCTELDMDDGRHSPPMVKNATVHPGLELPLMMAKEKPPITVVGDVGGRIAIIVDDIIDDVESFVAAAEILKERGAYKIYVMATHGILSAEAPRLIEESSVDEVVVTNTVPHEVQKLQCPKIKTVDISLILSEAIRRIHNGESMAYLFRNITVDD

SEQ ID NO: 31560 - protein, 732 aa, Homo sapiens
MEGGDQSEEEPRERSQAGGMGTLWSQESTPEERLPVEGSRPWAVARRVLTAILILGLLLCFSVLLFYNFQNCGPRPCETSVCLDLRDHYLASGNTSVAPCTDFFSFACGRAKETNNSFQELATKNKNRLRRILEVQNSWHPGSGEEKAFQFYNSCMDTLAIEAAGTGPLRQVIEELGGWRISGKWTSLNFNRTLRLLMSQYGHFPFFRAYLGPHPASPHTPVIQIDQPEFDVPLKQDQEQKIYAQIFREYLTYLNQLGTLLGGDPSKVQEHSSLSISITSRLFQFLRPLEQRRAQGKLFQMVTIDQLKEMAPAIDWLSCLQATFTPMSLSPSQSLVVHDVEYLKNMSQLVEEMLLKQRDFLQSHMILGLVVTLSPALDSQFQEARRKLSQKLRELTEQPPMPARPRWMKCVEETGTFFEPTLAALFVREAFGPSTRSAAMKLFTAIRDALITRLRNLPWMNEETQNMAQDKVAQLQVEMGASEWALKPELARQEYNDIQLGSSFLQSVLSCVRSLRARIVQSFLQPHPQHRWKVSPWDVNAYYSVSDHVVVFPAGLLQPPFFHPGYPRAVNFGAAGSIMAHELLHIFYQLLLPGGCLACDNHALQEAHLCLKRHYAAFPLPSRTSFNDSLTFLENAADVGGLAIALQAYSKRLLRHHGETVLPSLDLSPQQIFFRSYAQVMCRKPSPQDSHDTHSPPHLRVHGPLSSTPAFARYFRCARGALLNPSSRCQLW

SEQ ID NO: 31561 - protein, 2209 aa, Homo sapiens
MWNDIELLTNDDTGSGYLSVGSRKEHGTALYQVDLLVKISSEKASLNPKIQACSLSDGFIIVADQSVILLDSICRSLQLHLVFDTEVDVVGLCQEGKFLLVGERSGNLHLIHVTSKQTLLTNAFVQKANDENRRTYQNLVIEKDGSNEGTYYMLLLTYSGFFCITNLQLLKIQQAIENVDFSTAKKLQGQIKSSFISTENYHTLGCLSLVAGDLASEVPVIIGGTGNCAFSKWEPDSSKKGMTVKNLIDAEIIKGAKKFQLIDNLLFVLDTDNVLSLWDIYTLTPVWNWPSLHVEEFLLTTEADSPSSVTWQGITNLKLIALTASANKKMKNLMVYSLPTMEILYSLEVSSVSSLVQTGISTDTIYLLEGVCKNDPKLSEDSVSVLVLRCLTEALPENRLSRLLHKHRFAEAESFAIQFGLDVELVYKVKSNHILEKLALSSVDASEQTEWQQLVDDAKENLHKIQDDEFVVNYCLKAQWITYETTQEMLNYAKTRLLKKEDKTALIYSDGLKEVLRAHAKLTTFYGAFGPEKFSGSSWIEFLNNEDDLKDIFLQLKEGNLVCAQYLWLRHRANFESRFDVKMLESLLNSMSASVSLQKLCPWFKNDVIPFVRRTVPEGQIILAKWLEQAARNLELTDKANWPENGLQLAEIFFTAEKTDELGLASSWHWISLKDYQNTEEVCQLRTLVNNLRELITLHRKYNCKLALSDFEKENTTTIVFRMFDKVLAPELIPSILEKFIRVYMREHDLQEEELLLLYIEDLLNRCSSKSTSLFETAWEAKAMAVIACLSDTDLIFDAVLKIMYAAVVPWSAAVEQLVKQHLEMDHPKVKLLQESYKLMEMKKLLRGYGIREVNLLNKEIMRVVRYILKQDVPSSLEDALKVAQAFMLSDDEIYSLRIIDLIDREQGEDCLLLLKSLPPAEAEKTAERVIIWARLALQEEPDHSKEGKAWRMSVAKTSVDILKILCDIQKDNLQKKDECEEMLKLFKEVASLQENFEVFLSFEDYSNSSLVADLREQHIKAHEVAQAKHKPGSTPEPIAAEVRSPSMESKLHRQALALQMSKQELEAELTLRALKDGNIKTALKKCSDLFKYHCNADTGKLLFLTCQKLCQMLADNVPVTVPVGLNLPSMIHDLASQAATICSPDFLLDALELCKHTLMAVELSRQCQMDDCGILMKASFGTHKDPYEEWSYSDFFSEDGIVLESQMVLPVIYELISSLVPLAESKRYPLESTSLPYCSLNEGDGLVLPVINSISALLQNLQESSQWELALRFVVGSFGTCLQHSVSNFMNATLSEKLFGETTLVKSRHVVMELKEKAVIFIRENATTLLHKVFNCRLVDLDLALGYCTLLPQKDVFENLWKLIDKAWQNYDKILAISLVGSELASLYQEIEMGLKFRELSTDAQWGIRLGKLGISFQPVFRQHFLTKKDLIKALVENIDMDTSLILEYCSTFQLDCDAVLQLFIETLLHNTNAGQGQGDASMDSAKRRHPKLLAKALEMVPLLTSTKDLVISLSGILHKLDPYDYEMIEVVLKVIERADEKITNININQALSILKHLKSYRRISPPVDLEYQYMLEHVITLPSAAQTRLPFHLIFFGTAQNFWKILSTELSEESFPTLLLISKLMKFSLDTLYVSTAKHVFEKKLKPKLLKLTQAKSSTLINKEITKITQTIESCLLSIVNPEWAVAIAISLAQDIPEGSFKISALKFCLYLAERWLQNIPSQDEKREKAEALLKKLHIQYRRSGTEAVLIAHKLNTEEYLRVIGKPAHLIVSLYEHPSINQRIQNSSGTDYPDIHAAAKEIAEVNEINLEKVWDMLLEKWLCPSTKPGEKPSELFELQEDEALRRVQYLLLSRPIDYSSRMLFVFATSTTTTLGMHQLTFAHRTRALQCLFYLADKETIESLFKKPIEEVKSYLRCITFLASFETLNIPITYELFCSSPKEGMIKGLWKNHSHESMAVRLVTELCLEYKIYDLQLWNGLLQKLLGFNMIPYLRKVLKAISSIHSLWQVPYFSKAWQRVIQIPLLSASCPLSPDQLSDCSESLIAVLECPVSGDLDLIGVARQYIQLELPAFALACLMLMPHSEKRHQQIKNFLGSCDPQVILKQLEEHMNTGQLAGFSHQIRSLILNNIINKKEFGILAKTKYFQMLKMHAMNTNNITELVNYLANDLSLDEASVLITEYSKHCGKPVPPDTAPCEILKMFLSGLS

SEQ ID NO: 31562 - protein, 443 aa, Homo sapiens
MLEHVITLPSAAQTRLPFHLIFFGTAQNFWKILSTELSEESFPTLLLISKLMKFSLDTLYVSTAKHVFEKKLKPKLLKLTQAKSSTLINKEITKITQTIESCLLSIVNPEWAVAIAISLAQDIPEGSFKISALKFCLYLAERWLQNIPSQDEKREKAEALLKKLHIQYRRSGTEAVLIAHKLNTEEYLRVIGKPAHLIVSLYEHPSINQRIQNSSGTDYPDIHAAAKEIAEVNEINLEKVWDMLLEKWLCPSTKPGEKPSELFELQEDEALRRVQYLLLSRPIDYSSRMLFVFATSTTTTLGMHQLTFAHRTRALQCLFYLADKETIESLFKKPIEEVKSYLRCITFLASFETLNIPITYELFCSSPKEGMIKGLWKNHSHESMAVRLVTELCLEYKIYDLQLWNGLLQKLLGFNMIPYLRKVLKAISSIHSLWQRWRSCYVA

SEQ ID NO: 31563 - protein, 581 aa, Homo sapiens
MDEESLDGLLFKDHDFSSDLLRQLNSLRQSRILTDVSICAGAREIPCHRNVLASSSPYFRAMFCSSFREKSEAKVQLKGIDPPTLDQIVSYVYTGEAHIATDNVLPVMEAASMLQFPKLFEACSSYLQSQLAPSNCLGMIRLSEILSCETLKKKAREVALTSFPEVAASADLKELCALELRDYLGDDGLCGEEEKVFEALMVWIKHDLQARKRYMQELFKQVRLQYIHPAFFHHFIANDALLQSSPACQIILETAKRQMFSLCGTTVPDCKLLLHVPPRNSYQDFLILLGGRKDSQQTTRDVLLYSKQTGQWQSLAKLPTRLYKASAITLHRSIYVLGGMAVSSGRSLVSHNVYIFSLKLNQWRLGEPMLVARYSHRSTAHKNFIFSIGGIGEGQELMGSMERYDSICNVWESMASMPVGVLHPAVAVKDQRLYLFGGEDIMQNPVRLIQVYHISRNSWFKMETRMIKNVCAPAVVLGERIVIVGGYTRRILAYDPQSNKFVKCADMKDRRMHHGATVMGNKLYVTGGRRLTTDCNIEDSASFDCYDPETDTWTSQGQLPHKLFDHACLTLQCIPRTSGLP

SEQ ID NO: 31564 - protein, 875 aa, Homo sapiens
MSRHHSRFERDYRVGWDRREWSVNGTHGTTSICSVTSGAGGGTASSLSVRPGLLPLPVVPSRLPTPATAPAPCTTGSSEAITSLVASSASAVTTKAPGISKGDSQSQGLATSIRWGQTPINQSTPWDTDEPPSKQMRESDNPGTGPWVTTVAAGNQPTLIAHSYGVAQPPTFSPAVNVQAPVIGVTPSLPPHVGPQLPLMPGHYSLPQPPSQPLSSVVVNMPAQALYASPQPLAVSTLPGVGQVARPGPTAVGNGHMAGPLLPPPPPAQPSATLPSGAPATNGPPTTDSAHGLQMLRTIGVGKYEFTDPGHPREMLKELNQQRRAKAFTDLKIVVEGREFEVHQNVLASCSLYFKDLIQRSVQDSGQGGREKLELVLSNLQADVLELLLEFVYTGSLVIDSANAKTLLEAASKFQFHTFCKVCVSFLEKQLTASNCLGVLAMAEAMQCSELYHMAKAFALQIFPEVAAQEEILSISKDDFIAYVSNDSLNTKAEELVYETVIKWIKKDPATRTQYAAELLAVVRLPFIHPSYLLNVVDNEELIKSSEACRDLVNEAKRYHMLPHARQEMQTPRTRPRLSAGVAEVIVLVGGRQMVGMTQRSLVAVTCWNPQNNKWYPLASLPFYDREFFSVVSAGDNIYLSGGMESGVTLADVWCYMSLLDNWNLVSRMTVPRCRHNSLVYDGKIYTLGGLGVAGNVDHVERYDTITNQWEAVAPLPKAVHSAAATVCGGKIYVFGGVNEAGRAAGVLQSYVPQTNTWSFIESPMIDNKYAPAVTLNGFVFILGGAYARATTIYDPEKGNIKAGPNMNHSRQFCSAVVLDGKIYATGGIVSSEGPALGNMEAYEPTTNTWTLLPHMPCPVFRHGCVVIKKYIQSG

SEQ ID NO: 31565 - protein, 702 aa, Homo sapiens
MSRHHSRFERDYRVGWDRREWSVNGTHGTTSICSVTSGAGGGTASSLSVRPGLLPLPVVPSRLPTPATAPAPCTTGSSEAITSLVASSASAVTTKAPGISKGDSQSQGLATSIRWGQTPINQSTPWDTDEPPSKQMRESDNPGTGPWVTTVAAGNQPTLIAHSYGVAQPPTFSPAVNVQAPVIGVTPSLPPHVGPQLPLMPGHYSLPQPPSQPLSSVVVNMPAQALYASPQPLAVSTLPGVGQVARPGPTAVGNGHMAGPLLPPPPPAQPSATLPSGAPATNGPPTTDSAHGLQMLRTIGVGKYEFTDPGHPREMLKELNQQRRAKAFTDLKIVVEGREFEVHQNVLASCSLYFKDLIQRSVQDSGQGGREKLELVLSNLQADVLELLLEFVYTGSLVIDSANAKTLLEAASKFQFHTFCKVCVSFLEKQLTASNCLGVLAMAEAMQCSELYHMAKAFALQIFPEVAAQEEILSISKDDFIAYVSNDSLNTKAEELVYETVIKWIKKDPATRTQYAAELLAVVRLPFIHPSYLLNVVDNEELIKSSEACRDLVNEAKRYHMLPHARQEMQTPRTRPRLSAGVAEVIVLVGGRQMVGMTQRSLVAVTCWNPQNNKWYPLASLPFYDREFFSVVSAGDNIYLSGGMESGVTLADVWCYMSLLDNWNLVSRMTVPRCRHNSLVYDGKIYTLGGLGVAGNVDHVER

SEQ ID NO: 31566 - protein, 634 aa, Homo sapiens
MAPKKKIVKKNKGDINEMTIIVEDSPLNKLNALNGLLEGGNGLSCISSELTDASYGPNLLEGLSKMRQENFLCDLVIGTKTKSFDVHKSVMASCSEYFYNILKKDPSIQRVDLNDISPLGLATVIAYAYTGKLTLSLYTIGSIISAAVYLQIHTLVKMCSDFLIREMSVENCMYVVNIAETYSLKNAKAAAQKFIRDNFLEFAESDQFMKLTFEQINELLIDDDLQLPSEIVAFQIAMKWLEFDQKRVKYAADLLSNIRFGTISAQDLVNYVQSVPRMMQDADCHRLLVDAMNYHLLPYHQNTLQSRRTRIRGGCRVLVTVGGRPGLTEKSLSRDILYRDPENGWSKLTEMPAKSFNQCVAVMDGFLYVAGGEDQNDARNQAKHAVSNFCRYDPRFNTWIHLASMNQKRTHFSLSVFNGLVYAAGGRNAEGSLASLECYVPSTNQWQPKTPLEVARCCHASAVADGRVLVTGGYIANAYSRSVCAYDPASDSWQELPNLSTPRGWHCAVTLSDRVYVMGGSQLGPRGERVDVLTVECYSPATGQWSYAAPLQVGVSTAGVSALHGRAYLVGGWNEGEKKYKKCIQCFSPELNEWTEDDELPEATVGVSCCTLSMPNNVTRESRASSVSSVPVSI

SEQ ID NO: 31567 - protein, 1805 aa, Homo sapiens
MSDTKVKVAVRVRPMNRRELELNTKCVVEMEGNQTVLHPPPSNTKQGERKPPKVFAFDYCFWSMDESNTTKYAGQEVVFKCLGEGILEKAFQGYNACIFAYGQTGSGKSFSMMGHAEQLGLIPRLCCALFKRISLEQNESQTFKVEVSYMEIYNEKVRDLLDPKGSRQSLKVREHKVLGPYVDGLSQLAVTSFEDIESLMSEGNKSRTVAATNMNEESSRSHAVFNIIITQTLYDLQSGNSGEKVSKVSLVDLAGSERVSKTGAAGERLKEGSNINKSLTTLGLVISSLADQAAGKGKSKFVPYRDSVLTWLLKDNLGGNSQTSMIATISPAADNYEETLSTLRYADRAKRIVNHAVVNEDPNAKVIRELREEVEKLREQLSQAEAMKAPELKEKLEESEKLIKELTVTWEEKLRKTEEIAQERQRQLESMGISLEMSGIKVGDDKCYLVNLNADPALNELLVYYLKDHTRVGADTSQDIQLFGIGIQPQHCEIDIASDGDVTLTPKENARSCVNGTLVCSTTQLWHGDRILWGNNHFFRINLPKRKRRDWLKDFEKETGPPEHDLDAASEASSEPDYNYEFAQMEVIMKTLNSNDPVQNVVQVLEKQYLEEKRSALEEQRLMYERELEQLRQQLSPDRQPQSSGPDRLAYSSQTAQQKVTQWAEERDELFRQSLAKLREQLVKANTLVREANFLAEEMSKLTDYQVTLQIPAANLSANRKRGAIVSEPAIQVRRKGKSTQVWTIEKLENKLIDMRDLYQEWKEKVPEAKRLYGKRGDPFYEAQENHNLIGVANVFLECLFCDVKLQYAVPIISQQGEVAGRLHVEVMRVTGAVPERVVEDDSSENSSESGSLEVVDSSGEIIHRVKKLTCRVKIKEATGLPLNLSNFVFCQYTFWDQCESTVAAPVVDPEVPSPQSKDAQYTVTFSHCKDYVVNVTEEFLEFISDGALAIEVWGHRCAGNGSSIWEVDSLHAKTRTLHDRWNEVTRRIEMWISILELNELGEYAAVELHQAKDVNTGGIFQLRQGHSRRVQVTVKPVQHSGTLPLMVEAILSVSIGCVTARSTKLQRGLDSYQRDDEDGDDMDSYQEEDLNCVRERWSDALIKRREYLDEQIKKVSNKTEKTEDDVEREAQLVEQWVGLTEERNAVLVPAPGSGIPGAPADWIPPPGMETHIPVLFLDLNADDLSANEQLVGPHASGVNSILPKEHGSQFFYLPIIKHSDDEVSATASWDSSVHDSVHLNRVTPQNERIYLIVKTTVQLSHPAAMELVLRKRIAANIYNKQSFTQSLKRRISLKNIFYSCGVTYEIVSNIPKATEEIEDRETLALLAARSENEGTSDGETYIEKYTRGVLQVENILSLERLRQAVTVKEALSTKARHIRRSLSTPNVHNVSSSRPDLSGFDEDDKGWPENQLDMSDYSSSYQDVACYGTLPRDSPRRNKEGCTSETPHALTVSPFKAFSPQPPKFFKPLMPVKEEHKKRIALEARPLLSQESMPPPQAHNPGCIVPSGSNGSSMPVEHNSKREKKIDSEEEENELEAINRKLISSQPYVPVEFADFSVYNASLENREWFSSKVDLSNSRVLEKEVSRSPTTSSITSGYFSHSASNATLSDMVVPSSDSSDQLAIQTKDADSTEHSTPSLVHDFRPSSNKELTEVEKGLVKDKIIVVPLKENSALAKGSPSSQSIPEKNSKSLCRTGSCSELDACPSKISQPARGFCPREVTVEHTTNILEDHSFTEFMGVSEGKDFDGLTDSSAGELSSRRSLPNKTGGKTVSDGLHHPSQLHSKLENDQVIIPEAAFWVLCCQ

SEQ ID NO: 31568 - protein, 1770 aa, Homo sapiens
MSDTKVKVAVRVRPMNRRELELNTKCVVEMEGNQTVLHPPPSNTKQGERKPPKVFAFDYCFWSMDESNTTKYAGQEVVFKCLGEGILEKAFQGYNACIFAYGQTGSGKSFSMMGHAEQLGLIPRLCCALFKRISLEQNESQTFKVEVSYMEIYNEKVRDLLDPKGSRQSLKVREHKVLGPYVDGLSQLAVTSFEDIESLMSEGNKSRTVAATNMNEESSRSHAVFNIIITQTLYDLQSGNSGEKVSKVSLVDLAGSERVSKTGAAGERLKEGSNINKSLTTLGLVISSLADQAAGKGKSKFVPYRDSVLTWLLKDNLGGNSQTSMIATISPAADNYEETLSTLRYADRAKRIVNHAVVNEDPNAKVIRELREEVEKLREQLSQAEAMKAPELKEKLEESEKLIKELTVTWEEKLRKTEEIAQERQRQLESMGISLEMSGIKVGDDKCYLVNLNADPALNELLVYYLKDHTRVGADTSQDIQLFGIGIQPQHCEIDIASDGDVTLTPKENARSCVNGTLVCSTTQLWHGDRILWGNNHFFRINLPKRKRRDWLKDFEKETGPPEHDLDAASEASSEPDYNYEFAQMEVIMKTLNSNDPVQNVVQVLEKQYLEEKRSALEEQRLMYERELEQLRQQLSPDRQPQSSGPDRLAYSSQTAQQKVTQWAEERDELFRQSLAKLREQLVKANTLVREANFLAEEMSKLTDYQVTLQIPAANLSANRKRGAIVSEPAIQVRRKGKSTQVWTIEKLENKLIDMRDLYQEWKEKVPEAKRLYGKRGDPFYEAQENHNLIGVANVFLECLFCDVKLQYAVPIISQQGEVAGRLHVEVMRVTGAVPERVVEDDSSENSSESGSLEVVDSSGEIIHRVKKLTCRVKIKEATGLPLNLSNFVFCQYTFWDQCESTVAAPVVDPEVPSPQSKDAQYTVTFSHCKDYVVNVTEEFLEFISDGALAIEVWGHRCAGNGSSIWEVDSLHAKTRTLHDRWNEVTRRIEMWISILELNELGEYAAVELHQAKDVNTGGIFQLRQGHSRRVQVTVKPVQHSGTLPLMVEAILSVSIGCVTARSTKLQRGLDSYQRDDEDGDDMDSYQEEDLNCVRERWSDALIKRREYLDEQIKKVSNKTEKTEDDVEREAQLVEQWVGLTEERNAVLVPAPGSGIPGAPADWIPPPGMETHIPVLFLDLNADDLSANEQLVGPHASGVNSILPKEHGSQFFYLPIIKHSDDEVSATASWDSSVHDSVHLNRVTPQNERIYLIVKTTVQLSHPAAMELVLRKRIAANIYNKQSFTQSLKRRISLKNIFYSCGVTYEIVSNIPKATEEIEDRETLALLAARSENEGTSDGETYIEKYTRGVLQVENILSLERLRQAVTVKEALSTKARHIRRSLSTPNVHNVSSSRPDLSGFDEDDKGWPENQLDMSDYSSSYQDVACYGTLPRDSPRRNKEGCTSETPHALTVSPFKAFSPQPPKFFKPLMPVKEEHKKRIALEARPLLSQEDSEEEENELEAINRKLISSQPYVPVEFADFSVYNASLENREWFSSKVDLSNSRVLEKEVSRSPTTSSITSGYFSHSASNATLSDMVVPSSDSSDQLAIQTKDADSTEHSTPSLVHDFRPSSNKELTEVEKGLVKDKIIVVPLKENSALAKGSPSSQSIPEKNSKSLCRTGSCSELDACPSKISQPARGFCPREVTVEHTTNILEDHSFTEFMGVSEGKDFDGLTDSSAGELSSRRSLPNKTGGKTVSDGLHHPSQLHSKLENDQVIIPEAAFWVLCCQ

SEQ ID NO: 31569 - protein, 1749 aa, Homo sapiens
MSDTKVKVAVRVRPMNRRELELNTKCVVEMEGNQTVLHPPPSNTKQGERKPPKVFAFDYCFWSMDESNTTKYAGQEVVFKCLGEGILEKAFQGYNACIFAYGQTGSGKSFSMMGHAEQLGLIPRLCCALFKRISLEQNESQTFKVEVSYMEIYNEKVRDLLDPKGSRQSLKVREHKVLGPYVDGLSQLAVTSFEDIESLMSEGNKSRTVAATNMNEESSRSHAVFNIIITQTLYDLQSGNSGEKVSKVSLVDLAGSERVSKTGAAGERLKEGSNINKSLTTLGLVISSLADQAAGKGKSKFVPYRDSVLTWLLKDNLGGNSQTSMIATISPAADNYEETLSTLRYADRAKRIVNHAVVNEDPNAKVIRELREEVEKLREQLSQAEAMKAPELKEKLEESEKLIKELTVTWEEKLRKTEEIAQERQRQLESMGISLEMSGIKVGDDKCYLVNLNADPALNELLVYYLKDHTRVGADTSQDIQLFGIGIQPQHCEIDIASDGDVTLTPKENARSCVNGTLVCSTTQLWHGDRILWGNNHFFRINLPKRKRRDWLKDFEKETGPPEHDLDAASEASSEPDYNYEFAQMEVIMKTLNSNDPVQNVVQVLEKQYLEEKRSALEEQRLMYERELEQLRQQLSPDRQPQSSGPDRLAYSSQTAQQKVTQWAEERDELFRQSLAKLREQLVKANTLVREANFLAEEMSKLTDYQVTLQIPAANLSANRKRGAIVSEPAIQVRRKGKSTQVWTIEKLENKLIDMRDLYQEWKEKVPEAKRLYGKRGDPFYEAQENHNLIGVANVFLECLFCDVKLQYAVPIISQQGEVAGRLHVEVMRVTGAVPERVVEDDSSENSSESGSLEVVDSSGEIIHRVKKLTCRVKIKEATGLPLNLSNFVFCQYTFWDQCESTVAAPVVDPEVPSPQSKDAQYTVTFSHCKDYVVNVTEEFLEFISDGALAIEVWGHRCAGNGSSIWEVDSLHAKTRTLHDRWNEVTRRIEMWISILELNELGEYAAVELHQAKDVNTGGIFQLRQGHSRRVQVTVKPVQHSGTLPLMVEAILSVSIGCVTARSTKLQRGLDSYQEEDLNCVRERWSDALIKRREYLDEQIKKVSNKTEKTEDDVEREAQLVEQWVGLTEERNAVLVPAPGSGIPGAPADWIPPPGMETHIPVLFLDLNADDLSANEQLVGPHASGVNSILPKEHGSQFFYLPIIKHSDDEVSATASWDSSVHDSVHLNRVTPQNERIYLIVKTTVQLSHPAAMELVLRKRIAANIYNKQSFTQSLKRRISLKNIFYSCGVTYEIVSNIPKATEEIEDRETLALLAARSENEGTSDGETYIEKYTRGVLQVENILSLERLRQAVTVKEALSTKARHIRRSLSTPNVHNVSSSRPDLSGFDEDDKGWPENQLDMSDYSSSYQDVACYGTLPRDSPRRNKEGCTSETPHALTVSPFKAFSPQPPKFFKPLMPVKEEHKKRIALEARPLLSQEDSEEEENELEAINRKLISSQPYVPVEFADFSVYNASLENREWFSSKVDLSNSRVLEKEVSRSPTTSSITSGYFSHSASNATLSDMVVPSSDSSDQLAIQTKDADSTEHSTPSLVHDFRPSSNKELTEVEKGLVKDKIIVVPLKENSALAKGSPSSQSIPEKNSKSLCRTGSCSELDACPSKISQPARGFCPREVTVEHTTNILEDHSFTEFMGVSEGKDFDGLTDSSAGELSSRRSLPNKTGGKTVSDGLHHPSQLHSKLENDQGGTTSR

SEQ ID NO: 31570 - protein, 1757 aa, Homo sapiens
MSDTKVKVAVRVRPMNRRELELNTKCVVEMEGNQTVLHPPPSNTKQGERKPPKVFAFDYCFWSMDESNTTKYAGQEVVFKCLGEGILEKAFQGYNACIFAYGQTGSGKSFSMMGHAEQLGLIPRLCCALFKRISLEQNESQTFKVEVSYMEIYNEKVRDLLDPKGSRQSLKVREHKVLGPYVDGLSQLAVTSFEDIESLMSEGNKSRTVAATNMNEESSRSHAVFNIIITQTLYDLQSGNSGEKVSKVSLVDLAGSERVSKTGAAGERLKEGSNINKSLTTLGLVISSLADQAAGKGKSKFVPYRDSVLTWLLKDNLGGNSQTSMIATISPAADNYEETLSTLRYADRAKRIVNHAVVNEDPNAKVIRELREEVEKLREQLSQAEAMKAPELKEKLEESEKLIKELTVTWEEKLRKTEEIAQERQRQLESMGISLEMSGIKVGDDKCYLVNLNADPALNELLVYYLKDHTRVGADTSQDIQLFGIGIQPQHCEIDIASDGDVTLTPKENARSCVNGTLVCSTTQLWHGDRILWGNNHFFRINLPKRKRRDWLKDFEKETGPPEHDLDAASEASSEPDYNYEFAQMEVIMKTLNSNDPVQNVVQVLEKQYLEEKRSALEEQRLMYERELEQLRQQLSPDRQPQSSGPDRLAYSSQTAQQKVTQWAEERDELFRQSLAKLREQLVKANTLVREANFLAEEMSKLTDYQVTLQIPAANLSANRKRGAIVSEPAIQVRRKGKSTQVWTIEKLENKLIDMRDLYQEWKEKVPEAKRLYGKRGDPFYEAQENHNLIGVANVFLECLFCDVKLQYAVPIISQQGEVAGRLHVEVMRVTGAVPERVVEDDSSENSSESGSLEVVDSSGEIIHRVKKLTCRVKIKEATGLPLNLSNFVFCQYTFWDQCESTVAAPVVDPEVPSPQSKDAQYTVTFSHCKDYVVNVTEEFLEFISDGALAIEVWGHRCAGNGSSIWEVDSLHAKTRTLHDRWNEVTRRIEMWISILELNELGEYAAVELHQAKDVNTGGIFQLRQGHSRRVQVTVKPVQHSGTLPLMVEAILSVSIGCVTARSTKLQRGLDSYQEEDLNCVRERWSDALIKRREYLDEQIKKVSNKTEKTEDDVEREAQLVEQWVGLTEERNAVLVPAPGSGIPGAPADWIPPPGMETHIPVLFLDLNADDLSANEQLVGPHASGVNSILPKEHGSQFFYLPIIKHSDDEVSATASWDSSVHDSVHLNRVTPQNERIYLIVKTTVQLSHPAAMELVLRKRIAANIYNKQSFTQSLKRRISLKNIFYSCGVTYEIVSNIPKATEEIEDRETLALLAARSENEGTSDGETYIEKYTRGVLQVENILSLERLRQAVTVKEALSTKARHIRRSLSTPNVHNVSSSRPDLSGFDEDDKGWPENQLDMSDYSSSYQDVACYGTLPRDSPRRNKEGCTSETPHALTVSPFKAFSPQPPKFFKPLMPVKEEHKKRIALEARPLLSQEDSEEEENELEAINRKLISSQPYVPVEFADFSVYNASLENREWFSSKVDLSNSRVLEKEVSRSPTTSSITSGYFSHSASNATLSDMVVPSSDSSDQLAIQTKDADSTEHSTPSLVHDFRPSSNKELTEVEKGLVKDKIIVVPLKENSALAKGSPSSQSIPEKNSKSLCRTGSCSELDACPSKISQPARGFCPREVTVEHTTNILEDHSFTEFMGVSEGKDFDGLTDSSAGELSSRRSLPNKTGGKTVSDGLHHPSQLHSKLENDQVIIPEAAFWVLCCQ

SEQ ID NO: 31571 - protein, 70 aa, Homo sapiens
MSDTKVKVAVRVRPMNRRELELNTKCVVEMEGNQTVLHPPPSNTKQGERLVTVAHISNSSTLGGQGKRIT

SEQ ID NO: 31572 - protein, 478 aa, Homo sapiens
MATITCTRFTEEYQLFEELGKGAFSVVRRCVKVLAGQEYAAKIINTKKLSARDHQKLEREARICRLLKHPNIVRLHDSISEEGHHYLIFDLVTGGELFEDIVAREYYSEADASHCIQQILEAVLHCHQMGVVHRDLKPENLLLASKLKGAAVKLADFGLAIEVEGEQQAWFGFAGTPGYLSPEVLRKDPYGKPVDLWACGVILYILLVGYPPFWDEDQHRLYQQIKAGAYDFPSPEWDTVTPEAKDLINKMLTINPSKRITAAEALKHPWISHRSTVASCMHRQETVDCLKKFNARRKLKGAILTTMLATRNFSGGKSGGNKKSDGVKESSESTNTTIEDEDTKVRKQEIIKVTEQLIEAISNGDFESYTKMCDPGMTAFEPEALGNLVEGLDFHRFYFENLWSRNSKPVHTTILNPHIHLMGDESACIAYIRITQYLDAGGIPRTAQSEETRVWHRRDGKWQIVHFHRSGAPSVLPH

SEQ ID NO: 31573 - protein, 489 aa, Homo sapiens
MATITCTRFTEEYQLFEELGKGAFSVVRRCVKVLAGQEYAAKIINTKKLSARDHQKLEREARICRLLKHPNIVRLHDSISEEGHHYLIFDLVTGGELFEDIVAREYYSEADASHCIQQILEAVLHCHQMGVVHRDLKPENLLLASKLKGAAVKLADFGLAIEVEGEQQAWFGFAGTPGYLSPEVLRKDPYGKPVDLWACGVILYILLVGYPPFWDEDQHRLYQQIKAGAYDFPSPEWDTVTPEAKDLINKMLTINPSKRITAAEALKHPWISHRSTVASCMHRQETVDCLKKFNARRKLKGAILTTMLATRNFSGGKSGGNKKSDGVKKRKSSSSVQLMESSESTNTTIEDEDTKVRKQEIIKVTEQLIEAISNGDFESYTKMCDPGMTAFEPEALGNLVEGLDFHRFYFENLWSRNSKPVHTTILNPHIHLMGDESACIAYIRITQYLDAGGIPRTAQSEETRVWHRRDGKWQIVHFHRSGAPSVLPH

SEQ ID NO: 31574 - protein, 250 aa, Homo sapiens
MKLGLLCALLSLLAGHGWADTRAIGAEECRPNSQPWQAGLFHLTRLFCGATLISDRWLLTAAHCRKPYLWVRLGEHHLWKWEGPEQLFRVTDFFPHPGFNKDLSANDHNDDIMLIRLPRQARLSPAVQPLNLSQTCVSPGMQCLISGWGAVSSPKALFPVTLQCANISILENKLCHWAYPGHISDSMLCAGLWEGGRGSCQGDSGGPLVCNGTLAGVVSGGAEPCSRPRRPAVYTSVCHYLDWIQEIMEN

SEQ ID NO: 31575 - protein, 61 aa, Homo sapiens
MKLGLLCALLSLLAGICGSALESTTSGNGRVRSSCSGLRTSSPTLASTRTSAPMTTMMTSC

SEQ ID NO: 31576 - protein, 1044 aa, Homo sapiens
MKPGCAAGSPGNEWIFFSTDEITTRYRNTMSNGGLQRSVILSALILLRAVTGFSGDGRAIWSKNPNFTPVNESQLFLYDTFPKNFFWGIGTGALQVEGSWKKDGKGPSIWDHFIHTHLKNVSSTNGSSDSYIFLEKDLSALDFIGVSFYQFSISWPRLFPDGIVTVANAKGLQYYSTLLDALVLRNIEPIVTLYHWDLPLALQEKYGGWKNDTIIDIFNDYATYCFQMFGDRVKYWITIHNPYLVAWHGYGTGMHAPGEKGNLAAVYTVGHNLIKAHSKVWHNYNTHFRPHQKGWLSITLGSHWIEPNRSENTMDIFKCQQSMVSVLGWFANPIHGDGDYPEGMRKKLFSVLPIFSEAEKHEMRGTADFFAFSFGPNNFKPLNTMAKMGQNVSLNLREALNWIKLEYNNPRILIAENGWFTDSRVKTEDTTAIYMMKNFLSQVLQAIRLDEIRVFGYTAWSLLDGFEWQDAYTIRRGLFYVDFNSKQKERKPKSSAHYYKQIIRENGFSLKESTPDVQGQFPCDFSWGVTESVLKPESVASSPQFSDPHLYVWNATGNRLLHRVEGVRLKTRPAQCTDFVNIKKQLEMLARMKVTHYRFALDWASVLPTGNLSAVNRQALRYYRCVVSEGLKLGISAMVTLYYPTHAHLGLPEPLLHADGWLNPSTAEAFQAYAGLCFQELGDLVKLWITINEPNRLSDIYNRSGNDTYGAAHNLLVAHALAWRLYDRQFRPSQRGAVSLSLHADWAEPANPYADSHWRAAERFLQFEIAWFAEPLFKTGDYPAAMREYIASKHRRGLSSSALPRLTEAERRLLKGTVDFCALNHFTTRFVMHEQLAGSRYDSDRDIQFLQDITRLSSPTRLAVIPWGVRKLLRWVRRNYGDMDIYITASGIDDQALEDDRLRKYYLGKYLQEVLKAYLIDKVRIKGYYAFKLAEEKSKPRFGFFTSDFKAKSSIQFYNKVISSRGFPFENSSSRCSQTQENTECTVCLFLVQKKPLIFLGCCFFSTLVLLLSIAIFQRQKRRKFWKAKNLQHIPLKKGKRVVS

SEQ ID NO: 31577 - protein, 244 aa, Homo sapiens
MKKLMVVLSLIAAAWAEEQNKLVHGGPCDKTSHPYQAALYTSGHLLCGGVLIHPLWVLTAAHCKKPNLQVFLGKHNLRQRESSQEQSSVVRAVIHPDYDAASHDQDIMLLRLARPAKLSELIQPLPLERDCSANTTSCHILGWGKTADGDFPDTIQCAYIHLVSREECEHAYPGQITQNMLCAGDEKYGKDSCQGDSGGPLVCGDHLRGLVSWGNIPCGSKEKPGVYTNVCRYTNWIQKTIQAK

SEQ ID NO: 31578 - protein, 137 aa, Homo sapiens
MLLRLARPAKLSELIQPLPLERDCSANTTSCHILGWGKTADGDFPDTIQCAYIHLVSREECEHAYPGQITQNMLCAGDEKYGKDSCQGDSGGPLVCGDHLRGLVSWGNIPCGSKEKPGVYTNVCRYTNWIQKTIQAK

SEQ ID NO: 31579 - protein, 40 aa, Homo sapiens
MKKLMVVLSLIAAGIFRSSWGSITFGKGRVPRSRVLLSGL

SEQ ID NO: 31580 - protein, 538 aa, Homo sapiens
MFFLYTDFFLSLVAVPAAAPVCQPKSATNGQPPAPAPTPTPRLSISSRATVVARMEGTSQGGLQTVMKWKTVVAIFVVVVVYLVTGGLVFRALEQPFESSQKNTIALEKAEFLRDHVCVSPQELETLIQHALDADNAGVSPIGNSSNNSSHWDLGSAFFFAGTVITTIGYGNIAPSTEGGKIFCILYAIFGIPLFGFLLAGIGDQLGTIFGKSIARVEKVFRKKQVSQTKIRVISTILFILAGCIVFVTIPAVIFKYIEGWTALESIYFVVVTLTTVGFGDFVAGGNAGINYREWYKPLVWFWILVGLAYFAAVLSMIGDWLRVLSKKTKEEVGEIKAHAAEWKANVTAEFRETRRRLSVEIHDKLQRAATIRSMERRRLGLDQRAHSLDMLSPEKRSVFAALDTGRFKASSQESINNRPNNLRLKGPEQLNKHGQGASEDNIINKFGSTSRLTKRKNKDLKKTLPEDVQKIYKTFRNYSLDEEKKEEETEKMCNSDNSSTAMLTDCIQQHAELENGMIPTDTKDREPENNSLLEDRN

SEQ ID NO: 31581 - protein, 543 aa, Homo sapiens
MEDGFKGDRTEGCRSDSVAVPAAAPVCQPKSATNGQPPAPAPTPTPRLSISSRATVVARMEGTSQGGLQTVMKWKTVVAIFVVVVVYLVTGGLVFRALEQPFESSQKNTIALEKAEFLRDHVCVSPQELETLIQHALDADNAGVSPIGNSSNNSSHWDLGSAFFFAGTVITTIGYGNIAPSTEGGKIFCILYAIFGIPLFGFLLAGIGDQLGTIFGKSIARVEKVFRKKQVSQTKIRVISTILFILAGCIVFVTIPAVIFKYIEGWTALESIYFVVVTLTTVGFGDFVAGGNAGINYREWYKPLVWFWILVGLAYFAAVLSMIGDWLRVLSKKTKEEVGEIKAHAAEWKANVTAEFRETRRRLSVEIHDKLQRAATIRSMERRRLGLDQRAHSLDMLSPEKRSVFAALDTGRFKASSQESINNRPNNLRLKGPEQLNKHGQGASEDNIINKFGSTSRLTKRKNKDLKKTLPEDVQKIYKTFRNYSLDEEKKEEETEKMCNSDNSSTAMLTDCIQQHAELENGMIPTDTKDREPENNSLLEDRN

SEQ ID NO: 31582 - protein, 543 aa, Homo sapiens
MKFPIETPRKQVNWDPKVAVPAAAPVCQPKSATNGQPPAPAPTPTPRLSISSRATVVARMEGTSQGGLQTVMKWKTVVAIFVVVVVYLVTGGLVFRALEQPFESSQKNTIALEKAEFLRDHVCVSPQELETLIQHALDADNAGVSPIGNSSNNSSHWDLGSAFFFAGTVITTIGYGNIAPSTEGGKIFCILYAIFGIPLFGFLLAGIGDQLGTIFGKSIARVEKVFRKKQVSQTKIRVISTILFILAGCIVFVTIPAVIFKYIEGWTALESIYFVVVTLTTVGFGDFVAGGNAGINYREWYKPLVWFWILVGLAYFAAVLSMIGDWLRVLSKKTKEEVGEIKAHAAEWKANVTAEFRETRRRLSVEIHDKLQRAATIRSMERRRLGLDQRAHSLDMLSPEKRSVFAALDTGRFKASSQESINNRPNNLRLKGPEQLNKHGQGASEDNIINKFGSTSRLTKRKNKDLKKTLPEDVQKIYKTFRNYSLDEEKKEEETEKMCNSDNSSTAMLTDCIQQHAELENGMIPTDTKDREPENNSLLEDRN

SEQ ID NO: 31583 - protein, 1637 aa, Homo sapiens
MAGQGDCCVKVAVRIRPQLSKEKIEGCHICTSVTPGEPQVLLGKDKAFTYDFVFDLDTWQEQIYSTCVSKLIEGCFEGYNATVLAYGQTGAGKTYTMGTGFDMATSEEEQGIIPRAIAHLFGGIAERKRRAQEQGVAGPEFKVSAQFLELYNEEILDLFDSTRDPDTRHRRSNIKIHEDANGGIYTTGVTSRLIHSQEELIQCLKQGALSRTTASTQMNVQSSRSHAIFTIHLCQMRMCTQPDLVNEAVTGLPDGTPPSSEYETLTAKFHFVDLAGSERLKRTGATGERAKEGISINCGLLALGNVISALGDQSKKVVHVPYRDSKLTRLLQDSLGGNSQTIMIACVSPSDRDFMETLNTLKYANRARNIKNKVVVNQDKTSQQISALRAEIARLQMELMEYKAGKRVIGEDGAEGYSDLFRENAMLQKENGALRLRVKAMQEAIDAINNRVTQLMSQEANLLLAKAGDGNEAIGALIQNYIREIEELRTKLLESEAMNESLRRSLSRASARSPYSLGASPAAPAFGGSPASSMEDASEVIRRAKQDLERLKKKEVRQRRKSPEKEAFKKRAKLQQENSEETDENEAEEEEEERDESGCEEEEGREDEDEDSGSEESLVDSDSDPEEKEVNFQADLADLTCEIEIKQKLIDELENSQRRLQTLKHQYEEKLILLQNKIRDTQLERDRVLQNLSTMECYTEEKANKIKADYEKRLREMNRDLQKLQAAQKEHARLLKNQSRYERELKKLQAEVAEMKKAKVALMKQMREEQQRRRLVETKRNREIAQLKKEQRRQEFQIRALESQKRQQEMVLRRKTQEVSALRRLAKPMSERVAGRAGLKPPMLDSGAEVSASTTSSEAESGARSVSSIVRQWNRKINHFLGDHPAPTVNGTRPARKKFQKKGASQSFSKAARLKWQSLERRIIDIVMQRMTIVNLEADMERLIKKREELFLLQEALRRKRERLQAESPEEEKGLQELAEEIEVLAANIDYINDGITDCQATIVQLEETKEELDSTDTSVVISSCSLAEARLLLDNFLKASIDKGLQVAQKEAQIRLLEGRLRQTDMAGSSQNHLLLDALREKAEAHPELQALIYNVQQENGYASTDEEISEFSEGSFSQSFTMKGSTSHDDFKFKSEPKLSAQMKAVSAECLGPPLDISTKNITKSLASLVEIKEDGVGFSVRDPYYRDRVSRTVSLPTRGSTFPRQSRATETSPLTRRKSYDRGQPIRSTDVGFTPPSSPPTRPRNDRNVFSRLTSNQSQGSALDKSDDSDSSLSEVLRGIISPVGGAKGARTAPLQCVSMAEGHTKPILCLDATDELLFTGSKDRSCKMWNLVTGQEIAALKGHPNNVVSIKYCSHSGLVFSVSTSYIKVWDIRDSAKCIRTLTSSGQVISGDACAATSTRAITSAQGEHQINQIALSPSGTMLYAASGNAVRIWELSRFQPVGKLTGHIGPVMCLTVTQTASQHDLVVTGSKDHYVKMFELGECVTGTIGPTHNFEPPHYDGIECLAIQGDILFSGSRDNGIKKWDLDQQELIQQIPNAHKDWVCALAFIPGRPMLLSACRAGVIKVWNVDNFTPIGEIKGHDSPINAICTNAKHIFTASSDCRVKLWNYVPGLTPCLPRRVLAIKGRATTLP

SEQ ID NO: 31584 - protein, 1624 aa, Homo sapiens
MAGQGDCCVKVAVRIRPQLSKEKIEGCHICTSVTPGEPQVLLGKDKAFTYDFVFDLDTWQEQIYSTCVSKLIEGCFEGYNATVLAYGQTGAGKTYTMGTGFDMATSEEEQGIIPRAIAHLFGGIAERKRRAQEQGVAGPEFKVSAQFLELYNEEILDLFDSTRDPDTRHRRSNIKIHEDANGGIYTTGVTSRLIHSQEELIQCLKQGALSRTTASTQMNVQSSRSHAIFTIHLCQMRMCTQPDLVNEAVTGLPDGTPPSSEYETLTAKFHFVDLAGSERLKRTGATGERAKEGISINCGLLALGNVISALGDQSKKVVHVPYRDSKLTRLLQDSLGGNSQTIMIACVSPSDRDFMETLNTLKYANRARNIKNKVVVNQDKTSQQISALRAEIARLQMELMEYKAGKRVIGEDGAEGYSDLFRENAMLQKENGALRLRVKAMQEAIDAINNRVTQLMSQEANLLLAKAGDGNEAIGALIQNYIREIEELRTKLLESEAMNESLRRSLSRASARSPYSLGASPAAPAFGGSPASSMEDASEVIRRAKQDLERLKKKEVRQRRKSPEKEAFKKRAKLQQENSEETDENEAEEEEEERDESGCEEEEGREDEDEDSGSEESLVDSDSDPEEKEVNFQADLADLTCEIEIKQKLIDELENSQRRLQTLKHQYEEKLILLQNKIRDTQLERDRVLQNLSTMECYTEEKANKIKADYEKRLREMNRDLQKLQAAQKEHARLLKNQSRYERELKKLQAEVAEMKKAKVALMKQMREEQQRRRLVETKRNREIAQLKKEQRRQEFQIRALESQKRQQEMVLRRKTQEVSALRRLAKPMSERVAGRAGLKPPMLDSGAEVSASTTSSEAESGARSVSSIVRQWNRKINHFLGDHPAPTVNGTRPARKKFQKKGASQSFSKAARLKWQSLERRIIDIVMQRMTIVNLEADMERLIKKREELFLLQEALRRKRERLQAESPEEEKGLQELAEEIEVLAANIDYINDGITDCQATIVQLEETKEELDSTDTSVVISSCSLAEARLLLDNFLKASIDKGLQVAQKEAQIRLLEGRLRQTDMAGSSQNHLLLDALREKAEAHPELQALIYNVQQENGYASTDEEISEFSEGSFSQSFTMKGSTSHDDFKFKSEPKLSAQMKAVSAECLGPPLDISTKNITKSLASLVEIKEDGVGFSVRDPYYRDRVSRTVSLPTRGSTFPRQSRATETSPLTRRKSYDRGQPIRSTDVGFTPPSSPPTRPRNDRNVFSRLTSNQSQGSALDKGIISPVGGAKGARTAPLQCVSMAEGHTKPILCLDATDELLFTGSKDRSCKMWNLVTGQEIAALKGHPNNVVSIKYCSHSGLVFSVSTSYIKVWDIRDSAKCIRTLTSSGQVISGDACAATSTRAITSAQGEHQINQIALSPSGTMLYAASGNAVRIWELSRFQPVGKLTGHIGPVMCLTVTQTASQHDLVVTGSKDHYVKMFELGECVTGTIGPTHNFEPPHYDGIECLAIQGDILFSGSRDNGIKKWDLDQQELIQQIPNAHKDWVCALAFIPGRPMLLSACRAGVIKVWNVDNFTPIGEIKGHDSPINAICTNAKHIFTASSDCRVKLWNYVPGLTPCLPRRVLAIKGRATTLP

SEQ ID NO: 31585 - protein, 1610 aa, Homo sapiens
MAGQGDCCVKVAVRIRPQLSKEKIEGCHICTSVTPGEPQVLLGKDKAFTYDFVFDLDTWQEQIYSTCVSKLIEGCFEGYNATVLAYGQTGAGKTYTMGTGFDMATSEEEQGIIPRAIAHLFGGIAERKRRAQEQGVAGPEFKVSAQFLELYNEEILDLFDSTRDPDTRHRRSNIKIHEDANGGIYTTGVTSRLIHSQEELIQCLKQGALSRTTASTQMNVQSSRSHAIFTIHLCQMRMCTQPDLVNEAVTGLPDGTPPSSEYETLTAKFHFVDLAGSERLKRTGATGERAKEGISINCGLLALGNVISALGDQSKKVVHVPYRDSKLTRLLQDSLGGNSQTIMIACVSPSDRDFMETLNTLKYANRARNIKNKVVVNQDKTSQQISALRAEIARLQMELMEYKAGKRVIGEDGAEGYSDLFRENAMLQKENGALRLRVKAMQEAIDAINNRVTQLMSQEANLLLAKAGDGNEAIGALIQNYIREIEELRTKLLESEAMNESLRRSLSRASARSPYSLGASPAAPAFGGSPASSMEDASEVIRRAKQDLERLKKKEVRQRRKSPEKEAFKKRAKLQQENSEETDENEAEEEEEERDESGCEEEEGREDEDEDSGSEESLVDSDSDPEEKEVNFQADLADLTCEIEIKQKLIDELENSQRRLQTLKHQYEEKLILLQNKIRDTQLERDRVLQNLSTMECYTEEKANKIKADYEKRLREMNRDLQKLQAAQKEHARLLKNQSRYERELKKLQAEVAEMKKAKVALMKQMREEQQRRRLVETKRNREIAQLKKEQRRQEFQIRALESQKRQQEMVLRRKTQEVSALRRLAKPMSERVAGRAGLKPPMLDSGAEVSASTTSSEAESGARSVSSIVRQWNRKINHFLGDHPAPTVNGTRPARKKFQKKGASQSFSKAARLKWQSLERRIIDIVMQRMTIVNLEADMERLIKKREELFLLQEALRRKRERLQAESPEEEKGLQELAEEIEVLAANIDYINDGITDCQATIVQLEETKEELDSTDTSVVISSCSLAEARLLLDNFLKASIDKGLQVAQKEAQIRLLEGRLRQTDMAGSSQNHLLLDALREKAEAHPELQALIYNVQQENGYASTDEEISEFSEGSFSQSFTMKGSTSHDDFKFKSEPKLSAQMKAVSAECLGPPLDISTKNITKSLASLVEIKEDGVGFSVRDPYYRDRVSRTVSLPTRGSTFPRQSRATETSPLTRRKSYDRGQPIRSTDVGFTPPSSPPTRPRNDRNVFSRLTSNQSQGSALDKGIISPVGGAKGARTAPLQCVSMAEGHTKPILCLDATDELLFTGSKDRSCKMWNLVTGQEIAALKGHPNNVVSIKYCSHSGLVFSVSTSYIKVWDIRDSAKCIRTLTSSGQVISGDACAATSTRAITSAQGEHQINQIALSPSGTMLYAASGNAVRIWELSRFQPVGKLTGHIGPVMCLTVTQTASQHDLVVTGSKDHYVKMFELGECVTGTIGPTHNFEPPHYDGIECLAIQGDILFSGSRDNGIKKWDLDQQELIQQIPNAHKDWVCALAFIPGRPMLLSACRAGVIKVWNVDNFTPIGEIKGHDSPINAICTNAKHIFTASSDLTVKFWSVRRLPHSGPP

SEQ ID NO: 31586 - protein, 1623 aa, Homo sapiens
MAGQGDCCVKVAVRIRPQLSKEKIEGCHICTSVTPGEPQVLLGKDKAFTYDFVFDLDTWQEQIYSTCVSKLIEGCFEGYNATVLAYGQTGAGKTYTMGTGFDMATSEEEQGIIPRAIAHLFGGIAERKRRAQEQGVAGPEFKVSAQFLELYNEEILDLFDSTRDPDTRHRRSNIKIHEDANGGIYTTGVTSRLIHSQEELIQCLKQGALSRTTASTQMNVQSSRSHAIFTIHLCQMRMCTQPDLVNEAVTGLPDGTPPSSEYETLTAKFHFVDLAGSERLKRTGATGERAKEGISINCGLLALGNVISALGDQSKKVVHVPYRDSKLTRLLQDSLGGNSQTIMIACVSPSDRDFMETLNTLKYANRARNIKNKVVVNQDKTSQQISALRAEIARLQMELMEYKAGKRVIGEDGAEGYSDLFRENAMLQKENGALRLRVKAMQEAIDAINNRVTQLMSQEANLLLAKAGDGNEAIGALIQNYIREIEELRTKLLESEAMNESLRRSLSRASARSPYSLGASPAAPAFGGSPASSMEDASEVIRRAKQDLERLKKKEVRQRRKSPEKEAFKKRAKLQQENSEETDENEAEEEEEERDESGCEEEEGREDEDEDSGSEESLVDSDSDPEEKEVNFQADLADLTCEIEIKQKLIDELENSQRRLQTLKHQYEEKLILLQNKIRDTQLERDRVLQNLSTMECYTEEKANKIKADYEKRLREMNRDLQKLQAAQKEHARLLKNQSRYERELKKLQAEVAEMKKAKVALMKQMREEQQRRRLVETKRNREIAQLKKEQRRQEFQIRALESQKRQQEMVLRRKTQEVSALRRLAKPMSERVAGRAGLKPPMLDSGAEVSASTTSSEAESGARSVSSIVRQWNRKINHFLGDHPAPTVNGTRPARKKFQKKGASQSFSKAARLKWQSLERRIIDIVMQRMTIVNLEADMERLIKKREELFLLQEALRRKRERLQAESPEEEKGLQELAEEIEVLAANIDYINDGITDCQATIVQLEETKEELDSTDTSVVISSCSLAEARLLLDNFLKASIDKGLQVAQKEAQIRLLEGRLRQTDMAGSSQNHLLLDALREKAEAHPELQALIYNVQQENGYASTDEEISEFSEGSFSQSFTMKGSTSHDDFKFKSEPKLSAQMKAVSAECLGPPLDISTKNITKSLASLVEIKEDGVGFSVRDPYYRDRVSRTVSLPTRGSTFPRQSRATETSPLTRRKSYDRGQPIRSTDVGFTPPSSPPTRPRNDRNVFSRLTSNQSQGSALDKSDDSDSSLSEVLRGIISPVGGAKGARTAPLQCVSMAEGHTKPILCLDATDELLFTGSKDRSCKMWNLVTGQEIAALKGHPNNVVSIKYCSHSGLVFSVSTSYIKVWDIRDSAKCIRTLTSSGQVISGDACAATSTRAITSAQGEHQINQIALSPSGTMLYAASGNAVRIWELSRFQPVGKLTGHIGPVMCLTVTQTASQHDLVVTGSKDHYVKMFELGECVTGTIGPTHNFEPPHYDGIECLAIQGDILFSGSRDNGIKKWDLDQQELIQQIPNAHKDWVCALAFIPGRPMLLSACRAGVIKVWNVDNFTPIGEIKGHDSPINAICTNAKHIFTASSDLTVKFWSVRRLPHSGPP

SEQ ID NO: 31587 - protein, 757 aa, Homo sapiens
MLSLLVWILTLSDTFSQGTQTRFSQEPADQTVVAGQRAVLPCVLLNYSGIVQWTKDGLALGMGQGLKAWPRYRVVGSADAGQYNLEITDAELSDDASYECQATEAALRSRRAKLTVLIPPEDTRIDGGPVILLQAGTPHNLTCRAFNAKPAATIIWFRDGTQQEGAVASTELLKDGKRETTVSQLLINPTDLDIGRVFTCRSMNEAIPSGKETSIELDVHHPPTVTLSIEPQTVQEGERVVFTCQATANPEILGYRWAKGGFLIEDAHESRYETNVDYSFFTEPVSCEVHNKVGSTNVSTLVNVHFAPRIVVDPKPTTTDIGSDVTLTCVWVGNPPLTLTWTKKDSNMVLSNSNQLLLKSVTQADAGTYTCRAIVPRIGVAEREVPLYVNGPPIISSEAVQYAVRGDGGKVECFIGSTPPPDRIAWAWKENFLEVGTLERYTVERTNSGSGVLSTLTINNVMEADFQTHYNCTAWNSFGPGTAIIQLEEREVLPVGIIAGATIGASILLIFFFIALVFFLYRRRKGSRKDVTLRKLDIKVETVNREPLTMHSDREDDTASVSTATRVMKAIYSSFKDDVDLKQDLRCDTIDTREEYEMKDPTNGYYNVRAHEDRPSSRAVLYADYRAPGPARFDGRPSSRLSHSSGYAQLNTYSRGPASDYGPEPTPPGPAAPAGTDTTSQLSYENYEKFNSHPFPGAAGYPTYRLGYPQAPPSGLERTPYEAYDPIGKYATATRFSYTSQHSDYGQRFQQRMQTHV

SEQ ID NO: 31588 - protein, 773 aa, Homo sapiens
MLSLLVWILTLSDTFSQGTQTRFSQEPADQTVVAGQRAVLPCVLLNYSGIVQWTKDGLALGMGQGLKAWPRYRVVGSADAGQYNLEITDAELSDDASYECQATEAALRSRRAKLTVLIPPEDTRIDGGPVILLQAGTPHNLTCRAFNAKPAATIIWFRDGTQQEGAVASTELLKDGKRETTVSQLLINPTDLDIGRVFTCRSMNEAIPSGKETSIELDVHHPPTVTLSIEPQTVQEGERVVFTCQATANPEILGYRWAKGGFLIEDAHESRYETNVDYSFFTEPVSCEVHNKVGSTNVSTLVNVHFAPRIVVDPKPTTTDIGSDVTLTCVWVGNPPLTLTWTKKDSNMGPRPPGSPPEAALSAQVLSNSNQLLLKSVTQADAGTYTCRAIVPRIGVAEREVPLYVNGPPIISSEAVQYAVRGDGGKVECFIGSTPPPDRIAWAWKENFLEVGTLERYTVERTNSGSGVLSTLTINNVMEADFQTHYNCTAWNSFGPGTAIIQLEEREVLPVGIIAGATIGASILLIFFFIALVFFLYRRRKGSRKDVTLRKLDIKVETVNREPLTMHSDREDDTASVSTATRVMKAIYSSFKDDVDLKQDLRCDTIDTREEYEMKDPTNGYYNVRAHEDRPSSRAVLYADYRAPGPARFDGRPSSRLSHSSGYAQLNTYSRGPASDYGPEPTPPGPAAPAGTDTTSQLSYENYEKFNSHPFPGAAGYPTYRLGYPQAPPSGLERTPYEAYDPIGKYATATRFSYTSQHSDYGQRFQQRMQTHV

SEQ ID NO: 31589 - protein, 654 aa, Homo sapiens
MLSLLVWILTLSDTFSQGTQTRFSQEPADQTVVAGQRAVLPCVLLNYSGIVQWTKDGLALGMGQGLKAWPRYRVVGSADAGQYNLEITDAELSDDASYECQATEAALRSRRAKLTVLNPPTVTLSIEPQTVQEGERVVFTCQATANPEILGYRWAKGGFLIEDAHESRYETNVDYSFFTEPVSCEVHNKVGSTNVSTLVNVHFAPRIVVDPKPTTTDIGSDVTLTCVWVGNPPLTLTWTKKDSNMVLSNSNQLLLKSVTQADAGTYTCRAIVPRIGVAEREVPLYVNGPPIISSEAVQYAVRGDGGKVECFIGSTPPPDRIAWAWKENFLEVGTLERYTVERTNSGSGVLSTLTINNVMEADFQTHYNCTAWNSFGPGTAIIQLEEREVLPVGIIAGATIGASILLIFFFIALVFFLYRRRKGSRKDVTLRKLDIKVETVNREPLTMHSDREDDTASVSTATRVMKAIYSSFKDDVDLKQDLRCDTIDTREEYEMKDPTNGYYNVRAHEDRPSSRAVLYADYRAPGPARFDGRPSSRLSHSSGYAQLNTYSRGPASDYGPEPTPPGPAAPAGTDTTSQLSYENYEKFNSHPFPGAAGYPTYRLGYPQAPPSGLERTPYEAYDPIGKYATATRFSYTSQHSDYGQRFQQRMQTHV

SEQ ID NO: 31590 - protein, 1816 aa, Homo sapiens
MSGASVKVAVRVRPFNSRETSKESKCIIQMQGNSTSIINPKNPKEAPKSFSFDYSYWSHTSPEDPCFASQNRVYNDIGKEMLLHAFEGYNVCIFAYGQTGAGKSYTMMGKQEESQAGIIPQLCEELFEKINDNCNEEMSYSVEVSYMEIYCERVRDLLNPKNKGNLRVREHPLLGPYVEDLSKLAVTSYTDIADLMDAGNKARTVAATNMNETSSRSHAVFTIVFTQKKHDNETNLSTEKVSKISLVDLAGSERADSTGAKGTRLKEGANINKSLTTLGKVISALAEVDNCTSKSKKKKKTDFIPYRDSVLTWLLRENLGGNSRTAMVAALSPADINYDETLSTLRYADRAKQIKCNAVINEDPNAKLVRELKEEVTRLKDLLRAQGLGDIIDIDPLIDDYSGSGSKYLKDFQNNKHRYLLASENQRPGHFSTASMGSLTSSPSSCSLSSQVGLTSVTSIQERIMSTPGGEEAIERLKESEKIIAELNETWEEKLRKTEAIRMEREALLAEMGVAIREDGGTLGVFSPKKTPHLVNLNEDPLMSECLLYYIKDGITRVGQADAERRQDIVLSGAHIKEEHCIFRSERSNSGEVIVTLEPCERSETYVNGKRVSQPVQLRSGNRIIMGKNHVFRFNHPEQARAEREKTPSAETPSEPVDWTFAQRELLEKQGIDMKQEMEKRLQEMEILYKKEKEEADLLLEQQRLDYESKLQALQKQVETRSLAAETTEEEEEEEEVPWTQHEFELAQWAFRKWKSHQFTSLRDLLWGNAVYLKEANAISVELKKKVQFQFVLLTDTLYSPLPPELLPTEMEKTHEDRPFPRTVVAVEVQDLKNGATHYWSLEKLKQRLDLMREMYDRAGEMASSAQDESETTVTGSDPFYDRFHWFKLVGSSPIFHGCVNERLADRTPSPTFSTADSDITELADEQQDEMEDFDDEAFVDDAGSDAGTEEGSDLFSDGHDPFYDRSPWFILVGRAFVYLSNLLYPVPLIHRVAIVSEKGEVRGFLRVAVQAIAADEEAPDYGSGIRQSGTAKISFDNEYFNQSDFSSVAMTRSGLSLEELRIVEGQGQSSEVITPPEEISRINDLDLKSSTLLDGKMVMEGFSEEIGNHLKLGSAFTFRVTVLQASGILPEYADIFCQFNFLHRHDEAFSTEPLKNNGRGSPLAFYHVQNIAVEITESFVDYIKTKPIVFEVFGHYQQHPLHLQGQELNSPPQPCRRFFPPPMPLSKPVPATKLNTMSKTSLGQSMSKYDLLVWFEISELEPTGEYIPAVVDHTAGLPCQGTFLLHQGIQRRITVTIIHEKGSELHWKDVRELVVGRIRNKPEVDEAAVDAILSLNIISAKYLKSSHNSSRTFYRFEAVWDSSLHNSLLLNRVTPYGEKIYMTLSAYLELDHCIQPAVITKDVCMVFYSRDAKISPPRSLRSLFGSGYSKSPDSNRVTGIYELSLCKMSDTGSPGMQRRRRKILDTSVAYVRGEENLAGWRPRGDSLILEHQWELEKLELLHEVEKTRHFLLLRERLGDSIPKSLSDSLSPSLSSGTLSTSTSISSQISTTTFESAITPSESSGYDSGDIESLVDREKELATKCLQLLTHTFNREFSQVHGSVSDCKLSDISPIGRDPSESSFSSATLTPSSTCPSLVDSRSNSLDQKTPEANSRASSPCPEFEQFQIVPAVETPYLARAGKNEFLNLVPDIEEIRPSSVVSKKGYLHFKEPLYSNWAKHFVVVRRPYVFIYNSDKDPVERGIINLSTAQVEYSEDQQAMVKTPNTFAVCTKHRGVLLQALNDKDMNDWLYAFNPLLAGTIRSKLSRRCPSQSKY

SEQ ID NO: 31591 - protein, 1770 aa, Homo sapiens
MSGASVKVAVRVRPFNSRETSKESKCIIQMQGNSTSIINPKNPKEAPKSFSFDYSYWSHTSPEDPCFASQNRVYNDIGKEMLLHAFEGYNVCIFAYGQTGAGKSYTMMGKQEESQAGIIPQLCEELFEKINDNCNEEMSYSVEVSYMEIYCERVRDLLNPKNKGNLRVREHPLLGPYVEDLSKLAVTSYTDIADLMDAGNKARTVAATNMNETSSRSHAVFTIVFTQKKHDNETNLSTEKVSKISLVDLAGSERADSTGAKGTRLKEGANINKSLTTLGKVISALAEVSKKKKKTDFIPYRDSVLTWLLRENLGGNSRTAMVAALSPADINYDETLSTLRYADRAKQIKCNAVINEDPNAKLVRELKEEVTRLKDLLRAQGLGDIIDTSMGSLTSSPSSCSLSSQVGLTSVTSIQERIMSTPGGEEAIERLKESEKIIAELNETWEEKLRKTEAIRMEREALLAEMGVAIREDGGTLGVFSPKKTPHLVNLNEDPLMSECLLYYIKDGITRVGQADAERRQDIVLSGAHIKEEHCIFRSERSNSGEVIVTLEPCERSETYVNGKRVSQPVQLRSGNRIIMGKNHVFRFNHPEQARAEREKTPSAETPSEPVDWTFAQRELLEKQGIDMKQEMEKRLQEMEILYKKEKEEADLLLEQQRLDYESKLQALQKQVETRSLAAETTEEEEEEEEVPWTQHEFELAQWAFRKWKSHQFTSLRDLLWGNAVYLKEANAISVELKKKVQFQFVLLTDTLYSPLPPELLPTEMEKTHEDRPFPRTVVAVEVQDLKNGATHYWSLEKLKQRLDLMREMYDRAGEMASSAQDESETTVTGSDPFYDRFHWFKLVGSSPIFHGCVNERLADRTPSPTFSTADSDITELADEQQDEMEDFDDEAFVDDAGSDAGTEEGSDLFSDGHDPFYDRSPWFILVGRAFVYLSNLLYPVPLIHRVAIVSEKGEVRGFLRVAVQAIAADEEAPDYGSGIRQSGTAKISFDNEYFNQSDFSSVAMTRSGLSLEELRIVEGQGQSSEVITPPEEISRINDLDLKSSTLLDGKMVMEGFSEEIGNHLKLGSAFTFRVTVLQASGILPEYADIFCQFNFLHRHDEAFSTEPLKNNGRGSPLAFYHVQNIAVEITESFVDYIKTKPIVFEVFGHYQQHPLHLQGQELNSPPQPCRRFFPPPMPLSKPVPATKLNTMSKTSLGQSMSKYDLLVWFEISELEPTGEYIPAVVDHTAGLPCQGTFLLHQGIQRRITVTIIHEKGSELHWKDVRELVVGRIRNKPEVDEAAVDAILSLNIISAKYLKSSHNSSRTFYRFEAVWDSSLHNSLLLNRVTPYGEKIYMTLSAYLELDHCIQPAVITKDVCMVFYSRDAKISPPRSLRSLFGSGYSKSPDSNRVTGIYELSLCKMSDTGSPGMQRRRRKILDTSVAYVRGEENLAGWRPRGDSLILEHQWELEKLELLHEVEKTRHFLLLRERLGDSIPKSLSDSLSPSLSSGTLSTSTSISSQISTTTFESAITPSESSGYDSGDIESLVDREKELATKCLQLLTHTFNREFSQVHGSVSDCKLSDISPIGRDPSESSFSSATLTPSSTCPSLVDSRSNSLDQKTPEANSRASSPCPEFEQFQIVPAVETPYLARAGKNEFLNLVPDIEEIRPSSVVSKKGYLHFKEPLYSNWAKHFVVVRRPYVFIYNSDKDPVERGIINLSTAQVEYSEDQQAMVKTPNTFAVCTKHRGVLLQALNDKDMNDWLYAFNPLLAGTIRSKLSRRCPSQSKY

SEQ ID NO: 31592 - protein, 1153 aa, Homo sapiens
MSGASVKVAVRVRPFNSRETSKESKCIIQMQGNSTSIINPKNPKEAPKSFSFDYSYWSHTSPEDPCFASQNRVYNDIGKEMLLHAFEGYNVCIFAYGQTGAGKSYTMMGKQEESQAGIIPQLCEELFEKINDNCNEEMSYSVEVSYMEIYCERVRDLLNPKNKGNLRVREHPLLGPYVEDLSKLAVTSYTDIADLMDAGNKARTVAATNMNETSSRSHAVFTIVFTQKKHDNETNLSTEKVSKISLVDLAGSERADSTGAKGTRLKEGANINKSLTTLGKVISALAEVSKKKKKTDFIPYRDSVLTWLLRENLGGNSRTAMVAALSPADINYDETLSTLRYADRAKQIKCNAVINEDPNAKLVRELKEEVTRLKDLLRAQGLGDIIDTSMGSLTSSPSSCSLSSQVGLTSVTSIQERIMSTPGGEEAIERLKESEKIIAELNETWEEKLRKTEAIRMEREALLAEMGVAIREDGGTLGVFSPKKTPHLVNLNEDPLMSECLLYYIKDGITRVGQADAERRQDIVLSGAHIKEEHCIFRSERSNSGEVIVTLEPCERSETYVNGKRVSQPVQLRSGNRIIMGKNHVFRFNHPEQARAEREKTPSAETPSEPVDWTFAQRELLEKQGIDMKQEMEKRLQEMEILYKKEKEEADLLLEQQRLDADSDSGDDSDKRSCEESWKLITSLREKLPPSKLQTIVKKCGLPSSGKKREPIKMYQIPQRRRLSKDSKWVTISDLKIQAVKEICYEVALNDFRHSRQEIEALAIVKMKELCAMYGKKDPNERDSWRAVARDVWDTVGVGDEKIEDVMATGKGSTDVDDLKVHIDKLEDILQEVKKQNNMKDEEIKVLRNKMLKMEKVLPLIGSQEQKSPGSHKAKEPVGAGVSSTSENNVSKGDNGELAKEERVSQLMNGDPAFRRGRLRWMRQEQIRFKNLQQQEITKQLRRQNVPHRFIPPENRKPRFPFKSNPKHRNSWSPGTHIIITEDEVIELRIPKDDEARKGNKEESQEKGGKGAFKDPQFPWGSQGMRSQDHIQVSKQHINNQQQPPQLRWRSNSLNNGQPKSTRCQASASAESLNSHSGHPTADVQTFQAKRHIHQHRQSYCNYNTGGQLEGNAATSYQKQTDKPSHCSQFVTPPRMRRQFSAPNLKAGRETTV

SEQ ID NO: 31593 - protein, 1823 aa, Homo sapiens
MSGASVKVAVRVRPFNSRETSKESKCIIQMQGNSTSIINPKNPKEAPKSFSFDYSYWSHTSPEDPCFASQNRVYNDIGKEMLLHAFEGYNVCIFAYGQTGAGKSYTMMGKQEESQAGIIPQLCEELFEKINDNCNEEMSYSVEVSYMEIYCERVRDLLNPKNKGNLRVREHPLLGPYVEDLSKLAVTSYTDIADLMDAGNKARTVAATNMNETSSRSHAVFTIVFTQKKHDNETNLSTEKVSKISLVDLAGSERADSTGAKGTRLKEGANINKSLTTLGKVISALAEVDNCTSKSKKKKKTDFIPYRDSVLTWLLRENLGGNSRTAMVAALSPADINYDETLSTLRYADRAKQIKCNAVINEDPNAKLVRELKEEVTRLKDLLRAQGLGDIIDIDPLIDDYSGSGSKYLKDFQNNKHRYLLASENQRPGHFSTASMGSLTSSPSSCSLSSQVGLTSVTSIQERIMSTPGGEEAIERLKESEKIIAELNETWEEKLRKTEAIRMEREALLAEMGVAIREDGGTLGVFSPKKTPHLVNLNEDPLMSECLLYYIKDGITRVGQADAERRQDIVLSGAHIKEEHCIFRSERSNSGEVIVTLEPCERSETYVNGKRVSQPVQLRSGNRIIMGKNHVFRFNHPEQARAEREKTPSAETPSEPVDWTFAQRELLEKQGIDMKQEMEKRLQEMEILYKKEKEEADLLLEQQRLDYESKLQALQKQVETRSLAAETTEEEEEEEEVPWTQHEFELAQWAFRKWKSHQFTSLRDLLWGNAVYLKEANAISVELKKKVQFQFVLLTDTLYSPLPPELLPTEMEKTHEDRPFPRTVVAVEVQDLKNGATHYWSLEKLKQRLDLMREMYDRAGEMASSAQDESETTVTGSDPFYDRFHWFKLVGSSPIFHGCVNERLADRTPSPTFSTADSDITELADEQQDEMEDFDDEAFVDDAGSDAGTEEGSDLFSDGHDPFYDRSPWFILVGRAFVYLSNLLYPVPLIHRVAIVSEKGEVRGFLRVAVQAIAADEEAPDYGSGIRQSGTAKISFDNEYFNQSDFSSVAMTRSGLSLEELRIVEGQGQSSEVITPPEEISRINDLDLKSSTLLDGKMVMEGFSEEIGNHLKLGSAFTFRVTVLQASGILPEYADIFCQFNFLHRHDEAFSTEPLKNNGRGSPLAFYHVQNIAVEITESFVDYIKTKPIVFEVFGHYQQHPLHLQGQELNSPPQPCRRFFPPPMPLSKPVPATKLNTMSKTSLGQSMSKYDLLVWFEISELEPTGEYIPAVVDHTAGLPCQGTFLLHQGIQRRITVTIIHEKGSELHWKDVRELVVGRIRNKPEVDEAAVDAILSLNIISAKYLKSSHNSSRTFYRFEAVWDSSLHNSLLLNRVTPYGEKIYMTLSAYLELDHCIQPAVITKDVCMVFYSRDAKISPPRSLRSLFGSGYSKSPDSNRVTGIYELSLCKMSDTGSPGMQRRRRKILDTSVAYVRGEENLAGWRPRGDSLILEHQWELEKLELLHEVEKTRHFLLLRERLGDSIPKSLSDSLSPSLSSGTLSTSTSISSQISTTTFESAITPSESSGYDSGDIESLVDREKELATKCLQLLTHTFNREFSQVHGSVSDCKLSDISPIGRDPSESSFSSATLTPSSTCPSLVDSRSNSLDQKTPEANSRASSPCPEFEQFQIVPAVETPYLARAGKNEFLNLVPDIEEIRPSSVVSKKGYLHFKEPLYSNWAKHFVVVRRPYVFIYNSDKDPVERGIINLSTAQVEYSEDQQAMVKTPNTFAVCTKHRGVLLQALNDKDMNDWLYAFNPLLAGTIRPGHLASEIIREDKSVSFSCQ

SEQ ID NO: 31594 - protein, 419 aa, Homo sapiens
MWPGNAWRAALFWVPRGRRAQSALAQLRGILEGELEGIRGAGTWKSERVITSRQGPHIRVDGVSGGILNFCANNYLGLSSHPEVIQAGLQALEEFGAGLSSVRFICGTQSIHKNLEAKIARFHQREDAILYPSCYDANAGLFEALLTPEDAVLSDELNHASIIDGIRLCKAHKYRYRHLDMADLEAKLQEAQKHRLRLVATDGAFSMDGDIAPLQEICCLASRYGALVFMDECHATGFLGPTGRGTDELLGVMDQVTIINSTLGKALGGASGGYTTGPGPLVSLLRQRARPYLFSNSLPPAVVGCASKALDLLMGSNTIVQSMAAKTQRFRSKMEAAGFTISGASHPICPVMLGDARLASRMADDMLKRGIFVIGFSYPVVPKGKARIRVQISAVHSEEDIDRCVEAFVEVGRLHGALP

SEQ ID NO: 31595 - protein, 445 aa, Homo sapiens
MWPGNAWRAALFWVPRGRRAQSALAQLRGILEGELEGIRGAGTWKSERVITSRQGPHIRVDGVSGGPGTVIFPGLPLPHLSCCIHLLSFTSGILNFCANNYLGLSSHPEVIQAGLQALEEFGAGLSSVRFICGTQSIHKNLEAKIARFHQREDAILYPSCYDANAGLFEALLTPEDAVLSDELNHASIIDGIRLCKAHKYRYRHLDMADLEAKLQEAQKHRLRLVATDGAFSMDGDIAPLQEICCLASRYGALVFMDECHATGFLGPTGRGTDELLGVMDQVTIINSTLGKALGGASGGYTTGPGPLVSLLRQRARPYLFSNSLPPAVVGCASKALDLLMGSNTIVQSMAAKTQRFRSKMEAAGFTISGASHPICPVMLGDARLASRMADDMLKRGIFVIGFSYPVVPKGKARIRVQISAVHSEEDIDRCVEAFVEVGRLHGALP

SEQ ID NO: 31596 - protein, 672 aa, Homo sapiens
MESRKLISATDIQYSGSLLNSLNEQRGHGLFCDVTVIVEDRKFRAHKNILSASSTYFHQLFSVAGQVVELSFIRAEIFAEILNYIYSSKIVRVRSDLLDELIKSGQLLGVKFIAELGVPLSQVKSISGTAQDGNTEPLPPDSGDKNLVIQKSKDEAQDNGATIMPIITESFSLSAEDYEMKKIIVTDSDDDDDDVIFCSEILPTKETLPSNNTVAQVQSNPGPVAISDVAPSASNNSPPLTNITPTQKLPTPVNQATLSQTQGSEKLLVSSAPTHLTPNIILLNQTPLSTPPNVSSSLPNHMPSSINLLVQNQQTPNSAILTGNKANEEEEEEIIDDDDDTISSSPDSAVSNTSLVPQADTSQNTSFDGSLIQKMQIPTLLQEPLSNSLKISDIITRNTNDPGVGSKHLMEGQKIITLDTATEIEGLSTGCKVYANIGEDTYDIVIPVKDDPDEGEARLENEIPKTSGSEMANKRMKVKHDDHYELIVDGRVYYICIVCKRSYVCLTSLRRHFNIHSWEKKYPCRYCEKVFPLAEYRTKHEIHHTGERRYQCLACGKSFINYQFMSSHIKSVHSQDPSGDSKLYRLHPCRSLQIRQYAYLSDRSSTIPAMKDDGIGYKVDTGKEPPVGTTTSTQNKPMTWEDIFIQQENDSIFKQNVTDGSTEFEFIIPESY

SEQ ID NO: 31597 - protein, 382 aa, Homo sapiens
MRPGTALQAVLLAVLLVGLRAATGRLLSASDLDLRGGQPVCRGGTQRPCYKVIYFHDTSRRLNFEEAKEACRRDGGQLVSIESEDEQKLIEKFIENLLPSDGDFWIGLRRREEKQSNSTACQDLYAWTDGSISQFRNWYVDEPSCGSEVCVVMYHQPSAPAGIGGPYMFQWNDDRCNMKNNFICKYSDEKPAVPSREAEGEETELTTPVLPEETQEEDAKKTFKESREAALNLAYILIPSIPLLLLLVVTTVVCWVWICRKRKREQPDPSTKKQHTIWPSPHQGNSPDLEVYNVIRKQSEADLAETRPDLKNISFRVCSGEATPDDMSCDYDNMAVNPSESGFVTLVSVESGFVTNDIYEFSPDQMGRSKESGWVENEIYGY

SEQ ID NO: 31598 - protein, 374 aa, Homo sapiens
MRPGTALQAVLLAVLLVGLRAATGRLLSGQPVCRGGTQRPCYKVIYFHDTSRRLNFEEAKEACRRDGGQLVSIESEDEQKLIEKFIENLLPSDGDFWIGLRRREEKQSNSTACQDLYAWTDGSISQFRNWYVDEPSCGSEVCVVMYHQPSAPAGIGGPYMFQWNDDRCNMKNNFICKYSDEKPAVPSREAEGEETELTTPVLPEETQEEDAKKTFKESREAALNLAYILIPSIPLLLLLVVTTVVCWVWICRKRKREQPDPSTKKQHTIWPSPHQGNSPDLEVYNVIRKQSEADLAETRPDLKNISFRVCSGEATPDDMSCDYDNMAVNPSESGFVTLVSVESGFVTNDIYEFSPDQMGRSKESGWVENEIYGY

SEQ ID NO: 31599 - protein, 229 aa, Homo sapiens
MVTSGLGSGGVRRNKAIAQPARTFMLGLMAAYHNLEKPAVPSREAEGEETELTTPVLPEETQEEDAKKTFKESREAALNLAYILIPSIPLLLLLVVTTVVCWVWICRKRKREQPDPSTKKQHTIWPSPHQGNSPDLEVYNVIRKQSEADLAETRPDLKNISFRVCSGEATPDDMSCDYDNMAVNPSESGFVTLVSVESGFVTNDIYEFSPDQMGRSKESGWVENEIYGY

SEQ ID NO: 31600 - protein, 117 aa, Homo sapiens
MDMRVPAQLLGLLLLWFPGSRCDIQMTQSPSSVSASVGDRVTITCRASQGISSWLAWYQQKPGKAPKLLIYAASSLQSGVPSRFSGSGSGTDFTLTISSLQPEDFATYYCQQANSFP

SEQ ID NO: 31601 - protein, 198 aa, Homo sapiens
MNSGREPRTPRTLLSIADILAPRMVPRAPSAPQLPESGPGPTSPLCALEELTSKTFRGLDARALQPSEGRAGPDALGPGPFGRKRRKSRTAFTAQQVLELERRFVFQKYLAPSERDGLATRLGLANAQVVTWFQNRRAKLKRDVEEMRADVASLRALSPEVLCSLALPEGAPDPGLCLGPAGPDSRPHLSDEEIQVDD

SEQ ID NO: 31602 - protein, 194 aa, Homo sapiens
MGKRTSLEVSLGELGGEKCRGGRRSFPPLAASRPARPGGWRWARRDLCKTASRAENNSQACRPQRRAGPDALGPGPFGRKRRKSRTAFTAQQVLELERRFVFQKYLAPSERDGLATRLGLANAQVVTWFQNRRAKLKRDVEEMRADVASLRALSPEVLCSLALPEGAPDPGLCLGPAGPDSRPHLSDEEIQVDD

SEQ ID NO: 31603 - protein, 117 aa, Homo sapiens
MDMRVPAQLLGLLLLWLPGARCAIQLTQSPSSLSASVGDRVTITCRASQGISSALAWYQQKPGKAPKLLIYDASSLESGVPSRFSGSGSGTDFTLTISSLQPEDFATYYCQQFNSYP

SEQ ID NO: 31604 - protein, 697 aa, Homo sapiens
MGERAGSPGTDQERKAGKHHYSYLSDFETPQSSGRSSLVSSSPASVRRKNPKRQTSDGQVHHQAPRKPSPKGLPNRKGVRVGFRSQSLNREPLRKDTDLVTKRILSARLLKINELQNEVSELQVKLAELLKENKSLKRLQYRQEKALNKFEDAENEISQLIFRHNNEITALKERLRKSQEKERATEKRVKDTESELFRTKFSLQKLKEISEARHLPERDDLAKKLVSAELKLDDTERRIKELSKNLELSTNSFQRQLLAERKRAYEAHDENKVLQKEVQRLYHKLKEKERELDIKNIYSNRLPKSSPNKEKELALRKNAACQSDFADLCTKGVQTMEDFKPEEYPLTPETIMCYENKWEEPGHLTLDLQSQKQDRHGEAGILNPIMEREEKFVTDEELHVVKQEVEKLEDEWEREELDKKQKEKASLLEREEKPEWETGRYQLGMYPIQNMDKLQGEEEERLKREMLLAKLNEIDRELQDSRNLKYPVLPLLPDFESKLHSPERSPKTYRFSESSERLFNGHHLQDISFSTPKGEGQNSGNVRSPASPNEFAFGSYVPSFAKTSERSNPFSQKSSFLDFQRNSMEKLSKDGVDLITRKEKKANLMEQLFGASGSSTISSKSSDPNSVASSKGDIDPLNFLPGNKGSRDQEHDEDEGFFLSEGRSFNPNRHRLKHADDKPAVKAADSVEDEIEEVALR

SEQ ID NO: 31605 - protein, 105 aa, Homo sapiens
MSIYFPIHCPDYLRSAKMTEVMMNTQPMEEIGLSPRKDGLSYQIFPDPSDFDRCCKLKDRLPSIVVEPTEGEVESGELRWPPEEFLVQEDEQDNCEETAKENKEQ

SEQ ID NO: 31606 - protein, 115 aa, Homo sapiens
MEAPAQLLFLLLLWLPDTTGEIVLTQSPATLSLSPGERATLSCRASQSVSSYLAWYQQKPGQAPRLLIYDASNRATGIPARFSGSGPGTDFTLTISSLEPEDFAVYYCQQRSNWH

SEQ ID NO: 31607 - protein, 120 aa, Homo sapiens
MRLPAQLLGLLMLWVPGSSAEIVMTQTPLSLSITPGEQASMSCRSSQSLLHSDGYTYLYWFLQKARPVSTLLIYEVSNRFSGVPDRFSGSGSGTDFTLKISRVEAEDFGVYYCMQDAQDP

SEQ ID NO: 31608 - protein, 116 aa, Homo sapiens
METPAQLLFLLLLWLPDTTGEIVLTQSPGTLSLSPGERATLSCRASQSVSSSYLAWYQQKPGQAPRLLIYGASSRATGIPDRFSGSGSGTDFTLTISRLEPEDFAVYYCQQYGSSP

SEQ ID NO: 31609 - protein, 117 aa, Homo sapiens
MDMRVLAQLLGLLLLCFPGARCDIQMTQSPSSLSASVGDRVTITCRASQGISSWLAWYQQKPEKAPKSLIYAASSLQSGVPSRFSGSGSGTDFTLTISSLQPEDFATYYCQQYNSYP

SEQ ID NO: 31610 - protein, 99 aa, Homo sapiens
MAQGQRKFQAHKPAKSKTAAAASEKNRGPRKGGRVIAPKKARVVQQQKLKKNLEVGIRKKIEHDVVMKASSSLPKKLALLKAPAKKKGAAAATSSKTPS

SEQ ID NO: 31611 - protein, 1257 aa, Homo sapiens
MVVALRYVWPLLLCSPCLLIQIPEEYEGHHVMEPPVITEQSPRRLVVFPTDDISLKCEASGKPEVQFRWTRDGVHFKPKEELGVTVYQSPHSGSFTITGNNSNFAQRFQGIYRCFASNKLGTAMSHEIRLMAEGAPKWPKETVKPVEVEEGESVVLPCNPPPSAEPLRIYWMNSKILHIKQDERVTMGQNGNLYFANVLTSDNHSDYICHAHFPGTRTIIQKEPIDLRVKATNSMIDRKPRLLFPTNSSSHLVALQGQPLVLECIAEGFPTPTIKWLRPSGPMPADRVTYQNHNKTLQLLKVGEEDDGEYRCLAENSLGSARHAYYVTVEAAPYWLHKPQSHLYGPGETARLDCQVQGRPQPEVTWRINGIPVEELAKDQKYRIQRGALILSNVQPSDTMVTQCEARNRHGLLLANAYIYVVQLPAKILTADNQTYMAVQGSTAYLLCKAFGAPVPSVQWLDEDGTTVLQDERFFPYANGTLGIRDLQANDTGRYFCLAANDQNNVTIMANLKVKDATQITQGPRSTIEKKGSRVTFTCQASFDPSLQPSITWRGDGRDLQELGDSDKYFIEDGRLVIHSLDYSDQGNYSCVASTELDVVESRAQLLVVGSPGPVPRLVLSDLHLLTQSQVRVSWSPAEDHNAPIEKYDIEFEDKEMAPEKWYSLGKVPGNQTSTTLKLSPYVHYTFRVTAINKYGPGEPSPVSETVVTPEAAPEKNPVDVKGEGNETTNMVITWKPLRWMDWNAPQVQYRVQWRPQGTRGPWQEQIVSDPFLVVSNTSTFVPYEIKVQAVNSQGKGPEPQVTIGYSGEDYPQAIPELEGIEILNSSAVLVKWRPVDLAQVKGHLRGYNVTYWREGSQRKHSKRHIHKDHVVVPANTTSVILSGLRPYSSYHLEVQAFNGRGSGPASEFTFSTPEGVPGHPEALHLECQSNTSLLLRWQPPLSHNGVLTGYVLSYHPLDEGGKGQLSFNLRDPELRTHNLTDLSPHLRYRFQLQATTKEGPGEAIVREGGTMALSGISDFGNISATAGENYSVVSWVPKEGQCNFRFHILFKALGEEKGGASLSPQYVSYNQSSYTQWDLQPDTDYEIHLFKERMFRHQMAVKTNGTGRVRLPPAGFATEGWFIGFVSAIILLLLVLLILCFIKRSKGGKYSVKDKEDTQVDSEARPMKDETFGEYRSLESDNEEKAFGSSQPSLNGDIKPLGSDDSLADYGGSVDVQFNEDGSFIGQYSGKKEKEAAGGNDSSGATSPINPAVALE

SEQ ID NO: 31612 - protein, 1253 aa, Homo sapiens
MVVALRYVWPLLLCSPCLLIQIPEEYEGHHVMEPPVITEQSPRRLVVFPTDDISLKCEASGKPEVQFRWTRDGVHFKPKEELGVTVYQSPHSGSFTITGNNSNFAQRFQGIYRCFASNKLGTAMSHEIRLMAEGAPKWPKETVKPVEVEEGESVVLPCNPPPSAEPLRIYWMNSKILHIKQDERVTMGQNGNLYFANVLTSDNHSDYICHAHFPGTRTIIQKEPIDLRVKATNSMIDRKPRLLFPTNSSSHLVALQGQPLVLECIAEGFPTPTIKWLRPSGPMPADRVTYQNHNKTLQLLKVGEEDDGEYRCLAENSLGSARHAYYVTVEAAPYWLHKPQSHLYGPGETARLDCQVQGRPQPEVTWRINGIPVEELAKDQKYRIQRGALILSNVQPSDTMVTQCEARNRHGLLLANAYIYVVQLPAKILTADNQTYMAVQGSTAYLLCKAFGAPVPSVQWLDEDGTTVLQDERFFPYANGTLGIRDLQANDTGRYFCLAANDQNNVTIMANLKVKDATQITQGPRSTIEKKGSRVTFTCQASFDPSLQPSITWRGDGRDLQELGDSDKYFIEDGRLVIHSLDYSDQGNYSCVASTELDVVESRAQLLVVGSPGPVPRLVLSDLHLLTQSQVRVSWSPAEDHNAPIEKYDIEFEDKEMAPEKWYSLGKVPGNQTSTTLKLSPYVHYTFRVTAINKYGPGEPSPVSETVVTPEAAPEKNPVDVKGEGNETTNMVITWKPLRWMDWNAPQVQYRVQWRPQGTRGPWQEQIVSDPFLVVSNTSTFVPYEIKVQAVNSQGKGPEPQVTIGYSGEDYPQAIPELEGIEILNSSAVLVKWRPVDLAQVKGHLRGYNVTYWREGSQRKHSKRHIHKDHVVVPANTTSVILSGLRPYSSYHLEVQAFNGRGSGPASEFTFSTPEGVPGHPEALHLECQSNTSLLLRWQPPLSHNGVLTGYVLSYHPLDEGGKGQLSFNLRDPELRTHNLTDLSPHLRYRFQLQATTKEGPGEAIVREGGTMALSGISDFGNISATAGENYSVVSWVPKEGQCNFRFHILFKALGEEKGGASLSPQYVSYNQSSYTQWDLQPDTDYEIHLFKERMFRHQMAVKTNGTGRVRLPPAGFATEGWFIGFVSAIILLLLVLLILCFIKRSKGGKYSVKDKEDTQVDSEARPMKDETFGEYSDNEEKAFGSSQPSLNGDIKPLGSDDSLADYGGSVDVQFNEDGSFIGQYSGKKEKEAAGGNDSSGATSPINPAVALE

SEQ ID NO: 31613 - protein, 1248 aa, Homo sapiens
MVVALRYVWPLLLCSPCLLIQIPEELMEPPVITEQSPRRLVVFPTDDISLKCEASGKPEVQFRWTRDGVHFKPKEELGVTVYQSPHSGSFTITGNNSNFAQRFQGIYRCFASNKLGTAMSHEIRLMAEGAPKWPKETVKPVEVEEGESVVLPCNPPPSAEPLRIYWMNSKILHIKQDERVTMGQNGNLYFANVLTSDNHSDYICHAHFPGTRTIIQKEPIDLRVKATNSMIDRKPRLLFPTNSSSHLVALQGQPLVLECIAEGFPTPTIKWLRPSGPMPADRVTYQNHNKTLQLLKVGEEDDGEYRCLAENSLGSARHAYYVTVEAAPYWLHKPQSHLYGPGETARLDCQVQGRPQPEVTWRINGIPVEELAKDQKYRIQRGALILSNVQPSDTMVTQCEARNRHGLLLANAYIYVVQLPAKILTADNQTYMAVQGSTAYLLCKAFGAPVPSVQWLDEDGTTVLQDERFFPYANGTLGIRDLQANDTGRYFCLAANDQNNVTIMANLKVKDATQITQGPRSTIEKKGSRVTFTCQASFDPSLQPSITWRGDGRDLQELGDSDKYFIEDGRLVIHSLDYSDQGNYSCVASTELDVVESRAQLLVVGSPGPVPRLVLSDLHLLTQSQVRVSWSPAEDHNAPIEKYDIEFEDKEMAPEKWYSLGKVPGNQTSTTLKLSPYVHYTFRVTAINKYGPGEPSPVSETVVTPEAAPEKNPVDVKGEGNETTNMVITWKPLRWMDWNAPQVQYRVQWRPQGTRGPWQEQIVSDPFLVVSNTSTFVPYEIKVQAVNSQGKGPEPQVTIGYSGEDYPQAIPELEGIEILNSSAVLVKWRPVDLAQVKGHLRGYNVTYWREGSQRKHSKRHIHKDHVVVPANTTSVILSGLRPYSSYHLEVQAFNGRGSGPASEFTFSTPEGVPGHPEALHLECQSNTSLLLRWQPPLSHNGVLTGYVLSYHPLDEGGKGQLSFNLRDPELRTHNLTDLSPHLRYRFQLQATTKEGPGEAIVREGGTMALSGISDFGNISATAGENYSVVSWVPKEGQCNFRFHILFKALGEEKGGASLSPQYVSYNQSSYTQWDLQPDTDYEIHLFKERMFRHQMAVKTNGTGRVRLPPAGFATEGWFIGFVSAIILLLLVLLILCFIKRSKGGKYSVKDKEDTQVDSEARPMKDETFGEYSDNEEKAFGSSQPSLNGDIKPLGSDDSLADYGGSVDVQFNEDGSFIGQYSGKKEKEAAGGNDSSGATSPINPAVALE

SEQ ID NO: 31614 - protein, 1634 aa, Homo sapiens
MTSAQCPALACVMSPLRFWGPWPLLMWQLLWLLVKEAQPLEWVKDPLQLTSNPLGPPEPWSSHSSHFPRESPHAPTLPADPWDFDHLGPSASSEMPAPPQESTENLVPFLDTWDSAGELPLEPEQFLASQQDLKDKLSPQERLPVSPKKLKKDPAQRWSLAEIIGIIHQLSTPQSQKQTLQNEYSSTDTPYPGSLPPELRVKSDEPPGPSEQVGPSQFHLEPETQNPETLEDIQSSSLQQEAPAQLPQLLEEEPSSMQQEAPALPPESSMESLTLPNHEVSVQPPGEDQAYYHLPNITVKPADVEVTITSEPTNETESSQAQQETPIQFPEEVEPSATQQEAPIEPPVPPMEHELSISEQQQPVQPSESSREVESSPTQQETPGQPPEHHEVTVSPPGHHQTHHLASPSVSVKPPDVQLTIAAEPSAEVGTSLVHQEATTRLSGSGNDVEPPAIQHGGPPLLPESSEEAGPLAVQQETSFQSPEPINNENPSPTQQEAAAEHPQTAEEGESSLTHQEAPAQTPEFPNVVVAQPPEHSHLTQATVQPLDLGFTITPESMTEVELSPTMKETPTQPPKKVVPQLRVYQGVTNPTPGQDQAQHPVSPSVTVQLLDLGLTITPEPTTEVGHSTPPKRTIVSPKHPEVTLPHPDQVQTQHSHLTRATVQPLDLGFTITPKSMTEVEPSTALMTTAPPPGHPEVTLPPSDKGQAQHSHLTQATVQPLDLELTITTKPTTEVKPSPTTEETSTQLPDLGLAIIPEPTTETGHSTALEKTTAPRPDRVQTLHRSLTEVTGPPTELEPAQDSLVQSESYTQNKALTAPEEHKASTSTNICELCTCGDEMLSCIDLNPEQRLRQVPVPEPNTHNGTFTILNFQGNYISYIDGNVWKAYSWTEKLILRENNLTELHKDSFEGLLSLQYLDLSCNKIQSIERHTFEPLPFLKFINLSCNVITELSFGTFQAWHGMQFLHKLILNHNPLTTVEDPYLFKLPALKYLDMGTTLVPLTTLKNILMMTVELEKLIVPSHMACCLCQFKNSIEAVCKTVKLHCNSACLTNTTHCPEEASVGNPEGAFMKVLQARKNYTSTELIIEPEEPSDSSGINLSGFGSEQLDTNDESDVTSTLSYILPYFSAVNLDVKSLLLPFIKLPTTGNSLAKIQTVGKNRQRLNRVLMGPRSIQKRHFKEVGRQSIRREQGAQASVENTAEEKRLGSPAPRELKQPHTQQGPEKLAGNAVYTKPSFTQEHKAAVSVLKPFSKGAPSTSSPAKALPQVRDRWKDLTHAISILESAKARVTNMKTSKPIVHSRKKYRFHKTRSRMTHRTPKVKKSPKVRKKSYLSRLMLSNRLPFSAAKSLINSPSQGAFSSLRDLSPQENPFLEVSAPSEHFIENNNTKDTTARNAFEENVFMENTNMPEGTISENTNYNHPPEADSAGTAFNLGPTVKQTETKWEYNNVGTDLSPEPKSFNYPLLSSPGDQFEIQLTQQLQSVIPNNNVRRLIAHVIRTLKMDCSGAHVQVTCAKLVSRTGHLMKLLSGQQEVKASKIEWDTDQWKTENYINESTEAQSEQKEKSLEFTKELPGYGYTKKLILALIVTGILTILIILLCLIEICCHRRSLQEDEEGFSRDSEAPTEEESEALP

SEQ ID NO: 31615 - protein, 106 aa, Homo sapiens
MNRNILEEMLQYLLIDWIVGDQFEIQLNQQLWSLIPNNDVRRLVSHVIRTLKTDCTETHLQLACAKLISRTGLLMKLLSEQQELRTVSMTAWKPRMNRKSRSRMRS

SEQ ID NO: 31616 - protein, 837 aa, Homo sapiens
MAKAAASSSLEDLDLSGEEVQRLTSAFQDPEFRRMFSQYAEELTDPENRRRYEAEITALERERGVEVRFVHPEPGHVLRTSLDGARRCFVNVCSNALVGAPSSRPGSGGDRGAAPGSHWSLPYSLAPGREYAGRSSSRYMVYDVVFHPDALALARRHEGFRQMLDATALEAVEKQFGVKLDRRNAKTLKAKYKGTPEAAVLRTPLPGVIPARPDGEPKGPLPDFPYPYQYPAAPGPRAPSPPEAALQPAPTEPRYSVVQRHHVDLQDYRCSRDSAPSPVPHELVITIELPLLRSAEQAALEVTRKLLCLDSRKPDYRLRLSLPYPVDDGRGKAQFNKARRQLVVTLPVVLPAARREPAVAVAAAAPEESADRSGTDGQACASAREGEAGPARSRAEDGGHDTCVAGAAGSGVTTLGDPEVAPPPAAAGEERVPKPGEQDLSRHAGSPPGSVEEPSPGGENSPGGGGSPCLSSRSLAWGSSAGRESARGDSSVETREESEGTGGQRSACAMGGPGTKSGEPLCPPLLCNQDKETLTLLIQVPRIQPQSLQGDLNPLWYKLRFSAQDLVYSFFLQFAPENKLSTTEPVISISSNNAVIELAKSPESHGHWREWYYGVNNDSLEERLFVNEENVNEFLEEVLSSPFKQSMSLTPPLIEVLQVTDNKIQINAKLQECSNSDQLQGKEERVNEESHLTEKEYIEHCNTPTTDSDSSIAVKALQIDSFGLVTCFQQESLDVSQMILGKSQQPESKMQSEFIKEKSATCSNEEKDNLNESVITEEKETDGDHLSSLLNKTTVHNIPGFDSIKETNMQDGSVQVIKDHVTNCAFSFQNSLLYDLD

SEQ ID NO: 31617 - protein, 789 aa, Homo sapiens
MAKAAASSSLEDLDLSGEEVQRLTSAFQDPEFRRMFSQYAEELTDPENRRRYEAEITALERERGVEVRFVHPEPGHVLRTSLDGARRCFVNVCSNALVGAPSSRPGSGGDRGAAPGSHWSLPYSLAPGREYAGRSSSRYMVYDVVFHPDALALARRHEGFRQMLDATALEAVEKQFGVKLDRRNAKTLKAKYKGTPEAAVLRTPLPGVIPARPDGEPKGPLPDFPYPYQYPAAPGPRAPSPPEAALQPAPTEPRYSVVQRHHVDLQDYRCSRDSAPSPVPHELVITIELPLLRSAEQAALEVTRKLLCLDSRKPDYRLRLSLPYPVDDGRGKAQFNKARRQLVVTLPVVLPAARREPAVAVAAAAPEESADRSGTDGQACASAREGEAGPARSRAEDGGHDTCVAGAAGSGVTTLGDPEVAPPPAAAGEERVPKPGEQDLSRHAGSPPGSVEEPSPGGENSPGGGGSPCLSSRSLAWGSSAGRESARGDSSVETREESEGTGGQRSACAMGGPGTKSGEPLCPPLLCNQDKETLTLLIQVPRIQPQSLQGDLNPLWYKLRFSAQDLVYSFFLQFAPENKLSTTEPVISISSNNAVIELAKSPESHGHWREWYYGVNNDSLELQECSNSDQLQGKEERVNEESHLTEKEYIEHCNTPTTDSDSSIAVKALQIDSFGLVTCFQQESLDVSQMILGKSQQPESKMQSEFIKEKSATCSNEEKDNLNESVITEEKETDGDHLSSLLNKTTVHNIPGFDSIKETNMQDGSVQVIKDHVTNCAFSFQNSLLYDLD

SEQ ID NO: 31618 - protein, 740 aa, Homo sapiens
MPLAQLADPWQKMAVESPSDSAENGQQIMDEPMGEEEINPQTEEVSIKEIAITHHVKEGHEKADPSQFELLKVLGQGSFGKVFLVKKISGSDARQLYAMKVLKKATLKVRDRVRTKMERDILVEVNHPFIVKLHYAFQTEGKLYLILDFLRGGDLFTRLSKEVMFTEEDVKFYLAELALALDHLHSLGIIYRDLKPENILLDEEGHIKLTDFGLSKESIDHEKKAYSFCGTVEYMAPEVVNRRGHTQSADWWSFGVLMFEMLTGTLPFQGKDRKETMTMILKAKLGMPQFLSPEAQSLLRMLFKRNPANRLGAGPDGVEEIKRHSFFSTIDWNKLYRREIHPPFKPATGRPEDTFYFDPEFTAKTPKDSPGIPPSANAHQLFRGFSFVAITSDDESQAMQTVGVHSIVQQLHRNSIQFTDGYEVKEDIGVGSYSVCKRCIHKATNMEFAVKIIDKSKRDPTEEIEILLRYGQHPNIITLKDVYDDGKYVYVVTELMKGGELLDKILRQKFFSEREASAVLFTITKTVEYLHAQGVVHRDLKPSNILYVDESGNPESIRICDFGFAKQLRAENGLLMTPCYTANFVAPEVLKRQGYDAACDIWSLGVLLYTMLTGYTPFANGPDDTPEEILARIGSGKFSLSGGYWNSVSDTAKDLVSKMLHVDPHQRLTAALVLRHPWIVHWDQLPQYQLNRQDAPHLVKGAMAATYSALNRNQSPVLEPVGRSTLAQRRGIKKITSTAL

SEQ ID NO: 31619 - protein, 1020 aa, Homo sapiens
MRRFLRPGHDPVRERLKRDLFQFNKTVEHGFPHQPSALGYSPSLRILAIGTRSGAIKLYGAPGVEFMGLHQENNAVTQIHLLPGQCQLVTLLDDNSLHLWSLKVKGGASELQEDESFTLRGPPGAAPSATQITVVLPHSSCELLYLGTESGNVFVVQLPAFRALEDRTISSDAVLQRLPEEARHRRVFEMVEALQEHPRDPNQILIGYSRGLVVIWDLQGSRVLYHFLSSQQLENIWWQRDGRLLVSCHSDGSYCQWPVSSEAQQPEPLRSLVPYGPFPCKAITRILWLTTRQGLPFTIFQGGMPRASYGDRHCISVIHDGQQTAFDFTSRVIGFTVLTEADPAATFDDPYALVVLAEEELVVIDLQTAGWPPVQLPYLASLHCSAITCSHHVSNIPLKLWERIIAAGSRQNAHFSTMEWPIDGGTSLTPAPPQRDLLLTGHEDGTVRFWDASGVCLRLLYKLSTVRVFLTDTDPNENFSAQGEDEWPPLRKVGSFDPYSDDPRLGIQKIFLCKYSGYLAVAGTAGQVLVLELNDEAAEQAVEQVEADLLQDQEGYRWKGHERLAARSGPVRFEPGFQPFVLVQCQPPAVVTSLALHSEWRLVAFGTSHGFGLFDHQQRRQVFVKCTLHPSDQLALEGPLSRVKSLKKSLRQSFRRMRRSRVSSRKRHPAGPPGEAQEGSAKAERPGLQNMELAPVQRKIEARSAEDSFTGFVRTLYFADTYLKDSSRHCPSLWAGTNGGTIYAFSLRVPPAERRMDEPVRAEQAKEIQLMHRAPVVGILVLDGHSVPLPEPLEVAHDLSKSPDMQGSHQLLVVSEEQFKVFTLPKVSAKLKLKLTALEGSRVRRVSVAHFGSRRAEDYGEHHLAVLTNLGDIQVVSLPLLKPQVRYSCIRREDVSGIASCVFTKYGQGFYLISPSEFERFSLSTKWLVEPRCLVDSAETKNHRPGNGAGPKKAPSRARNSGTQSDGEEKQPGLVMERALLSDERVLKEIQSTLEGDRGSGNWRSHRAAVGCSLSNGGAE

SEQ ID NO: 31620 - protein, 1015 aa, Homo sapiens
MRRFLRPGHDPVRERLKRDLFQFNKTVEHGFPHQPSALGYSPSLRILAIGTRSGAIKLYGAPGVEFMGLHQENNAVTQIHLLPGQCQLVTLLDDNSLHLWSLKVKGGASELQEDESFTLRGPPGAAPSATQITVVLPHSSCELLYLGTESGNVFVVQLPAFRALEDRTISSDAVLQRLPEEARHRRVFEMVEALQEHPRDPNQILIGYSRGLVVIWDLQGSRVLYHFLSSQQLENIWWQRDGRLLVSCHSDGSYCQWPVSSEAQQPEPLRSLVPYGPFPCKAITRILWLTTRQGLPFTIFQGGMPRASYGDRHCISVIHDGQQTAFDFTSRVIGFTVLTEADPAATFDDPYALVVLAEEELVVIDLQTAGWPPVQLPYLASLHCSAITCSHHVSNIPLKLWERIIAAGSRQNAHFSTMEWPIDGGTSLTPAPPQRDLLLTGHEDGTVRFWDASGVCLRLLYKLSTVRVFLTDTDPNENFSAQGEDEWPPLRKVGSFDPYSDDPRLGIQKIFLCKYSGYLAVAGTAGQVLVLELNDEAAEQAVEQVEADLLQDQEGYRWKGHERLAARSGPVRFEPGFQPFVLVQCQPPAVVTSLALHSEWRLVAFGTSHGFGLFDHQQRRQVFVKCTLHPSDQLALEGPLSRVKSLKKSLRQSFRRMRRSRVSSRKRHPAGPPGEAQEGSAKAERPGLQNMELAPVQRKIEARSAEDSFTGFVRTLYFADTYLKDSSRHCPSLWAGTNGGTIYAFSLRVPPAERRMDEPVRAEQAKEIQLMHRAPVVGILVLDGHSVPLPEPLEVAHDLSKSPDMQGSHQLLVVSEEQFKVFTLPKVSAKLKLKLTALEGSRVRRVSVAHFGSRRAEDYGEHHLAVLTNLGDIQVVSLPLLKPQVRYSCIRREDVSGIASCVFTKYGQGFYLISPSEFERFSLSTKWLVEPRCLVDSAETKNHRPGNGAGPKKAPSRARNSGTQSDGEEKQPGLVMERALLSDERAATGVHIEPPWGAASAMAEQSEWLSVQAAR

SEQ ID NO: 31621 - protein, 356 aa, Homo sapiens
MRRFLRPGHDPVRERLKRDLFQFNKTVEHGFPHQPSALGYSPSLRILAIGTRSGAIKLYGAPGVEFMGLHQENNAVTQIHLLPGQCQLVTLLDDNSLHLWSLKVKGGASELQEDESFTLRGPPGAAPSATQITVVLPHSSCELLYLGTESGNVFVVQLPAFRALEDRTISSDAVLQRLPEEARHRRVFEMVEALQEHPRDPNQILIGYSRGLVVIWDLQGSRVLYHFLSSQQLENIWWQRDGRLLVSCHSDGSYCQWPVSSEAQQPEPLRSLVPYGPFPCKAITRILWLTTRQGLPFTIFQGGMPRASYGDRHCISVIHDGQQTAFDFTSRVIGFTVLTEADPAASRRASGVGAQG

SEQ ID NO: 31622 - protein, 772 aa, Homo sapiens
MGDEDDDESCAVELRITEANLTGHEEKVSVENFELLKVLGTGAYGKVFLVRKAGGHDAGKLYAMKVLRKAALVQRAKTQEHTRTERSVLELVRQAPFLVTLHYAFQTDAKLHLILDYVSGGEMFTHLYQRQYFKEAEVRVYGGEIVLALEHLHKLGIIYRDLKLENVLLDSEGHIVLTDFGLSKEFLTEEKERTFSFCGTIEYMAPEIIRSKTGHGKAVDWWSLGILLFELLTGASPFTLEGERNTQAEVSRRILKCSPPFPPRIGPVAQDLLQRLLCKDPKKRLGAGPQGAQEVRNHPFFQGLDWVALAARKIPAPFRPQIRSELDVGNFAEEFTRLEPVYSPPGSPPPGDPRIFQGYSFVAPSILFDHNNAVMTDGLEAPGAGDRPGRAAVARSAMMQDSPFFQQYELDLREPALGQGSFSVCRRCRQRQSGQEFAVKILSRRLEANTQREVAALRLCQSHPNVVNLHEVHHDQLHTYLVLELLRGGELLEHIRKKRHFSESEASQILRSLVSAVSFMHEEAGVVHRDLKPENILYADDTPGAPVKIIDFGFARLRPQSPGVPMQTPCFTLQYAAPELLAQQGYDESCDLWSLGVILYMMLSGQVPFQGASGQGGQSQAAEIMCKIREGRFSLDGEAWQGVSEEAKELVRGLLTVDPAKRLKLEGLRGSSWLQDGSARSSPPLRTPDVLESSGPAVRSGLNATFMAFNRGKREGFFLKSVENAPLAKRRKQKLRSATASRRGSPAPANPGRAPVASKGAPRRANGPLPPS

SEQ ID NO: 31623 - protein, 766 aa, Homo sapiens
MGDEDDDESCAVELRITEANLTGHEEKVSVENFELLKVLGTGAYGKVFLVRKAGGHDAGKLYAMKVLRKAALVQRAKTQEHTRTERSVLELVRQAPFLVTLHYAFQTDAKLHLILDYVSGGEMFTHLYQRQYFKEAEVRVYGGEIVLALEHLHKLGIIYRDLKLENVLLDSEGHIVLTDFGLSKEFLTEEKERTFSFCGTIEYMAPEIIRSKTGHGKAVDWWSLGILLFELLTGASPFTLEGERNTQAEVSRRILKCSPPFPPRIGPVAQDLLQRLLCKDPKKRLGAGPQGAQEVRNHPFFQGLDWVALAARKIPAPFRPQIRSELDVGNFAEEFTRLEPVYSPPGSPPPGDPRIFQGYSFVAPSILFDHNNAVMTDGLEAPGAGDRPGRAAVARSAMMQQYELDLREPALGQGSFSVCRRCRQRQSGQEFAVKILSRRLEANTQREVAALRLCQSHPNVVNLHEVHHDQLHTYLVLELLRGGELLEHIRKKRHFSESEASQILRSLVSAVSFMHEEAGVVHRDLKPENILYADDTPGAPVKIIDFGFARLRPQSPGVPMQTPCFTLQYAAPELLAQQGYDESCDLWSLGVILYMMLSGQVPFQGASGQGGQSQAAEIMCKIREGRFSLDGEAWQGVSEEAKELVRGLLTVDPAKRLKLEGLRGSSWLQDGSARSSPPLRTPDVLESSGPAVRSGLNATFMAFNRGKREGFFLKSVENAPLAKRRKQKLRSATASRRGSPAPANPGRAPVASKGAPRRANGPLPPS

SEQ ID NO: 31624 - protein, 141 aa, Homo sapiens
MEMLQGLLLLLLLSMGGAWASREPLRPWCHPINAILAVEKEGCPVCITVNTTICAGYCPTMMRVLQAVLPPLPQVVCTYRDVRFESIRLPGCPRGVDPVVSFPVALSCRCGPCRRSTSDCGGPKDHPLTCDHPQLSGLLFL

SEQ ID NO: 31625 - protein, 313 aa, Homo sapiens
MSLASGPGPGWLLFSFGMGLVSGSKCPNNCLCQAQEVICTGKQLTEYPLDIPLNTRRLFLNENRITSLPAMHLGLLSDLVYLDCQNNRIREVMDYTFIGVFKLIYLDLSSNNLTSISPFTFSVLSNLVQLNIANNPHLLSLHKFTFANTTSLRYLDLRNTGLQTLDSAALYHLTTLETLFLSGNPWKCNCSFLDFAIFLIVFHMDPSDDLNATCVEPTELTGWPITRVGNPLRYMCITHLDHKDYIFLLLIGFCIFAAGTVAAWLTGVCAVLYQNTRHKSSEEDEDEAGTRVEVSRRIFQTQTSSVQEFPQLI

SEQ ID NO: 31626 - protein, 771 aa, Homo sapiens
MAPGPFSSALLSPPPAALPFLLLLWAGASRGQPCPGRCICQNVAPTLTMLCAKTGLLFVPPAIDRRVVELRLTDNFIAAVRRRDFANMTSLVHLTLSRNTIGQVAAGAFADLRALRALHLDSNRLAEVRGDQLRGLGNLRHLILGNNQIRRVESAAFDAFLSTVEDLDLSYNNLEALPWEAVGQMVNLNTLTLDHNLIDHIAEGTFVQLHKLVRLDMTSNRLHKLPPDGLFLRSQGTGPKPPTPLTVSFGGNPLHCNCELLWLRRLTREDDLETCATPEHLTDRYFWSIPEEEFLCEPPLITRQAGGRALVVEGQAVSLRCRAVGDPEPVVHWVAPDGRLLGNSSRTRVRGDGTLDVTITTLRDSGTFTCIASNAAGEATAPVEVCVVPLPLMAPPPAAPPPLTEPGSSDIATPGRPGANDSAAERRLVAAELTSNSVLIRWPAQRPVPGIRMYQVQYNSSVDDSLVYRMIPSTSQTFLVNDLAAGRAYDLCVLAVYDDGATALPATRVVGCVQFTTAGDPAPCRPLRAHFLGGTMIIAIGGVIVASVLVFIVLLMIRYKVYGDGDSRRVKGSRSLPRVSHVCSQTNGAGTGAAQAPALPAQDHYEALREVESQAAPAVAVEAKAMEAETASAEPEVVLGRSLGGSATSLCLLPSEETSGEESRAAVGPRRSRSGALEPPTSAPPTLALVPGGAAARPRPQQRYSFDGDYGALFQSHSYPRRARRTKRHRSTPHLDGAGGGAAGEDGDLGLGSARACLAFTSTEWMLESTV

SEQ ID NO: 31627 - protein, 1011 aa, Homo sapiens
MMSDASDMLAAALEQMDGIIAGSKALEYSNGIFDCQSPTSPFMGSLRALHLVEDLRGLLEMMETDEKEGLRCQIPDSTAETLVEWLQSQMTNGHLPGNGDVYQERLARLENDKESLVLQVSVLTDQVEAQGEKIRDLEFCLEEHREKVNATEEMLQQELLSRTSLETQKLDLMAEISNLKLKLTAVEKDRLDYEDKFRDTEGLIQEINDLRLKVSEMDSERLQYEKKLKSTKSLMAKLSSMKIKVGQMQYEKQRMEQKWESLKDELASLKEQLEEKESEVKRLQEKLVCKMKGEGVEIVDRDIEVQKMKKAVESLMAANEEKDRKIEDLRQCLNRYKKMQDTVVLAQGKDGEYEELLNSSSISSLLDAQGFSDLEKSPSPTPVMGSPSCDPFNTSVPEEFHTTILQVSIPSLLPATVSMETSEKSKLTPKPETSFEENDGNIILGATVDTQLCDKLLTSSLQKSSSLGNLKKETSDGEKETIQKTSEDRAPAESRPFGTLPPRPPGQDTSMDDNPFGTRKVRSSFGRGFFKIKSNKRTASAPNLAETEKETAEHLDLAGASSRPKDSQRNSPFQIPPPSPDSKKKSRGIMKLFGKLRRSQSTTFNPDDMSEPEFKRGGTRATAGPRLGWSRDLGQSNSDLDMPFAKWTKEQVCNWLMEQGLGSYLNSGKHWIASGQTLLQASQQDLEKELGIKHSLHRKKLQLALQALGSEEETNHGKLDFNWVTRWLDDIGLPQYKTQFDEGRVDGRMLHYMTVDDLLSLKVVSVLHHLSIKRAIQVLRINNFEPNCLRRRPSDENTIAPSEVQKWTNHRVMEWLRSVDLAEYAPNLRGSGVHGGLMVLEPRFNVETMAQLLNIPPNKTLLRRHLATHFNLLIGAEAQHQKRDAMELPDYVLLTATAKVKPKKLAFSNFGNLRKKKQEDGEEYVCPMELGQASGSASKKGFKPGLDMRLYEEDDLDRLEQMEDSEGTVRQIGAFSEGINNLTHMLKEDDMFKDFAARSPSASITDEDSNV

SEQ ID NO: 31628 - protein, 1005 aa, Homo sapiens
MMSDASDMLAAALEQMDGIIAGSKALEYSNGIFDCQSPTSPFMGSLRALHLVEDLRGLLEMMETDEKEGLRCQIPDSTAETLVEWLQSQMTNGHLPGNGDVYQERLARLENDKESLVLQVSVLTDQVEAQGEKIRDLEFCLEEHREKVNATEEMLQQELLSRTSLETQKLDLMAEISNLKLKLTAVEKDRLDYEDKFRDTEGLIQEINDLRLKVSEMDSERLQYEKKLKSTKDELASLKEQLEEKESEVKRLQEKLVCKMKGEGVEIVDRDENFKKKLKEKNIEVQKMKKAVESLMAANEEKDRKIEDLRQCLNRYKKMQDTVVLAQGKKGKDGEYEELLNSSSISSLLDAQGFSDLEKSPSPTPVMGSPSCDPFNTSVPEEFHTTILQVSIPSLLPATVSMETSEKSKLTPKPETSFEENDGNIILGATVDTQLCDKLLTSSLQKSSSLGNLKKETSDGEKETIQKTSEDRAPAESRPFGTLPPRPPGQDTSMDDNPFGTRKVRSSFGRGFFKIKSNKRTASAPNLDRKRSASAPTLAETEKETAEHLDLAGASSRPKDSQRNSPFQIPPPSPDSKKKSRGIMKLFGKLRRSQSTTFNPDDMSEPEFKRGGTRATAGPRLGWSRDLGQSNSDLDMPFAKWTKEQVCNWLMEQGLGSYLNSGKHWIASGQTLLQASQQDLEKELGIKHSLHRKKLQLALQALGSEEETNHGKLDFNWVTRWLDDIGLPQYKTQFDEGRVDGRMLHYMTVDDLLSLKVVSVLHHLSIKRAIQVLRINNFEPNCLRRRPSDENTIAPSEVQKWTNHRVMEWLRSVDLAEYAPNLRGSGVHGGLMVLEPRFNVETMAQLLNIPPNKTLLRRHLATHFNLLIGAEAQHQKRDAMELPDYVLLTATAKVKPKKLAFSNFGNLRKKKQEDGEEYVCPMELGQASGSASKKGFKPGLDMRLYEEDDLDRLEQMEDSEGTVRQIGAFSEGINNLTHMLKEDDMFKDFAARSPSASITDEDSNV

SEQ ID NO: 31629 - protein, 858 aa, Homo sapiens
MLQQELLSRTSLETQKLDLMAEISNLKLKLTAVEKDRLDYEDKFRDTEGLIQEINDLRLKVSEMDSERLQYEKKLKSTKSLMAKLSSMKIKVGQMQYEKQRMEQKWESLKDELASLKEQLEEKESEVKRLQEKLVCKMKGEGVEIVDRDIEVQKMKKAVESLMAANEEKDRKIEDLRQCLNRYKKMQDTVVLAQGKDGEYEELLNSSSISSLLDAQGFSDLEKSPSPTPVMGSPSCDPFNTSVPEEFHTTILQVSIPSLLPATVSMETSEKSKLTPKPETSFEENDGNIILGATVDTQLCDKLLTSSLQKSSSLGNLKKETSDGEKETIQKTSEDRAPAESRPFGTLPPRPPGQDTSMDDNPFGTRKVRSSFGRGFFKIKSNKRTASAPNLAETEKETAEHLDLAGASSRPKDSQRNSPFQIPPPSPDSKKKSRGIMKLFGKLRRSQSTTFNPDDMSEPEFKRGGTRATAGPRLGWSRDLGQSNSDLDMPFAKWTKEQVCNWLMEQGLGSYLNSGKHWIASGQTLLQASQQDLEKELGIKHSLHRKKLQLALQALGSEEETNHGKLDFNWVTRWLDDIGLPQYKTQFDEGRVDGRMLHYMTVDDLLSLKVVSVLHHLSIKRAIQVLRINNFEPNCLRRRPSDENTIAPSEVQKWTNHRVMEWLRSVDLAEYAPNLRGSGVHGGLMVLEPRFNVETMAQLLNIPPNKTLLRRHLATHFNLLIGAEAQHQKRDAMELPDYVLLTATAKVKPKKLAFSNFGNLRKKKQEDGEEYVCPMELGQASGSASKKGFKPGLDMRLYEEDDLDRLEQMEDSEGTVRQIGAFSEGINNLTHMLKEDDMFKDFAARSPSASITDEDSNV

SEQ ID NO: 31630 - protein, 980 aa, Homo sapiens
MMSDASDMLAAALEQMDGIIAGSKALEYSNGIFDCQSPTSPFMGSLRALHLVEDLRGLLEMMETDEKEGLRCQIPDSTAETLVEWLQSQMTNGHLPGNGDVYQERLARLENDKESLVLQVSVLTDQVEAQGEKIRDLEFCLEEHREKVNATEEMLQQELLSRTSLETQKLDLMAEISNLKLKLTAVEKDRLDYEDKFRDTEGLIQEINDLRLKVSEMDSERLQYEKKLKSTKDELASLKEQLEEKESEVKRLQEKLVCKMKGEGVEIVDRDIEVQKMKKAVESLMAANEEKDRKIEDLRQCLNRYKKMQDTVVLAQGKDGEYEELLNSSSISSLLDAQGFSDLEKSPSPTPVMGSPSCDPFNTSVPEEFHTTILQVSIPSLLPATVSMETSEKSKLTPKPETSFEENDGNIILGATVDTQLCDKLLTSSLQKSSSLGNLKKETSDGEKETIQKTSEDRAPAESRPFGTLPPRPPGQDTSMDDNPFGTRKVRSSFGRGFFKIKSNKRTASAPNLAETEKETAEHLDLAGASSRPKDSQRNSPFQIPPPSPDSKKKSRGIMKLFGKLRRSQSTTFNPDDMSEPEFKRGGTRATAGPRLGWSRDLGQSNSDLDMPFAKWTKEQVCNWLMEQGLGSYLNSGKHWIASGQTLLQASQQDLEKELGIKHSLHRKKLQLALQALGSEEETNHGKLDFNWVTRWLDDIGLPQYKTQFDEGRVDGRMLHYMTVDDLLSLKVVSVLHHLSIKRAIQVLRINNFEPNCLRRRPSDENTIAPSEVQKWTNHRVMEWLRSVDLAEYAPNLRGSGVHGGLMVLEPRFNVETMAQLLNIPPNKTLLRRHLATHFNLLIGAEAQHQKRDAMELPDYVLLTATAKVKPKKLAFSNFGNLRKKKQEDGEEYVCPMELGQASGSASKKGFKPGLDMRLYEEDDLDRLEQMEDSEGTVRQIGAFSEGINNLTHMLKEDDMFKDFAARSPSASITDEDSNV

SEQ ID NO: 31631 - protein, 170 aa, Homo sapiens
MMSDASDMLAAALEQMDGIIAGSKALEYSNGIFDCQSPTSPFMGSLRALHLVEDLRGLLEMMETDEKEGLRCQIPDSTAETLVEWLQSQMTNGHLPGNGDVYQERLARLENDKESLVLQVSVLTDQVEAQGEKIRDLEFCLEEHREKVNATEEMLQQVCAEARTKMGFPC

SEQ ID NO: 31632 - protein, 335 aa, Homo sapiens
MTENVVCTGAVNAVKEVWEKRIKKLNEDLKREKEFQHKLVRIWEERVSLTKLREKVTREDGRVILKIEKEEWKTLPSSLLKLNQLQEWQLHRTGLLKIPEFIGRFQNLIVLDLSRNTISEIPPGIGLLTRLQELILSYNKIKTVPKELSNCASLEKLELAVNRDICDLPQELSNLLKLTHLDLSMNDFTTIPLAVLNMPALEWLDMGSNKLEQLPDTIERMQNLHTLWLQRNEITCLPQTISNMKNLGTLVLSNNKLQDIPVCMEEMANLRFVNFRDNPLKLKVSLPPSEGTDEEEERELFGLQFMHTYIQESRRRADHQVNGSTTLPISINTDG

SEQ ID NO: 31633 - protein, 339 aa, Homo sapiens
MTENVVCTGAVNAVKEVWEKRIKKLNEDLKREKEFQHKLVRIWEERVSLTKLREKVTREDGRVILKIEKEEWKTLPSSLLKLNQLQEWQLHRTGLLKIPEFIGRFQNLIVLDLSRNTISEIPPGIGLLTRLQELILSYNKIKTVPKELSNCASLEKLELAVNRDICDLPQELSNLLKLTHLDLSMNDFTTIPLAVLNMPALEWLDMGSNKLEQLPDTIERMQNLHTLWLQRNEITCLPQTISNMKNLGTLVLSNNKLQDIPVCMEEMANLRFVNFRDNPLKLKVSLPPSEGTDEEEERELFGLQFMHTYIQESRRRAALQFCVCHGQILTIYTCMALEI

SEQ ID NO: 31634 - protein, 796 aa, Homo sapiens
MIPVAEFKQFTEQQPAFKVLKPWWDVLAEYLTVAMLMIGVFGCTLQVTQDKIICLPNHELQENLSEAPCQQLLPRGIPEQIGALQEVKGLKNNLDLQQYSFINQLCYETALHWYAKYFPYLVVIHTLIFMVCTSFWFKFPGTSSKIEHFISILGKCFDSPWTTRALSEVSGENQKGPAATERAAATIVAMAGTGPGKAGEGEKEKVLAEPEKVVTEPPVVTLLDKKEGEQAKALFEKVKKFRMHVEEGDILYTMYIRQTVLKVCKFLAILVYNLVYVEKISFLVACRVETSEVTGYASFCCNHTKAHLFSKLAFCYISFVCIYGLTCIYTLYWLFHRPLKEYSFRSVREETGMGDIPDVKNDFAFMLHLIDQYDSLYSKRFAVFLSEVSESRLKQLNLNHEWTPEKLRQKLQRNAAGRLELALCMLPGLPDTVFELSEVESLRLEAICDITFPPGLSQLVHLQELSLLHSPARLPFSLQVFLRDHLKVMRVKCEELREVPLWVFGLRGLEELHLEGLFPQELARAATLESLRELKQLKVLSLRSNAGKVPASVTDVAGHLQRLSLHNDGARLVALNSLKKLAALRELELVACGLERIPHAVFSLGALQELDLKDNHLRSIEEILSFQHCRKLVTLRLWHNQIAYVPEHVRKLRSLEQLYLSYNKLETLPSQLGLCSGLRLLDVSHNGLHSLPPEVGLLQNLQHLALSYNALEALPEELFFCRKLRTLLLGDNQLSQLSPHVGALRALSRLELKGNRLEALPEELGNCGGLKKAGLLVEDTLYQGLPAEVRDKMEEE

SEQ ID NO: 31635 - protein, 292 aa, Homo sapiens
MGNQLDRITHLNYSELPTGDPSGIEKDELRVGVAYFFSDDEEDLDERGQPDKFGVKAPPGCTPCPESPSRHHHHLLHQLVLNETQFSAFRGQECIFSKVSGGPQGADLSVYAVTALPALCEPGDLLELLWLQPAPEPPAPAPHWAVYVGGGQIIHLHQGEIRQDSLYEAGAANVGRVVNSWYRYRPLVAELVVQNACGHLGLKSEEICWTNSESFAAWCRFGKREFKAGGEVPAGTQPPQQQYYLKVHLGENKVHTARFHSLEDLIREKRRIDASGRLRVLQELADLVDDKE

SEQ ID NO: 31636 - protein, 354 aa, Homo sapiens
MGNQLDRITHLNYSELPTGDPSGIEKDELRVGVAYFFSDDEEDLDERGQPDKFGVKAPPGCTPCPESPSRHHHHLLHQLVLNETQFSAFRGQECIFSKVSGGPQGADLSVYAVTALPALCEPGDLLELLWLQPAPEPPAPAPHWASRARRSAGRTRRASPPGAALASGSSRREGRCRQARSPRSSSTISRCTWERTRSTPPGFTAWKTSSARSAVSTPAAACECSRSSPTSWTTRSSRLGAAGPSASPAPRSLPFPAPGLRSQRFSTSAPPRHARPPPVARARAAPPHPQASGRKSQELPQGRKGAAASAWLTATAVVTVLGDPACAFPLRCKPGTGKGLRGERTWPSPRVHGQ

SEQ ID NO: 31637 - protein, 1257 aa, Homo sapiens
MMCEVMPTINEDTPMSQRGSQSSGSDSDSHFEQLMVNMLDERDRLLDTLRETQESLSLAQQRLQDVIYDRDSLQRQLNSALPQDIESLTGGLAGSKGADPPEFAALTKELNACREQLLEKEEEISELKAERNNTRLLLEHLECLVSRHERSLRMTVVKRQAQSPSGVSSEVEVLKALKSLFEHHKALDEKVRERLRVSLERVSALEEELAAANQEIVALREQNVHIQRKMASSEGSTESEHLEGMEPGQKVHEKRLSNGSIDSTDETSQIVELQELLEKQNYEMAQMKERLAALSSRVGEVEQEAETARKDLIKTEEMNTKYQRDIREAMAQKEDMEERITTLEKRYLSAQRESTSIHDMNDKLENELANKEAILRQMEEKNRQLQERLELAEQKLQQTMRKAETLPEVEAELAQRIAALTKAEERHGNIEERMRHLEGQLEEKNQELQRARQREKMNEEHNKRLSDTVDRLLTESNERLQLHLKERMAALEEKNVLIQESETFRKNLEESLHDKERLAEEIEKLRSELDQLKMRTGSLIEPTIPRTHLDTSAELRYSVGSLVDSQSDYRTTKVIRRPRRGRMGVRRDEPKVKSLGDHEWNRTQQIGVLSSHPFESDTEMSDIDDDDRETIFSSMDLLSPSGHSDAQTLAMMLQEQLDAINKEIRLIQEEKESTELRAEEIENRVASVSLEGLNLARVHPGTSITASVTASSLASSSPPSGHSTPKLTPRSPAREMDRMGVMTLPSDLRKHRRKIAVVEEDGREDKATIKCETSPPPTPRALRMTHTLPSSYHNDARSSLSVSLEPESLGLGSANSSQDSLHKAPKKKGIKSSIGRLFGKKEKARLGQLRGFMETEAAAQESLGLGKLGTQAEKDRRLKKKHELLEEARRKGLPFAQWDGPTVVAWLELWLGMPAWYVAACRANVKSGAIMSALSDTEIQREIGISNPLHRLKLRLAIQEMVSLTSPSAPPTSRTPSGNVWVTHEEMENLAAPAKTKESEEGSWAQCPVFLQTLAYGDMNHEWIGNEWLPSLGLPQYRSYFMECLVDARMLDHLTKKDLRVHLKMVDSFHRTSLQYGIMCLKRLNYDRKELERRREASQHEIKDVLVWSNDRVIRWIQAIGLREYANNILESGVHGSLIALDENFDYSSLALLLQIPTQNTQARQILEREYNNLLALGTERRLDESDDKNFRRGSTWRRQFPPREVHGISMMPGSSETLPAGFRLTTTSGQSRKMTTDVASSRLQRLDNSTVRTYSC

SEQ ID NO: 31638 - protein, 1232 aa, Homo sapiens
MMCEVMPTINEDTPMSQRGSQSSGSDSDSHFEQLMVNMLDERDRLLDTLRETQESLSLAQQRLQDVIYDRDSLQRQLNSALPQEFAALTKELNACREQLLEKEEEISELKAERNNTRLLLEHLECLVSRHERSLRMTVVKRQAQSPSGVSSEVEVLKALKSLFEHHKALDEKVRERLRVSLERVSALEEELAAANQEIVALREQNVHIQRKMASSEGSTESEHLEGMEPGQKVHEKRLSNGSIDSTDETSQIVELQELLEKQNYEMAQMKERLAALSSRVGEVEQEAETARKDLIKTEEMNTKYQRDIREAMAQKEDMEERITTLEKRYLSAQRESTSIHDMNDKLENELANKEAILRQMEEKNRQLQERLELAEQKLQQTMRKAETLPEVEAELAQRIAALTKAEERHGNIEERMRHLEGQLEEKNQELQRARQREKMNEEHNKRLSDTVDRLLTESNERLQLHLKERMAALEEKNVLIQESETFRKNLEESLHDKERLAEEIEKLRSELDQLKMRTGSLIEPTIPRTHLDTSAELRYSVGSLVDSQSDYRTTKVIRRPRRGRMGVRRDEPKVKSLGDHEWNRTQQIGVLSSHPFESDTEMSDIDDDDRETIFSSMDLLSPSGHSDAQTLAMMLQEQLDAINKEIRLIQEEKESTELRAEEIENRVASVSLEGLNLARVHPGTSITASVTASSLASSSPPSGHSTPKLTPRSPAREMDRMGVMTLPSDLRKHRRKIAVVEEDGREDKATIKCETSPPPTPRALRMTHTLPSSYHNDARSSLSVSLEPESLGLGSANSSQDSLHKAPKKKGIKSSIGRLFGKKEKARLGQLRGFMETEAAAQESLGLGKLGTQAEKDRRLKKNTSGHELLEEARRKGLPFAQWDGPTVVAWLELWLGMPAWYVAACRANVKSGAIMSALSDTEIQREIGISNPLHRLKLRLAIQEMVSLTSPSAPPTSRTPSGNVWVTHEEMENLAAPAKTKESEEGSWAQCPVFLQTLAYGDMNHEWIGNEWLPSLGLPQYRSYFMECLVDARMLDHLTKKDLRVHLKMVDSFHRTSLQYGIMCLKRLNYDRKELERRREASQHEIKDVLVWSNDRVIRWIQAIGLREYANNILESGVHGSLIALDENFDYSSLALLLQIPTQNTQARQILEREYNNLLALGTERRLDESDDKNFRRGSTWRRQFPPREVHGISMMPGSSETLPAGFRLTTTSGQSRKMTTDDGVFSVYST

SEQ ID NO: 31639 - protein, 1251 aa, Homo sapiens
MMCEVMPTINEDTPMSQRGSQSSGSDSDSHFEQLMVNMLDERDRLLDTLRETQESLSLAQQRLQDVIYDRDSLQRQLNSALPQDIESLTGGLAGSKGADPPEFAALTKELNACREQLLEKEEEISELKAERNNTRLLLEHLECLVSRHERSLRMTVVKRQAQSPSGVSSEVEVLKALKSLFEHHKALDEKVRERLRVSLERVSALEEELAAANQEIVALREQNVHIQRKMASSEGSTESEHLEGMEPGQKVHEKRLSNGSIDSTDETSQIVELQELLEKQNYEMAQMKERLAALSSRVGEVEQEAETARKDLIKTEEMNTKYQRDIREAMAQKEDMEERITTLEKRYLSAQRESTSIHDMNDKLENELANKEAILRQMEEKNRQLQERLELAEQKLQQTMRKAETLPEVEAELAQRIAALTKAEERHGNIEERMRHLEGQLEEKNQELQRARQREKMNEEHNKRLSDTVDRLLTESNERLQLHLKERMAALEEKNVLIQESETFRKNLEESLHDKERLAEEIEKLRSELDQLKMRTGSLIEPTIPRTHLDTSAELRYSVGSLVDSQSDYRTTKVIRRPRRGRMGVRRDEPKVKSLGDHEWNRTQQIGVLSSHPFESDTEMSDIDDDDRETIFSSMDLLSPSGHSDAQTLAMMLQEQLDAINKEIRLIQEEKESTELRAEEIENRVASVSLEGLNLARVHPGTSITASVTASSLASSSPPSGHSTPKLTPRSPAREMDRMGVMTLPSDLRKHRRKIAVVEEDGREDKATIKCETSPPPTPRALRMTHTLPSSYHNDARSSLSVSLEPESLGLGSANSSQDSLHKAPKKKGIKSSIGRLFGKKEKARLGQLRGFMETEAAAQESLGLGKLGTQAEKDRRLKKKHELLEEARRKGLPFAQWDGPTVVAWLELWLGMPAWYVAACRANVKSGAIMSALSDTEIQREIGISNPLHRLKLRLAIQEMVSLTSPSAPPTSRTPSGNVWVTHEEMENLAAPAKTKESEEGSWAQTLAYGDMNHEWIGNEWLPSLGLPQYRSYFMECLVDARMLDHLTKKDLRVHLKMVDSFHRTSLQYGIMCLKRLNYDRKELERRREASQHEIKDVLVWSNDRVIRWIQAIGLREYANNILESGVHGSLIALDENFDYSSLALLLQIPTQNTQARQILEREYNNLLALGTERRLDESDDKNFRRGSTWRRQFPPREVHGISMMPGSSETLPAGFRLTTTSGQSRKMTTDVASSRLQRLDNSTVRTYSC

SEQ ID NO: 31640 - protein, 1236 aa, Homo sapiens
MMCEVMPTINEDTPMSQRGSQSSGSDSDSHFEQLMVNMLDERDRLLDTLRETQESLSLAQQRLQDVIYDRDSLQRQLNSALPQDIESLTGGLAGSKGADPPEFAALTKELNACREQLLEKEEEISELKAERNNTRLLLEHLECLVSRHERSLRMTVVKRQAQSPSGVSSEVEVLKALKSLFEHHKALDEKVRERLRVSLERVSALEEELAAANQEIVALREQNVHIQRKMASSEGSTESEHLEGMEPGQKVHEKRLSNGSIDSTDETSQIVELQELLEKQNYEMAQMKERLAALSSRVGEVEQEAETARKDLIKTEEMNTKYQRDIREAMAQKEDMEERITTLEKRYLSAQRESTSIHDMNDKLENELANKEAILRQMEEKNRQLQERLELAEQKLQQTMRKAETLPEVEAELAQRIAALTKAEERHGNIEERMRHLEGQLEEKNQELQRARQREKMNEEHNKRLSDTVDRLLTESNERLQLHLKERMAALEEKNVLIQESETFRKNLEESLHDKERLAEEIEKLRSELDQLKMRTGSLIEPTIPRTHLDTSAELRYSVGSLVDSQSDYRTTKVIRRPRRGRMGVRRDEPKVKSLGDHEWNRTQQIGVLSSHPFESDTEMSDIDDDDRETIFSSMDLLSPSGHSDAQTLAMMLQEQLDAINKEIRLIQEEKESTELRAEEIENRVASVSLEGLNLARVHPGTSITASVTASSLASSSPPSGHSTPKLTPRSPAREMDRMGVMTLPSDLRKHRRKIAVVEEDGREDKATIKCETSPPPTPRALRMTHTLPSSYHNDARSSLSVSLEPESLGLGSANSSQDSLHKAPKKKGIKSSIGRLFGKKEKARLGQLRGFMETEAAAQESLGLGKLGTQAEKDRRLKKKHELLEEARRKGLPFAQWDGPTVVAWLELWLGMPAWYVAACRANVKSGAIMSALSDTEIQREIGISNPLHRLKLRLAIQEMVSLTSPSAPPTSRTKESEEGSWAQCPVFLQTLAYGDMNHEWIGNEWLPSLGLPQYRSYFMECLVDARMLDHLTKKDLRVHLKMVDSFHRTSLQYGIMCLKRLNYDRKELERRREASQHEIKDVLVWSNDRVIRWIQAIGLREYANNILESGVHGSLIALDENFDYSSLALLLQIPTQNTQARQILEREYNNLLALGTERRLDESDDKNFRRGSTWRRQFPPREVHGISMMPGSSETLPAGFRLTTTSGQSRKMTTDVASSRLQRLDNSTVRTYSC

SEQ ID NO: 31641 - protein, 1156 aa, Homo sapiens
MIFSDMNTVSGSPKVHPPNGTRFYTFQEFAALTKELNACREQLLEKEEEISELKAERNNTRLLLEHLECLVSRHERSLRMTVVKRQAQSPSGVSSEVEVLKALKSLFEHHKALDEKVRERLRVSLERVSALEEELAAANQEIVALREQNVHIQRKMASSEGSTESEHLEGMEPGQKVHEKRLSNGSIDSTDETSQIVELQELLEKQNYEMAQMKERLAALSSRVGEVEQEAETARKDLIKTEEMNTKYQRDIREAMAQKEDMEERITTLEKRYLSAQRESTSIHDMNDKLENELANKEAILRQMEEKNRQLQERLELAEQKLQQTMRKAETLPEVEAELAQRIAALTKAEERHGNIEERMRHLEGQLEEKNQELQRARQREKMNEEHNKRLSDTVDRLLTESNERLQLHLKERMAALEEKNVLIQESETFRKNLEESLHDKERLAEEIEKLRSELDQLKMRTGSLIEPTIPRTHLDTSAELRYSVGSLVDSQSDYRTTKVIRRPRRGRMGVRRDEPKVKSLGDHEWNRTQQIGVLSSHPFESDTEMSDIDDDDRETIFSSMDLLSPSGHSDAQTLAMMLQEQLDAINKEIRLIQEEKESTELRAEEIENRVASVSLEGLNLARVHPGTSITASVTASSLASSSPPSGHSTPKLTPRSPAREMDRMGVMTLPSDLRKHRRKIAVVEEDGREDKATIKCETSPPPTPRALRMTHTLPSSYHNDARSSLSVSLEPESLGLGSANSSQDSLHKAPKKKGIKSSIGRLFGKKEKARLGQLRGFMETEAAAQESLGLGKLGTQAEKDRRLKKKHELLEEARRKGLPFAQWDGPTVVAWLELWLGMPAWYVAACRANVKSGAIMSALSDTEIQREIGISNPLHRLKLRLAIQEMVSLTSPSAPPTSRTKESEEGSWAQTLAYGDMNHEWIGNEWLPSLGLPQYRSYFMECLVDARMLDHLTKKDLRVHLKMVDSFHRTSLQYGIMCLKRLNYDRKELERRREASQHEIKDVLVWSNDRVIRWIQAIGLREYANNILESGVHGSLIALDENFDYSSLALLLQIPTQNTQARQILEREYNNLLALGTERRLDESDDKNFRRGSTWRRQFPPREVHGISMMPGSSETLPAGFRLTTTSGQSRKMTTDVASSRLQRLDNSTVRTYSC

SEQ ID NO: 31642 - protein, 1152 aa, Homo sapiens
MIFSDMNTVSGSPKVHPPNGTRFYTFQEFAALTKELNACREQLLEKEEEISELKAERNNTRLLLEHLECLVSRHERSLRMTVVKRQAQSPSGVSSEVEVLKALKSLFEHHKALDEKIVALREQNVHIQRKMASSEGSTESEHLEGMEPGQKVHEKRLSNGSIDSTDETSQIVELQELLEKQNYEMAQMKERLAALSSRVGEVEQEAETARKDLIKTEEMNTKYQRDIREAMAQKEDMEERITTLEKRYLSAQRESTSIHDMNDKLENELANKEAILRQMEEKNRQLQERLELAEQKLQQTMRKAETLPEVEAELAQRIAALTKAEERHGNIEERMRHLEGQLEEKNQELQRARQREKMNEEHNKRLSDTVDRLLTESNERLQLHLKERMAALEEKNVLIQESETFRKNLEESLHDKERLAEEIEKLRSELDQLKMRTGSLIEPTIPRTHLDTSAELRYSVGSLVDSQSDYRTTKVIRRPRRGRMGVRRDEPKVKSLGDHEWNRTQQIGVLSSHPFESDTEMSDIDDDDRETIFSSMDLLSPSGHSDAQTLAMMLQEQLDAINKEIRLIQEEKESTELRAEEIENRVASVSLEGLNLARVHPGTSITASVTASSLASSSPPSGHSTPKLTPRSPAREMDRMGVMTLPSDLRKHRRKIAVVEEDGREDKATIKCETSPPPTPRALRMTHTLPSSYHNDARSSLSVSLEPESLGLGSANSSQDSLHKAPKKKGIKSSIGRLFGKKEKARLGQLRGFMETEAAAQESLGLGKLGTQAEKDRRLKKKHELLEEARRKGLPFAQWDGPTVVAWLELWLGMPAWYVAACRANVKSGAIMSALSDTEIQREIGISNPLHRLKLRLAIQEMVSLTSPSAPPTSRTPSGNVWVTHEEMENLAAPAKTKESEEGSWAQTLAYGDMNHEWIGNEWLPSLGLPQYRSYFMECLVDARMLDHLTKKDLRVHLKMVDSFHRTSLQYGIMCLKRLNYDRKELERRREASQHEIKDVLVWSNDRVIRWIQAIGLREYANNILESGVHGSLIALDENFDYSSLALLLQIPTQNTQARQILEREYNNLLALGTERRLDESDDKNFRRGSTWRRQFPPREVHGISMMPGSSETLPAGFRLTTTSGQSRKMTTDVASSRLQRLDNSTVRTYSC

SEQ ID NO: 31643 - protein, 783 aa, Homo sapiens
MRHLEGQLEEKNQELQRARQREKMNEEHNKRLSDTVDRLLTESNERLQLHLKERMAALEEKNVLIQESETFRKNLEESLHDKERLAEEIEKLRSELDQLKMRTGSLIEPTIPRTHLDTSAELRYSVGSLVDSQSDYRTTKVIRRPRRGRMGVRRDEPKVKSLGDHEWNRTQQIGVLSSHPFESDTEMSDIDDDDRETIFSSMDLLSPSGHSDAQTLAMMLQEQLDAINKEIRLIQEEKESTELRAEEIENRVASVSLEGLNLARVHPGTSITASVTASSLASSSPPSGHSTPKLTPRSPAREMDRMGVMTLPSDLRKHRRKIAVVEEDGREDKATIKCETSPPPTPRALRMTHTLPSSYHNDARSSLSVSLEPESLGLGSANSSQDSLHKAPKKKGIKSSIGRLFGKKEKARLGQLRGFMETEAAAQESLGLGKLGTQAEKDRRLKKKHELLEEARRKGLPFAQWDGPTVVAWLELWLGMPAWYVAACRANVKSGAIMSALSDTEIQREIGISNPLHRLKLRLAIQEMVSLTSPSAPPTSRTCPVFLQTLAYGDMNHEWIGNEWLPSLGLPQYRSYFMECLVDARMLDHLTKKDLRVHLKMVDSFHRTSLQYGIMCLKRLNYDRKELERRREASQHEIKDVLVWSNDRVIRWIQAIGLREYANNILESGVHGSLIALDENFDYSSLALLLQIPTQNTQARQILEREYNNLLALGTERRLDESDDKNFRRGSTWRRQFPPREVHGISMMPGSSETLPAGFRLTTTSGQSRKMTTDDGVFSVYST

SEQ ID NO: 31644 - protein, 443 aa, Homo sapiens
MTHTLPSSYHNDARSSLSVSLEPESLGLGSANSSQDSLHKAPKKKGIKSSIGRLFGKKEKARLGQLRGFMETEAAAQESLGLGKLGTQAEKDRRLKKKHELLEEARRKGLPFAQWDGPTVVAWLELWLGMPAWYVAACRANVKSGAIMSALSDTEIQREIGISNPLHRLKLRLAIQEMVSLTSPSAPPTSRTCPVFLQTLAYGDMNHEWIGNEWLPSLGLPQYRSYFMECLVDARMLDHLTKKDLRVHLKMVDSFHRTSLQYGIMCLKRLNYDRKELERRREASQHEIKDVLVWSNDRVIRWIQAIGLREYANNILESGVHGSLIALDENFDYSSLALLLQIPTQNTQARQILEREYNNLLALGTERRLDESDDKNFRRGSTWRRQFPPREVHGISMMPGSSETLPAGFRLTTTSGQSRKMTTDVASSRLQRLDNSTVRTYSC

SEQ ID NO: 31645 - protein, 261 aa, Homo sapiens
MVKGEKGPKGKKITLKVARNCIKITFDGKKRLDLSKMGITTFPKCILRLSDMDELDLSRNLIRKIPDSISKFQNLRWLDLHSNYIDKLPESIGQMTSLLYLNVSNNRLTSNGLPVELKQLKNIRAVNLGLNHLDSVPTTLGALKELHEVGLHDNLLNNIPVSISKLPKLKKLNIKRNPFPKPGESEIFIDSIRRLENLYVVEEKDLCAACLRKCQNARDNLNRIKNMATTTPRKTIFPNLISPNSMAKDSWEDWRIRLTSS

SEQ ID NO: 31646 - protein, 255 aa, Homo sapiens
MVKGEKGPKGKKITLKVARNCIKITFDGKKRLDLSKMGITTFPKCILRLSDMDELDLSRNLIRKIPDSISKFQNLRWLDLHSNYIDKLPESIGQMTSLLYLNVSNNRLTSNGLPVELKQLKNIRAVNLGLNHLDSVPTTLGALKELHEVGLHDNLLNNIPVSISKLPKLKKLNIKRNPFPKPGESEIFIDSIRRLENLYVVEEKDLCAACLRKCQNARDNLNRIKNMATTTPRKTIFPNLISPNSMAKDSWEDWR

SEQ ID NO: 31647 - protein, 2863 aa, Homo sapiens
MASEDNRVPSPPPTGDDGGGGGREETPTEGGALSLKPGLPIRGIRMKFAVLTGLVEVGEVSNRDIVETVFNLLVGGQFDLEMNFIIQEGESINCMVDLLEKCDITCQAEVWSMFTAILKKSIRNLQVCTEVGLVEKVLGKIEKVDNMIADLLVDMLGVLASYNLTVRELKLFFSKLQGDKGRWPPHAGKLLSVLKHMPQKYGPDAFFNFPGKSAAAIALPPIAKWPYQNGFTFHTWLRMDPVNNINVDKDKPYLYCFRTSKGLGYSAHFVGGCLIVTSIKSKGKGFQHCVKFDFKPQKWYMVTIVHIYNRWKNSELRCYVNGELASYGEITWFVNTSDTFDKCFLGSSETADANRVFCGQMTAVYLFSEALNAAQIFAIYQLGLGYKGTFKFKAESDLFLAEHHKLLLYDGKLSSAIAFTYNPRATDAQLCLESSPKDNPSIFVHSPHALMLQDVKAVLTHSIQSAMHSIGGVQVLFPLFAQLDYRQYLSDEIDLTICSTLLAFIMELLKNSIAMQEQMLACKGFLVIGYSLEKSSKSHVSRAVLELCLAFSKYLSNLQNGMPLLKQLCDHVLLNPAIWIHTPAKVQLMLYTYLSTEFIGTVNIYNTIRRVGTVLLIMHTLKYYYWAVNPQDRSGITPKGLDGPRPNQKEMLSLRAFLLMFIKQLVMKDSGVKEDELQAILNYLLTMHEDDNLMDVLQLLVALMSEHPNSMIPAFDQRNGLRVIYKLLASKSEGIRVQALKAMGYFLKHLAPKRKAEVMLGHGLFSLLAERLMLQTNLITMTTYNVLFEILIEQIGTQVIHKQHPDPDSSVKIQNPQILKVIATLLRNSPQCPESMEVRRAFLSDMIKLFNNSRENRRSLLQCSVWQEWMLSLCYFNPKNSDEQKITEMVYAIFRILLYHAVKYEWGGWRVWVDTLSITHSKVTFEIHKENLANIFREQQGKVDEEIGLCSSTSVQAASGIRRDINVSVGSQQPDTKDSPVCPHFTTNGNENSSIEKTSSLESASNIELQTTNTSYEEMKAEQENQELPDEGTLEETLTNETRNADDLEVSSDIIEAVAISSNSFITTGKDSMTVSEVTASISSPSEEDASEMPEFLDKSIVEEEEDDDYVELKVEGSPTEEANLPTELQDNSLSPAASEAGEKLDMFGNDDKLIFQEGKPVTEKQTDTETQDSKDSGIQTMTASGSSAMSPETTVSQIAVESDLGQMLEEGKKATNLTRETKLINDCHGSVSEASSEQKIAKLDVSNVATDTERLELKASPNVEAPQPHRHVLEISRQHEQPGQGIAPDAVNGQRRDSRSTVFRIPEFNWSQMHQRLLTDLLFSIETDIQMWRSHSTKTVMDFVNSSDNVIFVHNTIHLISQVMDNMVMACGGILPLLSAATSATHELENIEPTQGLSIEASVTFLQRLISLVDVLIFASSLGFTEIEAEKSMSSGGILRQCLRLVCAVAVRNCLECQQHSQLKTRGDKALKPMHSLIPLGKSAAKSPVDIVTGGISPVRDLDRLLQDMDINRLRAVVFRDIEDSKQAQFLALAVVYFISVLMVSKYRDILEPQNERHSQSCTETGSENENVSLSEITPAAFSTLTTASVEESESTSSARRRDSGIGEETATGLGSHVEVTPHTAPPGVSAGPDAISEVLSTLSLEVNKSPETKNDRGNDLDTKATPSVSVSKNVNVKDILRSLVNIPADGVTVDPALLPPACLGALGDLSVEQPVQFRSFDRSVIVAAKKSAVSPSTFNTSIPTNAVSVVSSVDSAQASDMGGESPGSRSSNAKLPSVPTVDSVSQDPVSNMSITERLEHALEKAAPLLREIFVDFAPFLSRTLLGSHGQELLIEGTSLVCMKSSSSVVELVMLLCSQEWQNSIQKNAGLAFIELVNEGRLLSQTMKDHLVRVANEAEFILSRQRAEDIHRHAEFESLCAQYSADKREDEKMCDHLIRAAKYRDHVTATQLIQKIINILTDKHGAWGNSAVSRPLEFWRLDYWEDDLRRRRRFVRNPLGSTHPEATLKTAVEHVCIFKLRENSKATDEDILAKGKQSIRSQALGNQNSENEILLEGDDDTLSSVDEKDLENLAGPVSLSTPAQLVAPSVVVKGTLSVTSSELYFEVDEEDPNFKKIDPKILAYTEGLHGKWLFTEIRSIFSRRYLLQNTALEIFMANRVAVMFNFPDPATVKKVVNYLPRVGVGTSFGLPQTRRISLASPRQLFKASNMTQRWQHREISNFEYLMFLNTIAGRSYNDLNQYPVFPWVITNYESEELDLTLPTNFRDLSKPIGALNPKRAAFFAERYESWEDDQVPKFHYGTHYSTASFVLAWLLRIEPFTTYFLNLQGGKFDHADRTFSSISRAWRNSQRDTSDIKELIPEFYYLPEMFVNFNNYNLGVMDDGTVVSDVELPPWAKTSEEFVHINRLALESEFVSCQLHQWIDLIFGYKQQGPEAVRALNVFYYLTYEGAVNLNSITDPVLREAVEAQIRSFGQTPSQLLIEPHPPRGSAMQVSPLMFTDKAQQDVIMVLKFPSNSPVTHVAANTQPGLATPAVITVTANRLFAVNKWHNLPAHQGAVQDQPYQLPVEIDPLIASNTGMHRRQITDLLDQSIQVHSQCFVITSDNRYILVCGFWDKSFRVYSTDTGRLIQVVFGHWDVVTCLARSESYIGGNCYILSGSRDATLLLWYWNGKCSGIGDNPGSETAAPRAILTGHDYEVTCAAVCAELGLVLSGSQEGPCLIHSMNGDLLRTLEGPENCLKPKLIQASREGHCVIFYENGLFCTFSVNGKLQATMETDDNIRAIQLSRDGQYLLTGGDRGVVVVRQVSDLKQLFAYPGCDAGIRAMALSYDQRCIISGMASGSIVLFYNDFNRWHHEYQTRY

SEQ ID NO: 31648 - protein, 2851 aa, Homo sapiens
MASEDNRVPSPPPTGDDGGGGGREETPTEGGALSLKPGLPIRGIRMKFAVLTGLVEVGEVSNRDIVETVFNLLVGGQFDLEMNFIIQEGESINCMVDLLEKCDITCQAEVWSMFTAILKKSIRNLQVCTEVGLVEKVLGKIEKVDNMIADLLVDMLGVLASYNLTVRELKLFFSKLQGDKGRWPPHAGKLLSVLKHMPQKYGPDAFFNFPGKSAAAIALPPIAKWPYQNGFTFHTWLRMDPVNNINVDKDKPYLYCFRTSKGLGYSAHFVGGCLIVTSIKSKGKGFQHCVKFDFKPQKWYMVTIVHIYNRWKNSELRCYVNGELASYGEITWFVNTSDTFDKCFLGSSETADANRVFCGQMTAVYLFSEALNAAQIFAIYQLGLGYKGTFKFKAESDLFLAEHHKLLLYDGKLSSAIAFTYNPRATDAQLCLESSPKDNPSIFVHSPHALMLQDVKAVLTHSIQSAMHSIGGVQVLFPLFAQLDYRQYLSDEIDLTICSTLLAFIMELLKNSIAMQEQMLACKGFLVIGYSLEKSSKSHVSRAVLELCLAFSKYLSNLQNGMPLLKQLCDHVLLNPAIWIHTPAKVQLMLYTYLSTEFIGTVNIYNTIRRVGTVLLIMHTLKYYYWAVNPQDRSGITPKGLDGPRPNQKEMLSLRAFLLMFIKQLVMKDSGVKEDELQAILNYLLTMHEDDNLMDVLQLLVALMSEHPNSMIPAFDQRNGLRVIYKLLASKSEGIRVQALKAMGYFLKHLAPKRKAEVMLGHGLFSLLAERLMLQTNLITMTTYNVLFEILIEQIGTQVIHKQHPDPDSSVKIQNPQILKVIATLLRNSPQCPESMEVRRAFLSDMIKLFNNSRENRRSLLQCSVWQEWMLSLCYFNPKNSDEQKITEMVYAIFRILLYHAVKYEWGGWRVWVDTLSITHSKVTFEIHKENLANIFREQQGKVDEEIGLCSSTSVQAASGIRRDINVSVGSQQPDTKDSPVCPHFTTNGNENSSIEKTSSLESASNIELQTTNTSYEEMKAEQENQELPDEGTLEETLTNETRNADDLEVSSDIIEAVAISSNSFITTGKDSMTVSEVTASISSPSEEDASEMPEFLDKSIVEEEEDDDYVELKVEGSPTEEANLPTELQDNSLSPAASEAGEKLDMFGNDDKLIFQEGKPVTEKQTDTETQDSKDSGIQTMTASGSSAMSPETTVSQIAVESDLGQMLEEGKKATNLTRETKLINDCHGSVSEASSEQKIAKLDVSNVATDTERLELKASPNVEAPQPHRHVLEISRQHEQPGQGIAPDAVNGQRRDSRSTVFRIPEFNWSQMHQRLLTDLLFSIETDIQMWRSHSTKTVMDFVNSSDNVIFVHNTIHLISQVMDNMVMACGGILPLLSAATSATHELENIEPTQGLSIEASVTFLQRLISLVDVLIFASSLGFTEIEAEKSMSSGGILRQCLRLVCAVAVRNCLECQQHSQLKTRGDKALKPMHSLIPLGKSAAKSPVDIVTGGISPVRDLDRLLQDMDINRLRAVVFRDIEDSKQAQFLALAVVYFISVLMVSKYRDILEPQNERHSQSCTETGSENENVSLSEITPAAFSTLTTASVEESESTSSARRRDSGIGEETATGLGSHVEVTPHTAPPGVSAGPDAISEVLSTLSLEVNKSPETKNDRGNDLDTKATPSVSVSKNVNVKDILRSLVNIPADGVTVDPALLPPACLGALGDLSVEQPVQFRSFDRSVIVAAKKSAVSPSTFNTSIPTNAVSVVSSVDSAQASDMGGESPGSRSSNAKLPSVPTVDSVSQDPVSNMSITERLEHALEKAAPLLREIFVDFAPFLSRTLLGSHGQELLIEGTSLVCMKSSSSVVELVMLLCSQEWQNSIQKNAGLAFIELVNEGRLLSQTMKDHLVRVANEAEFILSRQRAEDIHRHAEFESLCAQYSADKREDEKMCDHLIRAAKYRDHVTATQLIQKIINILTDKHGAWGNSAVSRPLEFWRLDYWEDDLRRRRRFVRNPLGSTHPEATLKTAVEHATDEDILAKGKQSIRSQALGNQNSENEILLEGDDDTLSSVDEKDLENLAGPVSLSTPAQLVAPSVVVKGTLSVTSSELYFEVDEEDPNFKKIDPKILAYTEGLHGKWLFTEIRSIFSRRYLLQNTALEIFMANRVAVMFNFPDPATVKKVVNYLPRVGVGTSFGLPQTRRISLASPRQLFKASNMTQRWQHREISNFEYLMFLNTIAGRSYNDLNQYPVFPWVITNYESEELDLTLPTNFRDLSKPIGALNPKRAAFFAERYESWEDDQVPKFHYGTHYSTASFVLAWLLRIEPFTTYFLNLQGGKFDHADRTFSSISRAWRNSQRDTSDIKELIPEFYYLPEMFVNFNNYNLGVMDDGTVVSDVELPPWAKTSEEFVHINRLALESEFVSCQLHQWIDLIFGYKQQGPEAVRALNVFYYLTYEGAVNLNSITDPVLREAVEAQIRSFGQTPSQLLIEPHPPRGSAMQVSPLMFTDKAQQDVIMVLKFPSNSPVTHVAANTQPGLATPAVITVTANRLFAVNKWHNLPAHQGAVQDQPYQLPVEIDPLIASNTGMHRRQITDLLDQSIQVHSQCFVITSDNRYILVCGFWDKSFRVYSTDTGRLIQVVFGHWDVVTCLARSESYIGGNCYILSGSRDATLLLWYWNGKCSGIGDNPGETAAPRAILTGHDYEVTCAAVCAELGLVLSGSQEGPCLIHSMNGDLLRTLEGPENCLKPKLIQASREGHCVIFYENGLFCTFSVNGKLQATMETDDNIRAIQLSRDGQYLLTGGDRGVVVVRQVSDLKQLFAYPGCDAGIRAMALSYDQRCIISGMASGSIVLFYNDFNRWHHEYQTRY

SEQ ID NO: 31649 - protein, 714 aa, Homo sapiens
MLQNPQEKSQAYPRRRRPGCYAYRQNPEAIAAAAMYTFLPDNFSPAKPKPSKDLKPLLGSAVLGLLLVLAAVVAWCYYSVSLRKAERLRAELLDLKAGGFSIRNQKGEQVFRLAFRSGALDLDSCSRDGALLGCSLTADGLPLHFFIQTVRPKDTVMCYRVRWEEAAPGRAVEHAMFLGDAAAHWYGGAEMRTQHWPIRLDGQQEPQPFVTSDVYSSDAAFGGILERYWLSSRAAAIKVNDSVPFHLGWNSTERSLRLQARYHDTPYKPPAGRAAAPELSYRVCVGSDVTSIHKYMVRRYFNKPSRVPAPEAFRDPIWSTWALYGRAVDQDKVLRFAQQIRLHHFNSSHLEIDDMYTPAYGDFDFDEVKFPNASDMFRRLRDAGFRVTLWVHPFVNYNSSRFGEGVERELFVREPTGRLPALVRWWNGIGAVLDFTHPKARDWFQGHLRRLRSRYSVASFKFDAGEVSYLPRDFSTYRPLPDPSVWSRRYTEMALPFFSLAEVRVGYQSQNISCFFRLVDRDSVWGYDLGLRSLIPAVLTVSMLGYPFILPDMVGGNAVPQRTAGGDVPERELYIRWLEVAAFMPAMQFSIPPWRYDAEVVAIAQKFAALRASLVAPLLLELAGEVTDTGDPIVRPLWWIAPGDETAHRIDSQFLIGDTLLVAPVLEPGKQERDVYLPAGKWRSYKGELFDKTPVLLTDYPVDLDEIAYFTWAS

SEQ ID NO: 31650 - protein, 1927 aa, Homo sapiens
MELSWHVVFIALLSFSCWGSDWESDRNFISTAGPLTNDLLHNLSGLLGDQSSNFVAGDKDMYVCHQPLPTFLPEYFSSLHASQITHYKVFLSWAQLLPAGSTQNPDEKTVQCYRRLLKALKTARLQPMVILHHQTLPASTLRRTEAFADLFADYATFAFHSFGDLVGIWFTFSDLEEVIKELPHQESRASQLQTLSDAHRKAYEIYHESYAFQGGKLSVVLRAEDIPELLLEPPISALAQDTVDFLSLDLSYECQNEASLRQKLSKLQTIEPKVKVFIFNLKLPDCPSTMKNPASLLFSLFEAINKDQVLTIGFDINEFLSCSSSSKKSMSCSLTGSLALQPDQQQDHETTDSSPASAYQRIWEAFANQSRAERDAFLQDTFPEGFLWGASTGAFNVEGGWAEGGRGVSIWDPRRPLNTTEGQATLEVASDSYHKVASDVALLCGLRAQVYKFSISWSRIFPMGHGSSPSLPGVAYYNKLIDRLQDAGIEPMATLFHWDLPQALQDHGGWQNESVVDAFLDYAAFCFSTFGDRVKLWVTFHEPWVMSYAGYGTGQHPPGISDPGVASFKVAHLVLKAHARTWHHYNSHHRPQQQGHVGIVLNSDWAEPLSPERPEDLRASERFLHFMLGWFAHPVFVDGDYPATLRTQIQQMNRQCSHPVAQLPEFTEAEKQLLKGSADFLGLSHYTSRLISNAPQNTCIPSYDTIGGFSQHVNHVWPQTSSSWIRVVPWGIRRLLQFVSLEYTRGKVPIYLAGNGMPIGESENLFDDSLRVDYFNQYINEVLKAIKEDSVDVRSYIARSLIDGFEGPSGYSQRFGLHHVNFSDSSKSRTPRKSAYFFTSIIEKNGFLTKGAKRLLPPNTVNLPSKVRAFTFPSEVPSKAKVVWEKFSSQPKFERDLFYHGTFRDDFLWGVSSSAYQIEGAWDADGKGPSIWDNFTHTPGSNVKDNATGDIACDSYHQLDADLNMLRALKVKAYRFSISWSRIFPTGRNSSINSHGVDYYNRLINGLVASNIFPMVTLFHWDLPQALQDIGGWENPALIDLFDSYADFCFQTFGDRVKFWMTFNEPMYLAWLGYGSGEFPPGVKDPGWAPYRIAHAVIKAHARVYHTYDEKYRQEQKGVISLSLSTHWAEPKSPGVPRDVEAADRMLQFSLGWFAHPIFRNGDYPDTMKWKVGNRSELQHLATSRLPSFTEEEKRFIRATADVFCLNTYYSRIVQHKTPRLNPPSYEDDQEMAEEEDPSWPSTAMNRAAPWGTRRLLNWIKEEYGDIPIYITENGVGLTNPNTEDTDRIFYHKTYINEALKAYRLDGIDLRGYVAWSLMDNFEWLNGYTVKFGLYHVDFNNTNRPRTARASARYYTEVITNNGMPLAREDEFLYGRFPEGFIWSAASAAYQIEGAWRADGKGLSIWDTFSHTPLRVENDAIGDVACDSYHKIAEDLVTLQNLGVSHYRFSISWSRILPDGTTRYINEAGLNYYVRLIDTLLAASIQPQVTIYHWDLPQTLQDVGGWENETIVQRFKEYADVLFQRLGDKVKFWITLNEPFVIAYQGYGYGTAAPGVSNRPGTAPYIVGHNLIKAHAEAWHLYNDVYRASQGGVISITISSDWAEPRDPSNQEDVEAARRYVQFMGGWFAHPIFKNGDYNEVMKTRIRDRSLAAGLNKSRLPEFTESEKRRINGTYDFFGFNHYTTVLAYNLNYATAISSFDADRGVASIADRSWPDSGSFWLKMTPFGFRRILNWLKEEYNDPPIYVTENGVSQREETDLNDTARIYYLRTYINEALKAVQDKVDLRGYTVWSAMDNFEWATGFSERFGLHFVNYSDPSLPRIPKASAKFYASVVRCNGFPDPATGPHACLHQPDAGPTISPVRQEEVQFLGLMLGTTEAQTALYVLFSLVLLGVCGLAFLSYKYCKRSKQGKTQRSQQELSPVSSF

SEQ ID NO: 31651 - protein, 398 aa, Homo sapiens
MWLLLTMASLISVLGTTHGLFGKLHPGSPEVTMNISQMITYWGYPNEEYEVVTEDGYILEVNRIPYGKKNSGNTGQRPVVFLQHGLLASATNWISNLPNNSLAFILADAGYDVWLGNSRGNTWARRNLYYSPDSVEFWAFSFDEMAKYDLPATIDFIVKKTGQKQLHYVGHSQGTTIGFIAFSTNPSLAKRIKTFYALAPVATVKYTKSLINKLRFVPQSLFKFIFGDKIFYPHNFFDQFLATEVCSREMLNLLCSNALFIICGFDSKNFNTSRLDVYLSHNPAGTSVQNMFHWTQAVKSGKFQAYDWGSPVQNRMHYDQSQPPYYNVTAMNVPIAVWNGGKDLLADPQDVGLLLPKLPNLIYHKEIPFYNHLDFIWAMDAPQEVYNDIVSMISEDKK

SEQ ID NO: 31652 - protein, 365 aa, Homo sapiens
MWLLLTMASLISVLGTTHGLFGKLHPGSPEVTMNISQMITYWGYPNEEYEVVTEDGYILEVNRIPYGKKNSGNTDAGYDVWLGNSRGNTWARRNLYYSPDSVEFWAFSFDEMAKYDLPATIDFIVKKTGQKQLHYVGHSQGTTIGFIAFSTNPSLAKRIKTFYALAPVATVKYTKSLINKLRFVPQSLFKFIFGDKIFYPHNFFDQFLATEVCSREMLNLLCSNALFIICGFDSKNFNTSRLDVYLSHNPAGTSVQNMFHWTQAVKSGKFQAYDWGSPVQNRMHYDQSQPPYYNVTAMNVPIAVWNGGKDLLADPQDVGLLLPKLPNLIYHKEIPFYNHLDFIWAMDAPQEVYNDIVSMISEDKK

SEQ ID NO: 31653 - protein, 408 aa, Homo sapiens
MFSNANSRSKMWLLLTMASLISVLGTTHGLFGKLHPGSPEVTMNISQMITYWGYPNEEYEVVTEDGYILEVNRIPYGKKNSGNTGQRPVVFLQHGLLASATNWISNLPNNSLAFILADAGYDVWLGNSRGNTWARRNLYYSPDSVEFWAFSFDEMAKYDLPATIDFIVKKTGQKQLHYVGHSQGTTIGFIAFSTNPSLAKRIKTFYALAPVATVKYTKSLINKLRFVPQSLFKFIFGDKIFYPHNFFDQFLATEVCSREMLNLLCSNALFIICGFDSKNFNTSRLDVYLSHNPAGTSVQNMFHWTQAVKSGKFQAYDWGSPVQNRMHYDQSQPPYYNVTAMNVPIAVWNGGKDLLADPQDVGLLLPKLPNLIYHKEIPFYNHLDFIWAMDAPQEVYNDIVSMISEDKK

SEQ ID NO: 31654 - protein, 375 aa, Homo sapiens
MFSNANSRSKMWLLLTMASLISVLGTTHGLFGKLHPGSPEVTMNISQMITYWGYPNEEYEVVTEDGYILEVNRIPYGKKNSGNTDAGYDVWLGNSRGNTWARRNLYYSPDSVEFWAFSFDEMAKYDLPATIDFIVKKTGQKQLHYVGHSQGTTIGFIAFSTNPSLAKRIKTFYALAPVATVKYTKSLINKLRFVPQSLFKFIFGDKIFYPHNFFDQFLATEVCSREMLNLLCSNALFIICGFDSKNFNTSRLDVYLSHNPAGTSVQNMFHWTQAVKSGKFQAYDWGSPVQNRMHYDQSQPPYYNVTAMNVPIAVWNGGKDLLADPQDVGLLLPKLPNLIYHKEIPFYNHLDFIWAMDAPQEVYNDIVSMISEDKK

SEQ ID NO: 31655 - protein, 865 aa, Homo sapiens
MVVSAGPWSSEKAEMNILEINEKLRPQLAENKQQFRNLKERCFLTQLAGFLANRQKKYKYEECKDLIKFMLRNERQFKEEKLAEQLKQAEELRQYKVLVHSQERELTQLREKLREGRDASRSLNEHLQALLTPDEPDKSQGQDLQEQLAEGCRLAQHLVQKLSPENDEDEDEDVQVEEDEKVLESSAPREVQKAEESKVPEDSLEECAITCSNSHGPCDSIQPHKNIKITFEEDKVNSSLVVDRESSHDGCQDALNILPVPGPTSSATNVSMVVSAGPLSSEKAEMNILEINEKLCPQLAEKKQQFRSLKEKCFVTQVACFLAKQQNKYKYEECKDLIKSMLRNERQFKEEKLAEQLKQAEELRQYKVLVHSQERELTQLREKLREGRDASRSLNEHLQALLTPDEPDKSQGQDLQEQLAEGCRLAQHLVQKLSPENDNDDDEDVQVEVAEKVQKSSSPREMQKAEEKEVPEDSLEECAITCSNSHGPYDSNQPHRKTKITFEEDKVDSTLIGSSSHVEWEDAVHIIPENESDDEEEEEKGPVSPRNLQESEEEEVPQESWDEGYSTLSIPPERLASYQSYSSTFHSLEEQQVCMAVDIGRHRWDQVKKEDQEATGPRLSRELLDEKEPEVLQDSLDRCYSTPSVYLGLTDSCQPYRSAFYVLEQQRIGLAVDMDEIEKYQEVEEDQDPSCPRLSRELLAEKEPEVLQDSLDRCYSTPSGYLELPDLGQPYRSAVYSLEEQYLGLALDVDRIKKDQEEEEDQGPPCPRLSRELLEVVEPEVLQDSLDVIQLLPVVLNSLTPASPTEVPFMHWRKNMLAFLLTWEKLKRRGRGRKEGEEDQRRKEEGEEKKGKKIKTHHAPGSAAC

SEQ ID NO: 31656 - protein, 598 aa, Homo sapiens
MVVSAGPWSSEKAEMNILEINEKLRPQLAENKQQFRNLKERCFLTQLAGFLANRQKKYKYEECKDLIKFMLRNERQFKEEKLAEQLKQAEELRQYKVLVHSQERELTQLREKLREGRDASRSLNEHLQALLTPDEPDKSQGQDLQEQLAEGCRLAQHLVQKLSPENDEDEDEDVQVEEDEKVLESSAPREVQKAEESKVPEDSLEECAITCSNSHGPCDSIQPHKNIKITFEEDKVNSSLVVDRESSHDGCQDALNILPVPGPTSSATNVSMVVSAGPLSSEKAEMNILEINEKLCPQLAEKKQQFRSLKEKCFVTQVACFLAKQQNKYKYEECKDLIKSMLRNERQFKEEKLAEQLKQAEELRQYKVLVHSQERELTQLREKLREGRDASRSLNEHLQALLTPDEPDKSQGQDLQEQLAEGCRLAQHLVQKLSPENDNDDDEDVQVEVAEKVQKSSSPREMQKAEEKEVPEDSLEECAITCSNSHGPYDSNQPHRKTKITFEEDKVDSTLIGSSSHVEWEDAVHIIPENESDDEEEEEKGPVSPRNLQESEEEEVPQESWDEGYSTLSIPPERTSVGSSEKGGPRGNRSQAQQGAAG

SEQ ID NO: 31657 - protein, 475 aa, Homo sapiens
MESKALLVLTLAVWLQSLTASRGGVAAADQRRDFIDIESKFALRTPEDTAEDTCHLIPGVAESVATCHFNHSSKTFMVIHGWTVTGMYESWVPKLVAALYKREPDSNVIVVDWLSRAQEHYPVSAGYTKLVGQDVARFINWMEEEFNYPLDNVHLLGYSLGAHAAGIAGSLTNKKVNRITGLDPAGPNFEYAEAPSRLSPDDADFVDVLHTFTRGSPGRSIGIQKPVGHVDIYPNGGTFQPGCNIGEAIRVIAERGLGDVDQLVKCSHERSIHLFIDSLLNEENPSKAYRCSSKEAFEKGLCLSCRKNRCNNLGYEINKVRAKRSSKMYLKTRSQMPYKVFHYQVKIHFSGTESETHTNQAFEISLYGTVAESENIPFTLPEVSTNKTYSFLIYTEVDIGELLMLKLKWKSDSYFSWSDWWSSPGFAIQKIRVKAGETQKKVIFCSREKVSHLQKGKAPAVFVKCHDKSLNKKSG

SEQ ID NO: 31658 - protein, 1722 aa, Homo sapiens
MDDDDAKLKAEIEAELDKLSISSLEKEDIESDAKSETQSDDSDTDSVELPESVLHCINIIKNRSKAVEELILQDLEDTDILSCSYGAVSNNHMHLRTGLSTEYEESSEQLIKILSEIEKEEFMRSKTDCATPDFVPEPSPHDLPMDEHVLPDDADINFGYCEVEEKCRQSFEAWQEKQKELEDKEKQTLKAQRDREEKQFQEEEEKRHCWMKQFKVEKKKLENIQKQEQDKMNDELYKEEKIWKEKFKQHEEYIRNLHLQMEEERTRFKDQQEKEKNSLLKQQNNAAVKIQAKYKAFVAYQKYGPIIKEQIESKKRKAQEWKEKEAKIRQKEEENRKRLEEEQRIKEERKKQKEEERKRREKEYEEKKNIVKQEREQLISKEKIILREDASQQLIISSALKKSGYNNKHLSLEDISNDKGDIAKNLVDENSKKQEDVLLWLVEESNMKENVDRQTILKESIQVKLKESISSQTILADFKMEEKNENLAKKRCSEELVKQERKYENTDNKTELGNSDLKGNLKEQFPLQELKSDAQKEEKIMKHVINENTGQKTQIILGHNQEISEVKTNEEQKIIKDNQQKKIQKVEKEEIQEQNGLLYKDKDTLVISVKQRSLSLTSENSKDVRENVILQEKEIYSKSKEIEENPKDNAWNSGIVIFNTTDTMINIEGKRNDQDYVLGRHAPCEGLSNYNAESSMVSKEVNSLKSEIRNISEKCHENAPEPDSMTCCVSESTLLYSIEERRLAWIKSFKPWLEIFKQNQQKKIVRRKRPVKCPANMTPALDKLEILRCGPWDTLQQVTTVTFQDLPGCVLSTLAECTNLQFLSLRRCGLTSLHSLSNCKKLKYIDAQENHIEAIECENLENLCVVLLNKNQLTSLHGLDGCTNIQCLELSYNKITRIGYSFFLEEKLVDNAGFCHHLGTSTSYLSLAQVWIPTGLCWSWIPITSLTKNSDCNFLISHLYWNCGLESLKNLQQLILDHNQLINTKGLCDTPTIVYLDCSHNHLTDVEGVENCGLLQILKLQGNYLSELPSLENLVLLRELHLDDNSISTVEAFSSYWLPLLQNITISQNSLTKIVPLFHFVSLEKLDVSHNCLSDLKSAIKWFDACYSLHELSLTGNPLLQETNWRDSLLKVLPALRILNGNILNSNSESRTEEHNQLGSAGFLALCQSQIREFNLLIENYITGKGDVFTLDTAENLCHYFKKLMILSTEYRHAHERGDVTITKKDESEAQKNHLAPTNSDSTLQNGVFYSCAREGEPDSPDIPEKWMDSVSSHSPLSKSATCENMEGRHQEILVCQKREDSKASSIPTIRIPFKEVVMTNSLLRNHQNIEPSEKIMAAVVIQSYWRGYLMRRQTHFSTRLHTAATEGLPNSSIKNQTILKKGKRENIVNIRKQREKAAILIQAVWKGFILRKKLTTALEAIKNEESDEEYREIDLEDFIFDEAALEEEWLALDSTRFPSQTLLLSNQLHWPKIPGNLKWDDTSFNLPSNPAQAWLCNDKENLSSSEHTQFNSRSENKTSSWTPESKTSRKSLLKSEKEKKISEEWGFKDISTAQQMLKRAQKMKSKKLKKKIDSTVRLALFKNNENKVSLPKSPKMVQPRRDGYFEGIEEDPIHKDTTANEKLERNREYTYQWLHTQVGVHETTSSRNMKCNHFLPELDPDVLNGGRVQLVARLVSREDTDLDLFSMTNGSALSVNREKKNQAHRHSAGSSSKLWFPSKLI

SEQ ID NO: 31659 - protein, 1697 aa, Homo sapiens
MDDDDAKLKAEIEAELDKLSISSLEKEDIESDAKSETQSDDSDTDSVELPESVLHCINIIKNRSKAVEELILQDLEDTDILSCSYGAVSNNHMHLRTGLSTEYEESSEQLIKILSEIEKEEFMRSKTDCATPDFVPEPSPHDLPMDEHVLPDDADINFGYCEVEEKCRQSFEAWQEKQKELEDKEKQTLKAQRDREEKQFQEEEEKRHCWMKQFKVEKKKLENIQKEYIRNLHLQMEEERTRFKDQQEKEKNSLLKQQNNAAVKIQAKYKAFVAYQKYGPIIKEQIESKKRKAQEWKEKEAKIRQKEEENRKRLEEEQRIKEERKKQKEEERKRREKEYEEKKNIVKQEREQLISKEKIILREDASQQLIISSALKKSGYNNKHLSLEDISNDKGDIAKNLVDENSKKQEDVLLWLVEESNMKENVDRQTILKESIQVKLKESISSQTILADFKMEEKNENLAKKRCSEELVKQERKYENTDNKTELGNSDLKGNLKEQFPLQELKSDAQKEEKIMKHVINENTGQKTQIILGHNQEISEVKTNEEQKIIKDNQQKKIQKVEKEEIQEQNGLLYKDKDTLVISVKQRSLSLTSENSKDVRENVILQEKEIYSKSKEIEENPKDNAWNSGIVIFNTTDTMINIEGKRNDQDYVLGRHAPCEGLSNYNAESSMVSKEVNSLKSEIRNISEKCHENAPEPDSMTCCVSESTLLYSIEERRLAWIKSFKPWLEIFKQNQQKKIVRRKRPVKCPANMTPALDKLEILRCGPWDTLQQVTTVTFQDLPGCVLSTLAECTNLQFLSLRRCGLTSLHSLSNCKKLKYIDAQENHIEAIECENLENLCVVLLNKNQLTSLHGLDGCTNIQCLELSYNKITRIGYSFFLEEKLVDNAGFCHHLGTSTSYLSLAQVWIPTGLCWSWIPITSLTKNSDCNFLISHLYWNCGLESLKNLQQLILDHNQLINTKGLCDTPTIVYLDCSHNHLTDVEGVENCGLLQILKLQGNYLSELPSLENLVLLRELHLDDNSISTVEAFSSYWLPLLQNITISQNSLTKIVPLFHFVSLEKLDVSHNCLSDLKSAIKWFDACYSLHELSLTGNPLLQETNWRDSLLKVLPALRILNGNILNSNSESRTEEHNQLGSAGFLALCQSQIREFNLLIENYITGKGDVFTLDTAENLCHYFKKLMILSTEYRHAHERGDVTITKKDESEAQKNHLAPTNSDSTLQNGVFYSCAREGEPDSPDIPEKWMDSVSSHSPLSKSATCENMEGRHQEILVCQKREDSKASSIPTIRIPFKEVVMTNSLLRNHQNIEPSEKIMAAVVIQSYWRGYLMRRQTHFSTRLHTAATEGLPNSSIKNQTILKKGKRENIVNIRKQREKAAILIQAVWKGFILRKKLTTALEAIKNEESDEEYREIDLEDFIFDEAALEEEWLALDSTRFPSQTLLLSNQLHWPKIPGNLKWDDTSFNLPSNPAQAWLCNDKENLSSSEHTQFNSRSENKTSSWTPESKTSRKSLLKSEKEKKISEEWGFKDISTAQQMLKRAQKMKSKKLKKKIDSTVRLALFKNNENKVSLPKSPKMVQPRRDGYFEGIEEDPIHKDTTANEKLERNREYTYQWLHTQVGVHETTSSRNMKCNHFLPELDPDVLNGGRVQLVARLVSREDTDLDLFSMTNGSALSVNREKKNQAHRHSAGSSSKLWFPSKLI

SEQ ID NO: 31660 - protein, 875 aa, Homo sapiens
MSGTKPDILWAPHHVDRFVVCDSELSLYHVESTVNSELKAGSLRLSEDSAATLLSINSDTPYMKCVAWYLNYDPECLLAVGQANGRVVLTSLGQDHNSKFKDLIGKEFVPKHARQCNTLAWNPLDSNWLAAGLDKHRADFSVLIWDICSKYTPDIVPMEKVKLSAGETETTLLVTKPLYELGQNDACLSLCWLPRDQKLLLAGMHRNLAIFDLRNTSQKMFVNTKAVQGVTVDPYFHDRVASFYEGQVAIWDLRKFEKPVLTLTEQPKPLTKVAWCPTRTGLLATLTRDSNIIRLYDMQHTPTPIGDETEPTIIERSVQPCDNYIASFAWHPTSQNRMIVVTPNRTMSDFTVFERISLAWSPITSLMWACGRHLYECTEEENDNSLEKDIATKMRLRALSRYGLDTEQVWRNHILAGNEDPQLKSLWYTLHFMKQYTEDMDQKSPGNKGSLVYAGIKSIVKSSLGMVESSRHNWSGLDKQSDIQNLNEERILALQLCGWIKKGTDVDVGPFLNSLVQEGEWERAAAVALFNLDIRRAIQILNEGASSEKGDLNLNVVAMALSGYTDEKNSLWREMCSTLRLQLNNPYLCVMFAFLTSETGSYDGVLYENKVAVRDRVAFACKFLSDTQLNRYIEKLTNEMKEAGNLEGILLTGLTKDGVDLMESYVDRTGDVQTASYCMLQGSPLDVLKDERVQYWIENYRNLLDAWRFWHKRAEFDIHRSKLDPSSKPLAQVFVSCNFCGKSISYSCSAVPHQGRGFSQYGVSGSPTKSKVTSCPGCRKPLPRCALCLINMGTPVSSCPGGTKSDEKVDLSKDKKLAQFNNWFTWCHNCRHGGHAGHMLSWFRDHAECPVSACTCKCMQLDTTGNLVPAETVQP

SEQ ID NO: 31661 - protein, 567 aa, Homo sapiens
MSGTKPDILWAPHHVDRFVVCDSELSLYHVESTVNSELKAGSLRLSEDSAATLLSINSDTPYMKCVAWYLNYDPECLLAVGQANGRVVLTSLGQDHNSKFKDLIGKEFVPKHARQCNTLAWNPLDSNWLAAGLDKHRADFSVLIWDICSKYTPDIVPMEKVKLSAGETETTLLVTKPLYELGQNDACLSLCWLPRDQKLLLAGMHRNLAIFDLRNTSQKMFVNTKAVQGVTVDPYFHDRVASFYEGQVAIWDLRKFEKPVLTLTEQPKPLTKVAWCPTRTGLLATLTRDSNIIRLYDMQHTPTPIGDETEPTIIERSVQPCDNYIASFAWHPTSQNRMIVVTPNRTMSDFTVFERISLAWSPITSLMWACGRHLYECTEEENDNSLEKDIATKMRLRALSRYGLDTEQVWRNHILAGNEDPQLKSLWYTLHFMKQYTEDMDQKSPGNKGSLVYAGIKSIVKSSLGMVESSRHNWSGLDKQSDIQNLNEERILALQLCGWIKKGTDVDVGPFLNSLVQEGEWERAAAVALFNLDIRRAIQILNEGASSEKGRRSESQCGSNGFIGLYG

SEQ ID NO: 31662 - protein, 2845 aa, Homo sapiens
MALGKVLAMALVLALAVLGSLSPGARAGDCKGQRQVLREAPGFVTDGAGNYSVNGNCEWLIEAPSPQHRILLDFLFLDTECTYDYLFVYDGDSPRGPLLASLSGSTRPPPIEASSGKMLLHLFSDANYNLLGFNASFRFSLCPGGCQSHGQCQPPGVCACEPGWGGPDCGLQECSAYCGSHGTCASPLGPCRCEPGFLGRACDLHLWENQGAGWWHNVSARDPAFSARIGAAGAFLSPPGLLAVFGGQDLNNALGDLVLYNFSANTWESWDLSPAPAARHSHVAVAWAGSLVLMGGELADGSLTNDVWAFSPLGRGHWELLAPPASSSSGPPGLAGHAAALVDDVWLYVSGGRTPHDLFSSGLFRFRLDSTSGGYWEQVIPAGGRPPAATGHSMVFHAPSRALLVHGGHRPSTARFSVRVNSTELFHVDRHVWTTLKGRDGLQGPRERAFHTASVLGNYMVVYGGNVHTHYQEEKCYEDGIFFYHLGCHQWVSGAELAPPGTPEGRAAPPSGRYSHVAAVLGGSVLLVAGGYSGRPRGDLMAYKVPPFVFQAPAPDYHLDYCSMYTDHSVCSRDPECSWCQGACQAAPPPGTPLGACPAASCLGLGRLLGDCQACLAFSSPTAPPRGPGTLGWCVHNESCLPRPEQARCRGEQISGTVGWWGPAPVFVTSLEACVTQSFLPGLHLLTFQQPPNTSQPDKVSIVRSTTITLTPSAETDVSLVYRGFIYPMLPGGPGGPGAEDVAVWTRAQRLHVLARMARGPDTENMEEVGRWVAHQEKETRRLQRPGSARLFPLPGRDHKYAVEIQGQLNGSAGPGHSELTLLWDRTGVPGGSEISFFFLEPYRSSSCTSYSSCLGCLADQGCGWCLTSATCHLRQGGAHCGDDGAGGSLLVLVPTLCPLCEEHRDCHACTQDPFCEWHQSTSRKGDAACSRRGRGRGALKSPEECPPLCSQRLTCEDCLANSSQCAWCQSTHTCFLFAAYLARYPHGGCRGWDDSVHSEPRCRSCDGFLTCHECLQSHECGWCGNEDNPTLGRCLQGDFSGPLGGGNCSLWVGEGLGLPVALPARWAYARCPDVDECRLGLARCHPRATCLNTPLSYECHCQRGYQGDGISHCNRTCLEDCGHGVCSGPPDFTCVCDLGWTSDLPPPTPAPGPPAPRCSRDCGCSFHSHCRKRGPGFCDECQDWTWGEHCERCRPGSFGNATGSRGCRPCQCNGHGDPRRGHCDNLSGLCFCQDHTEGAHCQLCSPGYYGDPRAGGSCFRECGGRALLTNVSSVALGSRRVGGLLPPGGGAARAGPGLSYCVWVVSATEELQPCAPGTLCPPLTLTFSPDSSTPCTLSYVLAFDGFPRFLDTGVVQSDRSLIAAFCGQRRDRPLTVQALSGLLVLHWEANGSSSWGFNASVGSARCGSGGPGSCPVPQECVPQDGAAGAGLCRCPQGWAGPHCRMALCPENCNAHTGAGTCNQSLGVCICAEGFGGPDCATKLDGGQLVWETLMDSRLSADTASRFLHRLGHTMVDGPDATLWMFGGLGLPQGLLGNLYRYSVSERRWTQMLAGAEDGGPGPSPRSFHAAAYVPAGRGAMYLLGGLTAGGVTRDFWVLNLTTLQWRQEKAPQTVELPAVAGHTLTARRGLSLLLVGGYSPENGFNQQLLEYQLATGTWVSGAQSGTPPTGLYGHSAVYHEATDSLYVFGGFRFHVELAAPSPELYSLHCPDRTWSLLAPSQGAKRDRMRNVRGSSRGLGQVPGEQPGSWGFREVRKKMALWAALAGTGGFLEEISPHLKEPRPRLFHASALLGDTMVVLGGRSDPDEFSSDVLLYQVNCNAWLLPDLTRSASVGPPMEESVAHAVAAVGSRLYISGGFGGVALGRLLALTLPPDPCRLLSSPEACNQSGACTWCHGACLSGDQAHRLGCGGSPCSPMPRSPEECRRLRTCSECLARHPRTLQPGDGEASTPRCKWCTNCPEGACIGRNGSCTSENDCRINQREVFWAGNCSEAACGAADCEQCTREGKCMWTRQFKRTGETRRILSVQPTYDWTCFSHSLLNVSPMPVESSPPLPCPTPCHLLPNCTSCLDSKGADGGWQHCVWSSSLQQCLSPSYLPLRCMAGGCGRLLRGPESCSLGCAQATQCALCLRRPHCGWCAWGGQDGGGRCMEGGLSGPRDGLTCGRPGASWAFLSCPPEDECANGHHDCNETQNCHDQPHGYECSCKTGYTMDNMTGLCRPVCAQGCVNGSCVEPDHCRCHFGFVGRNCSTECRCNRHSECAGVGARDHCLLCRNHTKGSHCEQCLPLFVGSAVGGGTCRPCHAFCRGNSHICISRKELQMSKGEPKKYSLDPEEIENWVTEGPSEDEAVCVNCQNNSYGEKCESCLQGYFLLDGKCTKCQCNGHADTCNEQDGTGCPCQNNTETGTCQGSSPSDRRDCYKYQCAKCRESFHGSPLGGQQCYRLISVEQECCLDPTSQTNCFHEPKRRALGPGRTVLFGVQPKFTNVDIRLTLDVTFGAVDLYVSTSYDTFVVRVAPDTGVHTVHIQPPPAPPPPPPPADGGPRGAGDPGGAGASSGPGAPAEPRVREVWPRGLITYVTVTEPSAVLVVRGVRDRLVITYPHEHHALKSSRFYLLLLGVGDPSGPGANGSADSQGLLFFRQDQAHIDLFVFFSVFFSCFFLFLSLCVLLWKAKQALDQRQEQRRHLQEMTKMASRPFAKVTVCFPPDPTAPASAWKPAGLPPPAFRRSEPFLAPLLLTGAGGPWGPMGGGCCPPAIPATTAGLRAGPITLEPTEDGMAGVATLLLQLPGGPHAPNGACLGSALVTLRHRLHEYCGGGGGAGGSGHGTGAGRKGLLSQDNLTSMSL

SEQ ID NO: 31663 - protein, 2778 aa, Homo sapiens
MALGKVLAMALVLALAVLGSLSPGARAGDCKGQRQVLREAPGFVTDGAGNYSVNGNCEWLIEAPSPQHRILLDFLFLDTECTYDYLFVYDGDSPRGPLLASLSGSTRPPPIEASSGKMLLHLFSDANYNLLGFNASFRFSLCPGGCQSHGQCQPPGVCACEPGWGGPDCGLQECSAYCGSHGTCASPLGPCRCEPGFLGRACDLHLWENQGAGWWHNVSARDPAFSARIGAAGAFLSPPGLLAVFGGQDLNNALGDLVLYNFSANTWESWDLSPAPAARHSHVAVAWAGSLVLMGGELADGSLTNDVWAFSPLGRGHWELLAPPASSSSGPPGLAGHAAALVDDVWLYVSGGRTPHDLFSSGLFRFRLDSTSGGYWEQVIPAGGRPPAATGHSMVFHAPSRALLVHGGHRPSTARFSVRVNSTELFHVDRHVWTTLKGRDGLQGPRERAFHTASVLGNYMVVYGGNVHTHYQEEKCYEDGIFFYHLGCHQWVSGAELAPPGTPEGRAAPPSGRYSHVAAVLGGSVLLVAGGYSGRPRGDLMAYKVPPFVFQAPAPDYHLDYCSMYTDHSVCSRDPECSWCQGACQAAPPPGTPLGACPAASCLGLGRLLGDCQACLAFSSPTAPPRGPGTLGWCVHNESCLPRPEQARCRGEQISGTVGWWGPAPVFVTSLEACVTQSFLPGLHLLTFQQPPNTSQPDKEEVGRWVAHQEKETRRLQRPGSARLFPLPGRDHKYAVEIQGQLNGSAGPGHSELTLLWDRTGVPGGSEISFFFLEPYRSSSCTSYSSCLGCLADQGCGWCLTSATCHLRQGGAHCGDDGAGGSLLVLVPTLCPLCEEHRDCHACTQDPFCEWHQSTSRKGDAACSRRGRGRGALKSPEECPPLCSQRLTCEDCLANSSQCAWCQSTHTCFLFAAYLARYPHGGCRGWDDSVHSEPRCRSCDGFLTCHECLQSHECGWCGNEDNPTLGRCLQGDFSGPLGGGNCSLWVGEGLGLPVALPARWAYARCPDVDECRLGLARCHPRATCLNTPLSYECHCQRGYQGDGISHCNRTCLEDCGHGVCSGPPDFTCVCDLGWTSDLPPPTPAPGPPAPRCSRDCGCSFHSHCRKRGPGFCDECQDWTWGEHCERCRPGSFGNATGSRGCRPCQCNGHGDPRRGHCDNLSGLCFCQDHTEGAHCQLCSPGYYGDPRAGGSCFRECGGRALLTNVSSVALGSRRVGGLLPPGGGAARAGPGLSYCVWVVSATEELQPCAPGTLCPPLTLTFSPDSSTPCTLSYVLAFDGFPRFLDTGVVQSDRSLIAAFCGQRRDRPLTVQALSGLLVLHWEANGSSSWGFNASVGSARCGSGGPGSCPVPQECVPQDGAAGAGLCRCPQGWAGPHCRMALCPENCNAHTGAGTCNQSLGVCICAEGFGGPDCATKLDGGQLVWETLMDSRLSADTASRFLHRLGHTMVDGPDATLWMFGGLGLPQGLLGNLYRYSVSERRWTQMLAGAEDGGPGPSPRSFHAAAYVPAGRGAMYLLGGLTAGGVTRDFWVLNLTTLQWRQEKAPQTVELPAVAGHTLTARRGLSLLLVGGYSPENGFNQQLLEYQLATGTWVSGAQSGTPPTGLYGHSAVYHEATDSLYVFGGFRFHVELAAPSPELYSLHCPDRTWSLLAPSQGAKRDRMRNVRGSSRGLGQVPGEQPGSWGFREVRKKMALWAALAGTGGFLEEISPHLKEPRPRLFHASALLGDTMVVLGGRSDPDEFSSDVLLYQVNCNAWLLPDLTRSASVGPPMEESVAHAVAAVGSRLYISGGFGGVALGRLLALTLPPDPCRLLSSPEACNQSGACTWCHGACLSGDQAHRLGCGGSPCSPMPRSPEECRRLRTCSECLARHPRTLQPGDGEASTPRCKWCTNCPEGACIGRNGSCTSENDCRINQREVFWAGNCSEAACGAADCEQCTREGKCMWTRQFKRTGETRRILSVQPTYDWTCFSHSLLNVSPMPVESSPPLPCPTPCHLLPNCTSCLDSKGADGGWQHCVWSSSLQQCLSPSYLPLRCMAGGCGRLLRGPESCSLGCAQATQCALCLRRPHCGWCAWGGQDGGGRCMEGGLSGPRDGLTCGRPGASWAFLSCPPEDECANGHHDCNETQNCHDQPHGYECSCKTGYTMDNMTGLCRPVCAQGCVNGSCVEPDHCRCHFGFVGRNCSTECRCNRHSECAGVGARDHCLLCRNHTKGSHCEQCLPLFVGSAVGGGTCRPCHAFCRGNSHICISRKELQMSKGEPKKYSLDPEEIENWVTEGPSEDEAVCVNCQNNSYGEKCESCLQGYFLLDGKCTKCQCNGHADTCNEQDGTGCPCQNNTETGTCQGSSPSDRRDCYKYQCAKCRESFHGSPLGGQQCYRLISVEQECCLDPTSQTNCFHEPKRRALGPGRTVLFGVQPKFTNVDIRLTLDVTFGAVDLYVSTSYDTFVVRVAPDTGVHTVHIQPPPAPPPPPPPADGGPRGAGDPGGAGASSGPGAPAEPRVREVWPRGLITYVTVTEPSAVLVVRGVRDRLVITYPHEHHALKSSRFYLLLLGVGDPSGPGANGSADSQGLLFFRQDQAHIDLFVFFSVFFSCFFLFLSLCVLLWKAKQALDQRQEQRRHLQEMTKMASRPFAKVTVCFPPDPTAPASAWKPAGLPPPAFRRSEPFLAPLLLTGAGGPWGPMGGGCCPPAIPATTAGLRAGPITLEPTEDGMAGVATLLLQLPGGPHAPNGACLGSALVTLRHRLHEYCGGGGGAGGSGHGTGAGRKGLLSQDNLTSMSL

SEQ ID NO: 31664 - protein, 334 aa, Homo sapiens
MSQSKGKKRNPGLKIPKEAFEQPQTSSTPPRDLDSKACISIGNQNFEVKADDLEPIMELGRGAYGVVEKMRHVPSGQIMAVKRIRATVNSQEQKRLLMDLDISMRTVDCPFTVTFYGALFREGDVWICMELMDTSLDKFYKQVIDKGQTIPEDILGKIAVSIVKALEHLHSKLSVIHRDVKPSNVLINALGQVKMCDFGISGYLVDSVAKTIDAGCKPYMAPERINPELNQKGYSVKSDIWSLGITMIELAILRFPYDSWGTPFQQLKQVVEEPSPQLPADKFSAEFVDFTSQCLKKNSKERPTYPELMQHPFFTLHESKGTDVASFVKLILGD

SEQ ID NO: 31665 - protein, 278 aa, Homo sapiens
MELGRGAYGVVEKMRHVPSGQIMAVKRIRATVNSQEQKRLLMDLDISMRTVDCPFTVTFYGALFREGDVWICMELMDTSLDKFYKQVIDKGQTIPEDILGKIAVSIVKALEHLHSKLSVIHRDVKPSNVLINALGQVKMCDFGISGYLVDSVAKTIDAGCKPYMAPERINPELNQKGYSVKSDIWSLGITMIELAILRFPYDSWGTPFQQLKQVVEEPSPQLPADKFSAEFVDFTSQCLKKNSKERPTYPELMQHPFFTLHESKGTDVASFVKLILGD

SEQ ID NO: 31666 - protein, 638 aa, Homo sapiens
MFGSSRYLGSSEQPRANSLGPSDRTLVLCSLVEGEDKVNPSEPHGLRMEEKWLLKGKLRNQRNQNKLLSPNKKQRKNHTSKLQELALLLPIALKTGTKKLTKKEILVHVLQYIQYLQRNIDAAKALFKCHITTGEGGLAGLGQKPAWGPARRRRHSTPSSSPSSQKSCLQGACQKPRKKKLTQASESQTRTPKPRRSLALNKPEKLVAPSPDQKGSGTGGTTTPPRCPDSCGHPRPASSSPPGDRKGGQSQLTLLDLAEDTIHCDISSCWCQGSVQDDAPFPALLAQEDVARIHFLNKTQPHPRQKLVFYDSSEDVDKGSLDADPWLPAWTPENSPQGSPLFLGPPQIDVWSGTGHPSEILGLSPSLFSSPGKLLPDEILEDDMEYLTQAAFFEEVCLDLESSPSAYTQEAPQEKDTASKAPKDPPESHSLHRSSVSLDHCYLSLSGNSKAPSSSSSSSSSSSSSEDSDSEPLWKQREDMQANPVGTPGSSEEDEDTTWTPTRLASPLLAAEKKATKGQVARAPVKPKEKKKGPCPPQMKKKCVNGFIMFCRMNRKQYIRSCPGTASTAATKELAQLWRVMTQQERRPYCTKARRFSRQHNRIVKQDGSSSEAEDWETPKPFYQLLAEKALPLPPHLQ

SEQ ID NO: 31667 - protein, 516 aa, Homo sapiens
MPSGSHWTANSSKIITWLLEQPGKEEKRKTMAKVNRARSTSPPDGGWGWMIVAGCFLVTICTRAVTRCISIFFVEFQTYFTQDYAQTAWIHSIVDCVTMLCAPLGSVVSNHLSCQVGIMLGGLLASTGLILSSFATSLKHLYLTLGVLTGLGFALCYSPAIAMVGKYFSRRKALAYGIAMSGSGIGTFILAPVVQLLIEQFSWRGALLILGGFVLNLCVCGALMRPITLKEDHTTPEQNHVCRTQKEDIKRVSPYSSLTKEWAQTCLCCCLQQEYSFLLMSDFVVLAVSVLFMAYGCSPLFVYLVPYALSVGVSHQQAAFLMSILGVIDIIGNITFGWLTDRRCLKNYQYVCYLFAVGMDGLCYLCLPMLQSLPLLVPFSCTFGYFDGAYVTLIPVVTTEIVGTTSLSSALGVVYFLHAVPYLVSPPIAGRLVDTTGSYTAAFLLCGFSMIFSSVLLGFARLIKRMRKTQLQFIAKESDPKLQLWTNGSVAYSVARELDQKHGEPVATAVPGYSLT

SEQ ID NO: 31668 - protein, 99 aa, Homo sapiens
MGECPHLVDVRLGHRSLATGPEQSDICHTGSEARWTTTWYGSLSFSRHKYKMLADLTPGVEMSCRHWARWLTPVIPALWKAEAGGLPELRSSRPAWTTW

SEQ ID NO: 31669 - protein, 440 aa, Homo sapiens
MEYQILKMSLCLFILLFLTPGILCICPLQCICTERHRHVDCSGRNLSTLPSGLQENIIHLNLSYNHFTDLHNQLTQYTNLRTLDISNNRLESLPAHLPRSLWNMSAANNNIKLLDKSDTAYQWNLKYLDVSKNMLEKVVLIKNTLRSLEVLNLSSNKLWTVPTNMPSKLHIVDLSNNSLTQILPGTLINLTNLTHLYLHNNKFTFIPDQSFDQLFQLQEITLYNNRWSCDHKQNITYLLKWMMETKAHVIGTPCSTQISSLKEHNMYPTPSGFTSSLFTVSGMQTVDTINSLSVVTQPKVTKIPKQYRTKETTFGATLSKDTTFTSTDKAFVPYPEDTSTETINSHEAAAATLTIHLQDGMVTNTSLTSSTKSSPTPMTLSITSGMPNNFSEMPQQSTTLNLWREETTTNVKTPLPSVANAWKVNASFLLLLNVVVMLAV

SEQ ID NO: 31670 - protein, 214 aa, Homo sapiens
MASHEVDNAELGSASAHGTPGSEAGPEELNTSVYQPIDGSPDYQKAKLQVLGAIQILNAAMILALGVFLGSLQYPYHFQKHFFFFTFYTGYPIWGAVFFCSSGTLSVVAGIKPTRTWIQNSFGMNIASATIALVGTAFLSLNIAVNIQSLRSCHSSSESPDLCNYMGSISNGMVSLLLILTLLELCVTISTIAMWCNANCCNSREEISSPPNSV

SEQ ID NO: 31671 - protein, 168 aa, Homo sapiens
MASHEVDNAELGSASAHGTPGSEAGPEELNTSVYQPIDGSPDYQKAKLQVLGFCSSGTLSVVAGIKPTRTWIQNSFGMNIASATIALVGTAFLSLNIAVNIQSLRSCHSSSESPDLCNYMGSISNGMVSLLLILTLLELCVTISTIAMWCNANCCNSREEISSPPNSV

SEQ ID NO: 31672 - protein, 91 aa, Homo sapiens
MNIASATIALVGTAFLSLNIAVNIQSLRSCHSSSESPDLCNYMGSISNGMVSLLLILTLLELCVTISTIAMWCNANCCNSREEISSPPNSV

SEQ ID NO: 31673 - protein, 313 aa, Homo sapiens
MLARNNSLVTEFILAGLTDHPEFRQPLFFLFLVIYIVTMVGNLGLITLFGLNSHLHTPMYYFLFNLSFIDLCYSSVFTPKMLMNFVSKKNIISNVGCMTRLFFFLFFVISECYMLTSMAYDRYVAICNPLLYKVTMSHQVCSMLTFAAYIMGLAGATAHTGCMLRLTFCSANIINHYLCDILPLLQLSCTSTYVNEVVVLIVVGTNITVPSCTILISYVFIVTSILHIKSTQGRSKAFSTCSSHVIALSLFFGSAAFMYIKYSSGSMEQGKVSSVFYTNVVPMLNPLIYSLRNKDVKVALRKALIKIQRRNIF

SEQ ID NO: 31674 - protein, 321 aa, Homo sapiens
MNQTLNSSGTVESALNYSRGSTVHTAYLVLSSLAMFTCLCGMAGNSMVIWLLGFRMHRNPFCIYILNLAAADLLFLFSMASTLSLETQPLVNTTDKVHELMKRLMYFAYTVGLSLLTAISTQRCLSVLFPIWFKCHRPRHLSAWVCGLLWTLCLLMNGLTSSFCSKFLKFNEDRCFRVDMVQAALIMGVLTPVMTLSSLTLFVWVRRSSQQWRRQPTRLFVVVLASVLVFLICSLPLSIYWFVLYWLSLPPEMQVLCFSLSRLSSSVSSSANPVIYFLVGSRRSHRLPTRSLGTVLQQALREEPELEGGETPTVGTNEMGA

SEQ ID NO: 31675 - protein, 523 aa, Homo sapiens
MTQNKLKLCSKANVYTEVPDGGWGWAVAVSFFFVEVFTYGIIKTFGVFFNDLMDSFNESNSRISWIISICVFVLTFSAPLATVLSNRFGHRLVVMLGGLLVSTGMVAASFSQEVSHMYVAIGIISGLGYCFSFLPTVTILSQYFGKRRSIVTAVASTGECFAVFAFAPAIMALKERIGWRYSLLFVGLLQLNIVIFGALLRPIFIRGPASPKIVIQENRKEAQYMLENEKTRTSIDSIDSGVELTTSPKNVPTHTNLELEPKADMQQVLVKTSPRPSEKKAPLLDFSILKEKSFICYALFGLFATLGFFAPSLYIIPLGISLGIDQDRAAFLLSTMAIAEVFGRIGAGFVLNREPIRKIYIELICVILLTVSLFAFTFATEFWGLMSCSIFFGFMVGTIGGTHIPLLAEDDVVGIEKMSSAAGVYIFIQSIAGLAGPPLAGLLVDQSKIYSRAFYSCAAGMALAAVCLALVRPCKMGLCQHHHSGETKVVSHRGKTLQDIPEDFLEMDLAKNEHRVHVQMEPV

SEQ ID NO: 31676 - protein, 308 aa, Homo sapiens
MTMENYSMAAQFVLDGLTQQAELQLPLFLLFLGIYVVTVVGNLGMILLIAVSPLLHTPMYYFLSSLSFVDFCYSSVITPKMLVNFLGKKNTILYSECMVQLFFFVVFVVAEGYLLTAMAYDRYVAICSPLLYNAIMSSWVCSLLVLAAFFLGFLSALTHTSAMMKLSFCKSHIINHYFCDVLPLLNLSCSNTHLNELLLFIIAGFNTLVPTLAVAVSYAFILYSILHIRSSEGRSKAFGTCSSHLMAVVIFFGSITFMYFKPPSSNSLDQEKVSSVFYTTVIPMLNPLIYSLRNKDVKKALRKVLVGK

SEQ ID NO: 31677 - protein, 580 aa, Homo sapiens
MEVPQPEPAPGSALSPAGVCGGAQRPGHLPGLLLGSHGLLGSPVRAAASSPVTTLTQTMHDLAGLGSETPKSQVGTLLFRSRSRLTHLSLSRRASESSLSSESSESSDAGLCMDSPSPMDPHMAEQTFEQAIQAASRIIRNEQFAIRRFQSMPVRLLGHSPVLRNITNSQAPDGRRKSEAGSGAASSSGEDKENDGFVFKMPWKPTHPSSTHALAEWASRREAFAQRPSSAPDLMCLSPDRKMEVEELSPLALGRFSLTPAEGDTEEDDGFVDILESDLKDDDAVPPGMESLISAPLVKTLEKEEEKDLVMYSKCQRLFRSPSMPCSVIRPILKRLERPQDRDTPVQNKRRRSVTPPEEQQEAEEPKARVLRSKSLCHDEIENLLDSDHRELIGDYSKAFLLQTVDGKHQDLKYISPETMVALLTGKFSNIVDKFVIVDCRYPYEYEGGHIKTAVNLPLERDAESFLLKSPIAPCSLDKRVILIFHCEFSSERGPRMCRFIRERDRAVNDYPSLYYPEMYILKGGYKEFFPQHPNFCEPQDYRPMNHEAFKDELKTFRLKTRSWAGERSRRELCSRLQDQ

SEQ ID NO: 31678 - protein, 566 aa, Homo sapiens
MEVPQPEPAPGSALSPAGVCGGAQRPGHLPGLLLGSHGLLGSPVRAAASSPVTTLTQTMHDLAGLGSRSRLTHLSLSRRASESSLSSESSESSDAGLCMDSPSPMDPHMAEQTFEQAIQAASRIIRNEQFAIRRFQSMPVRLLGHSPVLRNITNSQAPDGRRKSEAGSGAASSSGEDKENDGFVFKMPWKPTHPSSTHALAEWASRREAFAQRPSSAPDLMCLSPDRKMEVEELSPLALGRFSLTPAEGDTEEDDGFVDILESDLKDDDAVPPGMESLISAPLVKTLEKEEEKDLVMYSKCQRLFRSPSMPCSVIRPILKRLERPQDRDTPVQNKRRRSVTPPEEQQEAEEPKARVLRSKSLCHDEIENLLDSDHRELIGDYSKAFLLQTVDGKHQDLKYISPETMVALLTGKFSNIVDKFVIVDCRYPYEYEGGHIKTAVNLPLERDAESFLLKSPIAPCSLDKRVILIFHCEFSSERGPRMCRFIRERDRAVNDYPSLYYPEMYILKGGYKEFFPQHPNFCEPQDYRPMNHEAFKDELKTFRLKTRSWAGERSRRELCSRLQDQ

SEQ ID NO: 31679 - protein, 539 aa, Homo sapiens
MEVPQPEPAPGSALSPAGVCGGAQRPGHLPGLLLGSHGLLGSPVRAAASSPVTTLTQTMHDLAGLGSETPKSQVGTLLFRSRSRLTHLSLSRRASESSLSSESSESSDAGLCMDSPSPMDPHMAEQTFEQAIQAASRIIRNEQFAIRRFQSMPDGFVFKMPWKPTHPSSTHALAEWASRREAFAQRPSSAPDLMCLSPDRKMEVEELSPLALGRFSLTPAEGDTEEDDGFVDILESDLKDDDAVPPGMESLISAPLVKTLEKEEEKDLVMYSKCQRLFRSPSMPCSVIRPILKRLERPQDRDTPVQNKRRRSVTPPEEQQEAEEPKARVLRSKSLCHDEIENLLDSDHRELIGDYSKAFLLQTVDGKHQDLKYISPETMVALLTGKFSNIVDKFVIVDCRYPYEYEGGHIKTAVNLPLERDAESFLLKSPIAPCSLDKRVILIFHCEFSSERGPRMCRFIRERDRAVNDYPSLYYPEMYILKGGYKEFFPQHPNFCEPQDYRPMNHEAFKDELKTFRLKTRSWAGERSRRELCSRLQDQ

SEQ ID NO: 31680 - protein, 601 aa, Homo sapiens
MEVPQPEPAPGSALSPAGVCGGAQRPGHLPGLLLGSHGLLGSPVRAAASSPVTTLTQTMHDLAGLGSRSRLTHLSLSRRASESSLSSESSESSDAGLCMDSPSPMDPHMAEQTFEQAIQAASRIIRNEQFAIRRFQSMPVRLLGHSPVLRNITNSQAPDGRRKSEAGSGAASSSGEDKENVRFWKAGVGALREEEGACWGGSLACEDPPLPSWLQDGFVFKMPWKPTHPSSTHALAEWASRREAFAQRPSSAPDLMCLSPDRKMEVEELSPLALGRFSLTPAEGDTEEDDGFVDILESDLKDDDAVPPGMESLISAPLVKTLEKEEEKDLVMYSKCQRLFRSPSMPCSVIRPILKRLERPQDRDTPVQNKRRRSVTPPEEQQEAEEPKARVLRSKSLCHDEIENLLDSDHRELIGDYSKAFLLQTVDGKHQDLKYISPETMVALLTGKFSNIVDKFVIVDCRYPYEYEGGHIKTAVNLPLERDAESFLLKSPIAPCSLDKRVILIFHCEFSSERGPRMCRFIRERDRAVNDYPSLYYPEMYILKGGYKEFFPQHPNFCEPQDYRPMNHEAFKDELKTFRLKTRSWAGERSRRELCSRLQDQ

SEQ ID NO: 31681 - protein, 289 aa, Homo sapiens
MFGLFGLWRTFDSVVFYLTLIVGLGGPVGNGLVLWNLGFRIKKGPFSIYLLHLAAADFLFLSCRVGFSVAQAALGAQDTLYFVLTFLWFAVGLWLLAAFSVERCLSDLFPACYQGCRPRHASAVLCALVWTPTLPAVPLPANACGLLRNSACPLVCPRYHVASVTWFLVLARVAWTAGVVLFVWVTCCSTRPRPRLYGIVLGALLLLFFCGLPSVFYWSLQPLLNFLLPVFSPLATLLACVNSSSKPLIYSGLGRQPGKREPLRSVLRRALGEGAELGARGQSLPMGLL

SEQ ID NO: 31682 - protein, 582 aa, Homo sapiens
MSPAPRPPRCLLLPLLTLGTALASLGSAQSSSFSPEAWLQQYGYLPPGDLRTHTQRSPQSLSAAIAAMQKFYGLQVTGKADADTMKAMRRPRCGVPDKFGAEIKANVRRKRYAIQGLKWQHNEITFCIQNYTPKVGEYATYEAIRKAFRVWESATPLRFREVPYAYIREGHEKQADIMIFFAEGFHGDSTPFDGEGGFLAHAYFPGPNIGGDTHFDSAEPWTVRNEDLNGNDIFLVAVHELGHALGLEHSSDPSAIMAPFYQWMDTENFVLPDDDRRGIQQLYGGESGFPTKMPPQPRTTSRPSVPDKPKNPTYGPNICDGNFDTVAMLRGEMFVFKERWFWRVRNNQVMDGYPMPIGQFWRGLPASINTAYERKDGKFVFFKGDKHWVFDEASLEPGYPKHIKELGRGLPTDKIDAALFWMPNGKTYFFRGNKYYRFNEELRAVDSEYPKNIKVWEGIPESPRGSFMGSDEVFTYFYKGNKYWKFNNQKLKVEPGYPKSALRDWMGCPSGGRPDEGTEEETEVIIIEVDEEGGGAVSAAAVVLPVLLLLLVLAVGLAVFFFRRHGTPRRLLYCQRSLLDKV

SEQ ID NO: 31683 - protein, 271 aa, Homo sapiens
MSAPRLLISIIIMVSASSSSCMGGKQMTQNYSTIFAEGNISQPVLMDINAVLCCPPIALRNLIIITWEIILRGQPSCTKAYKKETNETKETNCTVERITWVSRPDQNSDLQIRPVDTTHDGYYRGIVVTPDGNFHRGYHLQVLVTPEVNLFQSRNITAVCKAVTGKPAAQISWIPEGSILATKQEYWGNGTVTVKSTCPWEGHKSTVTCHVSHLTGNKSLSVKLNSGLRTSGSPALSLLIILYVKLSLFVVILVTTGFVFFQRINHVRKVL

SEQ ID NO: 31684 - protein, 250 aa, Homo sapiens
MGGKQMTQNYSTIFAEGNISQPVLMDINAVLCCPPIALRNLIIITWEIILRGQPSCTKAYKKETNETKETNCTVERITWVSRPDQNSDLQIRPVDTTHDGYYRGIVVTPDGNFHRGYHLQVLVTPEVNLFQSRNITAVCKAVTGKPAAQISWIPEGSILATKQEYWGNGTVTVKSTCPWEGHKSTVTCHVSHLTGNKSLSVKLNSGLRTSGSPALSLLIILYVKLSLFVVILVTTGFVFFQRINHVRKVL

SEQ ID NO: 31685 - protein, 1237 aa, Homo sapiens
MQLLGLLSILWMLKSSPGATGTLSTATSTSHVTFPRAEATRTALSNSPHSRYLAEWPQGVPQLASPAPGHRENAPMTLTTSPHDTLISETLLSSLVSSNTSTTPTSKFAFKVETTPPTVLVYSATTECVYPTSFIITISHSTSICVTTTQVTFTSSYTPTPVTQKPVTTVTRTYPMTTTEKGTSAMISSPSTTTARETPIVTVTPSSSVSATDTTFHTTISSTTRTTERTPLPTGSIHTTMSPTPVFTTLKTAVTSTSPITSTITSTNTVTSMTTTTSRPTATNTLSSLTSSILSSTPAPNTEVITSHTTTTTPPSTLVTTLPTAIARSTPTSETTPSFMSSIITTETTSHSTPSFSSSTIHSTVSSSTTAITSPFTTAETGVTSTPSSPSSLSTDIPTTSLRTLTPLSLSTSTSLTTTTDLPSIPTDISSLPTPIHIISSSPSIQSTETSSLVGTTSPTMSTVRATLRSTENTPISSFSTSIVVTPETPTTQAPPVLMSATGTQTSPVPTTVTFGSMDSSTSTLHTLTPSTALSKIMSTSQFPIPSTHSSTLQTTPSIPSLQTSLTSTSEFTTESFTRGSTSTNAILTSFSTIIWSSTPTIIMSSSPSSASITPVFATTIHSVPSSPYIFSTENVGSASITAFPSLSSSSTTSTSPTSSSLTTALTEITPFSYISLPSTTPCPGTITITIVPASPTDPCVEMDPSTEATSPPTTPLTVFPFTTEMVTCPSSISMQTTLATHMDTSSMTPESESSIIPNASSSTGTGTVPTNTVFTSTRLPTSETWLSNNSVIPTPLPGVSTIPLTMKPSSSLPTILRTSSKSTHPSPPTARTSQTSVATTQTPTTLTTCRTTPITSWMTTQSTLTTTAGTCDNGGTWEQGQCACLPGFSGDRCQLQTRCQNGGQWDGLKCQCPSTFYGSSCEFAVEQVDLDVVETEVGMEVSVDQQFSPDLNDNTSQAYRDFNKTFWNQMQKIFADMQGFTFKGVEILSLRNGSIVVDYLVLLEMPFSPQLESEYEQVKTTLKEGLQNASQDANSCQDSQALCFKPDSIKVNNNSKTELTPEAICRRAAPTGYEEFYFPLVEATRLRCVTKCTSGLDNAIDCHQGQCVLETSGPACRCYSTDTHWFSGPRCEVTVHWRALVGGLTAGAALLVLLLLALGVRAVRSEWWGRQRRGRSWDQDRKWFETWDEEVVGTFSNWGFEDDGTDKDTNFHVALENVDTTMKVHIKRPEMTSSSV

SEQ ID NO: 31686 - protein, 508 aa, Homo sapiens
MEEGPLPGGLPSPEDAMVTELLSPEGPFASENIGLKAPVKYEEDEFHVFKEAYLGPADPKEPVLHAFNPALGADCKGQVKAKLAGGDSDGGELLGEYPGIPELSALEDVALLQAPQPPACNVHFLSSLLPAHRSPAVLPLGAWVLEGASHPGVRMIPVEIKEAGGTTTSNNPEEATLQNLLAQESCCKFPSSQELEDASCCSLKKDSNPMVICQLKGGTQMLCIDNSRTRELKALHLVPQYQDQNNYLQSDVPKPMTALVGRFLPASTKLNLITQQLEGALPSVVNGSAFPSGSTLPGPPKITLAGYCDCFASGDFCNNCNCNNCCNNLHHDIERFKAIKACLGRNPEAFQPKIGKGQLGNVKPQHNKGCNCRRSGCLKNYCECYEAQIMCSSICKCIGCKNYEESPERKTLMSMPNYMQTGGLEGSHYLPPTKFSGLPRFSHDRRPSSCISWEVVEATCACLLAQGEEAEKEHCSKCLAEQMILEEFGRCLSQILHTEFKSKGLKME

SEQ ID NO: 31687 - protein, 306 aa, Homo sapiens
MEEGPLPGGLPSPEDAMVTELLSPEGPFASENIGLKAPVKYEEDEFHVFKEAYLGPADPKEPVLHAFNPALGADCKGQVKAKLAGGDSDGGELLGEYPGIPELSALEDVALLQAPQPPACNVHFLSSLLPAHRSPAVLPLGAWVLEGASHPGVRMIPVEIKEAGGTTTSNNPEEATLQNLLAQESCCKFPSSQELEDASCCSLKKDSNPMVICQLKGGTQMLCIDNSRTRELKALHLVPQYQDQNNYLQSDVPKPMTALVGRFLPASTKLNLITQQLEGALPSVVNGSAFPSGSTLPGPPKITLAG

SEQ ID NO: 31688 - protein, 251 aa, Homo sapiens
MEEGPLPGGLPSPEDAMVTELLSPEGPFASENIGLKAPVKYEEDEFHVFKEAYLGPADPKEPVLHAFNPALGADCKGQVKAKLAGGDSDGGELLGEYPGIPELSALEDVALLQAPQPPACNVHFLSSLLPAHRSPAVLPLGAWVLEGASHPGVRMIPVEIKEAGGTTTSNNPEEATLQNLLAQESCCKFPSSQELEDASCCSLKKDSNPMVICQLKGGTQMLCIDNSRTRELKALHLVPQYQDQNNYLQSA

SEQ ID NO: 31689 - protein, 193 aa, Homo sapiens
MDNLRETFLSLEDGLGSSDSPGLLSSWDWKDRAGPFELNQASPSQSLSPAPSLESYSSSPCPAVAGLPCEHGGASSGGSEGCSVGGASGLVEVDYNMLAFQPTHLQGGGGPKAQKGTKVRMSVQRRRKASEREKLRMRTLADALHTLRNYLPPVYSQRGQPLTKIQTLKYTIKYIGELTDLLNRGREPRAQSA

SEQ ID NO: 31690 - protein, 103 aa, Homo sapiens
MAHYKAADSKREQFRRYLEKSGVLDTLTKVLVALYEEPEKPNSALDFLKHHLGAATPENPEIELLRLELAEMKEKYEAIVEENKKLKAKLAQYEPPQEEKRAE

SEQ ID NO: 31691 - protein, 1186 aa, Homo sapiens
MEVDTEEKRHRTRSKGVRVPVEPAIQELFSCPTPGCDGSGHVSGKYARHRSVYGCPLAKKRKTQDKQPQEPAPKRKPFAVKADSSSVDECDDSDGTEDMDEKEEDEGEEYSEDNDEPGDEDEEDEEGDREEEEEIEEEDEDDDEDGEDVEDEEEEEEEEEEEEEEEENEDHQMNCHNTRIMQDTEKDDNNNDEYDNYDELVAKSLLNLGKIAEDAAYRARTESEMNSNTSNSLEDDSDKNENLGRKSELSLDLDSDVVRETVDSLKLLAQGHGVVLSENMNDRNYADSMSQQDSRNMNYVMLGKPMNNGLMEKMVEESDEEVCLSSLECLRNQCFDLARKLSETNPQERNPQQNMNIRQHVRPEEDFPGRTPDRNYSDMLNLMRLEEQLSPRSRVFASCAKEDGCHERDDDTTSVNSDRSEEVFDMTKGNLTLLEKAIALETERAKAMREKMAMEAGRRDNMRSYEDQSPRQLPGEDRKPKSSDSHVKKPYYGKDPSRTEKKESKCPTPGCDGTGHVTGLYPHHRSLSGCPHKDRVPPEILAMHESVLKCPTPGCTGRGHVNSNRNSHRSLSGCPIAAAEKLAKAQEKHQSCDVSKSSQASDRVLRPMCFVKQLEIPQYGYRNNVPTTTPRSNLAKELEKYSKTSFEYNSYDNHTYGKRAIAPKVQTRDISPKGYDDAKRYCKDPSPSSSSTSSYAPSSSSNLSCGGGSSASSTCSKSSFDYTHDMEAAHMAATAILNLSTRCREMPQNLSTKPQDLCATRNPDMEVDENGTLDLSMNKQRPRDSCCPILTPLEPMSPQQQAVMNNRCFQLGEGDCWDLPVDYTKMKPRRIDEDESKDITPEDLDPFQEALEERRYPGEVTIPSPKPKYPQCKESKKDLITLSGCPLADKSIRSMLATSSQELKCPTPGCDGSGHITGNYASHRSLSGCPRAKKSGIRIAQSKEDKEDQEPIRCPVPGCDGQGHITGKYASHRSASGCPLAAKRQKDGYLNGSQFSWKSVKTEGMSCPTPGCDGSGHVSGSFLTHRSLSGCPRATSAMKKAKLSGEQMLTIKQRASNGIENDEEIKQLDEEIKELNESNSQMEADMIKLRTQITTMESNLKTIEEENKVIEQQNESLLHELANLSQSLIHSLANIQLPHMDPINEQNFDAYVTTLTEMYTNQDRYQSPENKALLENIKQAVRGIQV

SEQ ID NO: 31692 - protein, 184 aa, Homo sapiens
MSCPTPGCDGSGHVSGSFLTHRSLSGCPRATSAMKKAKLSGEQMLTIKQRASNGIENDEEIKQLDEEIKELNESNSQMEADMIKLRTQVTITTMESNLKTIEEENKVIEQQNESLLHELANLSQSLIHSLANIQLPHMDPINEQNFDAYVTTLTEMYTNQDRYQSPENKALLENIKQAVRGIQV

SEQ ID NO: 31693 - protein, 1184 aa, Homo sapiens
MEVDTEEKRHRTRSKGVRVPVEPAIQELFSCPTPGCDGSGHVSGKYARHRSVYGCPLAKKRKTQDKQPQEPAPKRKPFAVKADSSSVDECDDSDGTEDMDEKEEDEGEEYSEDNDEPGDEDEEDEEGDREEEEEIEEEDEDDDEDGEDVEDEEEEEEEEEEEEEEEENEDHQMNCHNTRIMQDTEKDDNNNDEYDNYDELVAKSLLNLGKIAEDAAYRARTESEMNSNTSNSLEDDSDKNENLGRKSELSLDLDSDVVRETVDSLKLLAQGHGVVLSENMNDRNYADSMSQQDSRNMNYVMLGKPMNNGLMEKMVEESDEEVCLSSLECLRNQCFDLARKLSETNPQERNPQQNMNIRQHVRPEEDFPGRTPDRNYSDMLNLMRLEEQLSPRSRVFASCAKEDGCHERDDDTTSVNSDRSEEVFDMTKGNLTLLEKAIALETERAKAMREKMAMEAGRRDNMRSYEDQSPRQLPGEDRKPKSSDSHVKKPYYDPSRTEKKESKCPTPGCDGTGHVTGLYPHHRSLSGCPHKDRVPPEILAMHESVLKCPTPGCTGRGHVNSNRNSHRSLSGCPIAAAEKLAKAQEKHQSCDVSKSSQASDRVLRPMCFVKQLEIPQYGYRNNVPTTTPRSNLAKELEKYSKTSFEYNSYDNHTYGKRAIAPKVQTRDISPKGYDDAKRYCKDPSPSSSSTSSYAPSSSSNLSCGGGSSASSTCSKSSFDYTHDMEAAHMAATAILNLSTRCREMPQNLSTKPQDLCATRNPDMEVDENGTLDLSMNKQRPRDSCCPILTPLEPMSPQQQAVMNNRCFQLGEGDCWDLPVDYTKMKPRRIDEDESKDITPEDLDPFQEALEERRYPGEVTIPSPKPKYPQCKESKKDLITLSGCPLADKSIRSMLATSSQELKCPTPGCDGSGHITGNYASHRSLSGCPRAKKSGIRIAQSKEDKEDQEPIRCPVPGCDGQGHITGKYASHRSASGCPLAAKRQKDGYLNGSQFSWKSVKTEGMSCPTPGCDGSGHVSGSFLTHRSLSGCPRATSAMKKAKLSGEQMLTIKQRASNGIENDEEIKQLDEEIKELNESNSQMEADMIKLRTQITTMESNLKTIEEENKVIEQQNESLLHELANLSQSLIHSLANIQLPHMDPINEQNFDAYVTTLTEMYTNQDRYQSPENKALLENIKQAVRGIQV

SEQ ID NO: 31694 - protein, 725 aa, Homo sapiens
MVMKASVDDDDSGWELSMPEKMEKSNTNWVDITQDFEEACRELKLGELLHDKLFGLFEAMSAIEMMDPKMDAGMIGNQVNRKVLNFEQAIKDGTIKIKDLTLPELIGIMDTCFCCLITWLEGHSLAQTVFTCLYIHNPDFIEDPAMKAFALGILKICDIAREKVNKAAVFEEEDFQSMTYGFKMANSVTDLRVTGMLKDVEDDMQRRVKSTRSRQGEERDPEVELEHQQCLAVFSRVKFTRVLLTVLIAFTKKETSAVAEAQKLMVQAADLLSAIHNSLHHGIQAQNDTTKGDHPIMMGFEPLVNQRLLPPTFPRYAKIIKREEMVNYFARLIDRIKTVCEVVNLTNLHCILDFFCEFSEQSPCVLSRSLLQTTFLVDNKKVFGTHLMQDMVKDALRSFVSPPVLSPKCYLYNNHQAKDCIDSFVTHCVRPFCSLIQIHGHNRARQRDKLGHILEEFATLQDEAEKVDAALHTMLLKQEPQRQHLACLGTWVLYHNLRIMIQYLLSGFELELYSMHEYYYIYWYLSEFLYAWLMSTLSRADGSQMAEERIMEEQQKGRSSKKTKKKKKVRPLSREITMSQAYQNMCAGMFKTMVAFDMDGKVRKPKFELDSEQVRYEHRFAPFNSVMTPPPVHYLQFKEMSDLNKYSPPPQSPELYVAASKHFQQAKMILENIPNPDHEVNRILKVAKPNFVVMKLLAGGHKKESKVPPEFDFSAHKYFPVVKLV

SEQ ID NO: 31695 - protein, 294 aa, Homo sapiens
MVMKASVDDDDSGWELSMPEKMEKSNTNWVDITQDFEEACRELKLGELLHDKLFGLFEAMSAIEMMDPKMDAGMIGNQVNRKVLNFEQAIKDGTIKIKDLTLPELIGIMDTCFCCLITWLEGHSLAQTVFTCLYIHNPDFIEDPAMKAFALGILKICDIAREKVNKAAVFEEEDFQSMTYGFKMANSVTDLRVTGMLKDVEDDMQRRVKSTRSRQGEERDPEVELEHQQCLAVFSRVKFTRVLLTVLIAFTKKETSAVAEAQKLMVQAADLLSAIHNSLHHGIQAQNDTTKGGL

SEQ ID NO: 31696 - protein, 139 aa, Homo sapiens
MALRMLWAGQAKGILGGWGIICLVMSLLLQHPGVYSKCYFQAQAPCHYEGKYFTLGESWLRKDCFHCTCLHPVGVGCCDTSQHPIDFPAGCEVRQEAGTCQFSLVQKSDPRLPCKGGGPDPEWGSANTPVPGAPAPHSS

SEQ ID NO: 31697 - protein, 208 aa, Homo sapiens
MPPKKDVPVKKPAGPSISKPAAKPAAAGAPPAKTKAEPAVPQAPQKTQEPPVDLSKVVIEFNKDQLEEFKEAFELFDRVGDGKILYSQCGDVMRALGQNPTNAEVLKVLGNPKSDELKSRRVDFETFLPMLQAVAKNRGQGTYEDYLEGFRVFDKEGNGKVMGAELRHVLTTLGEKMTEEEVETVLAGHEDSNGCINYEAFLKHILSV

SEQ ID NO: 31698 - protein, 207 aa, Homo sapiens
MRLNQNTLLLGKKVVLVPYTSEHVPSRYHEWMKSEELQRLTASEPLTLEQEYAMQCSWQEDADKCTFIVLDAEKWQAQPGATEESCMVGDVNLFLTDLEDLTLGEIEVMIAEPSCRGKGLGTEAVLAMLSYGVTTLGLTKFEAKIGQGNEPSIRMFQKLHFEQVATSSVFQEVTLRLTVSESEHQWLLEQTSHVEEKPYRDGSAEPC

SEQ ID NO: 31699 - protein, 206 aa, Homo sapiens
MRLNQNTLLLGKKVVLVPYTSEHVPRYHEWMKSEELQRLTASEPLTLEQEYAMQCSWQEDADKCTFIVLDAEKWQAQPGATEESCMVGDVNLFLTDLEDLTLGEIEVMIAEPSCRGKGLGTEAVLAMLSYGVTTLGLTKFEAKIGQGNEPSIRMFQKLHFEQVATSSVFQEVTLRLTVSESEHQWLLEQTSHVEEKPYRDGSAEPC

SEQ ID NO: 31700 - protein, 154 aa, Homo sapiens
MGLSDGEWQLVLNVWGKVEADIPGHGQEVLIRLFKGHPETLEKFDKFKHLKSEDEMKASEDLKKHGATVLTALGGILKKKGHHEAEIKPLAQSHATKHKIPVKYLEFISECIIQVLQSKHPGDFGADAQGAMNKALELFRKDMASNYKELGFQG

SEQ ID NO: 31701 - protein, 921 aa, Homo sapiens
MAPLALVGVTLLLAAPPCSGAATPTPSLPPPPANDSDTSTGGCQGSYRCQPGVLLPVWEPDDPSLGDKAARAVVYFVAMVYMFLGVSIIADRFMAAIEVITSKEKEITITKANGETSVGTVRIWNETVSNLTLMALGSSAPEILLSVIEVCGHNFQAGELGPGTIVGSAAFNMFVVIAVCIYVIPAGESRKIKHLRVFFVTASWSIFAYVWLYLILAVFSPGVVQVWEALLTLVFFPVCVVFAWMADKRLLFYKYVYKRYRTDPRSGIIIGAEGDPPKSIELDGTFVGAEAPGELGGLGPGPAEARELDASRREVIQILKDLKQKHPDKDLEQLVGIANYYALLHQQKSRAFYRIQATRLMTGAGNVLRRHAADASRRAAPAEGAGEDEDDGASRIFFEPSLYHCLENCGSVLLSVTCQGGEGNSTFYVDYRTEDGSAKAGSDYEYSEGTLVFKPGETQKELRIGIIDDDIFEEDEHFFVRLLNLRVGDAQGMFEPDGGGRPKGRLVAPLLATVTILDDDHAGIFSFQDRLLHVSECMGTVDVRVVRSSGARGTVRLPYRTVDGTARGGGVHYEDACGELEFGDDETMKTLQVKIVDDEEYEKKDNFFIELGQPQWLKRGISALLLNQGDGDRKLTAEEEEARRIAEMGKPVLGENCRLEVIIEESYDFKNTVDKLIKKTNLALVIGTHSWREQFLEAITVSAGDEEEEEDGSREERLPSCFDYVMHFLTVFWKVLFACVPPTEYCHGWACFGVSILVIGLLTALIGDLASHFGCTVGLKDSVNAVVFVALGTSIPDTFASKVAALQDQCADASIGNVTGSNAVNVFLGLGVAWSVAAVYWAVQGRPFEVRTGTLAFSVTLFTVFAFVGIAVLLYRRRPHIGGELGGPRGPKLATTALFLGLWLLYILFASLEAYCHIRGF

SEQ ID NO: 31702 - protein, 104 aa, Homo sapiens
MSSAARSRLTRATRQEMLFLALLLLPVVVAFARAEAEEDGDLQCLCVKTTSQVRPRHITSLEVIKAGPHCPTAQLIATLKNGRKICLDLQALLYKKIIKEHLES

SEQ ID NO: 31703 - protein, 753 aa, Homo sapiens
MERRAWSLQCTAFVLFCAWCALNSAKAKRQFVNEWAAEIPGGPEAASAIAEELGYDLLGQIGSLENHYLFKHKNHPRRSRRSAFHITKRLSDDDRVIWAEQQYEKERSKRSALRDSALNLFNDPMWNQQWYLQDTRMTAALPKLDLHVIPVWQKGITGKGVVITVLDDGLEWNHTDIYANYDPEASYDFNDNDHDPFPRYDPTNENKHGTRCAGEIAMQANNHKCGVGVAYNSKVGGIRMLDGIVTDAIEASSIGFNPGHVDIYSASWGPNDDGKTVEGPGRLAQKAFEYGVKQGRQGKGSIFVWASGNGGRQGDNCDCDGYTDSIYTISISSASQQGLSPWYAEKCSSTLATSYSSGDYTDQRITSADLHNDCTETHTGTSASAPLAAGIFALALEANPNLTWRDMQHLVVWTSEYDPLANNPGWKKNGAGLMVNSRFGFGLLNAKALVDLADPRTWRSVPEKKECVVKDNDFEPRALKANGEVIIEIPTRACEGQENAIKSLEHVQFEATIEYSRRGDLHVTLTSAAGTSTVLLAERERDTSPNGFKNWDFMSVHTWGENPIGTWTLRITDMSGRIQNEGRIVNWKLILHGTSSQPEHMKQPRVYTSYNTVQNDRRGVEKMVDPGEEQPTQENPKENTLVSKSPSSSSVGGRRDELEEGAPSQAMLRLLQSAFSKNSPPKQSPKKSPSAKLNIPYENFYEALEKLNKPSQLKDSEDSLYNDYVDVFYNTKPYKHRDDRLLQALVDILNEEN

SEQ ID NO: 31704 - protein, 706 aa, Homo sapiens
MGKGSISFLFFSQIGSLENHYLFKHKNHPRRSRRSAFHITKRLSDDDRVIWAEQQYEKERSKRSALRDSALNLFNDPMWNQQWYLQDTRMTAALPKLDLHVIPVWQKGITGKGVVITVLDDGLEWNHTDIYANYDPEASYDFNDNDHDPFPRYDPTNENKHGTRCAGEIAMQANNHKCGVGVAYNSKVGGIRMLDGIVTDAIEASSIGFNPGHVDIYSASWGPNDDGKTVEGPGRLAQKAFEYGVKQGRQGKGSIFVWASGNGGRQGDNCDCDGYTDSIYTISISSASQQGLSPWYAEKCSSTLATSYSSGDYTDQRITSADLHNDCTETHTGTSASAPLAAGIFALALEANPNLTWRDMQHLVVWTSEYDPLANNPGWKKNGAGLMVNSRFGFGLLNAKALVDLADPRTWRSVPEKKECVVKDNDFEPRALKANGEVIIEIPTRACEGQENAIKSLEHVQFEATIEYSRRGDLHVTLTSAAGTSTVLLAERERDTSPNGFKNWDFMSVHTWGENPIGTWTLRITDMSGRIQNEGRIVNWKLILHGTSSQPEHMKQPRVYTSYNTVQNDRRGVEKMVDPGEEQPTQENPKENTLVSKSPSSSSVGGRRDELEEGAPSQAMLRLLQSAFSKNSPPKQSPKKSPSAKLNIPYENFYEALEKLNKPSQLKDSEDSLYNDYVDVFYNTKPYKHRDDRLLQALVDILNEEN

SEQ ID NO: 31705 - protein, 636 aa, Homo sapiens
MGQGPRSPHKVGRRFPAGGKRGRGAKGSGRPLPGRKRQPWPPPDGRSEPAPDSHPHLSPEALGYFRRALSALKEAPETGEERDLMVHNIMKEVETQALALSTNRTGSEMLQELLGFSPLKPLCRVWAALRSNLRTVACHRCGVHVLQSALLQLPRLLGSAAEEEEEEEEDGKDGPTETLEELVLGLAAEVCDDFLVYCGDTHGSFVVRTLLQVLGGTILESERARPRGSQSSEAQKTPAQECKPADFEVPETFLNRLQDLSSSFLKDIAVFITDKISSFCLQVALQVLHRKLPQFCAHLCNAVIGYLSTRGSSVDGSPLLLFLRDQTSSRLLEQVLLVLEPPRLQSLFEEHLQGQLQTLAAHPIANFPLQRLLDAVTTPELLSPVFEELSPVLEAVLAQGHPGVVIALVGACRRVGAYQAKVLQLLLEAFHCAEPSSRQVACVPLFATLMAYEVYYGLTEEEGAVPAEHQVAMAAARALGDVTVLGSLLLQHLLHFSTPGLVLRSLGALTGPQLLSLAQSPAGSHVLDAILTSPSVTRKLRRRVLQNLKGQYVALACSRHGSRVLDAIWSGAALRARKEIAAELGEQNQELIRDPFGHHVARNVALTTFLKRREAWEQQQGAVAKRRRALNSILED

SEQ ID NO: 31706 - protein, 535 aa, Homo sapiens
MGQGPRSPHKVGRRFPAGGKRGRGAKGSGRPLPGRKRQPWPPPDGRSEPAPDSHPHLSPEALGYFRRALSALKEAPETGEERDLMVHNIMKEVETQALALSTNRTGSEMLQELLGFSPLKPLCRVWAALRSNLRTVACHRCGVHVLQSALLQLPRLLGSAAEEEEEEEEDGKDGPTETLEELVLGLAAEVCDDFLVYCGDTHGSFVVRTLLQVLGGTILESERARPRGSQSSEAQKTPAQECKPADFEVPETFLNRLQDLSSSFLKDIAVFITDKISSFCLQVALQVLHRKLPQFCAHLCNAVIGYLSTRGSSVDGSPLLLFLRDQTSSRLLEQVLLVLEPPRLQSLFEEHLQGQLQTLAAHPIANFPLQRLLDAVTTPELLSPVFEELSPVLEAVLAQGHPGVVIALVGACRRVGAYQAKVLQLLLEAFHCAEPSSRQVACVPLFATLMAYEVYYGLTEEEGAVPAEHQVAMAAARALGDVTVLGSLLLQHLLHFSTPGLVLRSLGALTGPQLLSLAQRPGRKLLLSLGSRTRS

SEQ ID NO: 31707 - protein, 377 aa, Homo sapiens
MLSSCVRPVPTTVRFVDSLICNSSRSFMDLKALLSSLNDFASLSFAESWDNVGLLVEPSPPHTVNTLFLTNDLTEEVMEEVLQKKADLILSYHPPIFRPMKRITWNTWKERLVIRALENRVGIYSPHTAYDAAPQGVNNWLAKGLGACTSRPIHPSKAPNYPTEGNHRVEFNVNYTQDLDKVMSAVKGIDGVSVTSFSARTGNEEQTRINLNCTQKALMQVVDFLSRNKQLYQKTEILSLEKPLLLHTGMGRLCTLDESVSLATMIDRIKRHLKLSHIRLALGVGRTLESQVKVVALCAGSGSSVLQGVEADLYLTGEMSHHDTLDAASQGINVILCEHSNTERGFLSDLRDMLDSHLENKINIILSETDRDPLQVV

SEQ ID NO: 31708 - protein, 350 aa, Homo sapiens
MDLKALLSSLNDFASLSFAESWDNVGLLVEPSPPHTVNTLFLTNDLTEEVMEEVLQKKADLILSYHPPIFRPMKRITWNTWKERLVIRALENRVGIYSPHTAYDAAPQGVNNWLAKGLGACTSRPIHPSKAPNYPTEGNHRVEFNVNYTQDLDKVMSAVKGIDGVSVTSFSARTGNEEQTRINLNCTQKALMQVVDFLSRNKQLYQKTEILSLEKPLLLHTGMGRLCTLDESVSLATMIDRIKRHLKLSHIRLALGVGRTLESQVKVVALCAGSGSSVLQGVEADLYLTGEMSHHDTLDAASQGINVILCEHSNTERGFLSDLRDMLDSHLENKINIILSETDRDPLQVV

SEQ ID NO: 31709 - protein, 285 aa, Homo sapiens
MLSSCVRPVPTTVRFVDSLICNSSRSFMDLKALLSSLNDFASLSFAESWDNVGLLVEPSPPHTVNTLFLTNDLTEEVMEEVLQKKADLILSYHPPIFRPMKRITWNTWKERLVIRALENRVGIYSPHTAYDAAPQGVNNWLAKGLGACTSRPIHPSKAPNYPTEGNHRVEFNVNYTQDLDKVMSAVKGIDGVSVTSFSARTGNEEQTRINLNCTQKALMQVVDFLSRNKQLYQKTEILSLEKSLKSKSWPCVLVLGAAFCRVLRLTFTSQVRCPIMILWMLLPKE

SEQ ID NO: 31710 - protein, 99 aa, Homo sapiens
MAAAAASRGVGAKLGLREIRIHLCQRSPGSQGVRDFIEKRYVELKKANPDLPILIRECSDVQPKLWARYAFGQETNVPLNNFSADQVTRALENVLSGKA

SEQ ID NO: 31711 - protein, 76 aa, Homo sapiens
MAAAAASRGVGAKLGLREIRIHLCQRSPGSQGVRDFIEKRYVELKKANPDLPILIRECSDVQPKLWARYASRVQNS

SEQ ID NO: 31712 - protein, 370 aa, Homo sapiens
MAAERQEALREFVAVTGAEEDRARFFLESAGWDLQIALASFYEDGGDEDIVTISQATPSSVSRGTAPSDNRVTSFRDLIHDQDEDEEEEEGQRFYAGGSERSGQQIVGPPRKKSPNELVDDLFKGAKEHGAVAVERVTKSPGETSKPRPFAGGGYRLGAAPEEESAYVAGEKRQHSSQDVHVVLKLWKSGFSLDNGELRSYQDPSNAQFLESIRRGEVPAELRRLAHGGQVNLDMEDHRDEDFVKPKGAFKAFTGEGQKLGSTAPQVLSTSSPAQQAENEAKASSSILIDESEPTTNIQIRLADGGRLVQKFNHSHRISDIRLFIVDARPAMAATSFILMTTFPNKELADESQTLKEANLLNAVIVQRLT

SEQ ID NO: 31713 - protein, 339 aa, Homo sapiens
MAAERQEALREFVAVTGAEEDRARFFLESAGWDLQIALASFYEDGGDEDIVTISQATPSSVSRGTAPSDNRVTSFRDLIHDQDEDEEEEEGQRFYAGGSERSGQQIVGPPRKKSPNELVDDLFKGAKEHGAVAVERVTKSPGETSKPRVHVVLKLWKSGFSLDNGELRSYQDPSNAQFLESIRRGEVPAELRRLAHGGQVNLDMEDHRDEDFVKPKGAFKAFTGEGQKLGSTAPQVLSTSSPAQQAENEAKASSSILIDESEPTTNIQIRLADGGRLVQKFNHSHRISDIRLFIVDARPAMAATSFILMTTFPNKELADESQTLKEANLLNAVIVQRLT

SEQ ID NO: 31714 - protein, 372 aa, Homo sapiens
MAAERQEALREFVAVTGAEEDRARFFLESAGWDLQIALASFYEDGGDEDIVTISQATPSSVSRGTAPSDNRVTSFRDLIHDQDEDEEEEEGQRSRFYAGGSERSGQQIVGPPRKKSPNELVDDLFKGAKEHGAVAVERVTKSPGETSKPRPFAGGGYRLGAAPEEESAYVAGEKRQHSSQDVHVVLKLWKSGFSLDNGELRSYQDPSNAQFLESIRRGEVPAELRRLAHGGQVNLDMEDHRDEDFVKPKGAFKAFTGEGQKLGSTAPQVLSTSSPAQQAENEAKASSSILIDESEPTTNIQIRLADGGRLVQKFNHSHRISDIRLFIVDARPAMAATSFILMTTFPNKELADESQTLKEANLLNAVIVQRLT

SEQ ID NO: 31715 - protein, 259 aa, Homo sapiens
MTKMKMRRKRKARGAKEHGAVAVERVTKSPGETSKPRPFAGGGYRLGAAPEEESAYVAGEKRQHSSQDVHVVLKLWKSGFSLDNGELRSYQDPSNAQFLESIRRGEVPAELRRLAHGGQVNLDMEDHRDEDFVKPKGAFKAFTGEGQKLGSTAPQVLSTSSPAQQAENEAKASSSILIDESEPTTNIQIRLADGGRLVQKFNHSHRISDIRLFIVDARPAMAATSFILMTTFPNKELADESQTLKEANLLNAVIVQRLT

SEQ ID NO: 31716 - protein, 344 aa, Homo sapiens
MSPQGPAVLSLGSLCLDTNQAPNWTGLQTLLQQLPPQDIDERYCLALGEEERAELQLFCARRKQEALGQGVARLVLPKLEGHTCEKCRELLKPGEYGVFAARAGEQRCWHQPCFACQACGQALINLIYFYHDGQLYCGRHHAELLRPRCPACDQLIFSWRCTEAEGQRWHENHFCCQDCAGPLGGGRYALPGGSPCCPSCFENRYSDAGSSWAGALEGQAFLGETGLDRTEGRDQTSVNSATLSRTLLAAAGGSSLQTQRGLPGSSPQQENRPGDKAEAPKGQEQCRLETIRDPKDTPFSTCSSSSDSEPEGFFLGERLPQSWKTPGSLQAEDSNASKTHCTMC

SEQ ID NO: 31717 - protein, 312 aa, Homo sapiens
MSPQGPAVLSLGSLCLDTNQAPNWTGLQTLLQQLPPQDIDERYCLALGEEERAELQLFCARRKQEALGQGVARLVLPKLEGHTCEKCRELLKPGEYGVFAARAGEQRCWHQPCFACQACGQALINLIYFYHDGQLYCGRHHAELLRPRCPACDQLIFSWRCTEAEGQRWHENHFCCQDCAGPLGGGRYALPGGSPCCPSCFENRYSDAGSSWAGALEGQAFLGAPPPHPPDPSLGARSSHRASLAGAFQGPPEPTPRRGRGCGARLPPRRGRRTPSGGGGGPWRGLSAAAAARTAQGLGGAGGWASPPLAAV

SEQ ID NO: 31718 - protein, 384 aa, Homo sapiens
MSVQNSGWPHQEDSPKPQDPGPPANSDSDSGHLPGEDPEDTHAQGPAVLSLGSLCLDTNQAPNWTGLQTLLQQLPPQDIDERYCLALGEEERAELQLFCARRKQEALGQGVARLVLPKLEGHTCEKCRELLKPGEYGVFAARAGEQRCWHQPCFACQACGQALINLIYFYHDGQLYCGRHHAELLRPRCPACDQLIFSWRCTEAEGQRWHENHFCCQDCAGPLGGGRYALPGGSPCCPSCFENRYSDAGSSWAGALEGQAFLGETGLDRTEGRDQTSVNSATLSRTLLAAAGGSSLQTQRGLPGSSPQQENRPGDKAEAPKGQEQCRLETIRDPKDTPFSTCSSSSDSEPEGFFLGERLPQSWKTPGSLQAEDSNASKTHCTMC

SEQ ID NO: 31719 - protein, 344 aa, Homo sapiens
MGVCGYLFLPWKCLVVVSLRLLFLVPTGVPVRSGDATFPKAMDNVTVRQGESATLRCTIDNRVTRVAWLNRSTILYAGNDKWCLDPRVVLLSNTQTQYSIEIQNVDVYDEGPYTCSVQTDNHPKTSRVHLIVQVSPKIVEISSDISINEGNNISLTCIATGRPEPTVTWRHISPKAVGFVSEDEYLEIQGITREQSGDYECSASNDVAAPVVRRVKVTVNYPPYISEAKGTGVPVGQKGTLQCEASAVPSAEFQWYKDDKRLIEGKKGVKVENRPFLSKLIFFNVSEHDYGNYTCVASNKLGHTNASIMLFGPGAVSEVSNGTSRRAGCVWLLPLLVLHLLLKF

SEQ ID NO: 31720 - protein, 344 aa, Homo sapiens
MKTIQPKMHNSISWAIFTGLAALCLFQGVPVRSGDATFPKAMDNVTVRQGESATLRCTIDNRVTRVAWLNRSTILYAGNDKWCLDPRVVLLSNTQTQYSIEIQNVDVYDEGPYTCSVQTDNHPKTSRVHLIVQVSPKIVEISSDISINEGNNISLTCIATGRPEPTVTWRHISPKAVGFVSEDEYLEIQGITREQSGDYECSASNDVAAPVVRRVKVTVNYPPYISEAKGTGVPVGQKGTLQCEASAVPSAEFQWYKDDKRLIEGKKGVKVENRPFLSKLIFFNVSEHDYGNYTCVASNKLGHTNASIMLFGPGAVSEVSNGTSRRAGCVWLLPLLVLHLLLKF

SEQ ID NO: 31721 - protein, 316 aa, Homo sapiens
MGVCGYLFLPWKCLVVVSLRLLFLVPTGVPVRSGDATFPKAMDNVTVRQGESATLRCTIDNRVTRVAWLNRSTILYAGNDKWCLDPRVVLLSNTQTQYSIEIQNVDVYDEGPYTCSVQTDNHPKTSRVHLIVQVSPKIVEISSDISINEGNNISLTCIATGRPEPTVTWRHISPKAVGFVSEDEYLEIQGITREQSGDYECSASNDVAAPVVRRVKVTVNYPPYISEAKGTGVPVGQKGTLQCEASAVPSAEFQWYKDDKRLIEGKKGVKVENRPFLSKLIFFNVSEHDYGNYTCVASNKLGHTNASIMLFGETVL

SEQ ID NO: 31722 - protein, 355 aa, Homo sapiens
MGVCGYLFLPWKCLVVVSLRLLFLVPTGVPVRSGDATFPKAMDNVTVRQGESATLRCTIDNRVTRVAWLNRSTILYAGNDKWCLDPRVVLLSNTQTQYSIEIQNVDVYDEGPYTCSVQTDNHPKTSRVHLIVQVSPKIVEISSDISINEGNNISLTCIATGRPEPTVTWRHISPKAVGFVSEDEYLEIQGITREQSGDYECSASNDVAAPVVRRVKVTVNYPPYISEAKGTGVPVGQKGTLQCEASAVPSAEFQWYKDDKRLIEGKKGVKVENRPFLSKLIFFNVSEHDYGNYTCVASNKLGHTNASIMLFEVKTTALTPWKGPGAVSEVSNGTSRRAGCVWLLPLLVLHLLLKF

SEQ ID NO: 31723 - protein, 796 aa, Homo sapiens
MLRGGRRGQLGWHSWAAGPGSLLAWLILASAGAAPCPDACCPHGSSGLRCTRDGALDSLHHLPGAENLTELYIENQQHLQHLELRDLRGLGELRNLTIVKSGLRFVAPDAFHFTPRLSRLNLSFNALESLSWKTVQGLSLQELVLSGNPLHCSCALRWLQRWEEEGLGGVPEQKLQCHGQGPLAHMPNASCGVPTLKVQVPNASVDVGDDVLLRCQVEGRGLEQAGWILTELEQSATVMKSGGLPSLGLTLANVTSDLNRKNVTCWAENDVGRAEVSVQVNVSFPASVQLHTAVEMHHWCIPFSVDGQPAPSLRWLFNGSVLNETSFIFTEFLEPAANETVRHGCLRLNQPTHVNNGNYTLLAANPFGQASASIMAAFMDNPFEFNPEDPIPVSFSPVDTNSTSGDPVEKKDETPFGVSVAVGLAVFACLFLSTLLLVLNKCGRRNKFGINRPAVLAPEDGLAMSLHFMTLGGSSLSPTEGKGSGLQGHIIENPQYFSDACVHHIKRRDIVLKWELGEGAFGKVFLAECHNLLPEQDKMLVAVKALKEASESARQDFQREAELLTMLQHQHIVRFFGVCTEGRPLLMVFEYMRHGDLNRFLRSHGPDAKLLAGGEDVAPGPLGLGQLLAVASQVAAGMVYLAGLHFVHRDLATRNCLVGQGLVVKIGDFGMSRDIYSTDYYRVGGRTMLPIRWMPPESILYRKFTTESDVWSFGVVLWEIFTYGKQPWYQLSNTEAIDCITQGRELERPRACPPEVYAIMRGCWQREPQQRHSIKDVHARLQALAQAPPVYLDVLG

SEQ ID NO: 31724 - protein, 790 aa, Homo sapiens
MLRGGRRGQLGWHSWAAGPGSLLAWLILASAGAAPCPDACCPHGSSGLRCTRDGALDSLHHLPGAENLTELYIENQQHLQHLELRDLRGLGELRNLTIVKSGLRFVAPDAFHFTPRLSRLNLSFNALESLSWKTVQGLSLQELVLSGNPLHCSCALRWLQRWEEEGLGGVPEQKLQCHGQGPLAHMPNASCGVPTLKVQVPNASVDVGDDVLLRCQVEGRGLEQAGWILTELEQSATVMKSGGLPSLGLTLANVTSDLNRKNVTCWAENDVGRAEVSVQVNVSFPASVQLHTAVEMHHWCIPFSVDGQPAPSLRWLFNGSVLNETSFIFTEFLEPAANETVRHGCLRLNQPTHVNNGNYTLLAANPFGQASASIMAAFMDNPFEFNPEDPIPDTNSTSGDPVEKKDETPFGVSVAVGLAVFACLFLSTLLLVLNKCGRRNKFGINRPAVLAPEDGLAMSLHFMTLGGSSLSPTEGKGSGLQGHIIENPQYFSDACVHHIKRRDIVLKWELGEGAFGKVFLAECHNLLPEQDKMLVAVKALKEASESARQDFQREAELLTMLQHQHIVRFFGVCTEGRPLLMVFEYMRHGDLNRFLRSHGPDAKLLAGGEDVAPGPLGLGQLLAVASQVAAGMVYLAGLHFVHRDLATRNCLVGQGLVVKIGDFGMSRDIYSTDYYRVGGRTMLPIRWMPPESILYRKFTTESDVWSFGVVLWEIFTYGKQPWYQLSNTEAIDCITQGRELERPRACPPEVYAIMRGCWQREPQQRHSIKDVHARLQALAQAPPVYLDVLG

SEQ ID NO: 31725 - protein, 760 aa, Homo sapiens
MKEAALICLAPSVPPILTVKSWDTMQLRAARSRCTNLLAASYIENQQHLQHLELRDLRGLGELRNLTIVKSGLRFVAPDAFHFTPRLSRLNLSFNALESLSWKTVQGLSLQELVLSGNPLHCSCALRWLQRWEEEGLGGVPEQKLQCHGQGPLAHMPNASCGVPTLKVQVPNASVDVGDDVLLRCQVEGRGLEQAGWILTELEQSATVMKSGGLPSLGLTLANVTSDLNRKNVTCWAENDVGRAEVSVQVNVSFPASVQLHTAVEMHHWCIPFSVDGQPAPSLRWLFNGSVLNETSFIFTEFLEPAANETVRHGCLRLNQPTHVNNGNYTLLAANPFGQASASIMAAFMDNPFEFNPEDPIPDTNSTSGDPVEKKDETPFGVSVAVGLAVFACLFLSTLLLVLNKCGRRNKFGINRPAVLAPEDGLAMSLHFMTLGGSSLSPTEGKGSGLQGHIIENPQYFSDACVHHIKRRDIVLKWELGEGAFGKVFLAECHNLLPEQDKMLVAVKALKEASESARQDFQREAELLTMLQHQHIVRFFGVCTEGRPLLMVFEYMRHGDLNRFLRSHGPDAKLLAGGEDVAPGPLGLGQLLAVASQVAAGMVYLAGLHFVHRDLATRNCLVGQGLVVKIGDFGMSRDIYSTDYYRVGGRTMLPIRWMPPESILYRKFTTESDVWSFGVVLWEIFTYGKQPWYQLSNTEAIDCITQGRELERPRACPPEVYAIMRGCWQREPQQRHSIKDVHARLQALAQAPPVYLDVLG

SEQ ID NO: 31726 - protein, 698 aa, Homo sapiens
MLRGGRRGQLGWHSWAAGPGSLLAWLILASAGAAPCPDACCPHGSSGLRCTRDGALDSLHHLPGAENLTELYIENQQHLQHLELRDLRGLGELRNLTIVKSGLRFVAPDAFHFTPRLSRLNLSFNALESLSWKTVQGLSLQELVLSGNPLHCSCALRWLQRWEEEGLGGVPEQKLQCHGQGPLAHMPNASCVPASVQLHTAVEMHHWCIPFSVDGQPAPSLRWLFNGSVLNETSFIFTEFLEPAANETVRHGCLRLNQPTHVNNGNYTLLAANPFGQASASIMAAFMDNPFEFNPEDPIPDTNSTSGDPVEKKDETPFGVSVAVGLAVFACLFLSTLLLVLNKCGRRNKFGINRPAVLAPEDGLAMSLHFMTLGGSSLSPTEGKGSGLQGHIIENPQYFSDACVHHIKRRDIVLKWELGEGAFGKVFLAECHNLLPEQDKMLVAVKALKEASESARQDFQREAELLTMLQHQHIVRFFGVCTEGRPLLMVFEYMRHGDLNRFLRSHGPDAKLLAGGEDVAPGPLGLGQLLAVASQVAAGMVYLAGLHFVHRDLATRNCLVGQGLVVKIGDFGMSRDIYSTDYYRVGGRTMLPIRWMPPESILYRKFTTESDVWSFGVVLWEIFTYGKQPWYQLSNTEAIDCITQGRELERPRACPPEVYAIMRGCWQREPQQRHSIKDVHARLQALAQAPPVYLDVLG

SEQ ID NO: 31727 - protein, 388 aa, Homo sapiens
MRTLRRLKFMSSPSLSDLGKREPAAAADERGTQQRRACANATWNSIHNGVIAVFQRKGLPDQELFSLNEGVRQLLKTELGSFFTEYLQNQLLTKGMVILRDKIRFYEGQKLLDSLAETWDFFFSDVLPMLQAIFYPVQGKEPSVRQLALLHFRNAITLSVKLEDALARAHARVPPAIVQMLLVLQGVHESRGVTEDYLRLETLVQKVVSPYLGTYGLHSSEGPFTHSCILEKRLLRRSRSGDVLAKNPVVRSKSYNTPLLNPVQEHEAEGAAAGGTSIRRHSVSEMTSCPEPQGFSDPPGQGPTGTFRSSPAPHSGPCPSRLYPTTQPPEQGLDPTRSSLPRSSPENLVDQILESVDSDSEGIFIDFGRGRGSGMSDLEGSGGRQSVV

SEQ ID NO: 31728 - protein, 287 aa, Homo sapiens
MAPMPTGQKLLDSLAETWDFFFSDVLPMLQAIFYPVQGKEPSVRQLALLHFRNAITLSVKLEDALARAHARVPPAIVQMLLVLQGVHESRGVTEDYLRLETLVQKVVSPYLGTYGLHSSEGPFTHSCILEKRLLRRSRSGDVLAKNPVVRSKSYNTPLLNPVQEHEAEGAAAGGTSIRRHSVSEMTSCPEPQGFSDPPGQGPTGTFRSSPAPHSGPCPSRLYPTTQPPEQGLDPTRSSLPRSSPENLVDQILESVDSDSEGIFIDFGRGRGSGMSDLEGSGGRQSVV

SEQ ID NO: 31729 - protein, 379 aa, Homo sapiens
MSSPSLSDLGKREPAAAADERGTQQRRACANATWNSIHNGVIAVFQRKGLPDQELFSLNEGVRQLLKTELGSFFTEYLQNQLLTKGMVILRDKIRFYEGQKLLDSLAETWDFFFSDVLPMLQAIFYPVQGKEPSVRQLALLHFRNAITLSVKLEDALARAHARVPPAIVQMLLVLQGVHESRGVTEDYLRLETLVQKVVSPYLGTYGLHSSEGPFTHSCILEKRLLRRSRSGDVLAKNPVVRSKSYNTPLLNPVQEHEAEGAAAGGTSIRRHSVSEMTSCPEPQGFSDPPGQGPTGTFRSSPAPHSGPCPSRLYPTTQPPEQGLDPTRSSLPRSSPENLVDQILESVDSDSEGIFIDFGRGRGSGMSDLEGSGGRQSVV

SEQ ID NO: 31730 - protein, 293 aa, Homo sapiens
MVILRDKIRFYEGQKLLDSLAETWDFFFSDVLPMLQAIFYPVQGKEPSVRQLALLHFRNAITLSVKLEDALARAHARVPPAIVQMLLVLQGVHESRGVTEDYLRLETLVQKVVSPYLGTYGLHSSEGPFTHSCILEKRLLRRSRSGDVLAKNPVVRSKSYNTPLLNPVQEHEAEGAAAGGTSIRRHSVSEMTSCPEPQGFSDPPGQGPTGTFRSSPAPHSGPCPSRLYPTTQPPEQGLDPTRSSLPRSSPENLVDQILESVDSDSEGIFIDFGRGRGSGMSDLEGSGGRQSVV

SEQ ID NO: 31731 - protein, 411 aa, Homo sapiens
MVCLELSQREAWGSGSPEKMPAQPEGLYRLKFMSSPSLSDLGKREPAAAADERGTQQRRACANATWNSIHNGVIAVFQRKGLPDQELFSLNEGVRQLLKTELGSFFTEYLQNQLLTKGMVILRDKIRFYEGQKLLDSLAETWDFFFSDVLPMLQAIFYPVQGKEPSVRQLALLHFRNAITLSVKLEDALARAHARVPPAIVQMLLVLQGVHESRGVTEDYLRLETLVQKVVSPYLGTYGLHSSEGPFTHSCILEKRLLRRSRSGDVLAKNPVVRSKSYNTPLLNPVQEHEAEGAAAGGTSIRRHSVSEMTSCPEPQGFSDPPGQGPTGTFRSSPAPHSGPCPSRLYPTTQPPEQGLDPTRSSLPRSSPENLVDQILESVDSDSEGIFIDFGRGRGSGMSDLEGSGGRQSVV

SEQ ID NO: 31732 - protein, 1156 aa, Homo sapiens
MFPAAPSPRTPGTGSRRGPLAGLGPGSTPRTASRKGLPLGSAVSSPVLFSPVGRRSSLSSRGTPTRMFPHHSITESVNYDVKTFGSSLPVKVMEALTLAEVDDQLTINIDEGGWACLVCKEKLIIWKIALSPITKLSVCKELQLPPSDFHWSADLVALSYSSPSGEAHSTQAVAVMVATREGSIRYWPSLAGEDTYTEAFVDSGGDKTYSFLTAVQGGSFILSSSGSQLIRLIPESSGKIHQHILPQGQGMLSGIGRKVSSLFGILSPSSDLTLSSVLWDRERSSFYSLTSSNISKWELDDSSEKHAYSWDINRALKENITDAIWGSESNYEAIKEGVNIRYLDLKQNCDGLVILAAAWHSADNPCLIYYSLITIEDNGCQMSDAVTVEVTQYNPPFQSEDLILCQLTVPNFSNQTAYLYNESAVYVCSTGTGKFSLPQEKIVFNAQGDSVLGAGACGGVPIIFSRNSGLVSITSRENVSILAEDLEGSLASSVAGPNSESMIFETTTKNETIAQEDKIKLLKAAFLQYCRKDLGHAQMVVDELFSSHSDLDSDSELDRAVTQISVDLMDDYPASDPRWAESVPEEAPGFSNTSLIILHQLEDKMKAHSFLMDFIHQVGLFGRLGSFPVRGTPMATRLLLCEHAEKLSAAIVLKNHHSRLSDLVNTAILIALNKREYEIPSNLTPADVFFREVSQVDTICECLLEHEEQVLRDAPMDSIEWAEVVINVNNILKDMLQAASHYRQNRNSLYRREESLEKEPEYVPWTATSGPGGIRTVIIRQHEIVLKVAYPQADSNLRNIVTEQLVALIDCFLDGYVSQLKSVDKSSNRERYDNLEMEYLQKRSDLLSPLLSLGQYLWAASLAEKYCDFDILVQMCEQTDNQSRLQRYMTQFADQNFSDFLFRWYLEKGKRGKLLSQPISQHGQLANFLQAHEHLSWLHEINSQELEKAHATLLGLANMETRYFAKKKTLLGLSKLAALASDFSEDMLQEKIEEMAEQERFLLHQETLPEQLLAEKQLNLSAMPVLTAPQLIGLYICEENRRANEYDFKKALDLLEYIDEEEDININDLKLEILCKALQRDNWSSSDGKDDPIEVSKDSIFVKILQKLLKDGIQLSEYLPEVKDLLQADQLGSLKSNPYFEFVLKANYEYYVQGQI

SEQ ID NO: 31733 - protein, 79 aa, Homo sapiens
MRQRGQEHLPTSVKSEPRACNNPTVAENRRVPSGLAAVIRNLTALWNPSLGVSERRGGDWEPSRIPRLWARVGWIQLPG

SEQ ID NO: 31734 - protein, 231 aa, Homo sapiens
MAGKKVLIVYAHQEPKSFNGSLKNVAVDELSRQGCTVTVSDLYAMNLEPRATDKDITGTLSNPEVFNYGVETHEAYKQRSLASDITDEQKKVREADLVIFQFPLYWFSVPAILKGWMDRVLCQGFAFDIPGFYDSGLLQGKLALLSVTTGGTAEMYTKTGVNGDSRYFLWPLQHGTLHFCGFKVLAPQISFAPEIASEEERKGMVAAWSQRLQTIWKEEPIPCTAHWHFGQ

SEQ ID NO: 31735 - protein, 350 aa, Homo sapiens
MFCCLGYEWLSGGCKTWHSAWVINTLADHRHRGTDFGGSPWLLIITVFLRSYKFAISLCTSYLCVSFLKTIFPSQNGHDGSTDVQQRARRSNCRRQEGIKIVLEDIFTLWRQVETKVRAKIRKMKVTTKVNRHDKINGKRKTAKEHLRKLSMKEREHGEKERQVSEAEENGKLDMKEIHTYMEMFQRAQALRRRAEDYYRCKITPSARKPLCNRVRMAAVEHRHSSGLPYWPYLTAETLKNRMGHQPPPPTQQHSIIDNSLSLKTPSERLLYPLPPSADDNLKTPPECLLTPLPPSALPSADDNLKTPAECLLTPLPPSAPPSADDNLKTPPECVCSLPFHPQRMIISRN

SEQ ID NO: 31736 - protein, 232 aa, Homo sapiens
MFCCLGYEWLSGGCKTWHSAWVINTLADHRHRGTDFGGSPWLLIITVFLRSYKFAISLCTSYLCVSFLKTIFPSQNGHDGSTDVQQRARRSNCRRQEGIKIVLEDIFTLWRQVETKVRAKIRKMKVTTKVNRHDKINGKRKTAKEHLRKLSMKEREHGEKERQVSEAEENGKLDMKEIHTYMEMFQRAQALRRRAEDYYRCKITPSARKPLCNRCTYNLVLPGSEKKYYSHA

SEQ ID NO: 31737 - protein, 369 aa, Homo sapiens
MFCCLGYEWLSGGCTTWHSAWVINTLADHRHRGTDFGGSPWLLIITVFLRSYKFAISLCTSYLCVSFLKTIFPSQNGHDGSTDVQQRARRSNRRRQEGIKIVLEDIFTLWRQVETKVRAKIRKMKVTTKVNRHDKINGKRKTAKEHLRKLSMKEREHREEERQVSEAEENGKLDMKEIHTYMEMFQRAQALRRRAEDYYRCKITPSARKPLCNRVRMAAVEHRHSSGLPYWPYLTAETLKNRMGHQPPPPTQQHSIIDNSLSLKTPSECVLYPLPPSADDNLKTPPECLLTPLPPSALPSADDNLKTPAECLLYPLPPSADDNLKTPPECLLTPLPPSAPPSADDNLKTPPECVCSLPFHPQRMIISRN

SEQ ID NO: 31738 - protein, 247 aa, Homo sapiens
MLVLRSGLTKALASRTLAPQVCSSFATGPRQYDGTFYEFRTYYLKPSNMNAFMENLKKNIHLRTSYSELVGFWSVEFGGRTNKVFHIWKYDNFAHRAEVRKALANCKEWQEQSIIPNLARIDKQETEITYLIPWSKLEKPPKEGVYELAVFQMKPGGPALWGDAFERAINAHVNLGYTKVVGVFHTEYGELNRVHVLWWNESADSRAAGRHKSHEDPRVVAAVRESVNYLVSQQNMLLIPASFSPLK

SEQ ID NO: 31739 - protein, 1241 aa, Homo sapiens
MALGTTLRASLLLLGLLTEGLAQLAIPASVPRGFWALPENLTVVEGASVELRCGVSTPGSAVQWAKDGLLLGPDPRIPGFPRYRLEGDPARGEFHLHIEACDLSDDAEYECQVGRSEMGPELVSPRVILSILVPPKLLLLTPEAGTMVTWVAGQEYVVNCVSGDAKPAPDITILLSGQTISDISANVNEGSQQKLFTVEATARVTPRSSDNRQLLVCEASSPALEAPIKASFTVNVLFPPGPPVIEWPGLDEGHVRAGQSLELPCVARGGNPLATLQWLKNGQPVSTAWGTEHTQAVARSVLVMTVRPEDHGAQLSCEAHNSVSAGTQEHGITLQVTFPPSAIIILGSASQTENKNVTLSCVSKSSRPRVLLRWWLGWRQLLPMEETVMDGLHGGHISMSNLTFLARREDNGLTLTCEAFSEAFTKETFKKSLILNVKYPAQKLWIEGPPEGQKLRAGTRVRLVCLAIGGNPEPSLMWYKDSRTVTESRLPQESRRVHLGSVEKSGSTFSRELVLVTGPSDNQAKFTCKAGQLSASTQLAVQFPPTNVTILANASALRPGDALNLTCVSVSSNPPVNLSWDKEGERLEGVAAPPRRAPFKGSAAARSVLLQVSSRDHGQRVTCRAHSAELRETVSSFYRLNVLYRPEFLGEQVLVVTAVEQGEALLPVSVSANPAPEAFNWTFRGYRLSPAGGPRHRILSSGALHLWNVTRADDGLYQLHCQNSEGTAEARLRLDVHYAPTIRALQDPTEVNVGGSVDIVCTVDANPILPGMFNWERLGEDEEDQSLDDMEKISRGPTGRLRIHHAKLAQAGAYQCIVDNGVAPPARRLLRLVVRFAPQVEHPTPLTKVAAAGDSTSSATLHCRARGVPNIVFTWTKNGVPLDLQDPRYTEHTYHQGGVHSSLLTIANVSAAQDYALFTCTATNALGSDQTNIQLVSISRPDPPSGLKVVSLTPHSVGLEWKPGFDGGLPQRFCIRYEALGTPGFHYVDVVPPQATTFTLTGLQPSTRYRVWLLASNALGDSGLADKGTQLPITTPGLHQPSGEPEDQLPTEPPSGPSGLPLLPVLFALGGLLLLSNASCVGGVLWQRRLRRLAEGISEKTEAGSEEDRVRNEYEESQWTGERDTQSSTVSTTEAEPYYRSLRDFSPQLPPTQEEVSYSRGFTGEDEDMAFPGHLYDEVERTYPPSGAWGPLYDEVQMGPWDLHWPEDTYQDPRGIYDQVAGDLDTLEPDSLPFELRGHLV

SEQ ID NO: 31740 - protein, 1201 aa, Homo sapiens
MALGTTLRASLLLLGLLTEGLAQLAIPASVPRGFWALPENLTVVEGASVELRCGVSTPGSAVQWAKDGLLLGPDPRIPGFPRYRLEGDPARGEFHLHIEACDLSDDAEYECQVGRSEMGPELVSPRVILSILVPPKLLLLTPEAGTMVTWVAGQEYVVNCVSGDAKPAPDITILLSGQTISDISANVNEGSQQKLFTVEATARVTPRSSDNRQLLVCEASSPALEAPIKASFTVNVLFPPGPPVIEWPGLDEGHVRAGQSLELPCVARGGNPLATLQWLKNGQPVSTAWGTEHTQAVARSVLVMTVRPEDHGAQLSCEAHNSVSAGTQEHGITLQVTFPPSAIIILGSASQTENKNVTLSCVSKSSRPRVLLRWWLGWRQLLPMEETVMDGLHGGHISMSNLTFLARREDNGLTLTCEAFSEAFTKETFKKSLILNVKYPAQKLWIEGPPEGQKLRAGTRVRLVCLAIGGNPEPSLMWYKDSRTVTESRLPQESRRVHLGSVEKSGSTFSRELVLVTGPSDNQAKFTCKAGQLSASTQLAVQFPPTNVTILANASALRPGDALNLTCVSVSSNPPVNLSWDKEGERLEGVAAPPRRAPFKGSAAARSVLLQVSSRDHGQRVTCRAHSAELRETVSSFYRLNVLYRPEFLGEQVLVVTAVEQGEALLPVSVSANPAPEAFNWTFRGYRLSPAGGPRHRILSSGALHLWNVTRADDGLYQLHCQNSEGTAEARLRLDVHYAPTIRALQDPTEVNVGGSVDIVCTVDANPILPGMFNWERLGEDEEDQSLDDMEKISRGPTGRLRIHHAKLAQAGAYQCIVDNGVAPPARRLLRLVVRFAPQVEHPTPLTKVAAAGDSTSSATLHCRARGVPNIVFTWTKNGVPLDLQDPRYTEHTYHQGGVHSSLLTIANVSAAQDYALFTCTATNALGSDQTNIQLVSISRPDPPSGLKVVSLTPHSVGLEWKPGFDGGLPQRFCIRYEALGTPGFHYVDVVPPQATTFTLTGLQPSTRYRVWLLASNALGDSGLADKGTQLPITTPGLHQPSGEPEDQLPTEPPSGISEKTEAGSEEDRVRNEYEESQWTGERDTQSSTVSTTEAEPYYRSLRDFSPQLPPTQEEVSYSRGFTGEDEDMAFPGHLYDEVERTYPPSGAWGPLYDEVQMGPWDLHWPEDTYQDPRGIYDQVAGDLDTLEPDSLPFELRGHLV

SEQ ID NO: 31741 - protein, 290 aa, Homo sapiens
MEVSLNHPASNTTSTKNNNSAFFYFESCQPPSPALLLLCIAYTVVLIVGLFGNLSLIIIIFKKQRKAQNFTSILIANLSLSDTLVCVMCIHFTIIYTLMDHWIFGDTMCRLTSYVQSVSISVSIFSLVFTAVERYQLIVNPRGWKPSVTHAYWGITLIWLFSLLLSIPFFLSYHLTDEPFRNLSLPTDLYTHQVACVENWPSKKDRLLFTTSLFLLQYFVPLGFILICYLKIVICLRRRNAKVDKKKENEGRLNENKRINTMLISIVVTFGACWLPRISSMSSLTGIMRC

SEQ ID NO: 31742 - protein, 301 aa, Homo sapiens
MKSGPGIQAAIDLTAGAAGGTACVLTGQPFDTIKVKMQTFPDLYKGLTDCFLKTYAQVGLRGFYKGTGPALMAYVAENSVLFMCYGFCQQFVRKVAGMDKQAKLSDLQTAAAGSFASAFAALALCPTELVKCRLQTMYEMEMSGKIAKSHNTIWSVVKGILKKDGPLGFYHGLSSTLLQEVPGYFFFFGGYELSRSFFASGRSKDELGPVHLMLSGGVAGICLWLVVFPVDCIKSRIQVLSMYGKQAGFIGTLLSVVRNEGIVALYSGLKATMIRAIPANGALFVAYEYSRKMMMKQLEAY

SEQ ID NO: 31743 - protein, 314 aa, Homo sapiens
MGVKNHSTVTEFLLSGLTEQAELQLPLFCLFLGIYTVTVVGNLSMISIIRLNRQLHTPMYYFLSSLSFLDFCYSSVITPKMLSGFLCRDRSISYSGCMIQLFFFCVCVISECYMLAAMACDRYVAICSPLLYRVIMSPRVCSLLVAAVFSVGFTDAVIHGGCILRLSFCGSNIIKHYFCDIVPLIKLSCSSTYIDELLIFVIGGFNMVATSLTIIISYAFILTSILRIHSKKGRCKAFSTCSSHLTAVLMFYGSLMSMYLKPASSSSLTQEKVSSVFYTTVILMLNPLIYSLRNNEVRNALMKLLRRKISLSPG

SEQ ID NO: 31744 - protein, 312 aa, Homo sapiens
MEAGNQTGFLEFILLGLSEDPELQPFIFGLFLSMYLVTVLGNLLIILAISSDSHLHTPMYFFLSNLSWVDICFSTCIVPKMLVNIQTENKAISYMDCLTQVYFSMFFPILDTLLLTVMAYDRFVAVCHPLHYMIIMNPHLCGLLVFVTWLIGVMTSLLHISLMMHLIFCKDFEIPHFFCELTYILQLACSDTFLNSTLIYFMTGVLGVFPLLGIIFSYSRIASSIRKMSSSGGKQKALSTCGSHLSVVSLFYGTGIGVHFTSAVTHSSQKISVASVMYTVVTPMLNPFIYSLRNKDVKGALGSLLSRAASCL

SEQ ID NO: 31745 - protein, 156 aa, Homo sapiens
MVDILGERHLVTCKGATVEAEAALQNKVVALYFAAARCAPSRDFTPLLCDFYTALVAEARRPAPFEVVFVSADGSSQEMLDFMRELHGAWLALPFHDPYRHELRKRYNVTAIPKLVIVKQNGEVITNKGRKQIRERGLACFQDWVEAADIFQNFSV

SEQ ID NO: 31746 - protein, 135 aa, Homo sapiens
MVDILGERHLVTCKGATVEAEAALQNKVVALYFAAARCAPSRDFTPLLCDFYTALVAEARRPAPFEVVFVSADGSSQEMLDFMRELHGAWLALPFHDPYRQRSLALLPRLECSGVILAHCNLCLLGSSDSLALAS

SEQ ID NO: 31747 - protein, 189 aa, Homo sapiens
MINTQDSSILPLSNCPQLQCCRHIVPGPLWCSDAPHPLSKIPGGRGGGRDPSLSALIYKDEKLTVTQDLPVNDGKPHIVHFQYEVTEVKVSSWDAVLSSQSLFVEIPDGLLADGSKEGLLALLEFAEEKMKVNYVFICFRKGREDRAPLLKTFSFLGFEIVRPGHPCVPSRPDVMFMVYPLDQNLSDED

SEQ ID NO: 31748 - protein, 274 aa, Homo sapiens
MKLPKGTRSSVYFAQHPEKEPLPSRQEVKQTPVIMAKIKGPGPAKYLRPSCTGYIDHDISMFKAPAYTLHSRHSEKRMVCHSSPGPCYLLDPKITRFGMSSCPQVPMEERISNLRLNPTLASCQYYFEKIHPPGERRAPQYTFGYRRPYRVMDLNPAPNQYQMPLLLGPNTPVSRAAPCYSLASRDKNWFYKEDVAGGPGPTTYARPEPSIYQNRSPTYSMAKRFAYPLDLTPRPGPGSHEVQQVTVHKPHIPAFTMGIKHSLHLCPLVIDIRD

SEQ ID NO: 31749 - protein, 359 aa, Homo sapiens
MAAVSGLVRRPLREVSGLLKRRFHWTAPAALQVTVRDAINQGMDEELERDEKVFLLGEEVAQYDGAYKVSRGLWKKYGDKRIIDTPISEMGFAGIAVGAAMAGLRPICEFMTFNFSMQAIDQVINSAAKTYYMSGGLQPVPIVFRGPNGASAGVAAQHSQCFAAWYGHCPGLKVVSPWNSEDAKGLIKSAIRDNNPVVVLENELMYGVPFEFPPEAQSKDFLIPIGKAKIERQGTHITVVSHSRPVGHCLEAAAVLSKEGVECEVINMRTIRPMDMETIEASVMKTNHLVTVEGGWPQFGVGAEICARIMEGPAFNFLDAPAVRVTGADVPMPYAKILEDNSIPQVKDIIFAIKKTLNI

SEQ ID NO: 31750 - protein, 341 aa, Homo sapiens
MAAVSGLVRRPLREVTVRDAINQGMDEELERDEKVFLLGEEVAQYDGAYKVSRGLWKKYGDKRIIDTPISEMGFAGIAVGAAMAGLRPICEFMTFNFSMQAIDQVINSAAKTYYMSGGLQPVPIVFRGPNGASAGVAAQHSQCFAAWYGHCPGLKVVSPWNSEDAKGLIKSAIRDNNPVVVLENELMYGVPFEFPPEAQSKDFLIPIGKAKIERQGTHITVVSHSRPVGHCLEAAAVLSKEGVECEVINMRTIRPMDMETIEASVMKTNHLVTVEGGWPQFGVGAEICARIMEGPAFNFLDAPAVRVTGADVPMPYAKILEDNSIPQVKDIIFAIKKTLNI

SEQ ID NO: 31751 - protein, 341 aa, Homo sapiens
MAAVSGLVRRPLREVSGLLKRRFHWTAPAALQVTVRDAINQGMDEELERDEKVFLLGEEVAQYDGAYKVSRGLWKKYGDKRIIDTPISEMGFAGIAVGAAMAGLRPICEFMTFNFSMQAIDQVINSAAKTYYMSGVAAQHSQCFAAWYGHCPGLKVVSPWNSEDAKGLIKSAIRDNNPVVVLENELMYGVPFEFPPEAQSKDFLIPIGKAKIERQGTHITVVSHSRPVGHCLEAAAVLSKEGVECEVINMRTIRPMDMETIEASVMKTNHLVTVEGGWPQFGVGAEICARIMEGPAFNFLDAPAVRVTGADVPMPYAKILEDNSIPQVKDIIFAIKKTLNI

SEQ ID NO: 31752 - protein, 559 aa, Homo sapiens
MWTNFFKLRLFCCLLAVLMVVVLVINVTQVEYLDHETVSATFIDSSGQFVSSQVTGISRNPYCGYDQQTLSSQERMEEDSLLAALHRQVPDVGPVPFVKSTDPSSSYFVILNSAAFFKVGSQLEVLVHVQDFQRKPKKYGGDYLQARIHSLKLQAGAVGRVVDYQNGFYKVFFTLLWPGKVKVSVSLVHPSEGIRVLQRLQEDKPDRVYFKSLFRSGRISETTECNVCLPGNLPLCNFTDLYTGEPWFCFKPKKLPCSSRITHFKGGYLKGLLTAAESAFFQSGVNIKMPVNSSGPDWVTVIPRRIKETNSLELSQGSGTFPSGYYYKDQWRPRKFKMRQFNDPDNITECLQRKVVHLFGDSTIRQWFEYLTTFVPDLVEFNLGSPKNVGPFLAVDQKHNILLKYRCHGPPIRFTTVFSNELHYVANELNGIVGGKNTVVAIAVWSHFSTFPLEVYIRRLRNIRRAVVRLLDRSPKTVVVIRTANAQELGPEVSLFNSDWYNFQLDTILRRMFSGVGVYLVDAWEMTLAHYLPHKLHPDEVIVKNQLDMFLSFVCPLET

SEQ ID NO: 31753 - protein, 829 aa, Homo sapiens
MSASSSGGSPRFPSCGKNGVTSLTQKKVLRAPCGAPSVTVTKSHKRGMKGDTVNVRRSVRVKTKVPWMPPGKSSARPVGCKWENPPHCLEITPPSSEKLVSVMRLSDLSTEDDDSGHCKMNRYDKKIDSLMNAVGCLKSEVKMQKGERQMAKRFLEERKEELEEVAHELAETEHENTVLRHNIERMKEEKDFTILQKKHLQQEKECLMSKLVEAEMDGAAAAKQVMALKDTIGKLKTEKQMTCTDINTLTRQKELLLQKLSTFEETNRTLRDLLREQHCKEDSERLMEQQGALLKRLAEADSEKARLLLLLQDKDKEVEELLQEIQCEKAQAKTASELSKSMESMRGHLQAQLRSKEAENSRLCMQIKNLERSGNQHKAEVEAIMEQLKELKQKGDRDKESLKKAIRAQKERAEKSEEYAEQLHVQLADKDLYVAEALSTLESWRSRYNQVVKEKGDLELEIIVLNDRVTDLVNQQQTLEEKMREDRDSLVERLHRQTAEYSAFKLENERLKASFAPMEDKLNQAHLEVQQLKASVKNYEGMIDNYKSQVMKTRLEADEVAAQLERCDKENKILKDEMNKEIEAARRQFQSQLADLQQLPDILKITEAKLAECQDQLQGYERKNIDLTAIISDLRSRIEHQGDKLEMAREKHQASQKENKQLSLKVDELERKLEATSAQNIEFLQVIAKREEAIHQSQLRLEEKTRECGTLARQLESAIEDARRQVEQTKEHALSKERAAQNKILDLETQLSRTKTELSQLRRSRDDADRRYQSRLQDLKDRLEQSESTNRSMQNYVQFLKSSYANVFGDGPYSTFLTSSPIRSRSPPA

SEQ ID NO: 31754 - protein, 763 aa, Homo sapiens
MKGDTVNVRRSVRVKTKNPPHCLEITPPSSEKLVSVMRLSDLSTEDDDSGHCKMNRYDKKIDSLMNAVGCLKSEVKMQKGERQMAKRFLEERKEELEEVAHELAETEHENTVLRHNIERMKEEKDFTILQKKHLQQEKECLMSKLVEAEMDGAAAAKQVMALKDTIGKLKTEKQMTCTDINTLTRQKELLLQKLSTFEETNRTLRDLLREQHCKEDSERLMEQQGALLKRLAEADSEKARLLLLLQDKDKEVEELLQEIQCEKAQAKTASELSKSMESMRGHLQAQLRSKEAENSRLCMQIKNLERSGNQHKAEVEAIMEQLKELKQKGDRDKESLKKAIRAQKERAEKSEEYAEQLHVQLADKDLYVAEALSTLESWRSRYNQVVKEKGDLELEIIVLNDRVTDLVNQQQTLEEKMREDRDSLVERLHRQTAEYSAFKLENERLKASFAPMEDKLNQAHLEVQQLKASVKNYEGMIDNYKSQVMKTRLEADEVAAQLERCDKENKILKDEMNKEIEAARRQFQSQLADLQQLPDILKITEAKLAECQDQLQGYERKNIDLTAIISDLRSRIEHQGDKLEMAREKHQASQKENKQLSLKVDELERKLEATSAQNIEFLQVIAKREEAIHQSQLRLEEKTRECGTLARQLESAIEDARRQVEQTKEHALSKERAAQNKILDLETQLSRTKTELSQLRRSRDDADRRYQSRLQDLKDRLEQSESTNRSMQNYVQFLKSSYANVFGDGPYSTFLTSSPIRSRSPPA

SEQ ID NO: 31755 - protein, 805 aa, Homo sapiens
MKDRSSTPPLHVHVDENTPVHVHIKKLPKPSATSSQKSHKRGMKGDTVNVRRSVRVKTKNPPHCLEITPPSSEKLVSVMRLSDLSTEDDDSGHCKMNRYDKKIDSLMNAVGCLKSEVKMQKGERQMAKRFLEERKEELEEVAHELAETEHENTVLRHNIERMKEEKDFTILQKKHLQQEKECLMSKLVEAEMDGAAAAKQVMALKDTIGKLKTEKQMTCTDINTLTRQKELLLQKLSTFEETNRTLRDLLREQHCKEDSERLMEQQGALLKRLAEADSEKARLLLLLQDKDKEVEELLQEIQCEKAQAKTASELSKSMESMRGHLQAQLRSKEAENSRLCMQIKNLERSGNQHKAEVEAIMEQLKELKQKGDRDKESLKKAIRAQKERAEKSEEYAEQLHVQLADKDLYVAEALSTLESWRSRYNQVVKEKGDLELEIIVLNDRVTDLVNQQQTLEEKMREDRDSLVERLHRQTAEYSAFKLENERLKASFAPMEDKLNQAHLEVQQLKASVKNYEGMIDNYKSQVMKTRLEADEVAAQLERCDKENKILKDEMNKEIEAARRQFQSQLADLQQLPDILKITEAKLAECQDQLQGYERKNIDLTAIISDLRSRIEHQGDKLEMAREKHQASQKENKQLSLKVDELERKLEATSAQNIEFLQVIAKREEAIHQSQLRLEEKTRECGTLARQLESAIEDARRQVEQTKEHALSKERAAQNKILDLETQLSRTKTELSQLRRSRDDADRRYQSRLQDLKDRLEQSESTNRSMQNYVQFLKSSYANVFGDGPYSTFLTSSPIRSRSPPA

SEQ ID NO: 31756 - protein, 824 aa, Homo sapiens
MKDRSSTPPLHVHVDENTPVHVHIKKLPKPSATSSQKSHKRGMKGDTVNVRRSVRVKTKVPWMPPGKSSARPVGCKWENPPHCLEITPPSSEKLVSVMRLSDLSTEDDDSGHCKMNRYDKKIDSLMNAVGCLKSEVKMQKGERQMAKRFLEERKEELEEVAHELAETEHENTVLRHNIERMKEEKDFTILQKKHLQQEKECLMSKLVEAEMDGAAAAKQVMALKDTIGKLKTEKQMTCTDINTLTRQKELLLQKLSTFEETNRTLRDLLREQHCKEDSERLMEQQGALLKRLAEADSEKARLLLLLQDKDKEVEELLQEIQCEKAQAKTASELSKSMESMRGHLQAQLRSKEAENSRLCMQIKNLERSGNQHKAEVEAIMEQLKELKQKGDRDKESLKKAIRAQKERAEKSEEYAEQLHVQLADKDLYVAEALSTLESWRSRYNQVVKEKGDLELEIIVLNDRVTDLVNQQQTLEEKMREDRDSLVERLHRQTAEYSAFKLENERLKASFAPMEDKLNQAHLEVQQLKASVKNYEGMIDNYKSQVMKTRLEADEVAAQLERCDKENKILKDEMNKEIEAARRQFQSQLADLQQLPDILKITEAKLAECQDQLQGYERKNIDLTAIISDLRSRIEHQGDKLEMAREKHQASQKENKQLSLKVDELERKLEATSAQNIEFLQVIAKREEAIHQSQLRLEEKTRECGTLARQLESAIEDARRQVEQTKEHALSKERAAQNKILDLETQLSRTKTELSQLRRSRDDADRRYQSRLQDLKDRLEQSESTNRSMQNYVQFLKSSYANVFGDGPYSTFLTSSPIRSRSPPA

SEQ ID NO: 31757 - protein, 638 aa, Homo sapiens
MSASSSGGSPRFPSCGKNGVTSLTQKKVLRAPCGAPSVTVTKSHKRGMKGDTVNVRRSVRVKTKNPPHCLEITPPSSEKLVSVMRLSDLSTEDDDSGHCKMNRYDKKIDSLMNAVGCLKSEVKMQKGERQMAKRFLEERKEELEEVAHELAETEHENTVLRHNIERMKEEKDFTILQKKHLQQEKECLMSKLVEAEMDGAAAAKQVMALKDTIGKLKTEKQMTCTDINTLTRQKELLLQKLSTFEETNRTLRDLLREQHCKEDSERLMEQQGALLKRLAEADSEKARLLLLLQDKDKEVEELLQEIQCEKAQAKTASELSKSMESMRGHLQAQLRSKEAENSRLCMQIKNLERSGNQHKAEVEAIMEQLKELKQKGDRDKESLKKAIRAQKERAEKSEEYAEQLHVQLADKDLYVAEALSTLESWRSRYNQVVKEKGDLELEIIVLNDRVTDLVNQQQTLEEKMREDRDSLVERLHRQTAEYSAFKLENERLKASFAPMEDKLNQAHLEVQQLKASVKNYEGMIDNYKSQVMKTRLEADEVAAQLERCDKENKILKDEMNKEIEAARRQFQSQLADLQQLPDILKITEAKLAECQDQLQGYERKNIDLTAIISDLRSRVRDWQKGSHELTRAGARIPR

SEQ ID NO: 31758 - protein, 657 aa, Homo sapiens
MSASSSGGSPRFPSCGKNGVTSLTQKKVLRAPCGAPSVTVTKSHKRGMKGDTVNVRRSVRVKTKVPWMPPGKSSARPVGCKWENPPHCLEITPPSSEKLVSVMRLSDLSTEDDDSGHCKMNRYDKKIDSLMNAVGCLKSEVKMQKGERQMAKRFLEERKEELEEVAHELAETEHENTVLRHNIERMKEEKDFTILQKKHLQQEKECLMSKLVEAEMDGAAAAKQVMALKDTIGKLKTEKQMTCTDINTLTRQKELLLQKLSTFEETNRTLRDLLREQHCKEDSERLMEQQGALLKRLAEADSEKARLLLLLQDKDKEVEELLQEIQCEKAQAKTASELSKSMESMRGHLQAQLRSKEAENSRLCMQIKNLERSGNQHKAEVEAIMEQLKELKQKGDRDKESLKKAIRAQKERAEKSEEYAEQLHVQLADKDLYVAEALSTLESWRSRYNQVVKEKGDLELEIIVLNDRVTDLVNQQQTLEEKMREDRDSLVERLHRQTAEYSAFKLENERLKASFAPMEDKLNQAHLEVQQLKASVKNYEGMIDNYKSQVMKTRLEADEVAAQLERCDKENKILKDEMNKEIEAARRQFQSQLADLQQLPDILKITEAKLAECQDQLQGYERKNIDLTAIISDLRSRVRDWQKGSHELTRAGARIPR

SEQ ID NO: 31759 - protein, 701 aa, Homo sapiens
MGELPTGCRKRRRKRGGAAARARLHPPRRLHGTTLASDFNDFIRRRFWAQPCRSWFPSCGKNGVTSLTQKKVLRAPCGAPSVTVTKSHKRGMKGDTVNVRRSVRVKTKVPWMPPGKSSARPVGCKWENPPHCLEITPPSSEKLVSVMRLSDLSTEDDDSGHCKMNRYDKKIDSLMNAVGCLKSEVKMQKGERQMAKRFLEERKEELEEVAHELAETEHENTVLRHNIERMKEEKDFTILQKKHLQQEKECLMSKLVEAEMDGAAAAKQVMALKDTIGKLKTEKQMTCTDINTLTRQKELLLQKLSTFEETNRTLRDLLREQHCKEDSERLMEQQGALLKRLAEADSEKARLLLLLQDKDKEVEELLQEIQCEKAQAKTASELSKSMESMRGHLQAQLRSKEAENSRLCMQIKNLERSGNQHKAEVEAIMEQLKELKQKGDRDKESLKKAIRAQKERAEKSEEYAEQLHVQLADKDLYVAEALSTLESWRSRYNQVVKEKGDLELEIIVLNDRVTDLVNQQQTLEEKMREDRDSLVERLHRQTAEYSAFKLENERLKASFAPMEDKLNQAHLEVQQLKASVKNYEGMIDNYKSQVMKTRLEADEVAAQLERCDKENKILKDEMNKEIEAARRQFQSQLADLQQLPDILKITEAKLAECQDQLQGYERKNIDLTAIISDLRSRVRDWQKGSHELTRAGARIPR

SEQ ID NO: 31760 - protein, 638 aa, Homo sapiens
MGRNRYPPACWFPSCGKNGVTSLTQKKVLRAPCGAPSVTVTKSHKRGMKGDTVNVRRSVRVKTKNPPHCLEITPPSSEKLVSVMRLSDLSTEDDDSGHCKMNRYDKKIDSLMNAVGCLKSEVKMQKGERQMAKRFLEERKEELEEVAHELAETEHENTVLRHNIERMKEEKDFTILQKKHLQQEKECLMSKLVEAEMDGAAAAKQVMALKDTIGKLKTEKQMTCTDINTLTRQKELLLQKLSTFEETNRTLRDLLREQHCKEDSERLMEQQGALLKRLAEADSEKARLLLLLQDKDKEVEELLQEIQCEKAQAKTASELSKSMESMRGHLQAQLRSKEAENSRLCMQIKNLERSGNQHKAEVEAIMEQLKELKQKGDRDKESLKKAIRAQKERAEKSEEYAEQLHVQLADKDLYVAEALSTLESWRSRYNQVVKEKGDLELEIIVLNDRVTDLVNQQQTLEEKMREDRDSLVERLHRQTAEYSAFKLENERLKASFAPMEDKLNQAHLEVQQLKASVKNYEGMIDNYKSQVMKTRLEADEVAAQLERCDKENKILKDEMNKEIEAARRQFQSQLADLQQLPDILKITEAKLAECQDQLQGYERKNIDLTAIISDLRSRVRDWQKGSHELTRAGARIPR

SEQ ID NO: 31761 - protein, 576 aa, Homo sapiens
MKDRSSTPPLHVHVDENTPVHVHIKKLPKPSATSSQKSHKRGMKGDTVNVRRSVRVKTKVKMQKGERQMAKRFLEERKEELEEVAHELAETEHENTVLRHNIERMKEEKDFTILQKKHLQQEKECLMSKLVEAEMDGAAAAKQVMALKDTIGKLKTEKQMTCTDINTLTRQKELLLQKLSTFEETNRTLRDLLREQHCKEDSERLMEQQGALLKRLAEADSEKARLLLLLQDKDKEVEELLQEIQCEKAQAKTASELSKSMESMRGHLQAQLRSKEAENSRLCMQIKNLERSGNQHKAEVEAIMEQLKELKQKGDRDKESLKKAIRAQKERAEKSEEYAEQLHVQLADKDLYVAEALSTLESWRSRYNQVVKEKGDLELEIIVLNDRVTDLVNQQQTLEEKMREDRDSLVERLHRQTAEYSAFKLENERLKASFAPMEDKLNQAHLEVQQLKASVKNYEGMIDNYKSQVMKTRLEADEVAAQLERCDKENKILKDEMNKEIEAARRQFQSQLADLQQLPDILKITEAKLAECQDQLQGYERKNIDLTAIISDLRSRVRDWQKGSHELTRAGARIPR

SEQ ID NO: 31762 - protein, 657 aa, Homo sapiens
MADQQGPHQNRFPSCGKNGVTSLTQKKVLRAPCGAPSVTVTKSHKRGMKGDTVNVRRSVRVKTKVPWMPPGKSSARPVGCKWENPPHCLEITPPSSEKLVSVMRLSDLSTEDDDSGHCKMNRYDKKIDSLMNAVGCLKSEVKMQKGERQMAKRFLEERKEELEEVAHELAETEHENTVLRHNIERMKEEKDFTILQKKHLQQEKECLMSKLVEAEMDGAAAAKQVMALKDTIGKLKTEKQMTCTDINTLTRQKELLLQKLSTFEETNRTLRDLLREQHCKEDSERLMEQQGALLKRLAEADSEKARLLLLLQDKDKEVEELLQEIQCEKAQAKTASELSKSMESMRGHLQAQLRSKEAENSRLCMQIKNLERSGNQHKAEVEAIMEQLKELKQKGDRDKESLKKAIRAQKERAEKSEEYAEQLHVQLADKDLYVAEALSTLESWRSRYNQVVKEKGDLELEIIVLNDRVTDLVNQQQTLEEKMREDRDSLVERLHRQTAEYSAFKLENERLKASFAPMEDKLNQAHLEVQQLKASVKNYEGMIDNYKSQVMKTRLEADEVAAQLERCDKENKILKDEMNKEIEAARRQFQSQLADLQQLPDILKITEAKLAECQDQLQGYERKNIDLTAIISDLRSRVRDWQKGSHELTRAGARIPR

SEQ ID NO: 31763 - protein, 504 aa, Homo sapiens
MKAAYTAYRCLTKDLEGCAMNPELTMESLGTLHGPAGGGSGGGGGGGGGGGGGGPGHEQELLASPSPHHAGRGAAGSLRGPPPPPTAHQELGTAAAAAAAASRSAMVTSMASILDGGDYRPELSIPLHHAMSMSCDSSPPGMGMSNTYTTLTPLQPLPPISTVSDKFHHPHPHHHPHHHHHHHHQRLSGNVSGSFTLMRDERGLPAMNNLYSPYKEMPGMSQSLSPLAATPLGNGLGGLHNAQQSLPNYGPPGHDKMLSPNFDAHHTAMLTRGEQHLSRGLGTPPAAMMSHLNGLHHPGHTQSHGPVLAPSRERPPSSSSGSQVATSGQLEEINTKEVAQRITAELKRYSIPQAIFAQRVLCRSQGTLSDLLRNPKPWSKLKSGRETFRRMWKWLQEPEFQRMSALRLAACKRKEQEPNKDRNNSQKKSRLVFTDLQRRTLFAIFKENKRPSKEMQITISQQLGLELTTVSNFFMNARRRSLEKWQDDLSTGGSSSTSSTCTKA

SEQ ID NO: 31764 - protein, 380 aa, Homo sapiens
MEEIYAKFVSQKISKTRWRPLPPGSLQTAETFATGSWDNEENYISLWSIGDFGNLDSDGGFEGDHQLLCDIRHHGDVMDLQFFDQERIVAASSTGCVTVFLHHPNNQTLSVNQQWTTAHYHTGPGSPSYSSAPCTGVVCNNPEIVTVGEDGRINLFRADHKEAVRTIDNADSSTLHAVTFLRTPEILTVNSIGQLKIWDFRQQGNEPSQILSLTGDRVPLHCVDRHPNQQHVVATGGQDGMLSIWDVRQGTMPVSLLKAHEAEMWEVHFHPSNPEHLFTCSEDGSLWHWDASTDVPEKSSLFHQGGRSSTFLSHSISNQANVHQSVISSWLSTDPAKDRIEITSLLPSRSLSVNTLDVLGPCLVCGTDAEAIYVTRHLFS

SEQ ID NO: 31765 - protein, 284 aa, Homo sapiens
MEEIYAKFVSQKISKTRWRPLPPGSLQTAETFATGSWDNEENYISLWSIGDFGNLDSDGGFEGDHQLLCDIRHHGDVMDLQFFDQERIVAASSTGCVTVFLHHPNNQTLSVNQQWTTAHYHTGPGSPSYSSAPCTGVVCNNPEIVTVGEDGRINLFRADHKEAVRTIVWEVHFHPSNPEHLFTCSEDGSLWHWDASTDVPEKSSLFHQGGRSSTFLSHSISNQANVHQSVISSWLSTDPAKDRIEITSLLPSRSLSVNTLDVLGPCLVCGTDAEAIYVTRHLFS

SEQ ID NO: 31766 - protein, 478 aa, Homo sapiens
MNPPSGPRVPPSPTQEPSCMATPAPPSWWDSSQSSISSLGRLPSISPTAPGTWAAAWVPLPTVDVPDHAHYTLGTVILLVGLTGMLGNLTVIYTFCRSRSLRTPANMFIINLAVSDFLMSFTQAPVFFTSSLYKQWLFGETGCEFYAFCGALFGISSMITLTAIALDRYLVITRPLATFGVASKRRAAFVLLGVWLYALAWSLPPFFGWSAYVPEGLLTSCSWDYMSFTPAVRAYTMLLCCFVFFLPLLIIIYCYIFIFRAIRETGRALQTFGACKGNGESLWQRQRLQSECKMAKIMLLVILLFVLSWAPYSAVALVAFAGYAHVLTPYMSSVPAVIAKASAIHNPIIYAITHPKYRVAIAQHLPCLGVLLGVSRRHSRPYPSYRSTHRSTLTSHTSNLSWISIRRRQESLGSESEVGWTHMEAAAVWGAAQQANGRSLYGQGLEDLEAKAPPRPQGHEAETPGKTKGLIPSQDPRM

SEQ ID NO: 31767 - protein, 489 aa, Homo sapiens
MNPPSGPRVPPSPTQEPSCMATPAPPSWWDSSQSSISSLGRLPSISPTAPGTWAAAWVPLPTVDVPDHAHYTLGTVILLVGLTGMLGNLTVIYTFCRAVLRGVTVMMQSRSLRTPANMFIINLAVSDFLMSFTQAPVFFTSSLYKQWLFGETGCEFYAFCGALFGISSMITLTAIALDRYLVITRPLATFGVASKRRAAFVLLGVWLYALAWSLPPFFGWSAYVPEGLLTSCSWDYMSFTPAVRAYTMLLCCFVFFLPLLIIIYCYIFIFRAIRETGRALQTFGACKGNGESLWQRQRLQSECKMAKIMLLVILLFVLSWAPYSAVALVAFAGYAHVLTPYMSSVPAVIAKASAIHNPIIYAITHPKYRVAIAQHLPCLGVLLGVSRRHSRPYPSYRSTHRSTLTSHTSNLSWISIRRRQESLGSESEVGWTHMEAAAVWGAAQQANGRSLYGQGLEDLEAKAPPRPQGHEAETPGKTKGLIPSQDPRM

SEQ ID NO: 31768 - protein, 319 aa, Homo sapiens
MNHVVKHNHTAVTKVTEFILMGITDNPGLQAPLFGLFLIIYLVTVIGNLGMVILTYLDSKLHTPMYFFLRHLSITDLGYSTVIAPKMLVNFIVHKNTISYNWYATQLAFFEIFIISELFILSAMAYDRYVAICKPLLYVIIMAEKVLWVLVIVPYLYSTFVSLFLTIKLFKLSFCGSNIISYFYCDCIPLMSILCSDTNELELIILIFSGCNLLFSLSIVLISYMFILVAILRMNSRKGRYKAFSTCSSHLTVVIMFYGTLLFIYLQPKSSHTLAIDKMASVFYTLLIPMLNPLIYSLRNKEVKDALKRTLTNRFKIPI

SEQ ID NO: 31769 - protein, 354 aa, Homo sapiens
MALNHTALPQDERLPHYLRDGDPFASKLSWEADLVAGFYLTIIGILSTFGNGYVLYMSSRRKKKLRPAEIMTINLAVCDLGISVVGKPFTIISCFCHRWVFGWIGCRWYGWAGFFFGCGSLITMTAVSLDRYLKICYLSYGVWLKRKHAYICLAAIWAYASFWTTMPLVGLGDYVPEPFGTSCTLDWWLAQASVGGQVFILNILFFCLLLPTAVIVFSYVKIIAKVKSSSKEVAHFDSRIHSSHVLEMKLTKVAMLICAGFLIAWIPYAVVSVWSAFGRPDSIPIQLSVVPTLLAKSAAMYNPIIYQVIDYKFACCQTGGLKATKKKSLEGFRLHTVTTVRKSSAVLEIHEEWE

SEQ ID NO: 31770 - protein, 305 aa, Homo sapiens
MVTEFIFLGLSDSQGLQTFLFMLFFVFYGGIVFGNLLIVITVVSDSHLHSPMYFLLANLSLIDLSLSSVTAPKMITDFFSQRKVISFKGCLVQIFLLHFFGGSEMVILIAMGFDRYIAICKPLHYTTIMCGNACVGIMAVAWGIGFLHSVSQLAFAVHLPFCGPNEVDSFYCDLPRVIKLACTDTYRLDIMVIANSGVLTVCSFVLLIISYTIILMTIQHRPLDKSSKALSTLTAHITVVLLFFGPCVFIYAWPFPIKSLDKFLAVFYSVITPLLNPIIYTLRNKDMKTAIRQLRKWDAHSSVKF

SEQ ID NO: 31771 - protein, 315 aa, Homo sapiens
METWVNQSYTDGFFLLGIFSHSTADLVLFSVVMAVFTVALCGNVLLIFLIYMDPHLHTPMYFFLSQLSLMDLMLVCTNVPKMAANFLSGRKSISFVGCGIQIGLFVCLVGSEGLLLGLMAYDRYVAISHPLHYPILMNQRVCLQITGSSWAFGIIDGLIQMVVVMNFPYCGLRKVNHFFCEMLSLLKLACVDTSLFEKVIFACCVFMLLFPFSIIVASYAHILGTVLQMHSAQAWKKALATCSSHLTAVTLFYGAAMFIYLRPRHYRAPSHDKVASIFYTVLTPMLNPLIYSLRNREVMGALRKGLDRCRIGSQH

SEQ ID NO: 31772 - protein, 425 aa, Homo sapiens
MGPRRLLLVAACFSLCGPLLSARTRARRPESKATNATLDPRSFLLRNPNDKYEPFWEDEEKNESGLTEYRLVSINKSSPLQKQLPAFISEDASGYLTSSWLTLFVPSVYTGVFVVSLPLNIMAIVVFILKMKVKKPAVVYMLHLATADVLFVSVLPFKISYYFSGSDWQFGSELCRFVTAAFYCNMYASILLMTVISIDRFLAVVYPMQSLSWRTLGRASFTCLAIWALAIAGVVPLLLKEQTIQVPGLNITTCHDVLNETLLEGYYAYYFSAFSAVFFFVPLIISTVCYVSIIRCLSSSAVANRSKKSRALFLSAAVFCIFIICFGPTNVLLIAHYSFLSHTSTTEAAYFAYLLCVCVSSISCCIDPLIYYYASSECQRYVYSILCCKESSDPSSYNSSGQLMASKMDTCSSNLNNSIYKKLLT

SEQ ID NO: 31773 - protein, 310 aa, Homo sapiens
MESNQTWITEVILLGFQVDPALELFLFGFFLLFYSLTLMGNGIILGLIYLDSRLHTPMYVFLSHLAIVDMSYASSTVPKMLANLVMHKKVISFAPCILQTFLYLAFAITECLILVMMCYDRYVAICHPLQYTLIMNWRVCTVLASTCWIFSFLLALVHITLILRLPFCGPQKINHFFCQIMSVFKLACADTRLNQVVLFAGSAFILVGPLCLVLVSYLHILVAILRIQSGEGRRKAFSTCSSHLCVVGLFFGSAIVMYMAPKSSHSQERRKILSLFYSLFNPILNPLIYSLRNAEVKGALKRVLWKQRSM

SEQ ID NO: 31774 - protein, 320 aa, Homo sapiens
MERTNDSTSTEFFLVGLSAHPKLQTVFFVLILWMYLMILLGNGVLISVIIFDSHLHTPMYFFLCNLSFLDVCYTSSSVPLILASFLAVKKKVSFSGCMVQMFISFAMGATECMILGTMALDRYVAICYPLRYPVIMSKGAYVAMAAGSWVTGLVDSVVQTAFAMQLPFCANNVIKHFVCEILAILKLACADISINVISMTGSNLIVLVIPLLVISISYIFIVATILRIPSTEGKHKAFSTCSAHLTVVIIFYGTIFFMYAKPESKASVDSGNEDIIEALISLFYGVMTPMLNPLIYSLRNKDVKAAVKNILCRKNFSDGK

SEQ ID NO: 31775 - protein, 347 aa, Homo sapiens
MIVQLICTVCFLAVNTFHVRSSFDFLKADDMGEINQTLVSEFLLLGLSGYPKIEIVYFALILVMYLVILIGNGVLIIASIFDSHFHTPMYFFLGNLSFLDICYTSSSVPSTLVSLISKKRNISFSGCAVQMFFGFAMGSTECLLLGMMAFDRYVAICNPLRYPIILSKVAYVLMASVSWLSGGINSAVQTLLAMRLPFCGNNIINHFACEILAVLKLACADISLNIITMVISNMAFLVLPLMVIFFSYMFILYTILQMNSATGRRKAFSTCSAHLTVVIIFYGTIFFMYAKPKSQDLIGEEKLQALDKLISLFYGVVTPMLNPILYSLRNKDVKAAVKYLLNKKPIH

SEQ ID NO: 31776 - protein, 314 aa, Homo sapiens
MENKTEVTQFILLGLTNDSELQVPLFITFPFIYIITLVGNLGIIVLIFWDSCLHNPMYFFLSNLSLVDFCYSSAVTPIVMAGFLIEDKVISYNACAAQMYIFVAFATVENYLLASMAYDRYAAVCKPLHYTTTMTTTVCARLAIGSYLCGFLNASIHTGDTFSLSFCKSNEVHHFFCDIPAVMVLSCSDRHISELVLIYVVSFNIFIALLVILISYTFIFITILKMHSASVYQKPLSTCASHFIAVGIFYGTIIFMYLQPSSSHSMDTDKMAPVFYTMVIPMLNPLVYSLRNKEVKSAFKKVVEKAKLSVGWSV

SEQ ID NO: 31777 - protein, 728 aa, Homo sapiens
MAGFWVGTAPLVAAGRRGRWPPQQLMLSAALRTLKHVLYYSRQCLMVSRNLGSVGYDPNEKTFDKILVANRGEIACRVIRTCKKMGIKTVAIHSDVDASSVHVKMADEAVCVGPAPTSKSYLNMDAIMEAIKKTRAQAVHPGYGFLSENKEFARCLAAEDVVFIGPDTHAIQAMGDKIESKLLAKKAEVNTIPGFDGVVKDAEEAVRIAREIGYPVMIKASAGGGGKGMRIAWDDEETRDGFRLSSQEAASSFGDDRLLIEKFIDNPRHIEIQVLGDKHGNALWLNERECSIQRRNQKVVEEAPSIFLDAETRRAMGEQAVALARAVKYSSAGTVEFLVDSKKNFYFLEMNTRLQVEHPVTECITGLDLVQEMIRVAKGYPLRHKQADIRINGWAVECRVYAEDPYKSFGLPSIGRLSQYQEPLHLPGVRVDSGIQPGSDISIYYDPMISKLITYGSDRTEALKRMADALDNYVIRGVTHNIALLREVIINSRFVKGDISTKFLSDVYPDGFKGHMLTKSEKNQLLAIASSLFVAFQLRAQHFQENSRMPVIKPDIANWELSVKLHDKVHTVVASNNGSVFSVEVDGSKLNVTSTWNLASPLLSVSVDGTQRTVQCLSREAGGNMSIQFLGTVYKVNILTRLAAELNKFMLEKVTEDTSSVLRSPMPGVVVAVSVKPGDAVAEGQEICVIEAMKMQNSMTAGKTGTVKSVHCQAGDTVGEGDLLVELE

SEQ ID NO: 31778 - protein, 702 aa, Homo sapiens
MAGFWVGTAPLVAAGRRGRWPPQQLMLSAALRTLKTFDKILVANRGEIACRVIRTCKKMGIKTVAIHSDVDASSVHVKMADEAVCVGPAPTSKSYLNMDAIMEAIKKTRAQAVHPGYGFLSENKEFARCLAAEDVVFIGPDTHAIQAMGDKIESKLLAKKAEVNTIPGFDGVVKDAEEAVRIAREIGYPVMIKASAGGGGKGMRIAWDDEETRDGFRLSSQEAASSFGDDRLLIEKFIDNPRHIEIQVLGDKHGNALWLNERECSIQRRNQKVVEEAPSIFLDAETRRAMGEQAVALARAVKYSSAGTVEFLVDSKKNFYFLEMNTRLQVEHPVTECITGLDLVQEMIRVAKGYPLRHKQADIRINGWAVECRVYAEDPYKSFGLPSIGRLSQYQEPLHLPGVRVDSGIQPGSDISIYYDPMISKLITYGSDRTEALKRMADALDNYVIRGVTHNIALLREVIINSRFVKGDISTKFLSDVYPDGFKGHMLTKSEKNQLLAIASSLFVAFQLRAQHFQENSRMPVIKPDIANWELSVKLHDKVHTVVASNNGSVFSVEVDGSKLNVTSTWNLASPLLSVSVDGTQRTVQCLSREAGGNMSIQFLGTVYKVNILTRLAAELNKFMLEKVTEDTSSVLRSPMPGVVVAVSVKPGDAVAEGQEICVIEAMKMQNSMTAGKTGTVKSVHCQAGDTVGEGDLLVELE

SEQ ID NO: 31779 - protein, 681 aa, Homo sapiens
MAGFWVGTAPLVAAGRRGRWPPQQLMLSAALRTLKHVLYYSRQCLMVSRNLGSVGYDPNEKTFDKILVANRGEIACRVIRTCKKMGIKTVAIHSDVDASSVHVKMADEAVCVGPAPTSKSYLNMDAIMEAIKKTRAQAVHPGYGFLSENKEFARCLAAEDVVFIGPDTHAIQAMGDKIESKLLAKKAEVNTIPGFDGVVKDAEEAVRIAREIGYPVMIKASAGGGGKGMRIAWDDEETRDGFRLSSQEAASSFGDDRLLIEKFIDNPRHIEIQVLGDKHGNALWLNERECSIQRRNQKVVEEAPSIFLDAETRRAMGEQAVALARAVKYSSAGTVEFLVDSKKNFYFLEMNTRLQVEHPVTECITGLDLVQEMIRVAKGYPLRHKQADIRINGWAVECRVYAEDPYKSFGLPSIGRLSQYQEPLHLPGVRVDSGIQPGSDISIYYDPMISKLITYGSDRTEALKRMADALDNYVIRGVTHNIALLREVIINSRFVKGDISTKFLSDVYPDGFKGHMLTKSEKNQLLAIASSLFVAFQLRAQHFQENSRMPVIKPDIANWELSVKLHDKVHTVVASNNGSVFSVEVDGSKLNVTSTWNLASPLLSVSVDGTQRTVQCLSREAGGNMSIQFLGTVVAEGQEICVIEAMKMQNSMTAGKTGTVKSVHCQAGDTVGEGDLLVELE

SEQ ID NO: 31780 - protein, 591 aa, Homo sapiens
MDDLDALLADLESTTSHISKRPVFLSEETPYSYPTGNHTYQEIAVPPPVPPPPSSEALNGTILDPLDQWQPSSSRFIHQQPQSSSPVYGSSAKTSSVSNPQDSVGSPCSRVGEEEHVYSFPNKQKSAEPSPTVMSTSLGSNLSELDRLLLELNAVQHNPPGFPADEANSSPPLPGALSPLYGVPETNSPLGGKAGPLTKEKPKRNGGRGLEDVRPSVESLLDELESSVPSPVPAITVNQGEMSSPQRVTSTQQQTRISASSATRELDELMASLSDFKIQGLEQRADGERCWAAGWPRDGGRSSPGGQDEGGFMAQGKTGSSSPPGGPPKPGSQLDSMLGSLQSDLNKLGVATVAKGVCGACKKPIAGQVVTAMGKTWHPEHFVCTHCQEEIGSRNFFERDGQPYCEKDYHNLFSPRCYYCNGPILDKVVTALDRTWHPEHFFCAQCGAFFGPEGFHEKDGKAYCRKDYFDMFAPKCGGCARAILENYISALNTLWHPECFVCRECFTPFVNGSFFEHDGQPYCEVHYHERRGSLCSGCQKPITGRCITAMAKKFHPEHFVCAFCLKQLNKGTFKEQNDKPYCQNCFLKLFC

SEQ ID NO: 31781 - protein, 557 aa, Homo sapiens
MDDLDALLADLESTTSHISKRPVFLSEETPYSYPTGNHTYQEIAVPPPVPPPPSSEALNGTILDPLDQWQPSSSRFIHQQPQSSSPVYGSSAKTSSVSNPQDSVGSPCSRVGEEEHVYSFPNKQKSAEPSPTVMSTSLGSNLSELDRLLLELNAVQHNPPGFPADEANSSPPLPGALSPLYGVPETNSPLGGKAGPLTKEKPKRNGGRGLEDVRPSVESLLDELESSVPSPVPAITVNQGEMSSPQRVTSTQQQTRISASSATRELDELMASLSDFKFMAQGKTGSSSPPGGPPKPGSQLDSMLGSLQSDLNKLGVATVAKGVCGACKKPIAGQVVTAMGKTWHPEHFVCTHCQEEIGSRNFFERDGQPYCEKDYHNLFSPRCYYCNGPILDKVVTALDRTWHPEHFFCAQCGAFFGPEGFHEKDGKAYCRKDYFDMFAPKCGGCARAILENYISALNTLWHPECFVCRECFTPFVNGSFFEHDGQPYCEVHYHERRGSLCSGCQKPITGRCITAMAKKFHPEHFVCAFCLKQLNKGTFKEQNDKPYCQNCFLKLFC

SEQ ID NO: 31782 - protein, 605 aa, Homo sapiens
MDDLDALLADLESTTSHISKRPVFLSEETPYSYPTGNHTYQEIAVPPPVPPPPSSEALNGTILDPLDQWQPSSSRFIHQQPQSSSPVYGSSAKTSSVSNPQDSVGSPCSRVGEEEHVYSFPNKQKSAEPSPTVMSTSLGSNLSELDRLLLELNAVQHNPPGFPADEANSSPPLPGALSPLYGVPETNSPLGGKAGPLTKEKPKRNGGRGLEDVRPSVESLLDELESSVPSPVPAITVNQGEMSSPQRVTSTQQQTRISASSATRELDELMASLSDFKGSWPLEEVVLLVSISSSVQEGEKYPHPCAARHRTPSLRSPDQPPPCPQFMAQGKTGSSSPPGGPPKPGSQLDSMLGSLQSDLNKLGVATVAKGVCGACKKPIAGQVVTAMGKTWHPEHFVCTHCQEEIGSRNFFERDGQPYCEKDYHNLFSPRCYYCNGPILDKVVTALDRTWHPEHFFCAQCGAFFGPEGFHEKDGKAYCRKDYFDMFAPKCGGCARAILENYISALNTLWHPECFVCRECFTPFVNGSFFEHDGQPYCEVHYHERRGSLCSGCQKPITGRCITAMAKKFHPEHFVCAFCLKQLNKGTFKEQNDKPYCQNCFLKLFC

SEQ ID NO: 31783 - protein, 424 aa, Homo sapiens
MSTSLGSNLSELDRLLLELNAVQHNPPGFPADEANSSPPLPGALSPLYGVPETNSPLGGKAGPLTKEKPKRNGGRGLEDVRPSVESLLDELESSVPSPVPAITVNQGEMSSPQRVTSTQQQTRISASSATRELDELMASLSDFKFMAQGKTGSSSPPGGPPKPGSQLDSMLGSLQSDLNKLGVATVAKGVCGACKKPIAGQVVTAMGKTWHPEHFVCTHCQEEIGSRNFFERDGQPYCEKDYHNLFSPRCYYCNGPILDKVVTALDRTWHPEHFFCAQCGAFFGPEGFHEKDGKAYCRKDYFDMFAPKCGGCARAILENYISALNTLWHPECFVCRECFTPFVNGSFFEHDGQPYCEVHYHERRGSLCSGCQKPITGRCITAMAKKFHPEHFVCAFCLKQLNKGTFKEQNDKPYCQNCFLKLFC

SEQ ID NO: 31784 - protein, 539 aa, Homo sapiens
MAAALRVAAVGARLSVLASGLRAAVRSLCSQATSVNERIENKRRTALLGGGQRRIDAQHKRGKLTARERISLLLDPGSFVESDMFVEHRCADFGMAADKNKFPGDSVVTGRGRINGRLVYVFSQDFTVFGGSLSGAHAQKICKIMDQAITVGAPVIGLNDSGGARIQEGVESLAGYADIFLRNVTASGVIPQISLIMGPCAGGAVYSPALTDFTFMVKDTSYLFITGPDVVKSVTNEDVTQEELGGAKTHTTMSGVAHRAFENDVDALCNLRDFFNYLPLSSQDPAPVRECHDPSDRLVPELDTIVPLESTKAYNMVDIIHSVVDEREFFEIMPNYAKNIIVGFARMNGRTVGIVGNQPKVASGCLDINSSVKGARFVRFCDAFNIPLITFVDVPGFLPGTAQEYGGIIRHGAKLLYAFAEATVPKVTVITRKAYGGAYDVMSSKHLCGDTNYAWPTAEIAVMGAKGAVEIIFKGHENVEAAQAEYIEKFANPFPAAVRGFVDDIIQPSSTRARICCDLDVLASKKVQRPWRKHANIPL

SEQ ID NO: 31785 - protein, 559 aa, Homo sapiens
MAAALRVAAVGARLSVLASGLRAAVRSLCSQATSVNERIENKRRTALLGGGQRRIDAQHKRGKLTARERISLLLDPGSFVESDMFVEHRCADFGMAADKNKFPGDSVVTGRGRINGRLVYVFSQQIIGWAQWLPLVISALWEAEDFTVFGGSLSGAHAQKICKIMDQAITVGAPVIGLNDSGGARIQEGVESLAGYADIFLRNVTASGVIPQISLIMGPCAGGAVYSPALTDFTFMVKDTSYLFITGPDVVKSVTNEDVTQEELGGAKTHTTMSGVAHRAFENDVDALCNLRDFFNYLPLSSQDPAPVRECHDPSDRLVPELDTIVPLESTKAYNMVDIIHSVVDEREFFEIMPNYAKNIIVGFARMNGRTVGIVGNQPKVASGCLDINSSVKGARFVRFCDAFNIPLITFVDVPGFLPGTAQEYGGIIRHGAKLLYAFAEATVPKVTVITRKAYGGAYDVMSSKHLCGDTNYAWPTAEIAVMGAKGAVEIIFKGHENVEAAQAEYIEKFANPFPAAVRGFVDDIIQPSSTRARICCDLDVLASKKVQRPWRKHANIPL

SEQ ID NO: 31786 - protein, 382 aa, Homo sapiens
MGSGEPNPAGKKKKYLKAALYVGDLDPDVTEDMLYKKFRPAGPLRFTRICRDPVTRSPLGYGYVNFRFPADAEWALNTMNFDLINGKPFRLMWSQPDDRLRKSGVGNIFIKNLDKSIDNRALFYLFSAFGNILSCKVVCDDNGSKGYAYVHFDSLAAANRAIWHMNGVRLNNRQVYVGRFKFPEERAAEVRTRDRATFTNVFVKNIGDDIDDEKLKELFCEYGPTESVKVIRDASGKSKGFGFVRYETHEAAQKAVLDLHGKSIDGKVLYVGRAQKKIERLAELRRRFERLRLKEKSRPPGVPIYIKNLDETINDEKLKEEFSSFGSISRAKVMMEVGQGKGFGVVCFSSFEEATKAVDEMNGRIVGSKPLHVTLGQARRRC

SEQ ID NO: 31787 - protein, 350 aa, Homo sapiens
MLYKKFRPAGPLRFTRICRDPVTRSPLGYGYVNFRFPADAEWALNTMNFDLINGKPFRLMWSQPDDRLRKSGVGNIFIKNLDKSIDNRALFYLFSAFGNILSCKVVCDDNGSKGYAYVHFDSLAAANRAIWHMNGVRLNNRQVYVGRFKFPEERAAEVRTRDRATFTNVFVKNIGDDIDDEKLKELFCEYGPTESVKVIRDASGKSKGFGFVRYETHEAAQKAVLDLHGKSIDGKVLYVGRAQKKIERLAELRRRFERLRLKEKSRPPGVPIYIKNLDETINDEKLKEEFSSFGSISRAKVMMEVGQGKGFGVVCFSSFEEATKAVDEMNGRIVGSKPLHVTLGQARRRC

SEQ ID NO: 31788 - protein, 742 aa, Homo sapiens
MGSENSALKSYTLREPPFTLPSGLAVYPAVLQDGKFASVFVYKRENEDKVNKAAKHLKTLRHPCLLRFLSCTVEADGIHLVTERVQPLEVALETLSSAEVCAGIYDILLALIFLHDRGHLTHNNVCLSSVFVSEDGHWKLGGMETVCKVSQATPEFLRSIQSIRDPASIPPEEMSPEFTTLPECHGHARDAFSFGTLVESLLTILNEQVSADVLSSFQQTLHSTLLNPIPKCRPALCTLLSHDFFRNDFLEVVNFLKSLTLKSEEEKTEFFKFLLDRVSCLSEELIASRLVPLLLNQLVFAEPVAVKSFLPYLLGPKKDHAQGETPCLLSPALFQSRVIPVLLQLFEVHEEHVRMVLLSHIEAYVEHFTQEQLKKVILPQVLLGLRDTSDSIVAITLHSLAVLVSLLGPEVVVGGERTKIFKRTAPSFTKNTDLSLEDSPMCVVCSHHSQISPILENPFSSIFPKCFFSGSTPINSKKHIQRDYYNTLLQTGDPFSQPIKFPINGLSDVKNTSEDSENFPSSSKKSEEWPDWSEPEEPENQTVNIQIWPREPCDDVKSQCTTLDVEESSWDDCEPSSLDTKVNPGGGITATKPVTSGEQKPIPALLSLTEESMPWKSSLPQKISLVQRGDDADQIEPPKVSSQERPLKVPSELGLGEEFTIQVKKKPVKDPEMDWFADMIPEIKPSAAFLILPELRTEMVPKKDDVSPVMQFSSKFAAAEITEGEAEGWEEEGELNWEDNNW

SEQ ID NO: 31789 - protein, 688 aa, Homo sapiens
MGSENSALKSYTLREPPFTLPSGLAVYPAVLQDGKFASVFVYKRENEDKVNKAAKHLKTLRHPCLLRFLSCTVEADGIHLVTERVQPLEVALETLSSAEVCAGIYDILLALIFLHDRGHLTHNNVCLSSVFVSEDGHWKLGGMETVCKVSQATPEFLRSIQSIRDPASIPPEEMSPEFTTLPECHGHARDAFSFGTLVESLLTILNEQVSADVLSSFQQTLHSTLLNPIPKCRPALCTLLSHDFFRNDFLEVVNFLKSLTLKSEEEKTEFFKFLLDRVSCLSEELIASRLVPLLLNQLVFAEPVAVKSFLPYLLGPKKDHAQGETPCLLSPALFQSRVIPVLLQLFEVHEEHVRMVLLSHIEAYVEHFTQEQLKKVILPQVLLGLRDTSDSIVAITLHSLAVLVSLLGPEVVVGGERTKIFKRTAPSFTKNTDLSLEGDPFSQPIKFPINGLSDVKNTSEDSENFPSSSKKSEEWPDWSEPEEPENQTVNIQIWPREPCDDVKSQCTTLDVEESSWDDCEPSSLDTKVNPGGGITATKPVTSGEQKPIPALLSLTEESMPWKSSLPQKISLVQRGDDADQIEPPKVSSQERPLKVPSELGLGEEFTIQVKKKPVKDPEMDWFADMIPEIKPSAAFLILPELRTEMVPKKDDVSPVMQFSSKFAAAEITEGEAEGWEEEGELNWEDNNW

SEQ ID NO: 31790 - protein, 359 aa, Homo sapiens
MQVPNSTGPDNATLQMLRNPAIAVALPVVYSLVAAVSIPGNLFSLWVLCRRMGPRSPSVIFMINLSVTDLMLASVLPFQIYYHCNRHHWVFGVLLCNVVTVAFYANMYSSILTMTCISVERFLGVLYPLSSKRWRRRRYAVAACAGTWLLLLTALSPLARTDLTYPVHALGIITCFDVLKWTMLPSVAMWAVFLFTIFILLFLIPFVITVACYTATILKLLRTEEAHGREQRRRAVGLAAVVLLAFVTCFAPNNFVLLAHIVSRLFYGKSYYHVYKLTLCLSCLNNCLDPFVYYFASREFQLRLREYLGCRRVPRDTLDTRRESLFSARTTSVRSEAGAHPEGMEGATRPGLQRQESVF

SEQ ID NO: 31791 - protein, 1356 aa, Homo sapiens
MKVTVCFGRTRVVVPCGDGHMKVFSLIQQAVTRYRKAIAKDPNYWIQVHRLEHGDGGILDLDDILCDVADDKDRLVAVFDEQDPHHGGDGTSASSTGTQSPEIFGSELGTNNVSAFQPYQATSEIEVTPSVLRANMPLHVRRSSDPALIGLSTSVSDSNFSSEEPSRKNPTRWSTTAGFLKQNTAGSPKTCDRKKDENYRSLPRDTSNWSNQFQRDNARSSLSASHPMVGKWLEKQEQDEDGTEEDNSRVEPVGHADTGLEHIPNFSLDDMVKLVEVPNDGGPLGIHVVPFSARGGRTLGLLVKRLEKGGKAEHENLFRENDCIVRINDGDLRNRRFEQAQHMFRQAMRTPIIWFHVVPAANKEQYEQLSQSEKNNYYSSRFSPDSQYIDNRSVNSAGLHTVQRAPRLNHPPEQIDSHSRLPHSAHPSGKPPSAPASAPQNVFSTTVSSGYNTKKIGKRLNIQLKKGTEGLGFSITSRDVTIGGSAPIYVKNILPRGAAIQDGRLKAGDRLIEVNGVDLVGKSQEEVVSLLRSTKMEGTVSLLVFRQEDAFHPRELNAEPSQMQIPKETKAEDEDIVLTPDGTREFLTFEVPLNDSGSAGLGVSVKGNRSKENHADLGIFVKSIINGGAASKDGRLRVNDQLIAVNGESLLGKTNQDAMETLRRSMSTEGNKRGMIQLIVARRISKCNELKSPGSPPGPELPIETALDDRERRISHSLYSGIEGLDESPSRNAALSRIMGESGKYQLSPTVNMPQDDTVIIEDDRLPVLPPHLSDQSSSSSHDDVGFVTADAGTWAKAAISDSADCSLSPDVDPVLAFQREGFGRQSMSEKRTKQFSDASQLDFVKTRKSKSMDLGIADETKLNTVDDQKAGSPSRDVGPSLGLKKSSSLESLQTAVAEVTLNGDIPFHRPRPRIIRGRGCNESFRAAIDKSYDKPAVDDDDEGMETLEEDTEESSRSGRESVSTASDQPSHSLERQMNGNQEKGDKTDRKKDKTGKEKKKDRDKEKDKMKAKKGMLKGLGDMFRFGKHRKDDKIEKTGKIKIQESFTSEEERIRMKQEQERIQAKTREFRERQARERDYAEIQDFHRTFGCDDELMYGGVSSYEGSMALNARPQSPREGHMMDALYAQVKKPRNSKPSPVDSNRSTPSNHDRIQRLRQEFQQAKQDEDVEDRRRTYSFEQPWPNARPATQSGRHSVSVEVQMQRQRQEERESSQQAQRQYSSLPRQSRKNASSVSQDSWEQNYSPGEGFQSAKENPRYSSYQGSRNGYLGGHGFNARVMLETQELLRQEQRRKEQQMKKQPPSEGPSNYDSYKKVQDPSYAPPKGPFRQDVPPSPSQVARLNRLQTPEKGRPFYS

SEQ ID NO: 31792 - protein, 1353 aa, Homo sapiens
MKVTVCFGRTRVVVPCGDGHMKVFSLIQQAVTRYRKAIAKDPNYWIQVHRLEHGDGGILDLDDILCDVADDKDRLVAVFDEQDPHHGGDGTSASSTGTQSPEIFGSELGTNNVSAFQPYQATSEIEVTPSVLRANMPLHVRRSSDPALIGLSTSVSDSNFSSEEPSRKNPTRWSTTAGFLKQNTAGSPKTCDRKKDENYRSLPRDTSNWSNQFQRDNARSSLSASHPMVGKWLEKQEQDEDGTEEDNSRVEPVGHADTGLEHIPNFSLDDMVKLVEVPNDGGPLGIHVVPFSARGGRTLGLLVKRLEKGGKAEHENLFRENDCIVRINDGDLRNRRFEQAQHMFRQAMRTPIIWFHVVPAANKEQYEQLSQSEKNNYYSSRFSPDSQYIDNRSVNSAGLHTVQRAPRLNHPPEQIDSHSRLPHSAHPSGKPPSAPASAPQNVFSTTVSSGYNTKKIGKRLNIQLKKGTEGLGFSITSRDVTIGGSAPIYVKNILPRGAAIQDGRLKAGDRLIEVNGVDLVGKSQEEVVSLLRSTKMEGTVSLLVFRQEDAFHPRELNAEPSQMQIPKETKAEDEDIVLTPDGTREFLTFEVPLNDSGSAGLGVSVKGNRSKENHADLGIFVKSIINGGAASKDGRLRVNDQLIAVNGESLLGKTNQDAMETLRRSMSTEGNKRGMIQLIVARRISKCNELKSPGSPPGPELPIETALDDRERRISHSLYSGIEGLDESPSRNAALSRIMGKYQLSPTVNMPQDDTVIIEDDRLPVLPPHLSDQSSSSSHDDVGFVTADAGTWAKAAISDSADCSLSPDVDPVLAFQREGFGRQSMSEKRTKQFSDASQLDFVKTRKSKSMDLGIADETKLNTVDDQKAGSPSRDVGPSLGLKKSSSLESLQTAVAEVTLNGDIPFHRPRPRIIRGRGCNESFRAAIDKSYDKPAVDDDDEGMETLEEDTEESSRSGRESVSTASDQPSHSLERQMNGNQEKGDKTDRKKDKTGKEKKKDRDKEKDKMKAKKGMLKGLGDMFRFGKHRKDDKIEKTGKIKIQESFTSEEERIRMKQEQERIQAKTREFRERQARERDYAEIQDFHRTFGCDDELMYGGVSSYEGSMALNARPQSPREGHMMDALYAQVKKPRNSKPSPVDSNRSTPSNHDRIQRLRQEFQQAKQDEDVEDRRRTYSFEQPWPNARPATQSGRHSVSVEVQMQRQRQEERESSQQAQRQYSSLPRQSRKNASSVSQDSWEQNYSPGEGFQSAKENPRYSSYQGSRNGYLGGHGFNARVMLETQELLRQEQRRKEQQMKKQPPSEGPSNYDSYKKVQDPSYAPPKGPFRQDVPPSPSQVARLNRLQTPEKGRPFYS

SEQ ID NO: 31793 - protein, 1266 aa, Homo sapiens
MKVTVCFGRTRVVVPCGDGHMKVFSLIQQAVTRYRKAIAKDPNYWIQVHRLEHGDGGILDLDDILCDVADDKDRLVAVFDEQDPHHGGDGTSASSTGTQSPEIFGSELGTNNVSAFQPYQATSEIEVTPSVLRANMPLHVRRSSDPALIGLSTSVSDSNFSSEEPSRKNPTRWSTTAGFLKQNTAGSPKTCDRKDEDGTEEDNSRVEPVGHADTGLEHIPNFSLDDMVKLVEVPNDGGPLGIHVVPFSARGGRTLGLLVKRLEKGGKAEHENLFRENDCIVRINDGDLRNRRFEQAQHMFRQAMRTPIIWFHVVPAANKEQYEQLSQSEKNNYYSSRFSPDSQYIDNRSVNSAGLHTVQRAPRLNHPPEQIDSHSRLPHSAHPSGKPPSAPASAPQNVFSTTVSSGYNTKKIGKRLNIQLKKGTEGLGFSITSRDVTIGGSAPIYVKNILPRGAAIQDGRLKAGDRLIEVNGVDLVGKSQEEVVSLLRSTKMEGTVSLLVFRQEDAFHPRELKAEDEDIVLTPDGTREFLTFEVPLNDSGSAGLGVSVKGNRSKENHADLGIFVKSIINGGAASKDGRLRVNDQLIAVNGESLLGKTNQDAMETLRRSMSTEGNKRGMIQLIVARRISKCNELKSPGSPPGPELPIETALDDRERRISHSLYSGIEGLDESPSRNAALSRIMGKYQLSPTVNMPQDDTVIIEDDRLPVLPPHLSDQSSSSSHDDVGFVTADAGTWAKAAISDSADCSLSPDVDPVLAFQREGFGRQIADETKLNTVDDQKAGSPSRDVGPSLGLKKSSSLESLQTAVAEVTLNGDIPFHRPRPRIIRGRGCNESFRAAIDKSYDKPAVDDDDEGMETLEEDTEESSRSGRESVSTASDQPSHSLERQMNGNQEKGDKTDRKKDKTGKEKKKDRDKEKDKMKAKKGMLKGLGDMFRFGKHRKDDKIEKTGKIKIQESFTSEEERIRMKQEQERIQAKTREFRERQARERDYAEIQDFHRTFGCDDELMYGGVSSYEGSMALNARPQSPREGHMMDALYAQVKKPRNSKPSPVDSNRSTPSNHDRIQRLRQEFQQAKQDEDVEDRRRTYSFEQPWPNARPATQSGRHSVSVEVQMQRQRQEERESSQQAQRQYSSLPRQSRKNASSVSQDSWEQNYSPGEGFQSAKENPRYSSYQGSRNGYLGGHGFNARVMLETQELLRQEQRRKEQQMKKQPPSEGPSNYDSYKKVQDPSYAPPKGPFRQDVPPSPSQVARLNRLQTPEKGRPFYS

SEQ ID NO: 31794 - protein, 1319 aa, Homo sapiens
MKVTVCFGRTRVVVPCGDGHMKVFSLIQQAVTRYRKAIAKDPNYWIQVHRLEHGDGGILDLDDILCDVADDKDRLVAVFDEQDPHHGGDGTSASSTGTQSPEIFGSELGTNNVSAFQPYQATSEIEVTPSVLRANMPLHVRRSSDPALIGLSTSVSDSNFSSEEPSRKNPTRWSTTAGFLKQNTAGSPKTCDRKKDENYRSLPRDTSNWSNQFQRDNARSSLSASHPMVGKWLEKQEQDEDGTEEDNSRVEPVGHADTGLEHIPNFSLDDMVKLVEVPNDGGPLGIHVVPFSARGGRTLGLLVKRLEKGGKAEHENLFRENDCIVRINDGDLRNRRFEQAQHMFRQAMRTPIIWFHVVPAANKEQYEQLSQSEKNNYYSSRFSPDSQYIDNRSVNSAGLHTVQRAPRLNHPPEQIDSHSRLPHSAHPSGKPPSAPASAPQNVFSTTVSSGYNTKKIGKRLNIQLKKGTEGLGFSITSRDVTIGGSAPIYVKNILPRGAAIQDGRLKAGDRLIEVNGVDLVGKSQEEVVSLLRSTKMEGTVSLLVFRQEDAFHPRELNAEPSQMQIPKETKAEDEDIVLTPDGTREFLTFEVPLNDSGSAGLGVSVKGNRSKENHADLGIFVKSIINGGAASKDGRLRVNDQLIAVNGESLLGKTNQDAMETLRRSMSTEGNKRGMIQLIVARRISKCNELKSPGSPPGPELPIETALDDRERRISHSLYSGIEGLDESPSRNAALSRIMGESGKYQLSPTVNMPQDDTVIIEDDRLPVLPPHLSDQSSSSSHDDVGFVTADAGTWAKAAISDSADCSLSPDVDPVLAFQREGFGRQSMSEKRTKQFSDASQLDFVKTRKSKSMDLGIADETKLNTVDDQKAGSPSRDVGPSLGLKKSSSLESLQTAVAEVTLNGDIPFHRPRPRIIRGRGCNESFRAAIDKSYDKPAVDDDDEGMETLEEDTEESSRSGRESVSTASDQPSHSLERQMNGNQEKGDKTDRKKDKTGKEKKKDRDKEKDKMKAKKGMLKGLGDMFRIQAKTREFRERQARERDYAEIQDFHRTFGCDDELMYGGVSSYEGSMALNARPQSPREGHMMDALYAQVKKPRNSKPSPVDSNRSTPSNHDRIQRLRQEFQQAKQDEDVEDRRRTYSFEQPWPNARPATQSGRHSVSVEVQMQRQRQEERESSQQAQRQYSSLPRQSRKNASSVSQDSWEQNYSPGEGFQSAKENPRYSSYQGSRNGYLGGHGFNARVMLETQELLRQEQRRKEQQMKKQPPSEGPSNYDSYKKVQDPSYAPPKGPFRQDVPPSPSQVARLNRLQTPEKGRPFYS

SEQ ID NO: 31795 - protein, 1244 aa, Homo sapiens
MKVTVCFGRTRVVVPCGDGHMKVFSLIQQAVTRYRKAIAKDPNYWIQVHRLEHGDGGILDLDDILCDVADDKDRLVAVFDEQDPHHGGDGTSASSTGTQSPEIFGSELGTNNVSAFQPYQATSEIEVTPSVLRANMPLHVRRSSDPALIGLSTSVSDSNFSSEEPSRKNPTRWSTTAGFLKQNTAGSPKTCDRKDEDGTEEDNSRVEPVGHADTGLEHIPNFSLDDMVKLVEVPNDGGPLGIHVVPFSARGGRTLGLLVKRLEKGGKAEHENLFRENDCIVRINDGDLRNRRFEQAQHMFRQAMRTPIIWFHVVPAANKEQYEQLSQSEKNNYYSSRFSPDSQYIDNRSVNSAGLHTVQRAPRLNHPPEQIDSHSRLPHSAHPSGKPPSAPASAPQNVFSTTVSSGYNTKKIGKRLNIQLKKGTEGLGFSITSRDVTIGGSAPIYVKNILPRGAAIQDGRLKAGDRLIEVNGVDLVGKSQEEVVSLLRSTKMEGTVSLLVFRQEDAFHPRELKAEDEDIVLTPDGTREFLTFEVPLNDSGSAGLGVSVKGNRSKENHADLGIFVKSIINGGAASKDGRLRVNDQLIAVNGESLLGKTNQDAMETLRRSMSTEGNKRGMIQLIVARRISKCNELKSPGSPPGPELPIETALDDRERRISHSLYSGIEGLDESPSRNAALSRIMGKYQLSPTVNMPQDDTVIIEDDRLPVLPPHLSDQSSSSSHDDVGFVTADAGTWAKAAISDSADCSLSPDVDPVLAFQREGFGRQSMSEKRTKQFSDASQLDFVKTRKSKSMDLGSSPSRDVGPSLGLKKSSSLESLQTAVAEVTLNGDIPFHRPRPRIIRGRGCNESFRAAIDKSYDKPAVDDDDEGMETLEEDTEESSRSGRESVSTASDQPSHSLERQMNGNQEKGDKTDRKKDKTGKEKKKDRDKEKDKMKAKKGMLKGLGDMFRIQAKTREFRERQARERDYAEIQDFHRTFGCDDELMYGGVSSYEGSMALNARPQSPREGHMMDALYAQVKKPRNSKPSPVDSNRSTPSNHDRIQRLRQEFQQAKQDEDVEDRRRTYSFEQPWPNARPATQSGRHSVSVEVQMQRQRQEERESSQQAQRQYSSLPRQSRKNASSVSQDSWEQNYSPGEGFQSAKENPRYSSYQGSRNGYLGGHGFNARVMLETQELLRQEQRRKEQQMKKQPPSEGPSNYDSYKKVQDPSYAPPKGPFRQDVPPSPSQVARLNRLQTPEKGRPFYS

SEQ ID NO: 31796 - protein, 1310 aa, Homo sapiens
MKVTVCFGRTRVVVPCGDGHMKVFSLIQQAVTRYRKAIAKDPNYWIQVHRLEHGDGGILDLDDILCDVADDKDRLVAVFDEQDPHHGGDGTSASSTGTQSPEIFGSELGTNNVSAFQPYQATSEIEVTPSVLRANMPLHVRRSSDPALIGLSTSVSDSNFSSEEPSRKNPTRWSTTAGFLKQNTAGSPKTCDRKKDENYRSLPRDTSNWSNQFQRDNARSSLSASHPMVGKWLEKQEQDEDGTEEDNSRVEPVGHADTGLEHIPNFSLDDMVKLVEVPNDGGPLGIHVVPFSARGGRTLGLLVKRLEKGGKAEHENLFRENDCIVRINDGDLRNRRFEQAQHMFRQAMRTPIIWFHVVPAANKEQYEQLSQSEKNNYYSSRFSPDSQYIDNRSVNSAGLHTVQRAPRLNHPPEQIDSHSRLPHSAHPSGKPPSAPASAPQNVFSTTVSSGYNTKKIGKRLNIQLKKGTEGLGFSITSRDVTIGGSAPIYVKNILPRGAAIQDGRLKAGDRLIEVNGVDLVGKSQEEVVSLLRSTKMEGTVSLLVFRQEDAFHPRELKAEDEDIVLTPDGTREFLTFEVPLNDSGSAGLGVSVKGNRSKENHADLGIFVKSIINGGAASKDGRLRVNDQLIAVNGESLLGKTNQDAMETLRRSMSTEGNKRGMIQLIVARRISKCNELKSPGSPPGPELPIETALDDRERRISHSLYSGIEGLDESPSRNAALSRIMGKYQLSPTVNMPQDDTVIIEDDRLPVLPPHLSDQSSSSSHDDVGFVTADAGTWAKAAISDSADCSLSPDVDPVLAFQREGFGRQIADETKLNTVDDQKAGSPSRDVGPSLGLKKSSSLESLQTAVAEVTLNGDIPFHRPRPRIIRGRGCNESFRAAIDKSYDKPAVDDDDEGMETLEEDTEESSRSGRESVSTASDQPSHSLERQMNGNQEKGDKTDRKKDKTGKEKKKDRDKEKDKMKAKKGMLKGLGDMFRFGKHRKDDKIEKTGKIKIQESFTSEEERIRMKQEQERIQAKTREFRERQARERDYAEIQDFHRTFGCDDELMYGGVSSYEGSMALNARPQSPREGHMMDALYAQVKKPRNSKPSPVDSNRSTPSNHDRIQRLRQEFQQAKQDEDVEDRRRTYSFEQPWPNARPATQSGRHSVSVEVQMQRQRQEERESSQQAQRQYSSLPRQSRKNASSVSQDSWEQNYSPGEGFQSAKENPRYSSYQGSRNGYLGGHGFNARVMLETQELLRQEQRRKEQQMKKQPPSEGPSNYDSYKKVQDPSYAPPKGPFRQDVPPSPSQVARLNRLQTPEKGRPFYS

SEQ ID NO: 31797 - protein, 1273 aa, Homo sapiens
MKVTVCFGRTRVVVPCGDGHMKVFSLIQQAVTRYRKAIAKDPNYWIQVHRLEHGDGGILDLDDILCDVADDKDRLVAVFDEQDPHHGGDGTSASSTGTQSPEIFGSELGTNNVSAFQPYQATSEIEVTPSVLRANMPLHVRRSSDPALIGLSTSVSDSNFSSEEPSRKNPTRWSTTAGFLKQNTAGSPKTCDRKKDENYRSLPRDTSNWSNQFQRDNARSSLSASHPMVGKWLEKQEQDEDGTEEDNSRVEPVGHADTGLEHIPNFSLDDMVKLVEVPNDGGPLGIHVVPFSARGGRTLGLLVKRLEKGGKAEHENLFRENDCIVRINDGDLRNRRFEQAQHMFRQAMRTPIIWFHVVPAANKEQYEQLSQSEKNNYYSSRFSPDSQYIDNRSVNSAGLHTVQRAPRLNHPPEQIDSHSRLPHSAHPSGKPPSAPASAPQNVFSTTVSSGYNTKKIGKRLNIQLKKGTEGLGFSITSRDVTIGGSAPIYVKNILPRGAAIQDGRLKAGDRLIEVNGVDLVGKSQEEVVSLLRSTKMEGTVSLLVFRQEDAFHPRELKAEDEDIVLTPDGTREFLTFEVPLNDSGSAGLGVSVKGNRSKENHADLGIFVKSIINGGAASKDGRLRVNDQLIAVNGESLLGKTNQDAMETLRRSMSTEGNKRGMIQLIVARRISKCNELKSPGSPPGPELPIETALDDRERRISHSLYSGIEGLDESPSRNAALSRIMGKYQLSPTVNMPQDDTVIIEDDRLPVLPPHLSDQSSSSSHDDVGFVTADAGTWAKAAISDSADCSLSPDVDPVLAFQREGFGRQIADETKLNTVDDQKAGSPSRDVGPSLGLKKSSSLESLQTAVAEVTLNGDIPFHRPRPRIIRGRGCNESFRAAIDKSYDKPAVDDDDEGMETLEEDTEESSRSGRESVSTASDQPSHSLERQMNGNQEKGDKTDRKKDKTGKEKKKDRDKEKDKMKAKKGMLKGLGDMFRIQAKTREFRERQARERDYAEIQDFHRTFGCDDELMYGGVSSYEGSMALNARPQSPREGHMMDALYAQVKKPRNSKPSPVDSNRSTPSNHDRIQRLRQEFQQAKQDEDVEDRRRTYSFEQPWPNARPATQSGRHSVSVEVQMQRQRQEERESSQQAQRQYSSLPRQSRKNASSVSQDSWEQNYSPGEGFQSAKENPRYSSYQGSRNGYLGGHGFNARVMLETQELLRQEQRRKEQQMKKQPPSEGPSNYDSYKKVQDPSYAPPKGPFRQDVPPSPSQVARLNRLQTPEKGRPFYS

SEQ ID NO: 31798 - protein, 1031 aa, Homo sapiens
MKVTVCFGRTRVVVPCGDGHMKVFSLIQQAVTRYRKAIAKDPNYWIQVHRLEHGDGGILDLDDILCDVADDKDRLVAVFDEQDPHHGGDGTSASSTGTQSPEIFGSELGTNNVSAFQPYQATSEIEVTPSVLRANMPLHVRRSSDPALIGLSTSVSDSNFSSEEPSRKNPTRWSTTAGFLKQNTAGSPKTCDRKKDENYRSLPRDTSNWSNQFQRDNARSSLSASHPMVGKWLEKQEQDEDGTEEDNSRVEPVGHADTGLEHIPNFSLDDMVKLVEVPNDGGPLGIHVVPFSARGGRTLGLLVKRLEKGGKAEHENLFRENDCIVRINDGDLRNRRFEQAQHMFRQAMRTPIIWFHVVPAANKEQYEQLSQSEKNNYYSSRFSPDSQYIDNRSVNSAGLHTVQRAPRLNHPPEQIDSHSRLPHSAHPSGKPPSAPASAPQNVFSTTVSSGYNTKKIGKRLNIQLKKGTEGLGFSITSRDVTIGGSAPIYVKNILPRGAAIQDGRLKAGDRLIEVNGVDLVGKSQEEVVSLLRSTKMEGTVSLLVFRQEDAFHPRELNAEPSQMQIPKETKAEDEDIVLTPDGTREFLTFEVPLNDSGSAGLGVSVKGNRSKENHADLGIFVKSIINGGAASKDGRLRVNDQLIAVNGESLLGKTNQDAMETLRRSMSTEGNKRGMIQLIVARRISKCNELKSPGSPPGPELPIETALDDRERRISHSLYSGIEGLDESPSRNAALSRIMGKYQLSPTVNMPQDDTVIIEDDRLPVLPPHLSDQSSSSSHDDVGFVTADAGTWAKAAISDSADCSLSPDVDPVLAFQREGFGRQSMSEKRTKQFSDASQLDFVKTRKSKSMDLGIADETKLNTVDDQKAGSPSRDVGPSLGLKKSSSLESLQTAVAEVTLNGDIPFHRPRPRIIRGRGCNESFRAAIDKSYDKPAVDDDDEGMETLEEDTEESSRSGRESVSTASDQPSHSLERQMNGNQEKGDKTDRKKDKTGKEKKKDRDKEKDKMKAKKGMLKGLGDMFSLAKLKPEKR

SEQ ID NO: 31799 - protein, 988 aa, Homo sapiens
MKVTVCFGRTRVVVPCGDGHMKVFSLIQQAVTRYRKAIAKDPNYWIQVHRLEHGDGGILDLDDILCDVADDKDRLVAVFDEQDPHHGGDGTSASSTGTQSPEIFGSELGTNNVSAFQPYQATSEIEVTPSVLRANMPLHVRRSSDPALIGLSTSVSDSNFSSEEPSRKNPTRWSTTAGFLKQNTAGSPKTCDRKKDENYRSLPRDTSNWSNQFQRDNARSSLSASHPMVGKWLEKQEQDEDGTEEDNSRVEPVGHADTGLEHIPNFSLDDMVKLVEVPNDGGPLGIHVVPFSARGGRTLGLLVKRLEKGGKAEHENLFRENDCIVRINDGDLRNRRFEQAQHMFRQAMRTPIIWFHVVPAANKEQYEQLSQSEKNNYYSSRFSPDSQYIDNRSVNSAGLHTVQRAPRLNHPPEQIDSHSRLPHSAHPSGKPPSAPASAPQNVFSTTVSSGYNTKKIGKRLNIQLKKGTEGLGFSITSRDVTIGGSAPIYVKNILPRGAAIQDGRLKAGDRLIEVNGVDLVGKSQEEVVSLLRSTKMEGTVSLLVFRQEDAFHPRELKAEDEDIVLTPDGTREFLTFEVPLNDSGSAGLGVSVKGNRSKENHADLGIFVKSIINGGAASKDGRLRVNDQLIAVNGESLLGKTNQDAMETLRRSMSTEGNKRGMIQLIVARRISKCNELKSPGSPPGPELPIETALDDRERRISHSLYSGIEGLDESPSRNAALSRIMGKYQLSPTVNMPQDDTVIIEDDRLPVLPPHLSDQSSSSSHDDVGFVTADAGTWAKAAISDSADCSLSPDVDPVLAFQREGFGRQIADETKLNTVDDQKAGSPSRDVGPSLGLKKSSSLESLQTAVAEVTLNGDIPFHRPRPRIIRGRGCNESFRAAIDKSYDKPAVDDDDEGMETLEEDTEESSRSGRESVSTASDQPSHSLERQMNGNQEKGDKTDRKKDKTGKEKKKDRDKEKDKMKAKKGMLKGLGDMFSLAKLKPEKR

SEQ ID NO: 31800 - protein, 1000 aa, Homo sapiens
MKVTVCFGRTRVVVPCGDGHMKVFSLIQQAVTRYRKAIAKDPNYWIQVHRLEHGDGGILDLDDILCDVADDKDRLVAVFDEQDPHHGGDGTSASSTGTQSPEIFGSELGTNNVSAFQPYQATSEIEVTPSVLRANMPLHVRRSSDPALIGLSTSVSDSNFSSEEPSRKNPTRWSTTAGFLKQNTAGSPKTCDRKKDENYRSLPRDTSNWSNQFQRDNARSSLSASHPMVGKWLEKQEQDEDGTEEDNSRVEPVGHADTGLEHIPNFSLDDMVKLVEVPNDGGPLGIHVVPFSARGGRTLGLLVKRLEKGGKAEHENLFRENDCIVRINDGDLRNRRFEQAQHMFRQAMRTPIIWFHVVPAANKEQYEQLSQSEKNNYYSSRFSPDSQYIDNRSVNSAGLHTVQRAPRLNHPPEQIDSHSRLPHSAHPSGKPPSAPASAPQNVFSTTVSSGYNTKKIGKRLNIQLKKGTEGLGFSITSRDVTIGGSAPIYVKNILPRGAAIQDGRLKAGDRLIEVNGVDLVGKSQEEVVSLLRSTKMEGTVSLLVFRQEDAFHPRELNAEPSQMQIPKETKAEDEDIVLTPDGTREFLTFEVPLNDSGSAGLGVSVKGNRSKENHADLGIFVKSIINGGAASKDGRLRVNDQLIAVNGESLLGKTNQDAMETLRRSMSTEGNKRGMIQLIVARRISKCNELKSPGSPPGPELPIETALDDRERRISHSLYSGIEGLDESPSRNAALSRIMGKYQLSPTVNMPQDDTVIIEDDRLPVLPPHLSDQSSSSSHDDVGFVTADAGTWAKAAISDSADCSLSPDVDPVLAFQREGFGRQTDETKLNTVDDQKAGSPSRDVGPSLGLKKSSSLESLQTAVAEVTLNGDIPFHRPRPRIIRGRGCNESFRAAIDKSYDKPAVDDDDEGMETLEEDTEESSRSGRESVSTASDQPSHSLERQMNGNQEKGDKTDRKKDKTGKEKKKDRDKEKDKMKAKKGMLKGLGDMFSLAKLKPEKR

SEQ ID NO: 31801 - protein, 1340 aa, Homo sapiens
MKVTVCFGRTRVVVPCGDGHMKVFSLIQQAVTRYRKAIAKDPNYWIQVHRLEHGDGGILDLDDILCDVADDKDRLVAVFDEQDPHHGGDGTSASSTGTQSPEIFGSELGTNNVSAFQPYQATSEIEVTPSVLRANMPLHVRRSSDPALIGLSTSVSDSNFSSEEPSRKNPTRWSTTAGFLKQNTAGSPKTCDRKKDENYRSLPRDTSNWSNQFQRDNARSSLSASHPMVGKWLEKQEQDEDGTEEDNSRVEPVGHADTGLEHIPNFSLDDMVKLVEVPNDGGPLGIHVVPFSARGGRTLGLLVKRLEKGGKAEHENLFRENDCIVRINDGDLRNRRFEQAQHMFRQAMRTPIIWFHVVPAANKEQYEQLSQSEKNNYYSSRFSPDSQYIDNRSVNSAGLHTVQRAPRLNHPPEQIDSHSRLPHSAHPSGKPPSAPASAPQNVFSTTVSSGYNTKKIGKRLNIQLKKGTEGLGFSITSRDVTIGGSAPIYVKNILPRGAAIQDGRLKAGDRLIEVNGVDLVGKSQEEVVSLLRSTKMEGTVSLLVFRQEDAFHPRELKAEDEDIVLTPDGTREFLTFEVPLNDSGSAGLGVSVKGNRSKENHADLGIFVKSIINGGAASKDGRLRVNDQLIAVNGESLLGKTNQDAMETLRRSMSTEGNKRGMIQLIVARRISKCNELKSPGSPPGPELPIETALDDRERRISHSLYSGIEGLDESPSRNAALSRIMGKYQLSPTVNMPQDDTVIIEDDRLPVLPPHLSDQSSSSSHDDVGFVTADAGTWAKAAISDSADCSLSPDVDPVLAFQREGFGRQSMSEKRTKQFSDASQLDFVKTRKSKSMDLGIADETKLNTVDDQKAGSPSRDVGPSLGLKKSSSLESLQTAVAEVTLNGDIPFHRPRPRIIRGRGCNESFRAAIDKSYDKPAVDDDDEGMETLEEDTEESSRSGRESVSTASDQPSHSLERQMNGNQEKGDKTDRKKDKTGKEKKKDRDKEKDKMKAKKGMLKGLGDMFRFGKHRKDDKIEKTGKIKIQESFTSEEERIRMKQEQERIQAKTREFRERQARERDYAEIQDFHRTFGCDDELMYGGVSSYEGSMALNARPQSPREGHMMDALYAQVKKPRNSKPSPVDSNRSTPSNHDRIQRLRQEFQQAKQDEDVEDRRRTYSFEQPWPNARPATQSGRHSVSVEVQMQRQRQEERESSQQAQRQYSSLPRQSRKNASSVSQDSWEQNYSPGEGFQSAKENPRYSSYQGSRNGYLGGHGFNARVMLETQELLRQEQRRKEQQMKKQPPSEGPSNYDSYKKVQDPSYAPPKGPFRQDVPPSPSQVARLNRLQTPEKGRPFYS

SEQ ID NO: 31802 - protein, 352 aa, Homo sapiens
MSRGTMPQPEAWPGASCAETPAREAAATARDGGKAAASGQPRPEMQCPAEHEEDMYRAADEIEKEKELLIHERGASEPRLSVAPEMDIMDYCKKEWRGNTQKATCMKMGYEEVSQKFTSIRRVRGDNYCALRATLFQAMSQAVGLPPWLQDPELMLLPEKLISKYNWIKQWKLGLKFDGKNEDLVDKIKESLTLLRKKWAGLAEMRTAEARQIACDELFTNEAEEYSLYEAVKFLMLNRAIELYNDKEKGKEVPFFSVLLFARDTSNDPGQLLRNHLNQVGHTGGLEQVEMFLLAYAVRHTIQVYRLSKYNTEEFITVYPTDPPKDWPVVTLIAEDDRHYNIPVRVCEETSL

SEQ ID NO: 31803 - protein, 444 aa, Homo sapiens
MSSSYDEASLAPEETTDSFWEVGNYKRTVKRIDDGHRLCNDLMNCVQERAKIEKAYGQQLTDWAKRWRQLIEKGPQYGSLERAWGAIMTEADKVSELHQEVKNNLLNEDLEKVKNWQKDAYHKQIMGGFKETKEAEDGFRKAQKPWAKKMKELEAAKKAYHLACKEEKLAMTREMNSKTEQSVTPEQQKKLQDKVDKCKQDVQKTQEKYEKVLEDVGKTTPQYMENMEQVFEQCQQFEEKRLVFLKEVLLDIKRHLNLAENSSYIHVYRELEQAIRGADAQEDLRWFRSTSGPGMPMNWPQFEEWNPDLPHTTTKKEKQPKKAEGVALTNATGAVESTSQAGDRGSVSSYDRGQPYATEWSDDESGNPFGGSETNGGANPFEDDSKGVRVRALYDYDGQEQDELSFKAGDELTKLGEEDEQGWCRGRLDSGQLGLYPANYVEAI

SEQ ID NO: 31804 - protein, 202 aa, Homo sapiens
MATLIYVDKEIGEPGTRVAAKDVLKLESRPSIKALDGISQVLTRRFGKTYDAPSALPKATRKALGTVNRATEKSVKTNGPRKQKQPSFSAKKMTEKTVKTKSSVPASDDAYPEIEKFFPFNLLDFESFDLPEERQIAHLPLSGVPLMILDEEGELEKLFQLGPPSPVKMPSPPWECNLLQSPSSILSTLDVELPAVCYDIDI

SEQ ID NO: 31805 - protein, 191 aa, Homo sapiens
MATLIYVDKEIGEPGTRVAAKDVLKLESRPSIKALDGISQVLTRRFGKTYDAPSALPKATRKALGTVNRATEKSVKTNGPRKQKQPSFSAKKMTEKTVKTKSSVPASDDAYPEIEKFFPFNLLDFESFDLPEERQIAHLPLSGVPLMILDEEGELEKLFQLGPPSPVKMPSPPWECNLFAVSFKHSVDPGC

SEQ ID NO: 31806 - protein, 2485 aa, Homo sapiens
MHVSLAEALEVRGGPLQEEEIWAVLNQSAESLQELFRKVSLADPAALGFIISPWSLLLLPSGSVSFTDENISNQDLRAFTAPEVLQNQSLTSLSDVEKIHIYSLGMTLYWGADYEVPQSQPIKLGDHLNSILLGMCEDVIYARVSVRTVLDACSAHIRNSNCAPSFSYVKHLVKLVLGNLSGTDQLSCNSEQKPDRSQAIRDRLRGKGLPTGRSSTSDVLDIQKPPLSHQTFLNKGLSKSMGFLSIKDTQDENYFKDILSDNSGREDSENTFSPYQFKTSGPEKKPIPGIDVLSKKKIWASSMDLLCTADRDFSSGETATYRRCHPEAVTVRTSTTPRKKEARYSDGSIALDIFGPQKMDPIYHTRELPTSSAISSALDRIRERQKKLQVLREAMNVEEPVRRYKTYHGDVFSTSSESPSIISSESDFRQVRRSEASKRFESSSGLPGVDETLSQGQSQRPSRQYETPFEGNLINQEIMLKRQEEELMQLQAKMALRQSRLSLYPGDTIKASMLDITRDPLREIALETAMTQRKLRNFFGPEFVKMTIEPFISLDLPRSILTKKGKNEDNRRKVNIMLLNGQRLELTCDTKTICKDVFDMVVAHIGLVEHHLFALATLKDNEYFFVDPDLKLTKVAPEGWKEEPKKKTKATVNFTLFFRIKFFMDDVSLIQHTLTCHQYYLQLRKDILEERMHCDDETSLLLASLALQAEYGDYQPEVHGVSYFRMEHYLPARVMEKLDLSYIKEELPKLHNTYVGASEKETELEFLKVCQRLTEYGVHFHRVHPEKKSQTGILLGVCSKGVLVFEVHNGVRTLVLRFPWRETKKISFSKKKITLQNTSDGIKHGFQTDNSKICQYLLHLCSYQHKFQLQMRARQSNQDAQDIERASFRSLNLQAESVRGFNMGRAISTGSLASSTLNKLAVRPLSVQAEILKRLSCSELSLYQPLQNSSKEKNDKASWEEKPREMSKSYHDLSQASLYPHRKNVIVNMEPPPQTVAELVGKPSHQMSRSDAESLAGVTKLNNSKSVASLNRSPERRKHESDSSSIEDPGQAYVLGMTMHSSGNSSSQVPLKENDVLHKRWSIVSSPEREITLVNLKKDAKYGLGFQIIGGEKMGRLDLGIFISSVAPGGPADLDGCLKPGDRLISVNSVSLEGVSHHAAIEILQNAPEDVTLVISQPKEKISKVPSTPVHLTNEMKNYMKKSSYMQDSAIDSSSKDHHWSRGTLRHISENSFGPSGGLREGSLSSQDSRTESASLSQSQVNGFFASHLGDQTWQESQHGSPSPSVISKATEKETFTDSNQSKTKKPGISDVTDYSDRGDSDMDEATYSSSQDHQTPKQESSSSVNTSNKMNFKTFSSSPPKPGDIFEVELAKNDNSLGISVTGGVNTSVRHGGIYVKAVIPQGAAESDGRIHKGDRVLAVNGVSLEGATHKQAVETLRNTGQVVHLLLEKGQSPTSKEHVPVTPQCTLSDQNAQGQGPEKVKKTTQVKDYSFVTEENTFEVKLFKNSSGLGFSFSREDNLIPEQINASIVRVKKLFPGQPAAESGKIDVGDVILKVNGASLKGLSQQEVISALRGTAPEVFLLLCRPPPGVLPEIDTALLTPLQSPAQVLPNSSKDSSQPSCVEQSTSSDENEMSDKSKKQCKSPSRRDSYSDSSGSGEDDLVTAPANISNSTWSSALHQTLSNMVSQAQSHHEAPKSQEDTICTMFYYPQKIPNKPEFEDSNPSPLPPDMAPGQSYQPQSESASSSSMDKYHIHHISEPTRQENWTPLKNDLENHLEDFELEVELLITLIKSEKGSLGFTVTKGNQRIGCYVHDVIQDPAKSDGRLKPGDRLIKVNDTDVTNMTHTDAVNLLRAASKTVRLVIGRVLELPRIPMLPHLLPDITLTCNKEELGFSLCGGHDSLYQVVYISDINPRSVAAIEGNLQLLDVIHYVNGVSTQGMTLEEVNRALDMSLPSLVLKATRNDLPVVPSSKRSAVSAPKSTKGNGSYSVGSCSQPALTPNDSFSTVAGEEINEISYPKGKCSTYQIKGSPNLTLPKESYIQEDDIYDDSQEAEVIQSLLDVVDEEAQNLLNENNAAGYSCGPGTLKMNGKLSEERTEDTDCDGSPLPEYFTEATKMNGCEEYCEEKVKSESLIQKPQEKKTDDDEITWGNDELPIERTNHEDSDKDHSFLTNDELAVLPVVKVLPSGKYTGANLKSVIRVLRGLLDQGIPSKELENLQELKPLDQCLIGQTKENRRKNRYKNILPYDATRVPLGDEGGYINASFIKIPVGKEEFVYIACQGPLPTTVGDFWQMIWEQKSTVIAMMTQEVEGEKIKCQRYWPNILGKTTMVSNRLRLALVRMQQLKGFVVRAMTLEDIQTREVRHISHLNFTAWPDHDTPSQPDDLLTFISYMRHIHRSGPIITHCSAGIGRSGTLICIDVVLGLISQDLDFDISDLVRCMRLQRHGMVQTEDQYIFCYQVILYVLTRLQAEEEQKQQPQLLK

SEQ ID NO: 31807 - protein, 2294 aa, Homo sapiens
MHVSLAEALEVRGGPLQEEEIWAVLNQSAESLQELFRKVSLADPAALGFIISPWSLLLLPSGSVSFTDENISNQDLRAFTAPEVLQNQSLTSLSDVEKIHIYSLGMTLYWGADYEVPQSQPIKLGDHLNSILLGMCEDVIYARVSVRTVLDACSAHIRNSNCAPSFSYVKHLVKLVLGNLSGTDQLSCNSEQKPDRSQAIRDRLRGKGLPTGRSSTSDVLDIQKPPLSHQTFLNKGLSKSMGFLSIKDTQDENYFKDILSDNSGREDSENTFSPYQFKTSGPEKKPIPGIDVLSKKKIWASSMDLLCTADRDFSSGETATYRRCHPEAVTVRTSTTPRKKEARYSDGSIALDIFGPQKMDPIYHTRELPTSSAISSALDRIRERQKKLQVLREAMNVEEPVRRYKTYHGDVFSTSSESPSIISSESDFRQVRRSEASKRFESSSGLPGVDETLSQGQSQRPSRQYETPFEGNLINQEIMLKRQEEELMQLQAKMALRQSRLSLYPGDTIKASMLDITRDPLREIALETAMTQRKLRNFFGPEFVKMTIEPFISLDLPRSILTKKGKNEDNRRKVNIMLLNGQRLELTCDTKTICKDVFDMVVAHIGLVEHHLFALATLKDNEYFFVDPDLKLTKVAPEGWKEEPKKKTKATVNFTLFFRIKFFMDDVSLIQHTLTCHQYYLQLRKDILEERMHCDDETSLLLASLALQAEYGDYQPEVHGVSYFRMEHYLPARVMEKLDLSYIKEELPKLHNTYVGASEKETELEFLKVCQRLTEYGVHFHRVHPEKKSQTGILLGVCSKGVLVFEVHNGVRTLVLRFPWRETKKISFSKKKITLQNTSDGIKHGFQTDNSKICQYLLHLCSYQHKFQLQMRARQSNQDAQDIDVLHKRWSIVSSPEREITLVNLKKDAKYGLGFQIIGGEKMGRLDLGIFISSVAPGGPADLDGCLKPGDRLISVNSVSLEGVSHHAAIEILQNAPEDVTLVISQPKEKISKVPSTPVHLTNEMKNYMKKSSYMQDSAIDSSSKDHHWSRGTLRHISENSFGPSGGLREGSLSSQDSRTESASLSQSQVNGFFASHLGDQTWQESQHGSPSPSVISKATEKETFTDSNQSKTKKPGISDVTDYSDRGDSDMDEATYSSSQDHQTPKQESSSSVNTSNKMNFKTFSSSPPKPGDIFEVELAKNDNSLGISVTGGVNTSVRHGGIYVKAVIPQGAAESDGRIHKGDRVLAVNGVSLEGATHKQAVETLRNTGQVVHLLLEKGQSPTSKEHVPVTPQCTLSDQNAQGQGPEKVKKTTQVKDYSFVTEENTFEVKLFKNSSGLGFSFSREDNLIPEQINASIVRVKKLFPGQPAAESGKIDVGDVILKVNGASLKGLSQQEVISALRGTAPEVFLLLCRPPPGVLPEIDTALLTPLQSPAQVLPNSSKDSSQPSCVEQSTSSDENEMSDKSKKQCKSPSRRDSYSDSSGSGEDDLVTAPANISNSTWSSALHQTLSNMVSQAQSHHEAPKSQEDTICTMFYYPQKIPNKPEFEDSNPSPLPPDMAPGQSYQPQSESASSSSMDKYHIHHISEPTRQENWTPLKNDLENHLEDFELEVELLITLIKSEKGSLGFTVTKGNQRIGCYVHDVIQDPAKSDGRLKPGDRLIKVNDTDVTNMTHTDAVNLLRAASKTVRLVIGRVLELPRIPMLPHLLPDITLTCNKEELGFSLCGGHDSLYQVVYISDINPRSVAAIEGNLQLLDVIHYVNGVSTQGMTLEEVNRALDMSLPSLVLKATRNDLPVVPSSKRSAVSAPKSTKGNGSYSVGSCSQPALTPNDSFSTVAGEEINEISYPKGKCSTYQIKGSPNLTLPKESYIQEDDIYDDSQEAEVIQSLLDVVDEEAQNLLNENNAAGYSCGPGTLKMNGKLSEERTEDTDCDGSPLPEYFTEATKMNGCEEYCEEKVKSESLIQKPQEKKTDDDEITWGNDELPIERTNHEDSDKDHSFLTNDELAVLPVVKVLPSGKYTGANLKSVIRVLRGLLDQGIPSKELENLQELKPLDQCLIGQTKENRRKNRYKNILPYDATRVPLGDEGGYINASFIKIPVGKEEFVYIACQGPLPTTVGDFWQMIWEQKSTVIAMMTQEVEGEKIKCQRYWPNILGKTTMVSNRLRLALVRMQQLKGFVVRAMTLEDIQTREVRHISHLNFTAWPDHDTPSQPDDLLTFISYMRHIHRSGPIITHCSAGIGRSGTLICIDVVLGLISQDLDFDISDLVRCMRLQRHGMVQTEDQYIFCYQVILYVLTRLQAEEEQKQQPQLLK

SEQ ID NO: 31808 - protein, 2466 aa, Homo sapiens
MHVSLAEALEVRGGPLQEEEIWAVLNQSAESLQELFRKVSLADPAALGFIISPWSLLLLPSGSVSFTDENISNQDLRAFTAPEVLQNQSLTSLSDVEKIHIYSLGMTLYWGADYEVPQSQPIKLGDHLNSILLGMCEDVIYARVSVRTVLDACSAHIRNSNCAPSFSYVKHLVKLVLGNLSGTDQLSCNSEQKPDRSQAIRDRLRGKGLPTGRSSTSDVLDIQKPPLSHQTFLNKGLSKSMGFLSIKDTQDENYFKDILSDNSGREDSENTFSPYQFKTSGPEKKPIPGIDVLSKKKIWASSMDLLCTADRDFSSGETATYRRCHPEAVTVRTSTTPRKKEARYSDGSIALDIFGPQKMDPIYHTRELPTSSAISSALDRIRERQKKLQVLREAMNVEEPVRRYKTYHGDVFSTSSESPSIISSESDFRQVRRSEASKRFESSSGLPGVDETLSQGQSQRPSRQYETPFEGNLINQEIMLKRQEEELMQLQAKMALRQSRLSLYPGDTIKASMLDITRDPLREIALETAMTQRKLRNFFGPEFVKMTIEPFISLDLPRSILTKKGKNEDNRRKVNIMLLNGQRLELTCDTKTICKDVFDMVVAHIGLVEHHLFALATLKDNEYFFVDPDLKLTKVAPEGWKEEPKKKTKATVNFTLFFRIKFFMDDVSLIQHTLTCHQYYLQLRKDILEERMHCDDETSLLLASLALQAEYGDYQPEVHGVSYFRMEHYLPARVMEKLDLSYIKEELPKLHNTYVGASEKETELEFLKVCQRLTEYGVHFHRVHPEKKSQTGILLGVCSKGVLVFEVHNGVRTLVLRFPWRETKKISFSKKKITLQNTSDGIKHGFQTDNSKICQYLLHLCSYQHKFQLQMRARQSNQDAQDIERASFRSLNLQAESVRGFNMGRAISTGSLASSTLNKLAVRPLSVQAEILKRLSCSELSLYQPLQNSSKEKNDKASWEEKPREMSKSYHDLSQASLYPHRKNVIVNMEPPPQTVAELVGKPSHQMSRSDAESLAGVTKLNNSKSVASLNRSPERRKHESDSSSIEDPGQAYVLDVLHKRWSIVSSPEREITLVNLKKDAKYGLGFQIIGGEKMGRLDLGIFISSVAPGGPADLDGCLKPGDRLISVNSVSLEGVSHHAAIEILQNAPEDVTLVISQPKEKISKVPSTPVHLTNEMKNYMKKSSYMQDSAIDSSSKDHHWSRGTLRHISENSFGPSGGLREGSLSSQDSRTESASLSQSQVNGFFASHLGDQTWQESQHGSPSPSVISKATEKETFTDSNQSKTKKPGISDVTDYSDRGDSDMDEATYSSSQDHQTPKQESSSSVNTSNKMNFKTFSSSPPKPGDIFEVELAKNDNSLGISVTGGVNTSVRHGGIYVKAVIPQGAAESDGRIHKGDRVLAVNGVSLEGATHKQAVETLRNTGQVVHLLLEKGQSPTSKEHVPVTPQCTLSDQNAQGQGPEKVKKTTQVKDYSFVTEENTFEVKLFKNSSGLGFSFSREDNLIPEQINASIVRVKKLFPGQPAAESGKIDVGDVILKVNGASLKGLSQQEVISALRGTAPEVFLLLCRPPPGVLPEIDTALLTPLQSPAQVLPNSSKDSSQPSCVEQSTSSDENEMSDKSKKQCKSPSRRDSYSDSSGSGEDDLVTAPANISNSTWSSALHQTLSNMVSQAQSHHEAPKSQEDTICTMFYYPQKIPNKPEFEDSNPSPLPPDMAPGQSYQPQSESASSSSMDKYHIHHISEPTRQENWTPLKNDLENHLEDFELEVELLITLIKSEKGSLGFTVTKGNQRIGCYVHDVIQDPAKSDGRLKPGDRLIKVNDTDVTNMTHTDAVNLLRAASKTVRLVIGRVLELPRIPMLPHLLPDITLTCNKEELGFSLCGGHDSLYQVVYISDINPRSVAAIEGNLQLLDVIHYVNGVSTQGMTLEEVNRALDMSLPSLVLKATRNDLPVVPSSKRSAVSAPKSTKGNGSYSVGSCSQPALTPNDSFSTVAGEEINEISYPKGKCSTYQIKGSPNLTLPKESYIQEDDIYDDSQEAEVIQSLLDVVDEEAQNLLNENNAAGYSCGPGTLKMNGKLSEERTEDTDCDGSPLPEYFTEATKMNGCEEYCEEKVKSESLIQKPQEKKTDDDEITWGNDELPIERTNHEDSDKDHSFLTNDELAVLPVVKVLPSGKYTGANLKSVIRVLRGLLDQGIPSKELENLQELKPLDQCLIGQTKENRRKNRYKNILPYDATRVPLGDEGGYINASFIKIPVGKEEFVYIACQGPLPTTVGDFWQMIWEQKSTVIAMMTQEVEGEKIKCQRYWPNILGKTTMVSNRLRLALVRMQQLKGFVVRAMTLEDIQTREVRHISHLNFTAWPDHDTPSQPDDLLTFISYMRHIHRSGPIITHCSAGIGRSGTLICIDVVLGLISQDLDFDISDLVRCMRLQRHGMVQTEDQYIFCYQVILYVLTRLQAEEEQKQQPQLLK

SEQ ID NO: 31809 - protein, 2490 aa, Homo sapiens
MHVSLAEALEVRGGPLQEEEIWAVLNQSAESLQELFRKVSLADPAALGFIISPWSLLLLPSGSVSFTDENISNQDLRAFTAPEVLQNQSLTSLSDVEKIHIYSLGMTLYWGADYEVPQSQPIKLGDHLNSILLGMCEDVIYARVSVRTVLDACSAHIRNSNCAPSFSYVKHLVKLVLGNLSGTDQLSCNSEQKPDRSQAIRDRLRGKGLPTGRSSTSDVLDIQKPPLSHQTFLNKGLSKSMGFLSIKDTQDENYFKDILSDNSGREDSENTFSPYQFKTSGPEKKPIPGIDVLSKKKIWASSMDLLCTADRDFSSGETATYRRCHPEAVTVRTSTTPRKKEARYSDGSIALDIFGPQKMDPIYHTRELPTSSAISSALDRIRERQKKLQVLREAMNVEEPVRRYKTYHGDVFSTSSESPSIISSESDFRQVRRSEASKRFESSSGLPGVDETLSQGQSQRPSRQYETPFEGNLINQEIMLKRQEEELMQLQAKMALRQSRLSLYPGDTIKASMLDITRDPLREIALETAMTQRKLRNFFGPEFVKMTIEPFISLDLPRSILTKKGKNEDNRRKVNIMLLNGQRLELTCDTKTICKDVFDMVVAHIGLVEHHLFALATLKDNEYFFVDPDLKLTKVAPEGWKEEPKKKTKATVNFTLFFRIKFFMDDVSLIQHTLTCHQYYLQLRKDILEERMHCDDETSLLLASLALQAEYGDYQPEVHGVSYFRMEHYLPARVMEKLDLSYIKEELPKLHNTYVGASEKETELEFLKVCQRLTEYGVHFHRVHPEKKSQTGILLGVCSKGVLVFEVHNGVRTLVLRFPWRETKKISFSKKKITLQNTSDGIKHGFQTDNSKICQYLLHLCSYQHKFQLQMRARQSNQDAQDIERASFRSLNLQAESVRGFNMGRAISTGSLASSTLNKLAVRPLSVQAEILKRLSCSELSLYQPLQNSSKEKNDKASWEEKPREMSKSYHDLSQASLYPHRKNVIVNMEPPPQTVAELVGKPSHQMSRSDAESLAGVTKLNNSKSVASLNRSPERRKHESDSSSIEDPGQAYVLGMTMHSSGNSSSQVPLKENDVLHKRWSIVSSPEREITLVNLKKDAKYGLGFQIIGGEKMGRLDLGIFISSVAPGGPADLDGCLKPGDRLISVNSVSLEGVSHHAAIEILQNAPEDVTLVISQPKEKISKVPSTPVHLTNEMKNYMKKSSYMQDSAIDSSSKDHHWSRGTLRHISENSFGPSGGLREGSLSSQDSRTESASLSQSQVNGFFASHLGDQTWQESQHGSPSPSVISKATEKETFTDSNQSKTKKPGISDVTDYSDRGDSDMDEATYSSSQDHQTPKQESSSSVNTSNKMNFKTFSSSPPKPGDIFEVELAKNDNSLGISVTVLFDKGGVNTSVRHGGIYVKAVIPQGAAESDGRIHKGDRVLAVNGVSLEGATHKQAVETLRNTGQVVHLLLEKGQSPTSKEHVPVTPQCTLSDQNAQGQGPEKVKKTTQVKDYSFVTEENTFEVKLFKNSSGLGFSFSREDNLIPEQINASIVRVKKLFPGQPAAESGKIDVGDVILKVNGASLKGLSQQEVISALRGTAPEVFLLLCRPPPGVLPEIDTALLTPLQSPAQVLPNSSKDSSQPSCVEQSTSSDENEMSDKSKKQCKSPSRRDSYSDSSGSGEDDLVTAPANISNSTWSSALHQTLSNMVSQAQSHHEAPKSQEDTICTMFYYPQKIPNKPEFEDSNPSPLPPDMAPGQSYQPQSESASSSSMDKYHIHHISEPTRQENWTPLKNDLENHLEDFELEVELLITLIKSEKGSLGFTVTKGNQRIGCYVHDVIQDPAKSDGRLKPGDRLIKVNDTDVTNMTHTDAVNLLRAASKTVRLVIGRVLELPRIPMLPHLLPDITLTCNKEELGFSLCGGHDSLYQVVYISDINPRSVAAIEGNLQLLDVIHYVNGVSTQGMTLEEVNRALDMSLPSLVLKATRNDLPVVPSSKRSAVSAPKSTKGNGSYSVGSCSQPALTPNDSFSTVAGEEINEISYPKGKCSTYQIKGSPNLTLPKESYIQEDDIYDDSQEAEVIQSLLDVVDEEAQNLLNENNAAGYSCGPGTLKMNGKLSEERTEDTDCDGSPLPEYFTEATKMNGCEEYCEEKVKSESLIQKPQEKKTDDDEITWGNDELPIERTNHEDSDKDHSFLTNDELAVLPVVKVLPSGKYTGANLKSVIRVLRGLLDQGIPSKELENLQELKPLDQCLIGQTKENRRKNRYKNILPYDATRVPLGDEGGYINASFIKIPVGKEEFVYIACQGPLPTTVGDFWQMIWEQKSTVIAMMTQEVEGEKIKCQRYWPNILGKTTMVSNRLRLALVRMQQLKGFVVRAMTLEDIQTREVRHISHLNFTAWPDHDTPSQPDDLLTFISYMRHIHRSGPIITHCSAGIGRSGTLICIDVVLGLISQDLDFDISDLVRCMRLQRHGMVQTEDQYIFCYQVILYVLTRLQAEEEQKQQPQLLK

SEQ ID NO: 31810 - protein, 202 aa, Homo sapiens
MATLIYVDKENEEPGILVATKDGLKLGSGPSIKALDGRSQVSISCFGKTFDAPTSLPKATRKALGTVNRATEKSVKTNGPLKQKQPSFSAKKMTEKTVKAKNSVPASDDGYPEIEKLFPFNPLGFESFDLPEEHQIAHLPLSEVPLMILDEERELEKLFQLGPPSPLKMPSPPWKSNLLQSPLSILLTLDVELPPVCSDIDI

SEQ ID NO: 31811 - protein, 1482 aa, Homo sapiens
MRKDRLLHLCLVLLLILLSASDSNSTEPQYMVLVPSLLHTEAPKKGCVLLSHLNETVTVSASLESGRENRSLFTDLVAEKDLFHCVSFTLPRISASSEVAFLSIQIKGPTQDFRKRNTVLVLNTQSLVFVQTDKPMYKPGQTVRFRVVSVDENFRPRNELIPLIYLENPRRNRIAQWQSLKLEAGINQLSFPLSSEPIQGSYRVVVQTESGGRIQHPFTVEEFVLPKFEVKVQVPKIISIMDEKVNITVCGEYTYGKPVPGLATVSLCRKLSRVLNCDKQEVCEEFSQQLNSNGCITQQVHTKMLQITNTGFEMKLRVEARIREEGTDLEVTANRISEITNIVSKLKFVKVDSHFRQGIPFFAQVLLVDGKGVPIPNKLFFISVNDANYYSNATTNEQGLAQFSINTTSISVNKLFVRVFTVHPNLCFHYSWVAEDHQGAQHTANRVFSLSGSYIHLEPVAGTLPCGHTETITAHYTLNRQAMGELSELSFHYLIMAKGVIVRSGTHTLPVESGDMKGSFALSFPVESDVAPIARMFIFAILPDGEVVGDSEKFEIENCLANKVDLSFSPAQSPPASHAHLQVAAAPQSLCALRAVDQSVLLMKPEAELSVSSVYNLLTVKDLTNFPDNVDQQEEEQGHCPRPFFIHNGAIYVPLSSNEADIYSFLKGMGLKVFTNSKIRKPKSCSVIPSVSAGAVGQGYYGAGLGVVERPYVPQLGTYNVIPLNNEQSSGPVPETVRSYFPETWIWELVAVNSSGVAEVGVTVPDTITEWKAGAFCLSEDAGLGISSTASLRAFQPFFVELTMPYSVIRGEVFTLKATVLNYLPKCIRVSVQLKASPAFLASQNTKGEESYCICGNERQTLSWTVTPKTLGNVNFSVSAEAMQSLELCGNEVVEVPEIKRKDTVIKTLLVEAEGIEQEKTFSSMTCASGANVSEQLSLKLPSNVVKESARASFSVLGDILGSAMQNIQNLLQMPYGCGEQNMVLFAPNIYVLNYLNETQQLTQEIKAKAVGYLITGYQRQLNYKHQDGSYSTFGERYGRNQGNTWLTAFVLKTFAQARSYIFIDEAHITQSLTWLSQMQKDNGCFRSSGSLLNNAIKGGVEDEATLSAYVTIALLEIPLPVTNPIVRNALFCLESAWNVAKEGTHGSHVYTKALLAYAFSLLGKQNQNREILNSLDKEAVKEDNLVHWERPQRPKAPVGHLYQTQAPSAEVEMTSYVLLAYLTAQPAPTSGDLTSATNIVKWIMKQQNAQGGFSSTQDTVVALHALSRYGAATFTRTEKTAQVTVQDSQTFSTNFQVDNNNLLLLQQISLPELPGEYVITVTGERCVYLQTSMKYNILPEKEDSPFALKVQTVPQTCDGHKAHTSFQISLTISYTGNRPASNMVIVDVKMVSGFIPLKPTVKMLERSSSVSRTEVSNNHVLIYVEQVTNQTLSFSFMVLQDIPVGDLKPAIVKVYDYYETDESVVAEYIAPCSTDTEHGNV

SEQ ID NO: 31812 - protein, 1268 aa, Homo sapiens
MSESYRRTTFPVRFRVVSVDENFRPRNELIPLIYLENPRRNRIAQWQSLKLEAGINQLSFPLSSEPIQGSYRVVVQTESGGRIQHPFTVEEFVLPKFEVKVQVPKIISIMDEKVNITVCGEYTYGKPVPGLATVSLCRKLSRVLNCDKQEVCEEFSQQLNSNGCITQQVHTKMLQITNTGFEMKLRVEARIREEGTDLEVTANRISEITNIVSKLKFVKVDSHFRQGIPFFAQVLLVDGKGVPIPNKLFFISVNDANYYSNATTNEQGLAQFSINTTSISVNKLFVRVFTVHPNLCFHYSWVAEDHQGAQHTANRVFSLSGSYIHLEPVAGTLPCGHTETITAHYTLNRQAMGELSELSFHYLIMAKGVIVRSGTHTLPVESGDMKGSFALSFPVESDVAPIARMFIFAILPDGEVVGDSEKFEIENCLANKVDLSFSPAQSPPASHAHLQVAAAPQSLCALRAVDQSVLLMKPEAELSVSSVYNLLTVKDLTNFPDNVDQQEEEQGHCPRPFFIHNGAIYVPLSSNEADIYSFLKGMGLKVFTNSKIRKPKSCSVIPSVSAGAVGQGYYGAGLGVVERPYVPQLGTYNVIPLNNEQSSGPVPETVRSYFPETWIWELVAVNSSGVAEVGVTVPDTITEWKAGAFCLSEDAGLGISSTASLRAFQPFFVELTMPYSVIRGEVFTLKATVLNYLPKCIRAEGIEQEKTFSSMTCASGANVSEQLSLKLPSNVVKESARASFSVLGDILGSAMQNIQNLLQMPYGCGEQNMVLFAPNIYVLNYLNETQQLTQEIKAKAVGYLITGYQRQLNYKHQDGSYSTFGERYGRNQGNTWLTAFVLKTFAQARSYIFIDEAHITQSLTWLSQMQKDNGCFRSSGSLLNNAIKGGVEDEATLSAYVTIALLEIPLPVTNPIVRNALFCLESAWNVAKEGTHGSHVYTKALLAYAFSLLGKQNQNREILNSLDKEAVKEDNLVHWERPQRPKAPVGHLYQTQAPSAEVEMTSYVLLAYLTAQPAPTSGDLTSATNIVKWIMKQQNAQGGFSSTQDTVVALHALSRYGAATFTRTEKTAQVTVQDSQTFSTNFQVDNNNLLLLQQISLPELPGEYVITVTGERCVYLQTSMKYNILPEKEDSPFALKVQTVPQTCDGHKAHTSFQISLTISYTGNRPASNMVIVDVKMVSGFIPLKPTVKMLERSSSVSRTEVSNNHVLIYVEQVTNQTLSFSFMVLQDIPVGDLKPAIVKVYDYYETDESVVAEYIAPCSTDTEHGNV

SEQ ID NO: 31813 - protein, 1066 aa, Homo sapiens
MNHDFQALALESRGMGELLPTKKFWEPDDSTKDGQKGIFLGDDEWRETAWGASHHSMSQPIMVQRRSGQGFHGNSEVNAILSPRSESGGLGVSMVEYVLSSSPADKLDSRFRKGNFGTRDAETDGPEKGDQKGKASPFEEDQNRDLKQGDDDDSKINGRGLPNGMDADCKDFNRTPGSRQASPTEVVERLGPNTNPSEGLGPLPNPTANKPLVEEFSNPETQNLDAMEQVGLESLQFDYPGNQVPMDSSGATVGLFDYNSQQQLFQRTNALTVQQLTAAQQQQYALAAAQQPHIAGVFSAGLAPAAFVPNPYIISAAPPGTDPYTAAGLAAAATLAGPAVVPPQYYGVPWGVYPANLFQQQAAAAANNTASQQAASQAQPGQQQVLRAGAGQRPLTPNQGQQGQQAESLAAAAAANPTLAFGQGLATGMPGYQVLAPTAYYDQTGALVVGPGARTGLGAPVRLMAPTPVLISSAAAQAAAAAAAGGTASSLTGSTNGLFRPIGTQPPQQQQQQPSTNLQSNSFYGSSSLTNSSQSSSLFSHGPGQPGSTSLGFGSGNSLGAAIGSALSGFGSSVGSSASSSATRRESLSTSSDLYKRSSSSLAPIGQPFYNSLGFSSSPSPIGMPLPSQTPGHSLTPPPSLSSHGSSSSLHLGGLTNGSGRYISAAPGAEAKYRSASSTSSLFSSSSQLFPPSRLRYNRSDIMPSGRSRLLEDFRNNRFPNLQLRDLIGHIVEFSQDQHGSRFIQQKLERATPAERQMVFNEILQAAYQLMTDVFGNYVIQKFFEFGSLDQKLALATRIRGHVLPLALQMYGCRVIQKALESISSDQQVISEMVKELDGHVLKCVKDQNGNHVVQKCIECVQPQSLQFIIDAFKGQVFVLSTHPYGCRVIQRILEHCTAEQTLPILEELHQHTEQLVQDQYGNYVIQHVLEHGRPEDKSKIVSEIRGKVLALSQHKFASNVVEKCVTHASRAERALLIDEVCCQNDGPHSALYTMMKDQYANYVVQKMIDMAEPAQRKIIMHKIRPHITTLRKYTYGKHILAKLEKYYLKNSPDLGPIGGPPNGML

SEQ ID NO: 31814 - protein, 987 aa, Homo sapiens
MNHDFQALALESRGMGELLPTKKFWEPDDSTKDGQKGIFLGDDEWRETAWGASHHSMSQPIMVQRRSGQGFHGNSEVNAILSPRSESGGLGVSMVEYVLSSSPADKLDSRFRKGNFGTRDAETDGPEKGDQKGKASPFEEDQNRDLKQGDDDDSKINGRGLPNGMDADCKDFNRTPGSRQASPTEVVERLGPNTNPSEGLGPLPNPTANKPLVEEFSNPETQNLDAMEQVGLESLQFDYPGNQVPMDSSGATVGLFDYNSQQQLFQRTNALTVQQLTAAQQQQYALAAAQQPHIAGVFSAGLAPAAFVPNPYIISAAPPGTDPYTAAGLAAAATLAGPAVVPPQYYGVPWGVYPANLFQQQAAAAANNTASQQAASQAQPGQQQVLRAGAGQRPLTPNQGQQGQQAESLAAAAAANPTLAFGQGLATGMPGYQVLAPTAYYDQTGALVVGPGARTGLGAPVRLMAPTPVLISSAAAQAAAAAAAGGTASSLTGSTNGLFRPIGTQPPQQQQQQPSTNLQSNSFYGSSSLTNSSQSSSLFSHGPGQPGSTSLGFGSGNSLGAAIGSALSGFGSSGGLTNGSGRYISAAPGAEAKYRSASSTSSLFSSSSQLFPPSRLRYNRSDIMPSGRSRLLEDFRNNRFPNLQLRDLIGHIVEFSQDQHGSRFIQQKLERATPAERQMVFNEILQAAYQLMTDVFGNYVIQKFFEFGSLDQKLALATRIRGHVLPLALQMYGCRVIQKALESISSDQQVISEMVKELDGHVLKCVKDQNGNHVVQKCIECVQPQSLQFIIDAFKGQVFVLSTHPYGCRVIQRILEHCTAEQTLPILEELHQHTEQLVQDQYGNYVIQHVLEHGRPEDKSKIVSEIRGKVLALSQHKFASNVVEKCVTHASRAERALLIDEVCCQNDGPHSALYTMMKDQYANYVVQKMIDMAEPAQRKIIMHKIRPHITTLRKYTYGKHILAKLEKYYLKNSPDLGPIGGPPNGML

SEQ ID NO: 31815 - protein, 1064 aa, Homo sapiens
MNHDFQALALESRGMGELLPTKKFWEPDDSTKDGQKGIFLGDDEWRETAWGASHHSMSQPIMVQRRSGQGFHGNSEVNAILSPRSESGGLGVSMVEYVLSSSPADKLDSRFRKGNFGTRDAETDGPEKGDQKGKASPFEEDQNRDLKQGDDDDSKINGRGLPNGMDADCKDFNRTPGSRQASPTEVVERLGPNTNPSEGLGPLPNPTANKPLVEEFSNPETQNLDAMEQVGLESLQFDYPGNQVPMDSSGATVGLFDYNSQQQLFQRTNALTVQQLTAAQQQQYALAAAQQPHIAGVFSAGLAPAAFVPNPYIISAAPPGTDPYTAAGLAAAATLAGPAVVPPQYYGVPWGVYPANLFQQQAAAAANNTASQQAASQAQPGQQQVLRAGAGQRPLTPNQGQQGQQAESLAAAAAANPTLAFGQGLATGMPGYQVLAPTAYYDQTGALVVGPGARTGLGAPVRLMAPTPVLISSAAAQAAAAAAAGGTASSLTGSTNGLFRPIGTQPPQQQQQQPSTNLQSNSFYGSSSLTNSSQSSSLFSHGPGQPGSTSLGFGSGNSLGAAIGSALSGFGSSVGSSASSSATRRESLSTSSDLYKRSSSSLAPIGQPFYNSLGFSSSPSPIGMPLPSQTPGHSLTPPPSLSSHGSSSSLHLGGLTNGSGRYISAAPGAEAKYRSASSTSSLFSSSSQLFPPSRLRYNRSDIMPSGRSRLLEDFRNNRFPNLQLRDLIGHIVEFSQDQHGSRFIQQKLERATPAERQMVFNEILQAAYQLMTDVFGNYVIQKFFEFGSLDQKLALATRIRGHVLPLALQMYGCRVIQKALESISSDQQSEMVKELDGHVLKCVKDQNGNHVVQKCIECVQPQSLQFIIDAFKGQVFVLSTHPYGCRVIQRILEHCTAEQTLPILEELHQHTEQLVQDQYGNYVIQHVLEHGRPEDKSKIVSEIRGKVLALSQHKFASNVVEKCVTHASRAERALLIDEVCCQNDGPHSALYTMMKDQYANYVVQKMIDMAEPAQRKIIMHKIRPHITTLRKYTYGKHILAKLEKYYLKNSPDLGPIGGPPNGML

SEQ ID NO: 31816 - protein, 1008 aa, Homo sapiens
MSQPIMVQRRSGQGFHGNSEVNAILSPRSESGGLGVSMVEYVLSSSPADKLDSRFRKGNFGTRDAETDGPEKGDQKGKASPFEEDQNRDLKQGDDDDSKINGRGLPNGMDADCKDFNRTPGSRQASPTEVVERLGPNTNPSEGLGPLPNPTANKPLVEEFSNPETQNLDAMEQVGLESLQFDYPGNQVPMDSSGATVGLFDYNSQQQLFQRTNALTVQQLTAAQQQQYALAAAQQPHIAGVFSAGLAPAAFVPNPYIISAAPPGTDPYTAAGLAAAATLAGPAVVPPQYYGVPWGVYPANLFQQQAAAAANNTASQQAASQAQPGQQQVLRAGAGQRPLTPNQGQQGQQAESLAAAAAANPTLAFGQGLATGMPGYQVLAPTAYYDQTGALVVGPGARTGLGAPVRLMAPTPVLISSAAAQAAAAAAAGGTASSLTGSTNGLFRPIGTQPPQQQQQQPSTNLQSNSFYGSSSLTNSSQSSSLFSHGPGQPGSTSLGFGSGNSLGAAIGSALSGFGSSVGSSASSSATRRESLSTSSDLYKRSSSSLAPIGQPFYNSLGFSSSPSPIGMPLPSQTPGHSLTPPPSLSSHGSSSSLHLGGLTNGSGRYISAAPGAEAKYRSASSTSSLFSSSSQLFPPSRLRYNRSDIMPSGRSRLLEDFRNNRFPNLQLRDLIGHIVEFSQDQHGSRFIQQKLERATPAERQMVFNEILQAAYQLMTDVFGNYVIQKFFEFGSLDQKLALATRIRGHVLPLALQMYGCRVIQKALESISSDQQSEMVKELDGHVLKCVKDQNGNHVVQKCIECVQPQSLQFIIDAFKGQVFVLSTHPYGCRVIQRILEHCTAEQTLPILEELHQHTEQLVQDQYGNYVIQHVLEHGRPEDKSKIVSEIRGKVLALSQHKFASNVVEKCVTHASRAERALLIDEVCCQNDGPHSALYTMMKDQYANYVVQKMIDMAEPAQRKIIMHKIRPHITTLRKYTYGKHILAKLEKYYLKNSPDLGPIGGPPNGML

SEQ ID NO: 31817 - protein, 180 aa, Homo sapiens
MAPGVARGPTPYWRLRLGGAALLLLLIPVAAAQEPPGAACSQNTNKTCEECLKNVSCLWCNTNKACLDYPVTSVLPPASLCKLSSARWGVCWVNFEALIITMSVVGGTLLLGIAICCCCCCRRKRSRKPDRSEEKAMREREERRIRQEERRAEMKTRHDEIRKKYGLFKEENPYARFENN

SEQ ID NO: 31818 - protein, 1187 aa, Homo sapiens
MPFGLKLRRTRRYNVLSKNCFVTRIRLLDSNVIECTLSVESTGQECLEAVAQRLELRETHYFGLWFLSKSQQARWVELEKPLKKHLDKFANEPLLFFGVMFYVPNVSWLQQEATRYQYYLQVKKDVLEGRLRCTLDQVIRLAGLAVQADFGDYNQFDSQDFLREYVLFPMDLALEEAVLEELTQKVAQEHKAHSGILPAEAELMYINEVERLDGFGQEIFPVKDNHGNCVHLGIFFMGIFVRNRIGRQAVIYRWNDMGNITHNKSTILVELINKEETALFHTDDIENAKYISRLFATRHKFYKQNKICTEQSNSPPPIRRQPTWSRSSLPRQQPYILPPVHVQCGEHYSETHTSQDSIFHGNEEALYCNSHNSLDLNYLNGTVTNGSVCSVHSVNSLNCSQSFIQASPVSSNLSIPGSDIMRADYIPSHRHSAIIVPSYRPTPDYETVMRQMKRGILHTDSQSQSLRNLNIINTHAYNQPEDLVYSQPEMRERHPYTVPYGPQGVYSNKLVSPSDQRNPKNNVVPSKPGASAISHTVSTPELANMQLQGSHNYSTAHMLKNYLFRPPPPYPRPRPATSTPDLASHRHKYVSGSSPDLVTRKVQLSVKTFQEDSSPVVHQSLQEVSEPLTATKHHGTVNKRHSLEVMNSMVRGMEAMTLKSLHLPMARRNTLREQGPPEEGSGSHEVPQLPQYHHKKTFSDATMLIHSSESEEEEEEAPESVPQIPMLREKMEYSAQLQAALARIPNKPPPEYPGPRKSVSNGALRQDQASLPPAMARARVLRHGPAKAISMSRTDPPAVNGASLGPSISEPDLTSVKERVKKEPVKERPVSEMFSLEDSIIEREMMIRNLEKQKMAGLEAQKRPLMLAALNGLSVARVSGREENRVDATRVPMDERFRTLKKKLEEGMVFTEYEQIPKKKANGIFSTAALPENAERSRIREVVPYEENRVELIPTKENNTGYINASHIKVVVGGAEWHYIATQGPLPHTCHDFWQMVWEQGVNVIAMVTAEEEGGRTKSHRYWPKLGSKHSSATYGKFKVTTKFRTDSVCYATTGLKVKHLLSGQERTVWHLQYTDWPDHGCPEDVQGFLSYLEEIQSVRRHTNSMLEGTKNRHPPIVVHCSAGVGRTGVLILSELMIYCLEHNEKVEVPMMLRLLREQRMFMIQTIAQYKFVYQVLIQFLQNSRLI

SEQ ID NO: 31819 - protein, 1447 aa, Homo sapiens
MASAGNAAEPQDRGGGGSGCIGAPGRPAGGGRRRRTGGLRRAAAPDRDYLHRPSYCDAAFALEQISKGKATGRKAPLWLRAKFQRLLFKLGCYIQKNCGKFLVVGLLIFGAFAVGLKAANLETNVEELWVEVGGRVSRELNYTRQKIGEEAMFNPQLMIQTPKEEGANVLTTEALLQHLDSALQASRVHVYMYNRQWKLEHLCYKSGELITETGYMDQIIEYLYPCLIITPLDCFWEGAKLQSGTAYLLGKPPLRWTNFDPLEFLEELKKINYQVDSWEEMLNKAEVGHGYMDRPCLNPADPDCPATAPNKNSTKPLDMALVLNGGCHGLSRKYMHWQEELIVGGTVKNSTGKLVSAHALQTMFQLMTPKQMYEHFKGYEYVSHINWNEDKAAAILEAWQRTYVEVVHQSVAQNSTQKVLSFTTTTLDDILKSFSDVSVIRVASGYLLMLAYACLTMLRWDCSKSQGAVGLAGVLLVALSVAAGLGLCSLIGISFNAATTQVLPFLALGVGVDDVFLLAHAFSETGQNKRIPFEDRTGECLKRTGASVALTSISNVTAFFMAALIPIPALRAFSLQAAVVVVFNFAMVLLIFPAILSMDLYRREDRRLDIFCCFTSPCVSRVIQVEPQAYTDTHDNTRYSPPPPYSSHSFAHETQITMQSTVQLRTEYDPHTHVYYTTAEPRSEISVQPVTVTQDTLSCQSPESTSSTRDLLSQFSDSSLHCLEPPCTKWTLSSFAEKHYAPFLLKPKAKVVVIFLFLGLLGVSLYGTTRVRDGLDLTDIVPRETREYDFIAAQFKYFSFYNMYIVTQKADYPNIQHLLYDLHRSFSNVKYVMLEENKQLPKMWLHYFRDWLQGLQDAFDSDWETGKIMPNNYKNGSDDGVLAYKLLVQTGSRDKPIDISQLTKQRLVDADGIINPSAFYIYLTAWVSNDPVAYAASQANIRPHRPEWVHDKADYMPETRLRIPAAEPIEYAQFPFYLNGLRDTSDFVEAIEKVRTICSNYTSLGLSSYPNGYPFLFWEQYIGLRHWLLLFISVVLACTFLVCAVFLLNPWTAGIIVMVLALMTVELFGMMGLIGIKLSAVPVVILIASVGIGVEFTVHVALAFLTAIGDKNRRAVLALEHMFAPVLDGAVSTLLGVLMLAGSEFDFIVRYFFAVLAILTILGVLNGLVLLPVLLSFFGPYPEVSPANGLNRLPTPSPEPPPSVVRFAMPPGHTHSGSDSSDSEYSSQTTVSGLSEELRHYEAQQGAGGPAHQVIVEATENPVFAHSTVVHPESRHHPPSNPRQQPHLDSGSLPPGRQGQQPRRDPPREGLWPPPYRPRRDAFEISTEGHSGPSNRARWGPRGARSHNPRNPASTAMGSSVPGYCQPITTVTASASVTVAVHPPPVPGPGRNPRGGLCPGYPETDHGLFEDPHVPFHVRCERRDSKVEVIELQDVECEERPRGSSSN

SEQ ID NO: 31820 - protein, 1446 aa, Homo sapiens
MELLNRNRLVIVSPRCTPPKASGGPARRGFYTFRSFCKDGGGGEEEEENGGEEKDDRGDKETRSDKGKATGRKAPLWLRAKFQRLLFKLGCYIQKNCGKFLVVGLLIFGAFAVGLKAANLETNVEELWVEVGGRVSRELNYTRQKIGEEAMFNPQLMIQTPKEEGANVLTTEALLQHLDSALQASRVHVYMYNRQWKLEHLCYKSGELITETGYMDQIIEYLYPCLIITPLDCFWEGAKLQSGTAYLLGKPPLRWTNFDPLEFLEELKKINYQVDSWEEMLNKAEVGHGYMDRPCLNPADPDCPATAPNKNSTKPLDMALVLNGGCHGLSRKYMHWQEELIVGGTVKNSTGKLVSAHALQTMFQLMTPKQMYEHFKGYEYVSHINWNEDKAAAILEAWQRTYVEVVHQSVAQNSTQKVLSFTTTTLDDILKSFSDVSVIRVASGYLLMLAYACLTMLRWDCSKSQGAVGLAGVLLVALSVAAGLGLCSLIGISFNAATTQVLPFLALGVGVDDVFLLAHAFSETGQNKRIPFEDRTGECLKRTGASVALTSISNVTAFFMAALIPIPALRAFSLQAAVVVVFNFAMVLLIFPAILSMDLYRREDRRLDIFCCFTSPCVSRVIQVEPQAYTDTHDNTRYSPPPPYSSHSFAHETQITMQSTVQLRTEYDPHTHVYYTTAEPRSEISVQPVTVTQDTLSCQSPESTSSTRDLLSQFSDSSLHCLEPPCTKWTLSSFAEKHYAPFLLKPKAKVVVIFLFLGLLGVSLYGTTRVRDGLDLTDIVPRETREYDFIAAQFKYFSFYNMYIVTQKADYPNIQHLLYDLHRSFSNVKYVMLEENKQLPKMWLHYFRDWLQGLQDAFDSDWETGKIMPNNYKNGSDDGVLAYKLLVQTGSRDKPIDISQLTKQRLVDADGIINPSAFYIYLTAWVSNDPVAYAASQANIRPHRPEWVHDKADYMPETRLRIPAAEPIEYAQFPFYLNGLRDTSDFVEAIEKVRTICSNYTSLGLSSYPNGYPFLFWEQYIGLRHWLLLFISVVLACTFLVCAVFLLNPWTAGIIVMVLALMTVELFGMMGLIGIKLSAVPVVILIASVGIGVEFTVHVALAFLTAIGDKNRRAVLALEHMFAPVLDGAVSTLLGVLMLAGSEFDFIVRYFFAVLAILTILGVLNGLVLLPVLLSFFGPYPEVSPANGLNRLPTPSPEPPPSVVRFAMPPGHTHSGSDSSDSEYSSQTTVSGLSEELRHYEAQQGAGGPAHQVIVEATENPVFAHSTVVHPESRHHPPSNPRQQPHLDSGSLPPGRQGQQPRRDPPREGLWPPPYRPRRDAFEISTEGHSGPSNRARWGPRGARSHNPRNPASTAMGSSVPGYCQPITTVTASASVTVAVHPPPVPGPGRNPRGGLCPGYPETDHGLFEDPHVPFHVRCERRDSKVEVIELQDVECEERPRGSSSN

SEQ ID NO: 31821 - protein, 1381 aa, Homo sapiens
MGKATGRKAPLWLRAKFQRLLFKLGCYIQKNCGKFLVVGLLIFGAFAVGLKAANLETNVEELWVEVGGRVSRELNYTRQKIGEEAMFNPQLMIQTPKEEGANVLTTEALLQHLDSALQASRVHVYMYNRQWKLEHLCYKSGELITETGYMDQIIEYLYPCLIITPLDCFWEGAKLQSGTAYLLGKPPLRWTNFDPLEFLEELKKINYQVDSWEEMLNKAEVGHGYMDRPCLNPADPDCPATAPNKNSTKPLDMALVLNGGCHGLSRKYMHWQEELIVGGTVKNSTGKLVSAHALQTMFQLMTPKQMYEHFKGYEYVSHINWNEDKAAAILEAWQRTYVEVVHQSVAQNSTQKVLSFTTTTLDDILKSFSDVSVIRVASGYLLMLAYACLTMLRWDCSKSQGAVGLAGVLLVALSVAAGLGLCSLIGISFNAATTQVLPFLALGVGVDDVFLLAHAFSETGQNKRIPFEDRTGECLKRTGASVALTSISNVTAFFMAALIPIPALRAFSLQAAVVVVFNFAMVLLIFPAILSMDLYRREDRRLDIFCCFTSPCVSRVIQVEPQAYTDTHDNTRYSPPPPYSSHSFAHETQITMQSTVQLRTEYDPHTHVYYTTAEPRSEISVQPVTVTQDTLSCQSPESTSSTRDLLSQFSDSSLHCLEPPCTKWTLSSFAEKHYAPFLLKPKAKVVVIFLFLGLLGVSLYGTTRVRDGLDLTDIVPRETREYDFIAAQFKYFSFYNMYIVTQKADYPNIQHLLYDLHRSFSNVKYVMLEENKQLPKMWLHYFRDWLQGLQDAFDSDWETGKIMPNNYKNGSDDGVLAYKLLVQTGSRDKPIDISQLTKQRLVDADGIINPSAFYIYLTAWVSNDPVAYAASQANIRPHRPEWVHDKADYMPETRLRIPAAEPIEYAQFPFYLNGLRDTSDFVEAIEKVRTICSNYTSLGLSSYPNGYPFLFWEQYIGLRHWLLLFISVVLACTFLVCAVFLLNPWTAGIIVMVLALMTVELFGMMGLIGIKLSAVPVVILIASVGIGVEFTVHVALAFLTAIGDKNRRAVLALEHMFAPVLDGAVSTLLGVLMLAGSEFDFIVRYFFAVLAILTILGVLNGLVLLPVLLSFFGPYPEVSPANGLNRLPTPSPEPPPSVVRFAMPPGHTHSGSDSSDSEYSSQTTVSGLSEELRHYEAQQGAGGPAHQVIVEATENPVFAHSTVVHPESRHHPPSNPRQQPHLDSGSLPPGRQGQQPRRDPPREGLWPPPYRPRRDAFEISTEGHSGPSNRARWGPRGARSHNPRNPASTAMGSSVPGYCQPITTVTASASVTVAVHPPPVPGPGRNPRGGLCPGYPETDHGLFEDPHVPFHVRCERRDSKVEVIELQDVECEERPRGSSSN

SEQ ID NO: 31822 - protein, 1296 aa, Homo sapiens
MFNPQLMIQTPKEEGANVLTTEALLQHLDSALQASRVHVYMYNRQWKLEHLCYKSGELITETGYMDQIIEYLYPCLIITPLDCFWEGAKLQSGTAYLLGKPPLRWTNFDPLEFLEELKKINYQVDSWEEMLNKAEVGHGYMDRPCLNPADPDCPATAPNKNSTKPLDMALVLNGGCHGLSRKYMHWQEELIVGGTVKNSTGKLVSAHALQTMFQLMTPKQMYEHFKGYEYVSHINWNEDKAAAILEAWQRTYVEVVHQSVAQNSTQKVLSFTTTTLDDILKSFSDVSVIRVASGYLLMLAYACLTMLRWDCSKSQGAVGLAGVLLVALSVAAGLGLCSLIGISFNAATTQVLPFLALGVGVDDVFLLAHAFSETGQNKRIPFEDRTGECLKRTGASVALTSISNVTAFFMAALIPIPALRAFSLQAAVVVVFNFAMVLLIFPAILSMDLYRREDRRLDIFCCFTSPCVSRVIQVEPQAYTDTHDNTRYSPPPPYSSHSFAHETQITMQSTVQLRTEYDPHTHVYYTTAEPRSEISVQPVTVTQDTLSCQSPESTSSTRDLLSQFSDSSLHCLEPPCTKWTLSSFAEKHYAPFLLKPKAKVVVIFLFLGLLGVSLYGTTRVRDGLDLTDIVPRETREYDFIAAQFKYFSFYNMYIVTQKADYPNIQHLLYDLHRSFSNVKYVMLEENKQLPKMWLHYFRDWLQGLQDAFDSDWETGKIMPNNYKNGSDDGVLAYKLLVQTGSRDKPIDISQLTKQRLVDADGIINPSAFYIYLTAWVSNDPVAYAASQANIRPHRPEWVHDKADYMPETRLRIPAAEPIEYAQFPFYLNGLRDTSDFVEAIEKVRTICSNYTSLGLSSYPNGYPFLFWEQYIGLRHWLLLFISVVLACTFLVCAVFLLNPWTAGIIVMVLALMTVELFGMMGLIGIKLSAVPVVILIASVGIGVEFTVHVALAFLTAIGDKNRRAVLALEHMFAPVLDGAVSTLLGVLMLAGSEFDFIVRYFFAVLAILTILGVLNGLVLLPVLLSFFGPYPEVSPANGLNRLPTPSPEPPPSVVRFAMPPGHTHSGSDSSDSEYSSQTTVSGLSEELRHYEAQQGAGGPAHQVIVEATENPVFAHSTVVHPESRHHPPSNPRQQPHLDSGSLPPGRQGQQPRRDPPREGLWPPPYRPRRDAFEISTEGHSGPSNRARWGPRGARSHNPRNPASTAMGSSVPGYCQPITTVTASASVTVAVHPPPVPGPGRNPRGGLCPGYPETDHGLFEDPHVPFHVRCERRDSKVEVIELQDVECEERPRGSSSN

SEQ ID NO: 31823 - protein, 460 aa, Homo sapiens
MSRSLDSARSFLERLEARGGREGAVLAGEFSDIQACSAAWKADGVCSTVAGSRPENVRKNRYKDVLPYDQTRVILSLLQEEGHSDYINGNFIRGVDGSLAYIATQGPLPHTLLDFWRLVWEFGVKVILMACREIENGRKRCERYWAQEQEPLQTGLFCITLIKEKWLNEDIMLRTLKVTFQKESRSVYQLQYMSWPDRGVPSSPDHMLAMVEEARRLQGSGPEPLCVHCSAGCGRTGVLCTVDYVRQLLLTQMIPPDFSLFDVVLKMRKQRPAAVQTEEQYRFLYHTVAQMFCSTLQNASPHYQNIKENCAPLYDDALFLRTPQALLAIPRPPGGVLRSISVPGSPGHAMADTYAVVQKRGAPAGAGSGTQTGTGTGTGARSAEEAPLYSKVTPRAQRPGAHAEDARGTLPGRVPADQSPAGSGAYEDVAGGAQTGGLGFNLRIGRPKGPRDPPAEWTRV

SEQ ID NO: 31824 - protein, 353 aa, Homo sapiens
MSRSLDSARSFLERLEARGGREGAVLAGEFSKRCERYWAQEQEPLQTGLFCITLIKEKWLNEDIMLRTLKVTFQKESRSVYQLQYMSWPDRGVPSSPDHMLAMVEEARRLQGSGPEPLCVHCSAGCGRTGVLCTVDYVRQLLLTQMIPPDFSLFDVVLKMRKQRPAAVQTEEQYRFLYHTVAQMFCSTLQNASPHYQNIKENCAPLYDDALFLRTPQALLAIPRPPGGVLRSISVPGSPGHAMADTYAVVQKRGAPAGAGSGTQTGTGTGTGARSAEEAPLYSKVTPRAQRPGAHAEDARGTLPGRVPADQSPAGSGAYEDVAGGAQTGGLGFNLRIGRPKGPRDPPAEWTRV

SEQ ID NO: 31825 - protein, 648 aa, Homo sapiens
MEVKGKKQFTGKSTKTAQEKNRFHKNSDSGSSKTFPTRKVAKEGGPKVTSRNFEKSITKLGKKGVKQFKNKQQGDKSPKNKFQPANKFNKKRKFQPDGRSDESAAKKPKWDDFKKKKKELKQSRQLSDKTNYDIVVRAKQMWEILRRKDCDKEKRVKLMSDLQKLIQGKIKTIAFAHDSTRVIQCYIQYGNEEQRKQAFEELRDDLVELSKAKYSRNIVKKFLMYGSKPQIAEIIRSFKGHVRKMLRHAEASAIVEYAYNDKAILEQRNMLTEELYGNTFQLYKSADHRTLDKVLEVQPEKLELIMDEMKQILTPMAQKEAVIKHSLVHKVFLDFFTYAPPKLRSEMIEAIREAVVYLAHTHDGARVAMHCLWHGTPKDRKVIVKTMKTYVEKVANGQYSHLVLLAAFDCIDDTKLVKQIIISEIISSLPSIVNDKYGRKVLLYLLSPRDPAHTVREIIEVLQKGDGNAHSKKDTEVRRRELLESISPALLSYLQEHAQEVVLDKSACVLVSDILGSATGDVQPTMNAIASLAATGLHPGGKDGELHIAEHPAGHLVLKWLIEQDKKMKENGREGCFAKTLVEHVGMKNLKSWASVNRGAIILSSLLQSCDLEVANKVKAALKSLIPTLEKTKSTSKGIEILLEKLST

SEQ ID NO: 31826 - protein, 1203 aa, Homo sapiens
MTRSPPLRELPPSYTPPARTAAPQILAGSLKAPLWLRAYFQGLLFSLGCGIQRHCGKVLFLGLLAFGALALGLRMAIIETNLEQLWVEVGSRVSQELHYTKEKLGEEAAYTSQMLIQTARQEGENILTPEALGLHLQAALTASKVQVSLYGKSWDLNKICYKSGVPLIENGMIERMIEKLFPCVILTPLDCFWEGAKLQGGSAYLPGRPDIQWTNLDPEQLLEELGPFASLEGFRELLDKAQVGQAYVGRPCLHPDDLHCPPSAPNHHSRQAPNVAHELSGGCHGFSHKFMHWQEELLLGGMARDPQGELLRAEALQSTFLLMSPRQLYEHFRGDYQTHDIGWSEEQASTVLQAWQRRFVQLAQEALPENASQQIHAFSSTTLDDILHAFSEVSAARVVGGYLLMLAYACVTMLRWDCAQSQGSVGLAGVLLVALAVASGLGLCALLGITFNAATTQVLPFLALGIGVDDVFLLAHAFTEALPGTPLQERMGECLQRTGTSVVLTSINNMAAFLMAALVPIPALRAFSLQAAIVVGCTFVAVMLVFPAILSLDLRRRHCQRLDVLCCFSSPCSAQVIQILPQELGDGTVPVGIAHLTATVQAFTHCEASSQHVVTILPPQAHLVPPPSDPLGSELFSPGGSTRDLLGQEEETRQKAACKSLPCARWNLAHFARYQFAPLLLQSHAKAIVLVLFGALLGLSLYGATLVQDGLALTDVVPRGTKEHAFLSAQLRYFSLYEVALVTQGGFDYAHSQRALFDLHQRFSSLKAVLPPPATQAPRTWLHYYRNWLQGIQAAFDQDWASGRITRHSYRNGSEDGALAYKLLIQTGDAQEPLDFSQLTTRKLVDREGLIPPELFYMGLTVWVSSDPLGLAASQANFYPPPPEWLHDKYDTTGENLRIPPAQPLEFAQFPFLLRGLQKTADFVEAIEGARAACAEAGQAGVHAYPSGSPFLFWEQYLGLRRCFLLAVCILLVCTFLVCALLLLNPWTAGLIVLVLAMMTVELFGIMGFLGIKLSAIPVVILVASVGIGVEFTVHVALGFLTTQGSRNLRAAHALEHTFAPVTDGAISTLLGLLMLAGSHFDFIVRYFFAALTVLTLLGLLHGLVLLPVLLSILGPPPEVIQMYKESPEILSPPAPQGGGLRWGASSSLPQSFARVTTSMTVAIHPPPLPGAYIHPAPDEPPWSPAATSSGNLSSRGPGPATG

SEQ ID NO: 31827 - protein, 1146 aa, Homo sapiens
MTRSPPLRELPPSYTPPARTAAPQILAGSLKAPLWLRAYFQGLLFSLGCGIQRHCGKVLFLGLLAFGALALGLRMAIIETNLEQLWVEVGSRVSQELHYTKEKLGEEAAYTSQMLIQTARQEGENILTPEALGLHLQAALTASKVQVSLYGKSWDLNKICYKSGVPLIENGMIERMIEKLFPCVILTPLDCFWEGAKLQGGSAYLPGRPDIQWTNLDPEQLLEELGPFASLEGFRELLDKAQVGQAYVGRPCLHPDDLHCPPSAPNHHSRQAPNVAHELSGGCHGFSHKFMHWQEELLLGGMARDPQGELLRAEALQSTFLLMSPRQLYEHFRGDYQTHDIGWSEEQASTVLQAWQRRFVQLAQEALPENASQQIHAFSSTTLDDILHAFSEVSAARVVGGYLLMLAYACVTMLRWDCAQSQGSVGLAGVLLVALAVASGLGLCALLGITFNAATTQVLPFLALGIGVDDVFLLAHAFTEALPGTPLQERMGECLQRTGTSVVLTSINNMAAFLMAALVPIPALRAFSLQAAIVVGCTFVAVMLVFPAILSLDLRRRHCQRLDVLCCFSSPCSAQVIQILPQELGDGTVPVGIAHLTATVQAFTHCEASSQHVVTILPPQAHLVPPPSDPLGSELFSPGGSTRDLLGQEEETRQKAACKSLPCARWNLAHFARYQFAPLLLQSHAKAIVLVLFGALLGLSLYGATLVQDGLALTDVVPRGTKEHAFLSAQLRYFSLYEVALVTQGGFDYAHSQRALFDLHQRFSSLKAVLPPPATQAPRTWLHYYRNWLQGIQAAFDQDWASGRITRHSYRNGSEDGALAYKLLIQTGDAQEPLDFSQLTTRKLVDREGLIPPELFYMGLTVWVSSDPLGLAASQANFYPPPPEWLHDKYDTTGENLRIPPAQPLEFAQFPFLLRGLQKTADFVEAIEGARAACAEAGQAGVHAYPSGSPFLFWEQYLGLRRCFLLAVCILLVCTFLVCALLLLNPWTAGLIVLVLAMMTVELFGIMGFLGIKLSAIPVVILVASVGIGVEFTVHVALGFLTTQGSRNLRAAHALEHTFAPVTDGAISTLLGLLMLAGSHFDFIVRYFFAALTVLTLLGLLHGLVLLPVLLSILGPPPEVIQMYKESPEILSPPAPQGGGLRPEEI

SEQ ID NO: 31828 - protein, 435 aa, Homo sapiens
MEMEKEFEQIDKSGSWAAIYQDIRHEASDFPCRVAKLPKNKNRNRYRDVSPFDHSRIKLHQEDNDYINASLIKMEEAQRSYILTQGPLPNTCGHFWEMVWEQKSRGVVMLNRVMEKGSLKCAQYWPQKEEKEMIFEDTNLKLTLISEDIKSYYTVRQLELENLTTQETREILHFHYTTWPDFGVPESPASFLNFLFKVRESGSLSPEHGPVVVHCSAGIGRSGTFCLADTCLLLMDKRKDPSSVDIKKVLLEMRKFRMGLIQTADQLRFSYLAVIEGAKFIMGDSSVQDQWKELSHEDLEPPPEHIPPPPRPPKRILEPHNGKCREFFPNHQWVKEETQEDKDCPIKEEKGSPLNAAPYGIESMSQDTEVRSRVVGGSLRGAQAASPAKGEPSLPEKDEDHALSYWKPFLVNMCVATVLTAGAYLCYRFLFNSNT

SEQ ID NO: 31829 - protein, 420 aa, Homo sapiens
MSSPRDFRAEPVNDYEGNDSEAEDLNFRETLPSSSQENTPRSKVFENKVNSEKVKLSLRNFPHNDYEDVFEEPSESGSDPSMWTARGPFRRDRWSSEDEEAAGPSQALSPLLSDTRKIVSEGELDQLAQIRPLIFNFHEQTAIKDCLKILEEKTAAYDIMQEFMALELKNLPGEFNSGNQPSNREKNRYRDILPYDSTRVPLGKSKDYINASYIRIVNCGEEYFYIATQGPLLSTIDDFWQMVLENNSNVIAMITREIEGGIIKCYHYWPISLKKPLELKHFRVFLENYQILQYFIIRMFQVVEKSTGTSHSVKQLQFTKWPDHGTPASADSFIKYIRYARKSHLTGPMVVHCSAGIGRTGVFLCVDVVFCAIVKNCSFNIMDIVAQMREQRSGMVQTKEQYHFCYDIVLEVLRKLLTLD

SEQ ID NO: 31830 - protein, 411 aa, Homo sapiens
MIVNDYEGNDSEAEDLNFRETLPSSSQENTPRSKVFENKVNSEKVKLSLRNFPHNDYEDVFEEPSESGSDPSMWTARGPFRRDRWSSEDEEAAGPSQALSPLLSDTRKIVSEGELDQLAQIRPLIFNFHEQTAIKDCLKILEEKTAAYDIMQEFMALELKNLPGEFNSGNQPSNREKNRYRDILPYDSTRVPLGKSKDYINASYIRIVNCGEEYFYIATQGPLLSTIDDFWQMVLENNSNVIAMITREIEGGIIKCYHYWPISLKKPLELKHFRVFLENYQILQYFIIRMFQVVEKSTGTSHSVKQLQFTKWPDHGTPASADSFIKYIRYARKSHLTGPMVVHCSAGIGRTGVFLCVDVVFCAIVKNCSFNIMDIVAQMREQRSGMVQTKEQYHFCYDIVLEVLRKLLTLD

SEQ ID NO: 31831 - protein, 392 aa, Homo sapiens
MGTTCLHLGTLEQSLVFENKVNSEKVKLSLRNFPHNDYEDVFEEPSESGSDPSMWTARGPFRRDRWSSEDEEAAGPSQALSPLLSDTRKIVSEGELDQLAQIRPLIFNFHEQTAIKDCLKILEEKTAAYDIMQEFMALELKNLPGEFNSGNQPSNREKNRYRDILPYDSTRVPLGKSKDYINASYIRIVNCGEEYFYIATQGPLLSTIDDFWQMVLENNSNVIAMITREIEGGIIKCYHYWPISLKKPLELKHFRVFLENYQILQYFIIRMFQVVEKSTGTSHSVKQLQFTKWPDHGTPASADSFIKYIRYARKSHLTGPMVVHCSAGIGRTGVFLCVDVVFCAIVKNCSFNIMDIVAQMREQRSGMVQTKEQYHFCYDIVLEVLRKLLTLD

SEQ ID NO: 31832 - protein, 339 aa, Homo sapiens
MWTARGPFRRDRWSSEDEEAAGPSQALSPLLSDTRKIVSEGELDQLAQIRPLIFNFHEQTAIKDCLKILEEKTAAYDIMQEFMALELKNLPGEFNSGNQPSNREKNRYRDILPYDSTRVPLGKSKDYINASYIRIVNCGEEYFYIATQGPLLSTIDDFWQMVLENNSNVIAMITREIEGGIIKCYHYWPISLKKPLELKHFRVFLENYQILQYFIIRMFQVVEKSTGTSHSVKQLQFTKWPDHGTPASADSFIKYIRYARKSHLTGPMVVHCSAGIGRTGVFLCVDVVFCAIVKNCSFNIMDIVAQMREQRSGMVQTKEQYHFCYDIVLEVLRKLLTLD

SEQ ID NO: 31833 - protein, 197 aa, Homo sapiens
MWTARGPFRRDRWSSEDEEAAGPSQALSPLLSDTRKIVSEGELDQLAQIRPLIFNFHEQTAIKDCLKILEEKTAAYDIMQEFMTGTSHSVKQLQFTKWPDHGTPASADSFIKYIRYARKSHLTGPMVVHCSAGIGRTGVFLCVDVVFCAIVKNCSFNIMDIVAQMREQRSGMVQTKEQYHFCYDIVLEVLRKLLTLD

SEQ ID NO: 31834 - protein, 228 aa, Homo sapiens
MIDDSTRVPLGKSKDYINASYIRIVNCGEEYFYIATQGPLLSTIDDFWQMVLENNSNVIAMITREIEGGIIKCYHYWPISLKKPLELKHFRVFLENYQILQYFIIRMFQVVEKSTGTSHSVKQLQFTKWPDHGTPASADSFIKYIRYARKSHLTGPMVVHCSAGIGRTGVFLCVDVVFCAIVKNCSFNIMDIVAQMREQRSGMVQTKEQYHFCYDIVLEVLRKLLTLD

SEQ ID NO: 31835 - protein, 226 aa, Homo sapiens
MSSPRDFRAEPVNDYEGNDSEAEDLNFRETLPSSSQENTPRSKVFENKVNSEKVKLSLRNFPHNDYEDVFEEPSESGSDPSMWTARGPFRRDRWSSEDEEAAGPSQALSPLLSDTRKIVSEGELDQLAQIRPLIFNFHEQTAIKDCLKILEEKTAAYDIMQEFMALELKNLPGEFNSGNQPSNREKNRYRDILPFQHHGYSGPNERTTFWHGSNEGAVSLLLRYCA

SEQ ID NO: 31836 - protein, 217 aa, Homo sapiens
MIVNDYEGNDSEAEDLNFRETLPSSSQENTPRSKVFENKVNSEKVKLSLRNFPHNDYEDVFEEPSESGSDPSMWTARGPFRRDRWSSEDEEAAGPSQALSPLLSDTRKIVSEGELDQLAQIRPLIFNFHEQTAIKDCLKILEEKTAAYDIMQEFMALELKNLPGEFNSGNQPSNREKNRYRDILPFQHHGYSGPNERTTFWHGSNEGAVSLLLRYCA

SEQ ID NO: 31837 - protein, 104 aa, Homo sapiens
MWTARGPFRRDRWSSEDEEAAGPSQALSPLLSDTRKIVSEGELDQLAQIRPLIFNFHEQTAIKDCLKILEEKTAAYDIMQEFMMIQHAFLLEKARTTSMLVILE

SEQ ID NO: 31838 - protein, 206 aa, Homo sapiens
MSSPRDFRAEPVNDYEGNDSEAEDLNFRETLPSSSQENTPRSKVFENKVNSEKVKLSLRNFPHNDYEDVFEEPSESGSDPSMWTARGPFRRDRWSSEDEEAAGPSQALSPLLSDTRKIVSEGELDQLAQIRPLIFNFHEQTAIKDCLKILEEKTAAYDIMQEFMFNIMDIVAQMREQRSGMVQTKEQYHFCYDIVLEVLRKLLTLD

SEQ ID NO: 31839 - protein, 269 aa, Homo sapiens
MIVNDYEGNDSEAEDLNFRETLPSSSQENTPRSKVFENKVNSEKVKLSLRNFPHNDYEDVFEEPSESGSDPSMWTARGPFRRDRWSSEDEEAAGPSQALSPLLSDTRKIVSEGELDQLAQIRPLIFNFHEQTAIKDCLKILEEKTAAYDIMQEFMTGTSHSVKQLQFTKWPDHGTPASADSFIKYIRYARKSHLTGPMVVHCSAGIGRTGVFLCVDVVFCAIVKNCSFNIMDIVAQMREQRSGMVQTKEQYHFCYDIVLEVLRKLLTLD

SEQ ID NO: 31840 - protein, 198 aa, Homo sapiens
MGTTCLHLGTLEQSLVFENKVNSEKVKLSLRNFPHNDYEDVFEEPSESGSDPSMWTARGPFRRDRWSSEDEEAAGPSQALSPLLSDTRKIVSEGELDQLAQIRPLIFNFHEQTAIKDCLKILEEKTAAYDIMQEFMALELKNLPGEFNSGNQPSNREKNRYRDILPFQHHGYSGPNERTTFWHGSNEGAVSLLLRYCA

SEQ ID NO: 31841 - protein, 145 aa, Homo sapiens
MSSPRDFRAEPVNDYEGNDSEAEDLNFRETLPSSSQENTPRSKVFENKVNSEKVKLSLRNFPHNDYEDVFEEPSESGSDPSMWTARGPFRRDRWSSEDEEAAGPSQALSPLLSVQHHGYSGPNERTTFWHGSNEGAVSLLLRYCA

SEQ ID NO: 31842 - protein, 145 aa, Homo sapiens
MWTARGPFRRDRWSSEDEEAAGPSQALSPLLSDTRKIVSEGELDQLAQIRPLIFNFHEQTAIKDCLKILEEKTAAYDIMQEFMALELKNLPGEFNSGNQPSNREKNRYRDILPFQHHGYSGPNERTTFWHGSNEGAVSLLLRYCA

SEQ ID NO: 31843 - protein, 136 aa, Homo sapiens
MIVNDYEGNDSEAEDLNFRETLPSSSQENTPRSKVFENKVNSEKVKLSLRNFPHNDYEDVFEEPSESGSDPSMWTARGPFRRDRWSSEDEEAAGPSQALSPLLSVQHHGYSGPNERTTFWHGSNEGAVSLLLRYCA

SEQ ID NO: 31844 - protein, 1174 aa, Homo sapiens [sequence omitted]

SEQ ID NO: 31845 - protein, 206 aa, Homo sapiens
MALPCTLGLGMLLALPGALGSGGSAEDSVGSSSVTVVLLLLLLLLLATGLALAWRRLSRDSGGYYHPARLGAALWGRTRRLLWASPPGRWLQARAELGSTDNDLERQEDEQDTDYDHVADGGLQADPGEGEQQCGEASSPEQVPVRAEEARDSDTEGDLVLGSPGPASAGGSAEALLSDLHAFAGSAAWDDSARAAGGQGLHVTAL

SEQ ID NO: 31846 - protein, 700 aa, Homo sapiens
MDFVRLARLFARARPMGLFILQHLDPCRARWAGGREGLMRPMWAPFSSSSSQLPLGQERQENTGSLGSDPSHSNSTATQEEDEEEEESFGTLSDKYSSRRLFRKSAAQFHNLRFGERRDEQMEPEPKLWRGRRNTPYWYFLQCKHLIKEGKLVEALDLFERQMLKEERLQPMESNYTVLIGGCGRVGYLKKAFNLYNQMKKRDLEPSDATYTALFNVCAESPWKDSALQSALKLRQQLQAKNFELNLKTYHALLKMAAKCADLRMCLDVFKEIIHKGHVVTEETFSFLLMGCIQDKKTGFRYALQVWRLMLSLGLQPSRDSYNLLLVAARDCGLGDPQVASELLLKPREEATVLQPPVSRQRPRRTAQAKAGNLMSAMLHVEALERQLFLEPSQALGPPEPPEARVPGKAQPEVDTKAEPSHTAALTAVALKPPPVELEVNLLTPGAVPPTVVSFGTVTTPADRLALIGGLEGFLSKMAEHRQQPDIRTLTLLAEVVESGSPAESLLLALLDEHQVEADLTFFNTLVRKKSKLGDLEGAKALLPVLAKRGLVPNLQTFCNLAIGCHRPKDGLQLLTDMKKSQVTPNTHIYSALINAAIRKLNYTYLISILKDMKQNRVPVNEVVIRQLEFAAQYPPTFDRYQGKNTYLEKIDGFRAYYKQWLTVMPAEETPHPWQKFRTKPQGDQDTGKEADDGCALGGR

SEQ ID NO: 31847 - protein, 807 aa, Homo sapiens
MDQREILQKFLDEAQSKKITKEEFANEFLKLKRQSTKYKADKTYPTTVAEKPKNIKKNRYKDILPYDYSRVELSLITSDEDSSYINANFIKGVYGPKAYIATQGPLSTTLLDFWRMIWEYSVLIIVMACMEYEMGKKKCERYWAEPGEMQLEFGPFSVSCEAEKRKSDYIIRTLKVKFNSETRTIYQFHYKNWPDHDVPSSIDPILELIWDVRCYQEDDSVPICIHCSAGCGRTGVICAIDYTWMLLKDGIIPENFSVFSLIREMRTQRPSLVQTQEQYELVYNAVLELFKRQMDVIRDKHSGTESQAKHCIPEKNHTLQADSYSPNLPKSTTKAAKMMNQQRTKMEIKESSSFDFRTSEISAKEELVLHPAKSSTSFDFLELNYSFDKNADTTMKWQTKAFPIVGEPLQKHQSLDLGSLLFEGCSNSKPVNAAGRYFNSKVPITRTKSTPFELIQQRETKEVDSKENFSYLESQPHDSCFVEMQAQKVMHVSSAELNYSLPYDSKHQIRNASNVKHHDSSALGVYSYIPLVENPYFSSWPPSGTSSKMSLDLPEKQDGTVFPSSLLPTSSTSLFSYYNSHDSLSLNSPTNISSLLNQESAVLATAPRIDDEIPPPLPVRTPESFIVVEEAGEFSPNVPKSLSSAVKVKIGTSLEWGGTSEPKKFDDSVILRPSKSVKLRSPKSELHQDRSSPPPPLPERTLESFFLADEDCMQAQSIETYSTSYPDTMENSTSSKQTLKTPGKSFTRSKSLKILRNMKKSICNSCPPNKPAESVQSNNSSSFLNFGFANRFSKPKGPRNPPPTWNI

SEQ ID NO: 31848 - protein, 691 aa, Homo sapiens
MDQREILQKFLDEAQSKKITKEEFANEFLKLKRQSTKYKADKTYPTTVAEKPKNIKKNRYKDILPYDYSRVELSLITSDEDSSYINANFIKGVYGPKAYIATQGPLSTTLLDFWRMIWEYSVLIIVMACMEYEMGKKKCERYWAEPGEMQLEFGPFSVSCEAEKRKSDYIIRTLKVKFNSETRTIYQFHYKNWPDHDVPSSIDPILELIWDVRCYQEDDSVPICIHCSAGCGRTGVICAIDYTWMLLKDGIIPENFSVFSLIREMRTQRPSLVQTQEQYELVYNAVLELFKRQMDVIRDKHSGTESQAKHCIPEKNHTLQADSYSPNLPKSTTKAAKMMNQQRTKMEIKESSSFDFRTSEISAKEELVLHPAKSSTSFDFLELNYSFDKNADTTMKWQTKAFPIVGEPLQKHQSLDLGSLLFEGCSNSKPVNAAGRYFNSKVPITRTKSTPFELIQQRETKEVDSKENFSYLESQPHDSCFVEMQAQKVMHVSSAELNYSLPYDSKHQIRNASNVKHHDSSALGVYSYIPLVENPYFSSWPPSGTSSKMSLDLPEKQDGTVFPSSLLPTSSTSLFSYYNSHDSLSLNSPTNISSLLNQESAVLATAPRIDDEIPPPLPVRTPESFIVVEEAGEFSPNVPKSLSSAVKVKIGTSLEWGGTSEPKKFDDSVILRPSKSVKLRSPKSGKNFSWL

SEQ ID NO: 31849 - protein, 752 aa, Homo sapiens
MDQREILQKFLDEAQSKKITKEEFANEFLKLKRQSTKYKADKTYPTTVAEKPKNIKKNRYKDILPYDYSRVELSLITSDEDSSYINANFIKGVYGPKAYIATQGPLSTTLLDFWRMIWEYSVLIIVMACMEYEMGKKKCERYWAEPGEMQLEFGPFSVSCEAEKRKSDYIIRTLKVKFNSETRTIYQFHYKNWPDHDVPSSIDPILELIWDVRCYQEDDSVPICIHCSAGCGRTGVICAIDYTWMLLKDGSQAKHCIPEKNHTLQADSYSPNLPKSTTKAAKMMNQQRTKMEIKESSSFDFRTSEISAKEELVLHPAKSSTSFDFLELNYSFDKNADTTMKWQTKAFPIVGEPLQKHQSLDLGSLLFEGCSNSKPVNAAGRYFNSKVPITRTKSTPFELIQQRETKEVDSKENFSYLESQPHDSCFVEMQAQKVMHVSSAELNYSLPYDSKHQIRNASNVKHHDSSALGVYSYIPLVENPYFSSWPPSGTSSKMSLDLPEKQDGTVFPSSLLPTSSTSLFSYYNSHDSLSLNSPTNISSLLNQESAVLATAPRIDDEIPPPLPVRTPESFIVVEEAGEFSPNVPKSLSSAVKVKIGTSLEWGGTSEPKKFDDSVILRPSKSVKLRSPKSELHQDRSSPPPPLPERTLESFFLADEDCMQAQSIETYSTSYPDTMENSTSSKQTLKTPGKSFTRSKSLKILRNMKKSICNSCPPNKPAESVQSNNSSSFLNFGFANRFSKPKGPRNPPPTWNI

SEQ ID NO: 31850 - protein, 779 aa, Homo sapiens
MDQREILQKFLDEAQSKKITKEEFANEFLKLKRQSTKYKADKTYPTTVAEKPKNIKKNRYKDILPYDYSRVELSLITSDEDSSYINANFIKGVYGPKAYIATQGPLSTTLLDFWRMIWEYSVLIIVMACMEYEMGKKKCERYWAEPGEMQLEFGPFSVSCEAEKRKSDYIIRTLKVKFNSETRTIYQFHYKNWPDHDVPSSIDPILELIWDVRCYQEDDSVPICIHCSAGCGRTGVICAIDYTWMLLKDGIIPENFSVFSLIREMRTQRPSLVQTQEQYELVYNAVLELFKRQMDVIRDKHSGTESQAKHCIPEKNHTLQADSYSPNLPKSTTKAAKMMNQQRTKMEIKESSSFDFRTSEISAKEELVLHPAKSSTSFDFLELNYSFDKNADTTMKWQTKAFPIVGEPLQKHQSLDLGSLLFEGCSNSKPVNAAGRYFNSKVPITRTKSTPFELIQQRETKEVDSKENFSYLESQPHDSCFVEMQAQKVMHVSSAELNYSLPYDSKHQIRNASNVKHHDSSALGVYSYIPLVENPYFSSWPPSGTSSKMSLDLPEKQDGTVFPSSLLPTSSTSLFSYYNSHDSLSLNSPTNISSLLNQESAVLATAPRIDDEIPPPLPVRTPESFIVVEEAGEFSPNVPKSLSSAVKSVKLRSPKSELHQDRSSPPPPLPERTLESFFLADEDCMQAQSIETYSTSYPDTMENSTSSKQTLKTPGKSFTRSKSLKILRNMKKSICNSCPPNKPAESVQSNNSSSFLNFGFANRFSKPKGPRNPPPTWNI

SEQ ID NO: 31851 - protein, 179 aa, Homo sapiens
MDQREILQKFLDEAQSKKITKEEFANEFLKLKRQSTKYKADKTYPTTVAEKPKNIKKNRYKDILPYDYSRVELSLITSDEDSSYINANFIKGVYGPKAYIATQGPLSTTLLDFWRMIWEYSVLIIVMACMEYEMGKEAEKRKSDYIIRTLKVKFNSVSVILAHQTSLQNLFSQITPAHF

SEQ ID NO: 31852 - protein, 668 aa, Homo sapiens
MDQREILQKFLDEAQSKKITKEEFANEFLKLKRQSTKYKADKTYPTTVAEKPKNIKKNRYKDILPYDYSRVELSLITSDEDSSYINANFIKGVYGPKAYIATQGPLSTTLLDFWRMIWEYSVLIIPENFSVFSLIREMRTQRPSLVQTQEQYELVYNAVLELFKRQMDVIRDKHSGTESQAKHCIPEKNHTLQADSYSPNLPKSTTKAAKMMNQQRTKMEIKESSSFDFRTSEISAKEELVLHPAKSSTSFDFLELNYSFDKNADTTMKWQTKAFPIVGEPLQKHQSLDLGSLLFEGCSNSKPVNAAGRYFNSKVPITRTKSTPFELIQQRETKEVDSKENFSYLESQPHDSCFVEMQAQKVMHVSSAELNYSLPYDSKHQIRNASNVKHHDSSALGVYSYIPLVENPYFSSWPPSGTSSKMSLDLPEKQDGTVFPSSLLPTSSTSLFSYYNSHDSLSLNSPTNISSLLNQESAVLATAPRIDDEIPPPLPVRTPESFIVVEEAGEFSPNVPKSLSSAVKVKIGTSLEWGGTSEPKKFDDSVILRPSKSVKLRSPKSELHQDRSSPPPPLPERTLESFFLADEDCMQAQSIETYSTSYPDTMENSTSSKQTLKTPGKSFTRSKSLKILRNMKKSICNSCPPNKPAESVQSNNSSSFLNFGMCVILLKS

SEQ ID NO: 31853 - protein, 388 aa, Homo sapiens
MVRDSMAAAFRPSNRVLLQALQILVYPGVGGSGSVSCRCPLGAKRYLLTDNVVKLKEFQQKKVAVACNLSGTKETYFRNLKKKLTQNKLILKGELITLLHLCESRDHVELAKNVIYRYHAENKNFTLGEYKFGPLFVRLCYELDLEESAVELMKDQHLRGFFSDSTSFNILMDMLFIKGKYKSALQVLIEMKNQDVKFTKDTYVLAFAICYKLNSPESFKICTTLREEALLKGEILSRRASCFAVALALNQNEMAKAVSIFSQIMNPESIACINLNIIIHIQSNMLENLIKTLKNAAEGNLSKFVKRHVFSEEVLAKVREKVKDVPALVAKFDEIYGTLHITGQVTTDSLDAVLCHTPRDRKSHTLLLNKRMVSRRTFQPLSQSLLAE

SEQ ID NO: 31854 - protein, 216 aa, Homo sapiens
MWNWLKMSFTGALQVLIEMKNQDVKFTKDTYVLAFAICYKLNSPESFKICTTLREEALLKGEILSRRASCFAVALALNQNEMAKAVSIFSQIMNPESIACINLNIIIHIQSNMLENLIKTLKNAAEGNLSKFVKRHVFSEEVLAKVREKVKDVPALVAKFDEIYGTLHITGQVTTDSLDAVLCHTPRDRKSHTLLLNKRMVSRRTFQPLSQSLLAE

SEQ ID NO: 31855 - protein, 279 aa, Homo sapiens
MVRDSMAAAFRPSNRVLLQALQILVYPGVGGSGSVSCRCPLGAKRYLLTDNVVKLKEFQQKKVAVACNLSGTKGALQVLIEMKNQDVKFTKDTYVLAFAICYKLNSPESFKICTTLREEALLKGEILSRRASCFAVALALNQNEMAKAVSIFSQIMNPESIACINLNIIIHIQSNMLENLIKTLKNAAEGNLSKFVKRHVFSEEVLAKVREKVKDVPALVAKFDEIYGTLHITGQVTTDSLDAVLCHTPRDRKSHTLLLNKRMVSRRTFQPLSQSLLAE

SEQ ID NO: 31856 - protein, 381 aa, Homo sapiens
MHLLAILFCALWSAVLAENSDDYDLMYVNLDNEIDNGLHPTEDPTPCACGQEHSEWDKLFIMLENSQMRERMLLQATDDVLRGELQRLREELGRLAESLARPCAPGAPAEARLTSALDELLQATRDAGRRLARMEGAEAQRPEEAGRALAAVLEELRQTRADLHAVQGWAARSWLPAGCETAILFPMRSKKIFGSVHPVRPMRLESFSACIWVKATDVLNKTILFSYGTKRNPYEIQLYLSYQSIVFVVGGEENKLVAEAMVSLGRWTHLCGTWNSEEGLTSLWVNGELAATTVEMATGHIVPEGGILQIGQEKNGCCVGGGFDETLAFSGRLTGFNIWDSVLSNEEIRETGGAESCHIRGNIVGWGVTEIQPHGGAQYVS

SEQ ID NO: 31857 - protein, 1636 aa, Homo sapiens
MEAVPRMPMIWLDLKEAGDFHFQPAVKKFVLKNYGENPEAYNEELKKLELLRQNAVRVPRDFEGCSVLRKYLGQLHYLQSRVPMGSGQEAAVPVTWTEIFSGKSVAHEDIKYEQACILYNLGALHSMLGAMDKRVSEEGMKVSCTHFQCAAGAFAYLREHFPQAYSVDMSRQILTLNVNLMLGQAQECLLEKSMLDNRKSFLVARISAQVVDYYKEACRALENPDTASLLGRIQKDWKKLVQMKIYYFAAVAHLHMGKQAEEQQKFGERVAYFQSALDKLNEAIKLAKGQPDTVQDALRFTMDVIGGKYNSAKKDNDFIYHEAVPALDTLQPVKGAPLVKPLPVNPTDPAVTGPDIFAKLVPMAAHEASSLYSEEKAKLLREMMAKIEDKNEVLDQFMDSMQLDPETVDNLDAYSHIPPQLMEKCAALSVRPDTVRNLVQSMQVLSGVFTDVEASLKDIRDLLEEDELLEQKFQEAVGQAGAISITSKAELAEVRREWAKYMEVHEKASFTNSELHRAMNLHVGNLRLLSGPLDQVRAALPTPALSPEDKAVLQNLKRILAKVQEMRDQRVSLEQQLRELIQKDDITASLVTTDHSEMKKLFEEQLKKYDQLKVYLEQNLAAQDRVLCALTEANVQYAAVRRVLSDLDQKWNSTLQTLVASYEAYEDLMKKSQEGRDFYADLESKVAALLERTQSTCQAREAARQQLLDRELKKKPPPRPTAPKPLLPRREESEAVEAGDPPEELRSLPPDMVAGPRLPDTFLGSATPLHFPPSPFPSSTGPGPHYLSGPLPPGTYSGPTQLIQPRAPGPHAMPVAPGPALYPAPAYTPELGLVPRSSPQHGVVSSPYVGVGPAPPVAGLPSAPPPQFSGPELAMAVRPATTTVDSIQAPIPSHTAPRPNPTPAPPPPCFPVPPPQPLPTPYTYPAGAKQPIPAQHHFSSGIPAGFPAPRIGPQPQPHPQPHPSQAFGPQPPQQPLPLQHPHLFPPQAPGLLPPQSPYPYAPQPGVLGQPPPPLHTQLYPGPAQDPLPAHSGALPFPSPGPPQPPHPPLAYGPAPSTRPMGPQAAPLTIRGPSSAGQSTPSPHLVPSPAPSPGPGPVPPRPPAAEPPPCLRRGAAAADLLSSSPESQHGGTQSPGGGQPLLQPTKVDAAEGRRPQALRLIERDPYEHPERLRQLQQELEAFRGQLGDVGALDTVWRELQDAQEHDARGRSIAIARCYSLKNRHQDVMPYDSNRVVLRSGKDDYINASCVEGLSPYCPPLVATQAPLPGTAADFWLMVHEQKVSVIVMLVSEAEMEKQKVARYFPTERGQPMVHGALSLALSSVRSTETHVERVLSLQFRDQSLKRSLVHLHFPTWPELGLPDSPSNLLRFIQEVHAHYLHQRPLHTPIIVHCSSGVGRTGAFALLYAAVQEVEAGNGIPELPQLVRRMRQQRKHMLQEKLHLRFCYEAVVRHVEQVLQRHGVPPPCKPLASASISQKNHLPQDSQDLVLGGDVPISSIQATIAKLSIRPPGGLESPVASLPGPAEPPGLPPASLPESTPIPSSSPPPLSSPLPEAPQPKEEPPVPEAPSSGPPSSSLELLASLTPEAFSLDSSLRGKQRMSKHNFLQAHNGQGLRATRPSDDPLSLLDPLWTLNKT

SEQ ID NO: 31858 - protein, 478 aa, Homo sapiens
MGCSWRKTLSFFLVFVPIYLHGASSQEAAPVGPRKPFFERLRRLEEQFRRFQEVTWTHLQNIASNYNVSYNVDVRFRSLAEESQAVAQAVNRSQASVQGELAQLKAWVRKLQRRGRKVDTRLRALDLTLGERSQQRARERKAHKAQRDALQDSLARLEGLVHSQGARLAALEGRLPVAHPGTAALGPALVPTPTQPEELGPTSLKLQRDRQELRAASEHRGPPQDSSAPLQGRREPPASGSHRVLSGTAPKDPRQQAWSPQVPGEICGVGPTLVFPNASTRNVVFLSPGFVTALRALSFCSWVRTASGRLGTLLSYATEDNDNKLVLHGRDSLLPGSIHFVIGDPAFRELPLQLLLDGQWHHICVIWTSTQGRYWLHVDRRLVATGSRFREGYEIPPGGSLVLGQEQDSVGGGFDSSEAFVGSMSGLAIWDRALVPGEVANLAIGKEFPTGAILTLANAALAGGFVQGANCTCLERCP

SEQ ID NO: 31859 - protein, 473 aa, Homo sapiens
MGSGNWEVTGPPCGSRCERPPGLPRGVHGQFRSAVGLSGLRWFRRFQEVTWTHLQNIASNYNVSYNVDVRFRSLAEESQAVAQAVNRSQASVQGELAQLKAWVRKLQRRGRKVDTRLRALDLTLGERSQQRARERKAHKAQRDALQDSLARLEGLVHSQGARLAALEGRLPVAHPGTAALGPALVPTPTQPEELGPTSLKLQRDRQELRAASEHRGPPQDSSAPLQGRREPPASGSHRVLSGTAPKDPRQQAWSPQVPGEICGVGPTLVFPNASTRNVVFLSPGFVTALRALSFCSWVRTASGRLGTLLSYATEDNDNKLVLHGRDSLLPGSIHFVIGDPAFRELPLQLLLDGQWHHICVIWTSTQGRYWLHVDRRLVATGSRFREGYEIPPGGSLVLGQEQDSVGGGFDSSEAFVGSMSGLAIWDRALVPGEVANLAIGKEFPTGAILTLANAALAGGFVQGANCTCLERCP

SEQ ID NO: 31860 - protein, 689 aa, Homo sapiens
MAVVSAVRWLGLRSRLGQPLTGRRAGLCEQARSCRFYSGSATLSKVEGTDVTGIEEVVIPKKKTWDKVAVLQALASTVNRDTTAVPYVFQDDPYLMPASSLESRSFLLAKKSGENVAKFIINSYPKYFQKDIAEPHIPCLMPEYFEPQIKDISEAALKERIELRKVKASVDMFDQLLQAGTTVSLETTNSLLDLLCYYGDQEPSTDYHFQQTGQSEALEEENDETSRRKAGHQFGVTWRAKNNAERIFSLMPEKNEHSYCTMIRGMVKHRAYEQALNLYTELLNNRLHADVYTFNALIEATVCAINEKFEEKWSKILELLRHMVAQKVKPNLQTFNTILKCLRRFHVFARSPALQVLREMKAIGIEPSLATYHHIIRLFDQPGDPLKRSSFIIYDIMNELMGKRFSPKDPDDDKFFQSAMSICSSLRDLELAYQVHGLLKTGDNWKFIGPDQHRNFYYSKFFDLICLMEQIDVTLKWYEDLIPSAYFPHSQTMIHLLQALDVANRLEVIPKIWKDSKEYGHTFRSDLREEILMLMARDKHPPELQVAFADCAADIKSAYESQPIRQTAQDWPATSLNCIAILFLRAGRTQEAWKMLGLFRKHNKIPRSELLNELMDSAKVSNSPSQAIEVVELASAFSLPICEGLTQRVMSDFAINQEQKEALSNLTALTSDSDTDSSSDSDSDTSEGK

SEQ ID NO: 31861 - protein, 280 aa, Homo sapiens
MMAYKFFQSAMSICSSLRDLELAYQVHGLLKTGDNWKFIGPDQHRNFYYSKFFDLICLMEQIDVTLKWYEDLIPSAYFPHSQTMIHLLQALDVANRLEVIPKIWKDSKEYGHTFRSDLREEILMLMARDKHPPELQVAFADCAADIKSAYESQPIRQTAQDWPATSLNCIAILFLRAGRTQEAWKMLGLFRKHNKIPRSELLNELMDSAKVSNSPSQAIEVVELASAFSLPICEGLTQRVMSDFAINQEQKEALSNLTALTSDSDTDSSSDSDSDTSEGK

SEQ ID NO: 31862 - protein, 1134 aa, Homo sapiens
MGLLASAGLLLLLVIGHPRSLGLKCGIRMVNMKSKEPAVGSRFFSRISSWRNSTVTGHPWQVSLKSDEHHFCGGSLIQEDRVVTAAHCLDSLSEKQLKNITVTSGEYSLFQKDKQEQNIPVSKIITHPEYNSREYMSPDIALLYLKHKVKFGNAVQPICLPDSDDKVEPGILCLSSGWGKISKTSEYSNVLQEMELPIMDDRACNTVLKSMNLPPLGRTMLCAGFPDWGMDACQGDSGGPLVCRRGGGIWILAGITSWVAGCAGGSVPVRNNHVKASLGIFSKVSELMDFITQNLFTGLDRGQPLSKVGSRYITKALSSVQEVNGSQRGKGILDMEKQVGCDHDYVSLRSSSGVLFNQRSLMEDDGKQNKRVCGKILPSPLLAETSEAMVPFVSDTEDSGSGFELTVTAVQKSEAGSGCGSLAILVEEGTNHSAKYPDLYPSNIRCHWFICAPEKHIIKLTFEDFAVKFSPNCIYDAVVIYGDSEEKHKLAKLCGMLTITSIFSSSNMTVIYFKSDGKNRLQGFKARFTILPSESLNKFEPKLPPQNNPVSTVKAILHDVCGIPPFSPQWLSRRIAGGEEACPHCWPWQVGLRFLGDYQCGGAIINPVWILTAAHCVQLKNNPLSWTIIAGDHDRNLKESTEQVRRAKHIIVHEDFNTLSYDSDIALIQLSSPLEYNSVVRPVCLPHSAEPLFSSEICAVTGWGSISADGGLASRLQQIQVHVLEREVCEHTYYSAHPGGITEKMICAGFAASGEKDFCQGDSGGPLVCRHENGPFVLYGIVSWGAGCVQPWKPGVFARVMIFLDWIQSKINGPASLQTNNKCKTLKQQLPPPTPSPDSASWPGCCSEAELEKPRGFFPTPRYLLDYRGRLECSWVLRVSPSSMAKFTIEYLSLLGSPVCQDSVLIIYEERHSKRKTAGGLHGRRLYSMTFMSPGPLVRVTFHALVRGAFGISYIDLKVLGPKDSKITRLSQSSNREHLVPCEDVLLTKPEGIMQIPRNSHRTTMGCQWRLVAPLNHIIQLNIINFPMKPTTFVCHGHLRVYEGFGPGKKLIASFAGTLAMILTKDILKREKLNFINTYIMHIWENSVYDNVRSVGKRKQKKFASNLSYSMEAEKSRIQVPADLVPAKGSLSGS

SEQ ID NO: 31863 - protein, 564 aa, Homo sapiens
MLISRNKLILLLGIVFFERGKSATLSLPKAPSCGQSLVKVQPWNYFNIFSRILGGSQVEKGSYPWQVSLKQRQKHICGGSIVSPQWVITAAHCIANRNIVSTLNVTAGEYDLSQTDPGEQTLTIETVIIHPHFSTKKPMDYDIALLKMAGAFQFGHFVGPICLPELREQFEAGFICTTAGWGRLTEGGVLSQVLQEVNLPILTWEECVAALLTLKRPISGKTFLCTGFPDGGRDACQGDSGGSLMCRNKKGAWTLAGVTSWGLGCGRGWRNNVRKSDQGSPGIFTDISKVLPWIHEHIQTGNRRKSSRAWCSEQDVIVSGAEGKLHFPESLHLYYESKQRCVWTLLVPEEMHVLLSFSHLDVESCHHSYLSMYSLEDRPIGKFCGESLPSSILIGSNSLRLKFVSDATDNAARFNLTYKALKPNYIPDSGCSYLTVLFEEGLIQSLNYPENYSDKANCDWIFQASKHHLIKLSFQSLEIEESGDCTSDYVTVHSDVERKKEIARLCGYDVPTPVLSPSSIMLISFHSDENGTCRGFQATVSFIPKAGKKIELPTLWFPVLILVM

SEQ ID NO: 31864 - protein, 795 aa, Homo sapiens
METALAKTPQKRQVMFLAILLLLWEAGSEAVRYSIPEETESGYSVANLAKDLGLGVGELATRGARMHYKGNKELLQLDIKTGNLLLYEKLDREVMCGATEPCILHFQLLLENPVQFFQTDLQLTDINDHAPEFPEKEMLLKIPESTQPGTVFPLKIAQDFDIGSNTVQNYTISPNSHFHVATHNRGDGRKYPELVLDKALDREERPELSLTLTALDGGAPPRSGTTTIRIVVLDNNDNAPEFLQSFYEVQVPENSPLNSLVVVVSARDLDAGAYGSVAYALFQGDEVTQPFVIDEKTAEIRLKRALDFEATPYYNVEIVATDGGGLSGKCTVAIEVVDVNDNAPELTMSTLSSPTPENAPETVVAVFSVSDPDSGDNGRMICSIQNDLPFLLKPTLKNFYTLVTQRTLDRESQAEYNITITVTDMGTPRLKTEHNITVLVSDVNDNAPAFTQTSYTLFVRENNSPALHIGSVSATDRDSGTNAQVTYSLLPPQNPHLRLASLVSINADNGHLFALRSLDYEALQAFEFRVGATDRGSPALSSEALVRVLVLDANDNSPFVLYPLQNGSAPCTELVPRAAEPGYLVTKVVAVDGDSGQNAWLSYQLLKATEPGLFSMWAHNGEVRTARLLSERDAAKHRLVVLVKDNGEPPRSATATLHVLLVDGFSQPYLPLPEAAPAQAQADSLTVYLVVALASVSSLFLFSVLLFVAVRLCRRSRAASVGRCSVPEGPFPGHLVDVSGTGTLSQSYHYEVCLTGDSGAGEFKFLKPIIPNLLPQGAGEEIGKTAAFRNSFGLN

SEQ ID NO: 31865 - protein, 248 aa, Homo sapiens
MQKSEGSGGTQLKNRATGNYDQRTSSSTQLKHRNAVQGSKSSLSTSSPESARKLHPRPSDKLNPKTINPFGEQSRVPSAFAAIYSKGGIPCRLVHGSVKHRLQWECPPESLSFDPLLITLAEGLRETKHPYTFVSKEGFRELLLVKGAPEKAIPLLPRLIPVLKAALVHSDDEVFERGLNALVQLSVVVGPSLNDHLKHLLTSLSKRLMDKKFKEPITSALQKLEQHGGSGSLSIIKSKIPTYCSICC

SEQ ID NO: 31866 - protein, 221 aa, Homo sapiens
MQKSEGSGGTQLKNRATGNYDQRTSSSTQLKHRNAVQGSKSSLSTSSPESARKLHPRPSDKLNPKTINPFGEQSRVPSAFAAIYSKGGIPCRLVHGSVKHRLQWECPPESLSFDPLLITLAEGLRETKHPYTFVSKEGFRELLLVKGAPEKAIPLLPRLIPVLKAALVHSDDEVFERGLNALVQLSVVVGPSLNDHLKHLLTSGSLSIIKSKIPTYCSICC

SEQ ID NO: 31867 - protein, 123 aa, Homo sapiens
MQKSEGSGGTQLKNRATGNYDQRTSSSTQLKHRNAVQGSKSSLSTSSPESARKLHPRPSDKLNPKTINPVHSDDEVFERGLNALVQLSVVVGPSLNDHLKHLLTSGSLSIIKSKIPTYCSICC

SEQ ID NO: 31868 - protein, 200 aa, Homo sapiens
MQKSEGSGGTQLKNRATGNYDQRTSSSTQLKHRNAVQGSKSSLSTSSPESARKLHPRPSDKLNPKTINPGLRETKHPYTFVSKEGFRELLLVKGAPEKAIPLLPRLIPVLKAALVHSDDEVFERGLNALVQLSVVVGPSLNDHLKHLLTSDPVQLMRFPRPLLGLMICQKDPWNSGKLLLAVMVSYNTQKIKIKISKGEP

SEQ ID NO: 31869 - protein, 267 aa, Homo sapiens
MPRAFLVKKPCVSTCKRNWSELPDEERGEIYVPVSLGFCPPQPYREPEPSVAEPPSCPLALNMSLRDSSYSMAPGPCVVAQLPSEDMGHLTDPQSRDHGFLRTKMKVTLGDSPSGDLFTCRVCQKAFTYQRMLNRHMKCHNDVKRHLCTYCGKGFNDTFDLKRHVRTHTGVRPYKCSLCDKAFTQRCSLESHLKKIHGVQQKYAYKERRAKLYVCEECGCTSESQEGHVLHLKEHHPDSPLLRKTSKKVAVALQNTVTSLLQGSPHL

SEQ ID NO: 31870 - protein, 913 aa, Homo sapiens
MTSRLRALGGRINNIRTSELPKEKTRSEVICSIHFLDGVVQTFKVTKQDTGQVLLDMVHNHLGVTEKEYFGLQHDDDSVDSPRWLEASKAIRKQLKGGFPCTLHFRVRFFIPDPNTLQQEQTRHLYFLQLKMDICEGRLTCPLNSAVVLASYAVQSHFGDYNSSIHHPGYLSDSHFIPDQNEDFLTKVESLHEQHSGLKQSEAESCYINIARTLDFYGVELHSGRDLHNLDLMIGIASAGVAVYRKYICTSFYPWVNILKISFKRKKFFIHQRQKQAESREHIVAFNMLNYRSCKNLWKSCVEHHTFFQAKKLLPQEKNVLSQYWTMGSRNTKKSVNNQYCKKVIGGMVWNPAMRRSLSVEHLETKSLPSRSPPITPNWRSPRLRHEIRKPRHSSADNLANEMTYITETEDVFYTYKGSLAPQDSDSEVSQNRSPHQESLSENNPAQSYLTQKSSSSVSPSSNAPGSCSPDGVDQQLLDDFHRVTKGGSTEDASQYYCDKNDNGDSYLVLIRITPDEDGKFGFNLKGGVDQKMPLVVSRINPESPADTCIPKLNEGDQIVLINGRDISEHTHDQVVMFIKASRESHSRELALVIRRRAVRSFADFKSEDELNQLFPEAIFPMCPEGGDTLEGSMAQLKKGLESGTVLIQFEQLYRKKPGLAITFAKLPQNLDKNRYKDVLPYDTTRVLLQGNEDYINASYVNMEIPAANLVNKYIATQGPLPHTCAQFWQVVWDQKLSLIVMLTTLTERGRTKCHQYWPDPPDVMNHGGFHIQCQSEDCTIAYVSREMLVTNTQTGEEHTVTHLQYVAWPDHGVPDDSSDFLEFVNYVRSLRVDSEPVLVHCSAGIGRTGVLVTMETAMCLTERNLPIYPLDIVRKMRDQRAMMVQTSSQYKFVCEAILRVYEEGLVQMLDPS

SEQ ID NO: 31871 - protein, 782 aa, Homo sapiens
MDICEGRLTCPLNSAVVLASYAVQSHFGDYNSSIHHPGYLSDSHFIPDQNEDFLTKVESLHEQHSGLKQSEAESCYINIARTLDFYGVELHSGRDLHNLDLMIGIASAGVAVYRKYICTSFYPWVNILKISFKRKKFFIHQRQKQAESREHIVAFNMLNYRSCKNLWKSCVEHHTFFQAKKLLPQEKNVLSQYWTMGSRNTKKSVNNQYCKKVIGGMVWNPAMRRSLSVEHLETKSLPSRSPPITPNWRSPRLRHEIRKPRHSSADNLANEMTYITETEDVFYTYKGSLAPQDSDSEVSQNRSPHQESLSENNPAQSYLTQKSSSSVSPSSNAPGSCSPDGVDQQLLDDFHRVTKGGSTEDASQYYCDKNDNGDSYLVLIRITPDEDGKFGFNLKGGVDQKMPLVVSRINPESPADTCIPKLNEGDQIVLINGRDISEHTHDQVVMFIKASRESHSRELALVIRRRAVRSFADFKSEDELNQLFPEAIFPMCPEGGDTLEGSMAQLKKGLESGTVLIQFEQLYRKKPGLAITFAKLPQNLDKNRYKDVLPYDTTRVLLQGNEDYINASYVNMEIPAANLVNKYIATQGPLPHTCAQFWQVVWDQKLSLIVMLTTLTERGRTKCHQYWPDPPDVMNHGGFHIQCQSEDCTIAYVSREMLVTNTQTGEEHTVTHLQYVAWPDHGVPDDSSDFLEFVNYVRSLRVDSEPVLVHCSAGIGRTGVLVTMETAMCLTERNLPIYPLDIVRKMRDQRAMMVQTSSQYKFVCEAILRVYEEGLVQMLDPS

SEQ ID NO: 31872 - protein, 737 aa, Homo sapiens
MDICEGRLTCPLNSAVVLASYAVQSHFGDYNSSIHHPGYLSDSHFIPDQNEDFLTKVESLHEQHSGLKQSEAESCYINIARTLDFYGVELHSGRDLHNLDLMIGIASAGVAVYRKYICTSFYPWVNILKISFKRKKFFIHQRQKQAESREHIVAFNMLNYRSCKNLWKSCVEHHTFFQAKKLLPQEKNVLSQYWTMGSRNTKKRSPRLRHEIRKPRHSSADNLANEMTYITETEDVFYTYKGSLAPQDSDSEVSQNRSPHQESLSENNPAQSYLTQKSSSSVSPSSNAPGSCSPDGVDQQLLDDFHRVTKGGSTEDASQYYCDKNDNGDSYLVLIRITPDEDGKFGFNLKGGVDQKMPLVVSRINPESPADTCIPKLNEGDQIVLINGRDISEHTHDQVVMFIKASRESHSRELALVIRRRAVRSFADFKSEDELNQLFPEAIFPMCPEGGDTLEGSMAQLKKGLESGTVLIQFEQLYRKKPGLAITFAKLPQNLDKNRYKDVLPYDTTRVLLQGNEDYINASYVNMEIPAANLVNKYIATQGPLPHTCAQFWQVVWDQKLSLIVMLTTLTERGRTKCHQYWPDPPDVMNHGGFHIQCQSEDCTIAYVSREMLVTNTQTGEEHTVTHLQYVAWPDHGVPDDSSDFLEFVNYVRSLRVDSEPVLVHCSAGIGRTGVLVTMETAMCLTERNLPIYPLDIVRKMRDQRAMMVQTSSQYKFVCEAILRVYEEGLVQMLDPS

SEQ ID NO: 31873 - protein, 275 aa, Homo sapiens
MPKVFLVKRRSLGVSVRSWDELPDEKRADTYIPVGLGRLLHDPPEDCRSDGGSSSGSGSSSAGEPGGAESSSSPHAPESETPEPGDAEGPDGHLATKQRPVARSKIKFTTGTCSDSVVHSCDLCGKGFRLQRMLNRHLKCHNQVKRHLCTFCGKGFNDTFDLKRHVRTHTGIRPYKCNVCNKAFTQRCSLESHLKKIHGVQQQYAYKQRRDKLYVCEDCGYTGPTQEDLYLHVNSAHPGSSFLKKTSKKLAALLQGKLTSAHQENTSLSEEEERK

SEQ ID NO: 31874 - protein, 143 aa, Homo sapiens
MLNRHLKCHNQVKRHLCTFCGKGFNDTFDLKRHVRTHTGIRPYKCNVCNKAFTQRCSLESHLKKIHGVQQQYAYKQRRDKLYVCEDCGYTGPTQEDLYLHVNSAHPGSSFLKKTSKKLAALLQGKLTSAHQENTSLSEEEERK

SEQ ID NO: 31875 - protein, 1185 aa, Homo sapiens
MHVHVCVCLCVCIYTSSCVCACVHMCMRDALLAEGRGGGLAAADDFLYLECCKCFSQESQIAMVCQERSQNETYEVKMNNDTEACRATLNLEERRSVAIRSRENVVFVQTDKPTYKPGQKDVNGIAQFFLDTYTFTYPNITLKDPQNNRIFQRQNVTSFRNITQLSFQLISEPMFGDYWIVVKRNSRETVTHQFAVKRYVLPKFEVTVNAPQTVTISDDEFQVDVCAYNFGQPVQGETQIRVCREYFSSSNCEKNENEICEQFIAQVQTNLDIFTLLCSSFLTVMQISEKTSVFITQLLGTVNFENMDTFYRRGISYFGQLKFSDPNNVPMVNKLLQLELNDEFIGNYTTDENGEAQFSIDTSDIFDPEFNLKVRHQRTEECYLPSWLTPQYLDAHFLVSRFYSRTNSFLKIVPEPKQLECNQQKVVTVHYSLNSEAYEDDSNVKFFYLNGNFSFPISISADLAPAAVLFVYTLHPSGEIVADSVRFQVDKCFKHKVNIKFSNEQGLPGSNASLCLQAAPVLFCALRAVDRNVLLLKSEQQLSAESVSSLYNMVPSIEPYGYFYHGLNLDDGKEDPCIPQRDMFYNGLYYTPVSNYGDGDIYNIVRVRSLRILENIIQTVRTNFPETWMWDLVSVSSSGSANLSFLIPDTITQWEASGFCVNGDVGFGISSTTTLEVSQPFFIEIASPFSVVQNEQFDLIVNVFSYRNTCVEVSYIWECLPGKVNITVVAESKQSSACPNEGMEQQKLNWKDTVVQSFLVEFLFLGDILGLALQNLVVLQMPYGSGEQNAALLASDTYVLDYLKSTEQLTEEVQSKAFFLSILGYQRQLSFKNSDGSYSVFWQQSQKGSIWLSALTFKTLERMKKYVFIDENVQKQTLIWLSSQQKTSGCFKNDGQLFNHALRNALFCLEAALDSGVTNGYNHAILAYAFALAGKEKQVESLLQTLDQSAPKLSKRYYWERERKPKTEEFPSFIPWAPSAQTEKSCYVLLAVISRKIPDLTYASKIVQWLAQRMNSHGGFSSNQVINVGLILIAARGEEGLFSKDQNTVTFSSEGSSEIFQVNGHNRLLVQRSEVTQAPGEYTVDVEGHGCTFIQIFRYTGIRNKSSMVVIDVKMLSGFTPTMSSIEEVNNRSLIFQHKDSYIEYKRADSFPFSVEQSNLVFNIQPAPAMVYDYYEKGRQATAMP

SEQ ID NO: 31876 - protein, 1432 aa, Homo sapiens
MTGSHLSHDSWQYVLLIPSVLQEGSLDKACAQLFNLTESVVLTVSLNYGEVQTKIFEENVTGENFFKCISFEVPQARSDPLAFITFSAKGATLNLEERRSVAIRSRENVVFVQTDKPTYKPGQKDVNGIAQFFLDTYTFTYPNITLKDPQNNRIFQWQNVTSFRNITQLSFQLISEPMFGDYWIVVKRNSRKTVTHQFAVKRYVLPKFEVTVNAPQTVTISDDEFQVDVCAKYTFGQPVQGKTQIRVCREYFSSSNCEKNDNEICEQFIAQLENGCVSQIVNTKVFQLYRSGLFMTFHVAVIVTEFGTGNYCMQISEKTSVFITQLLGTVNFENMDTFYRRGISYFGTLKFSDPNNVPMVNKLLQLELNDEFIGNYTTDENGEAQFSIDTSDIFDPEFNLKATYVRPKSCYLPSWLTPQYLDAHFLVSRFYSRTNSFLKIVPEPKQLECNHQKVVTVHYSLNSEAYEDDSNVKFFYLVSLSHDSGNFQHRISSSPIYTAWNGNFSFPLSISADLAPAAVLFVYTLHPSGEIVADSVRFQVDKCFKHKVNIKFSNEQGLPGSNASLYLQAAPVLFCALGAVDGNVLLLKSEQQLSAESVYNMVPSIEPYGYFYHGLNLDDGKEDPCIPQRDMFYNGLYYTPVSNYGDGDIYNIVRNMGLKVFTNLHYRKPEVCVMERRLPLPKPLYLETENYGPMHSVPSRIACRGENADYVEQAIIQTVRTNFPETWMWDLVSVDSSGSANLSFLIPDTITQWEASGFCVNGDVGFGISSTTTLEVSQPFFIEIASPFSVVQNEQFDLIVNAFSYLNTCVEISVQVEESQNYEANINTWKINGSEVIQAGGRKTNIWTIIPKKLGKVNITVVAESKQSSACPNEGMEQQKLNWKDTVVKSFLVEPEGIEKERTQSFLICTEGAKASKQGVLDLPNDVVEGSARGFFTVVGDILGLAMQNLVVLQMPYGGGEQNAALLASDTYVLDYLKSTEQLTEEVQSKAFFLLSNGYQRQLSFKNSDGSYSVFWQQNQKGSIWLSALTFKTLERMKKFVFIDENVQKQTLIWLSSQQKTSGCFKNDGQLFNHAWEGGDEEDISLTAYVVGMFFEAGLNSTFPALRNALFCLEAALDSGVTNGYNHAILAYAFALAGKEKQVESLLQTLDQSATKLNNVIYWERERKPKTEEFPSFIPWAPSAQTEKSCYVLLAVISRKIPDLTYASKIVQWLAQQMNSHGGFSSNQVINVGLILIAICGEEGLFSKNQNTVTFSSEGSSEIQFNGHNRLLVQRSEVTQAPGQYTVDVEGRGCTFIQATLKYNVLLPKKASGFSLSLEIVKNYSLTVFDLTVNLKYTGIRNKSSMVVIDVKMLSGFTPTMSSIEELENKGQVMKTEVKNDHVLFYLENVFGRADSFTFSVEQSNLVFNIQPAPGMVYDYYEKDGEAFLLTN

SEQ ID NO: 31877 - protein, 800 aa, Homo sapiens
MAVRELCFPRQRQVLFLFLFWGVSLAGSGFGRYSVTEETEKGSFVVNLAKDLGLAEGELAARGTRVVSDDNKQYLLLDSHTGNLLTNEKLDREKLCGPKEPCMLYFQILMDDPFQIYRAELRVRDINDHAPVFQDKETVLKISENTAEGTAFRLERAQDPDGGLNGIQNYTISPNSFFHINISGGDEGMIYPELVLDKALDREEQGELSLTLTALDGGSPSRSGTSTVRIVVLDVNDNAPQFAQALYETQAPENSPIGFLIVKVWAEDVDSGVNAEVSYSFFDASENIRTTFQINPFSGEIFLRELLDYELVNSYKINIQAMDGGGLSARCRVLVEVLDTNDNPPELIVSSFSNSVAENSPETPLAVFKINDRDSGENGKMVCYIQENLPFLLKPSVENFYILITEGALDREIRAEYNITITVTDLGTPRLKTEHNITVLVSDVNDNAPAFTQTSYTLFVRENNSPALHIGSVSATDRDSGTNAQVTYSLLPPQDPHLPLASLVSINADNGHLFALRSLDYEALQAFEFRVGATDRGSPALSREALVRVLVLDANDNSPFVLYPLQNGSAPCTELVPRAAEPGYLVTKVVAVDGDSGQNAWLSYQLLKATEPGLFGVWAHNGEVRTARLLSERDAAKHRLVVLVKDNGEPPRSATATLHLLLVDGFSQPYLPLPEAAPAQAQAEADLLTVYLVVALASVSSLFLLSVLLFVAVRLCRRSRAASVGRCSVPEGPFPGHLVDVRGAETLSQSYQYEVCLTGGPGTSEFKFLKPVISDIQAQGPGRKGEENSTFRNSFGFNIQ

SEQ ID NO: 31878 - protein, 963 aa, Homo sapiens
MAERGGAGGGPGGAGGGSGQRGSGVAQSPQQPPPQQQQQQPPQQPTPPKLAQATSSSSSTSAAAASSSSSSTSTSMAVAVASGSAPPGGPGPGRTPAPVQMNLYATWEVDRSSSSCVPRLFSLTLKKLVMLKEMDKDLNSVVIAVKLQGSKRILRSNEIVLPASGLVETELQLTFSLQYPHFLKRDANKLQIMLQRRKRYKNRTILGYKTLAVGLINMAEVMQHPNEGALVLGLHSNVKDVSVPVAEIKIYSLSSQPIDHEGIKSKLSDRSPDIDNYSEEEEESFSSEQEGSDDPLHGQDLFYEDEDLRKVKKTRRKLTSTSAITRQPNIKQKFVALLKRFKVSDEVGFGLEHVSREQIREVEEDLDELYDSLEMYNPSDSGPEMEETESILSTPKPKLKPFFEGMSQSSSQTEIGSLNSKGSLGKDTTSPMELAALEKIKSTWIKNQDDSLTETDTLEITDQDMFGDASTSLVVPEKVKTPMKSSKTDLQGSASPSKVEGVHTPRQKRSTPLKERQLSKPLSERTNSSDSERSPDLGHSTQIPRKVVYDQLNQILVSDAALPENVILVNTTDWQGQYVAELLQDQRKPVVCTCSTVEVQAVLSALLTRIQRYCNCNSSMPRPVKVAAVGGQSYLSSILRFFVKSLANKTSDWLGYMRFLIIPLGSHPVAKYLGSVDSKYSSSFLDSGWRDLFSRSEPPVSEQLDVAGRVMQYVNGAATTHQLPVAEAMLTCRHKFPDEDSYQKFIPFIGVVKVGLVEDSPSTAGDGDDSPVVSLTVPSTSPPSSSGLSRDATATPPSSPSMSSALAIVGSPNSPYGDVIGLQVDYWLGHPGERRREGDKRDASSKNTLKSVFRSVQVSRLPHSGEAQLSGTMAMTVVTKEKNKKVPTIFLSKKPREKEVDSKSQVIEGISRLICSAKQQQTMLRVSIDGVEWSDIKFFQLAAQWPTHVKHFPVGLFSGSKAT

SEQ ID NO: 31879 - protein, 1008 aa, Homo sapiens
MAERGGAGGGPGGAGGGSGQRGSGVAQSPQQPPPQQQQQQPPQQPTPPKLAQATSSSSSTSAAAASSSSSSTSTSMAVAVASGSAPPGGPGPGRTPAPVQMNLYATWEVDRSSSSCVPRLFSLTLKKLVMLKEMDKDLNSVVIAVKLQGSKRILRSNEIVLPASGLVETELQLTFSLQYPHFLKRDANKLQIMLQRRKRYKNRTILGYKTLAVGLINMAEVMQHPNEGALVLGLHSNVKDVSVPVAEIKIYSLSSQPIDHEGIKSKLSDRSPDIDNYSEEEEESFSSEQEGSDDPLHGQDLFYEDEDLRKVKKTRRKLTSTSAITRQPNIKQKFVALLKRFKVSDEVGFGLEHVSREQIREVEEDLDELYDSLEMYNPSDSGPEMEETESILSTPKPKLKPFFEGMSQSSSQTEIGSLNSKGSLGKDTTSPMELAALEKIKSTWIKNQDDSLTETDTLEITDQDMFGDASTSLVVPEKVKTPMKSSKTDLQGSASPSKVEGVHTPRQKRSTPLKERQLSKPLSERTNSSDSERSPDLGHSTQIPRKVVYDQLNQILVSDAALPENVILVNTTDWQGQYVAELLQDQRKPVVCTCSTVEVQAVLSALLTRIQRYCNCNSSMPRPVKVAAVGGQSYLSSILRFFVKSLANKTSDWLGYMRFLIIPLGSHPVAKYLGSVDSKYSSSFLDSGWRDLFSRSEPPVSEQLDVAGRVMQYVNGAATTHQLPVAEAMLTCRHKFPDEDSYQKFIPFIGVVKVGLVEDSPSTAGDGDDSPVVSLTVPSTSPPSSSGLSRDATATPPSSPSMSSALAIVGSPNSPYGDVIGLQVDYWLGHPGERRREGDKRDASSKNTLKSVFRSVQVSRLPHSGEAQLSGTMAMTVVTKEKNKKVPTIFLSKKPREKEVDSKSQVIEGISRLICSSPSLGPSLGPDPSSQPGFPPAGSFPPCHLPLTNPGSEPLIPDRPCSQEWLRTQGPSPALCTPQPGHLRPTAPLELFSCPLTPSQKFLHRTSF

SEQ ID NO: 31880 - protein, 795 aa, Homo sapiens
MENGGAGTLQIRQVLLFFVLLGMSQAGSETGNFLVMEELQSGSFVGNLAKTLGLEVSELSSRGARVVSNDNKECLQLDTNTGDLLLREMLDREELCGSNEPCVLYFQVLMKNPTQFLQIELQVRDINDHSPVFLEKEMLLEIPENSPVGAVFLLESAKDLDVGINAVKSYTINPNSHFHVKIRVNPDNRKYPELVLDKALDYEERPELSFILTALDGGSPPRSGTALVRVVVVDINDNSPEFEQAFYEVKILENSILGSLVVTVSAWDLDSGTNSELSYTFSHASEDIRKTFEINQKSGDITLTAPLDFEAIESYSIIIQATDGGGLFGKSTVRIQVMDVNDNAPEITVSSITSPIPENTPETVVMVFRIRDRDSGDNGKMVCSIPEDIPFVLKSSVNNYYTLETERPLDRESRAEYNITITVTDLGTPRLKTEHNITVLVSDVNDNAPAFTQTSYALFVRENNSPALHIGSISATDRDSGTNAQVNYSLLPSQDPHLPLASLVSINADNGHLFALRSLDYEALQGFQFRVGATDHGSPALSSEALVRVLVLDANDNSPFVLYPLQNGSAPCTELVPWAAEPGYLVTKVVAVDGDSGQNAWLSYQLLKATEPGLFGVWAHNGEVRTARLLSERDAAKHRLVVLVKDNGEPPRSATATLHVLLVDGFSQPYLPLPEAAPAQAQADSLTVYLVVALASVSSLFLFSVLLFVAVRLCRRSRAAPVGRCSVPEGPFPGHLVDVSGTGTLSQSYHYEVCVTGGSRSNKFKFLKPIIPNFLPQSTGSEVEENPPFQNNLGF

SEQ ID NO: 31881 - protein, 458 aa, Homo sapiens
MDVNDNAPEITVSSITSPIPENTPETVVMVFRIRDRDSGDNGKMVCSIPEDIPFVLKSSVNNYYTLETERPLDRESRAEYNITITVTDLGTPRLKTEHNITVLVSDVNDNAPAFTQTSYALFVRENNSPALHIGSISATDRDSGTNAQVNYSLLPSQDPHLPLASLVSINADNGHLFALRSLDYEALQGFQFRVGATDHGSPALSSEALVRVLVLDANDNSPFVLYPLQNGSAPCTELVPWAAEPGYLVTKVVAVDGDSGQNAWLSYQLLKATEPGLFGVWAHNGEVRTARLLSERDAAKHRLVVLVKDNGEPPRSATATLHVLLVDGFSQPYLPLPEAAPAQAQADSLTVYLVVALASVSSLFLFSVLLFVAVRLCRRSRAAPVGRCSVPEGPFPGHLVDVSGTGTLSQSYHYEVCVTGGSRSNKFKFLKPIIPNFLPQSTGSEVEENPPFQNNLGF

SEQ ID NO: 31882 - protein, 926 aa, Homo sapiens
MTSRFRLPAGRTYNVRASELARDRQHTEVVCNILLLDNTVQAFKVNKHDQGQVLLDVVFKHLDLTEQDYFGLQLADDSTDNPRWLDPNKPIRKQLKRGSPYSLNFRVKFFVSDPNKLQEEYTRYQYFLQIKQDILTGRLPCPSNTAALLASFAVQSELGDYDQSENLSGYLSDYSFIPNQPQDFEKEIAKLHQQHIGLSPAEAEFNYLNTARTLELYGVEFHYARDQSNNEIMIGVMSGGILIYKNRVRMNTFPWLKIVKISFKCKQFFIQLRKELHESRETLLGFNMVNYRACKNLWKACVEHHTFFRLDRPLPPQKNFFAHYFTLGSKFRYCGRTEVQSVQYGKEKANKDRVFARSPSKPLARKLMDWEVVSRNSISDDRLETQSLPSRSPPGTPNHRNSTFTQEGTRLRPSSVGHLVDHMVHTSPSEVFVNQRSPSSTQANSIVLESSPSQETPGDGKPPALPPKQSKKNSWNQIHYSHSQQDLESHINETFDIPSSPEKPTPNGGIPHDNLVLIRMKPDENGRFGFNVKGGYDQKMPVIVSRVAPGTPADLCVPRLNEGDQVVLINGRDIAEHTHDQVVLFIKASCERHSGELMLLVRPNAVYDVVEEKLENEPDFQYIPEKAPLDSVHQDDHSLRESMIQLAEGLITGTVLTQFDQLYRKKPGMTMSCAKLPQNISKNRYRDISPYDATRVILKGNEDYINANYINMEIPSSSIINQYIACQGPLPHTCTDFWQMTWEQGSSMVVMLTTQVERGRVKCHQYWPEPTGSSSYGCYQVTCHSEEGNTAYIFRKMTLFNQEKNESRPLTQIQYIAWPDHGVPDDSSDFLDFVCHVRNKRAGKEEPVVVHCSAGIGRTGVLITMETAMCLIECNQPVYPLDIVRTMRDQRAMMIQTPSQYRFVCEAILKVYEEGFVKPLTTSTNK

SEQ ID NO: 31883 - protein, 787 aa, Homo sapiens
MEPAGERFPEQRQVLILLLLLEVTLAGWEPRRYSVMEETERGSFVANLANDLGLGVGELAERGARVVSEDNEQGLQLDLQTGQLILNEKLDREKLCGPTEPCIMHFQVLLKKPLEVFRAELLVTDINDHSPEFPEREMTLKIPETSSLGTVFPLKKARDLDVGSNNVQNYNISPNSHFHVSTRTRGDGRKYPELVLDTELDREEQAELRLTLTAVDGGSPPRSGTVQILILVLDANDNAPEFVQALYEVQVPENSPVGSLVVKVSARDLDTGTNGEISYSLYYSSQEIDKPFELSSLSGEIRLIKKLDFETMSSYDLDIEASDGGGLSGKCSVSVKVLDVNDNFPELSISSLTSPIPENSPETEVALFRIRDRDSGENGKMICSIQDDVPFKLKPSVENFYRLVTEGALDRETRAEYNITITITDLGTPRLKTEQSITVLVSDVNDNAPAFTQTSYTLFVRENNSPALHIGSVSATDRDSGTNAQVTYSLLPPRDPHLPLTSLVSINTDNGHLFALQSLDYEALQAFEFRVGATDRGFPALSSEALVRVLVLDANDNSPFVLYPLQNGSAPCTELVPRAAEPGYLVTKVVAVDGDSGQNAWLSYQLLKATEPGLFGVWAHNGEVRTARLLSERDVAKHRLVVLVKDNGEPPRSATATLQVLLVDGFSQPYLPLPEAAPAQAQADSLTVYLVVALASVSSLFLFSVFLFVAVRLCRRSRAASVGRCSVPEGPFPGHLVDVSGTGTLSQSYQYEVCLTGGSESNDFKFLKPIFPNIVSQDSRRKSEFLE

SEQ ID NO: 31884 - protein, 189 aa, Homo sapiens
MASKRALVILAKGAEEMETVIPVDVMRRAGIKVTVAGLAGKDPVQCSRDVVICPDASLEDAKKEGPYDVVVLPGGNLGAQNLSESAAVKEILKEQENRKGLIAAICAGPTALLAHEIGFGSKVTTHPLAKDKMMNGGHYTYSENRVEKDGLILTSRGPGTSFEFALAIVEALNGKEVAAQVKAPLVLKD

SEQ ID NO: 31885 - protein, 565 aa, Homo sapiens
MNYEGARSERENHAADDSEGGALDMCCSERLPGLPQPIVMEALDEAEGLQDSQREMPPPPPPSPPSDPAQKPPPRGAGSHSLTVRSSLCLFAASQFLLACGVLWFSGYGHIWSQNATNLVSSLLTLLKQLEPTAWLDSGTWGVPSLLLVFLSVGLVLVTTLVWHLLRTPPEPPTPLPPEDRRQSVSRQPSFTYSEWMEEKIEDDFLDLDPVPETPVFDCVMDIKPEADPTSLTVKSMGLQERRGSNVSLTLDMCTPGCNEEGFGYLMSPREESAREYLLSASRVLQAEELHEKALDPFLLQAEFFEIPMNFVDPKEYDIPGLVRKNRYKTILPNPHSRVCLTSPDPDDPLSSYINANYIRGYGGEEKVYIATQGPIVSTVADFWRMVWQEHTPIIVMITNIEEMNEKCTEYWPEEQVAYDGVEITVQKVIHTEDYRLRLISLKSGTEERGLKHYWFTSWPDQKTPDRAPPLLHLVREVEEAAQQEGPHCAPIIVHCSAGIGRTGCFIATSICCQQLRQEGVVDILKTTCQLRQDRGGMIQTCEQYQFVHHVMSLYEKQLSHQSPE

SEQ ID NO: 31886 - protein, 533 aa, Homo sapiens
MNYEGARSERENHAADDSEGGALDMCCSERLPGLPQPIVMEALDEAEGLQDSQREMPPPPPPSPPSDPAQKPPPRGAGSHSLTVRSSLCLFAASQFLLEPTAWLDSGTWGVPSLLLVFLSVGLVLVTTLVWHLLRTPPEPPTPLPPEDRRQSVSRQPSFTYSEWMEEKIEDDFLDLDPVPETPVFDCVMDIKPEADPTSLTVKSMGLQERRGSNVSLTLDMCTPGCNEEGFGYLMSPREESAREYLLSASRVLQAEELHEKALDPFLLQAEFFEIPMNFVDPKEYDIPGLVRKNRYKTILPNPHSRVCLTSPDPDDPLSSYINANYIRGYGGEEKVYIATQGPIVSTVADFWRMVWQEHTPIIVMITNIEEMNEKCTEYWPEEQVAYDGVEITVQKVIHTEDYRLRLISLKSGTEERGLKHYWFTSWPDQKTPDRAPPLLHLVREVEEAAQQEGPHCAPIIVHCSAGIGRTGCFIATSICCQQLRQEGVVDILKTTCQLRQDRGGMIQTCEQYQFVHHVMSLYEKQLSHQSPE

SEQ ID NO: 31887 - protein, 541 aa, Homo sapiens
MCCSERLPGLPQPIVMEALDEAEGLQDSQREMPPPPPPSPPSDPAQKPPPRGAGSHSLTVRSSLCLFAASQFLLACGVLWFSGYGHIWSQNATNLVSSLLTLLKQLEPTAWLDSGTWGVPSLLLVFLSVGLVLVTTLVWHLLRTPPEPPTPLPPEDRRQSVSRQPSFTYSEWMEEKIEDDFLDLDPVPETPVFDCVMDIKPEADPTSLTVKSMGLQERRGSNVSLTLDMCTPGCNEEGFGYLMSPREESAREYLLSASRVLQAEELHEKALDPFLLQAEFFEIPMNFVDPKEYDIPGLVRKNRYKTILPNPHSRVCLTSPDPDDPLSSYINANYIRGYGGEEKVYIATQGPIVSTVADFWRMVWQEHTPIIVMITNIEEMNEKCTEYWPEEQVAYDGVEITVQKVIHTEDYRLRLISLKSGTEERGLKHYWFTSWPDQKTPDRAPPLLHLVREVEEAAQQEGPHCAPIIVHCSAGIGRTGCFIATSICCQQLRQEGVVDILKTTCQLRQDRGGMIQTCEQYQFVHHVMSLYEKQLSHQSPE

SEQ ID NO: 31888 - protein, 734 aa, Homo sapiens
MWKTWLQGGARVIFDDYKPYLRLDPQNGDLLLNEQLDREALCDLTEPCILHFQVLFENPLQFFRAELLVKDINDHTPTFLNNHMLLKISEGATLGTLFQIDSAQDLDVGKNGVQNYTISPNPHFHLKLRDSDEGRKYPELVLDQSLDREKVSEFSLTLTAVDGGSPPRSGTTLINVVVLDISDNAPEFEKPVYEVLVPESSPLDSLIIKASATDLDAGINGELSYSFSHVSRDVRKTFEIHPISGEVYLKAPLDFEIIQSYIINIQAIEGGSLSGKSSILVRVVDVNDNPPEIAMTSLTSPIPENSSPEMVVAVFSIRDQDAGDNGRTVCSIQDNLPFVLKPTFKNFYALVTEHPLDREVRNEYNITITVTDLGTPRLKTEHNITVLVSDVNDNAPIFTQTSYTLFVRENNSPALHIGSVSATDRDSGTNAQVTYSLLPPQDPHLPLTSLVSINADNGHLFALRSLDYEALQEFGFRVGAADHGSPALSSEVLVRVLVLDANDNSPFVLYPLQNGSAPCTELVPRAAEPGYLVTKVVAVDGDSGQNAWLSYQLLKATEPGLFGVWAHNGEGRTARLLSERDAAKHRLVVLVKDNGEPPRSATATLHVLLVEGFSQPYLPLTEAAPSQAQADSLTVYLVVALASVSSLFLFSVFLFVAVRLCRRSRAASMGRCSVPECPFPGHLVDVSGTGTLSQSYQYEVCLTGGSGANEFKFLKPVIPNLLSRDSEMEKAPPF

SEQ ID NO: 31889 - protein, 931 aa, Homo sapiens
MASPPRGWGCGELLLPFMLLGTLCEPGSGQIRYSMPEELDKGSFVGNIAKDLGLEPQELAERGVRIVSRGRTQLFALNPRSGSLVTAGRIDREELCAQSPLCVVNFNILVENKMKIYGVEVEIIDINDNFPRFRDEELKVKVNENAAAGTRLVLPFARDADVGVNSLRSYQLSSNLHFSLDVVSGTDGQKYPELVLEQPLDREKETVHDLLLTALDGGDPVLSGTTHIRVTVLDANDNAPLFTPSEYSVSVPENIPVGTRLLMLTATDPDEGINGKLTYSFRNEEEKISETFQLDSNLGEISTLQSLDYEESRFYLMEVVAQDGGALVASAKVVVTVQDVNDNAPEVILTSLTSSISEDCLPGTVIALFSVHDGDSGENGEIACSIPRNLPFKLEKSVDNYYHLLTTRDLDREETSDYNITLTVMDHGTPPLSTESHIPLKVADVNDNPPNFPQASYSTSVTENNPRGVSIFSVTAHDPDSGDNARVTYSLAEDTFQGAPLSSYVSINSDTGVLYALRSFDYEQLRDLQLWVTASDSGNPPLSSNVSLSLFVLDQNDNTPEILYPALPTDGSTGVELAPRSAEPGYLVTKVVAVDKDSGQNAWLSYRLLKASEPGLFAVGLHTGEVRTARALLDRDALKQSLVVAVEDHGQPPLSATFTVTVAVADRIPDILADLGSIKTPIDPEDLDLTLYLVVAVAAVSCVFLAFVIVLLVLRLRRWHKSRLLQAEGSRLAGVPASHFVGVDGVRAFLQTYSHEVSLTADSRKSHLIFPQPNYADTLLSEESCEKSEPLLMSDKVDANKEERRVQQAPPNTDWRFSQAQRPGTSGSQNGDDTGTWPNNQFDTEMLQAMILASASEAADGSSTLGGGAGTMGLSARYGPQFTLQHVPDYRQNVYIPGSNATLTNAAGKRDGKAPAGGNGNKKKSGKKEKK

SEQ ID NO: 31890 - protein, 813 aa, Homo sapiens
MASPPRGWGCGELLLPFMLLGTLCEPGSGQIRYSMPEELDKGSFVGNIAKDLGLEPQELAERGVRIVSRGRTQLFALNPRSGSLVTAGRIDREELCAQSPLCVVNFNILVENKMKIYGVEVEIIDINDNFPRFRDEELKVKVNENAAAGTRLVLPFARDADVGVNSLRSYQLSSNLHFSLDVVSGTDGQKYPELVLEQPLDREKETVHDLLLTALDGGDPVLSGTTHIRVTVLDANDNAPLFTPSEYSVSVPENIPVGTRLLMLTATDPDEGINGKLTYSFRNEEEKISETFQLDSNLGEISTLQSLDYEESRFYLMEVVAQDGGALVASAKVVVTVQDVNDNAPEVILTSLTSSISEDCLPGTVIALFSVHDGDSGENGEIACSIPRNLPFKLEKSVDNYYHLLTTRDLDREETSDYNITLTVMDHGTPPLSTESHIPLKVADVNDNPPNFPQASYSTSVTENNPRGVSIFSVTAHDPDSGDNARVTYSLAEDTFQGAPLSSYVSINSDTGVLYALRSFDYEQLRDLQLWVTASDSGNPPLSSNVSLSLFVLDQNDNTPEILYPALPTDGSTGVELAPRSAEPGYLVTKVVAVDKDSGQNAWLSYRLLKASEPGLFAVGLHTGEVRTARALLDRDALKQSLVVAVEDHGQPPLSATFTVTVAVADRIPDILADLGSIKTPIDPEDLDLTLYLVVAVAAVSCVFLAFVIVLLVLRLRRWHKSRLLQAEGSRLAGVPASHFVGVDGVRAFLQTYSHEVSLTADSRKSHLIFPQPNYADTLLSEESCEKSEPLLMSDKVDANKEERRVQVSFLFR

SEQ ID NO: 31891 - protein, 1445 aa, Homo sapiens
MAYSWQTDPNPNESHEKQYEHQEFLFVNQPHSSSQVSLGFDQIVDEISGKIPHYESEIDENTFFVPTAPKWDSTGHSLNEAHQISLNEFTSKSRELSWHQVSKAPAIGFSPSVLPKPQNTNKECSWGSPIGKHHGADDSRFSILAPSFTSLDKINLEKELENENHNYHIGFESSIPPTNSSFSSDFMPKEENKRSGHVNIVEPSLMLLKGSLQPGMWESTWQKNIESIGCSIQLVEVPQSSNTSLASFCNKVKKIRERYHAADVNFNSGKIWSTTTAFPYQLFSKTKFNIHIFIDNSTQPLHFMPCANYLVKDLIAEILHFCTNDQLLPKDHILSVCGSEEFLQNDHCLGSHKMFQKDKSVIQLHLQKSREAPGKLSRKHEEDHSQFYLNQLLEFMHIWKVSRQCLLTLIRKYDFHLKYLLKTQENVYNIIEEVKKICSVLGCVETKQITDAVNELSLILQRKGENFYQSSETSAKGLIEKVTTELSTSIYQLINVYCNSFYADFQPVNVPRCTSYLNPGLPSHLSFTVYAAHNIPETWVHRINFPLEIKSLPRESMLTVKLFGIACATNNANLLAWTCLPLFPKEKSILGSMLFSMTLQSEPPVEMITPGVWDVSQPSPVTLQIDFPATGWEYMKPDSEENRSNLEEPLKECIKHIARLSQKQTPLLLSEEKKRYLWFYRFYCNNENCSLPLVLGSAPGWDERTVSEMHTILRRWTFSQPLEALGLLTSSFPDQEIRKVAVQQLDNLLNDELLEYLPQLVQAVKFEWNLESPLVQLLLHRSLQSIQVAHRLYWLLKNAENEAYFKSWYQKLLAALQFCAGKALNDEFSKEQKLIKILGDIGERVKSASDHQRQEVLKKEIGRLEEFFQDVNTCHLPLNPALCIKGIDHDACSYFTSNALPLKITFINANPMGKNISIIFKAGDDLRQDMLVLQLIQVMDNIWLQEGLDMQMIIYRCLSTGKDQGLVQMVPDAVTLAKIHRHSGLIGPLKENTIKKWFSQHNHLKADYEKALRNFFYSCAGWCVVTFILGVCDRHNDNIMLTKSGHMFHIDFGKFLGHAQTFGGIKRDRAPFIFTSEMEYFITEGGKNPQHFQDFVELCCRAYNIIRKHSQLLLNLLEMMLYAGLPELSGIQDLKYVYNNLRPQDTDLEATSHFTKKIKESLECFPVKLNNLIHTLAQMSAISPAKSTSQTFPQESCLLSTTRSIERATILGFSKKSSNLYLIQVTHSNNETSLTEKSFEQFSKLHSQLQKQFASLTLPEFPHWWHLPFTNSDHRRFRDLNHYMEQILNVSHEVTNSDCVLSFFLSEAVQQTVEESSPVYLGEKFPDKKPKVQLVISYEDVKLTILVKHMKNIHLPDGSAPSAHVEFYLLPYPSEVRRRKTKSVPKCTDPTYNEIVVYDEVTELQGHVLMLIVKSKTVFVGAINIRLCSVPLDKEKWYPLGNSII

SEQ ID NO: 31892 - protein, 310 aa, Homo sapiens
MVYKTLFALCILTAGWRVQSLPTSAPLSVSLPTNIVPPTTIWTSSPQNTDADTASPSNGTHNNSVLPVTASAPTSLLPKNISIESREEEITSPGSNWEGTNTDPSPSGFSSTSGGVHLTTTLEEHSSGTPEAGVAATLSQSAAEPPTLISPQAPASSPSSLSTSPPEVFSASVTTNHSSTVTSTQPTGAPTAPESPTEESSSDHTPTSHATAEPVPQEKTPPTTVSGKVMCELIDMETTTTFPRVIMQEVEHALSSGSIAAITVTVIAVVLLVFGVAAYLKIRHSSYGRLLDDHDYGSWGNYNNPLYDDS

SEQ ID NO: 31893 - protein, 640 aa, Homo sapiens
MAALYRPGLRLNWHGLSPLGWPSCRSIQTLRVLSGDLGQLPTGIRDFVEHSARLCQPEGIHICDGTEAENTATLTLLEQQGLIRKLPKYNNCWLARTDPKDVARVESKTVIVTPSQRDTVPLPPGGARGQLGNWMSPADFQRAVDERFPGCMQGRTMYVLPFSMGPVGSPLSRIGVQLTDSAYVVASMRIMTRLGTPVLQALGDGDFVKCLHSVGQPLTGQGEPVSQWPCNPEKTLIGHVPDQREIISFGSGYGGNSLLGKKCFALRIASRLARDEGWLAEHMLILGITSPAGKKRYVAAAFPSACGKTNLAMMRPALPGWKVECVGDDIAWMRFDSEGRLRAINPENGFFGVAPGTSATTNPNAMATIQSNTIFTNVAETSDGGVYWEGIDQPLPPGVTVTSWLGKPWKPGDKEPCAHPNSRFCAPARQCPIMDPAWEAPEGVPIDAIIFGGRRPKGVPLVYEAFNWRHGVFVGSAMRSESTAAAEHKGKIIMHDPFAMRPFFGYNFGHYLEHWLSMEGRKGAQLPRIFHVNWFRRDEAGHFLWPGFGENARVLDWICRRLEGEDSARETPIGLVPKEGALDLSGLRAIDTTQLFSLPKDFWEQEVRDIRSYLTEQVNQDLPKEVLAELEALERRVHKM

SEQ ID NO: 31894 - protein, 441 aa, Homo sapiens
MAALYRPGLRLNWHGLSPLGWPSCRSIQTLRVLSGDLGQLPTGIRDFVEHSARLCQPEGIHICDGTEAENTATLTLLEQQGLIRKLPKYNNCWLARTDPKDVARVESKTVIVTPSQRDTVPLPPGGARGQLGNWMSPADFQRAVDERFPGCMQGRTMYVLPFSMGPVGSPLSRIGVQLTDSAYVVASMRIMTRLGTPVLQALGDGDFVKCLHSVGQPLTGQGEPVSQWPCNPEKTLIGHVPDQREIISFGSGYGGNSLLGKKCFALRIASRLARDEGWLAEHMLILGITSPAGKKRYVAAAFPSACGKTNLAMMRPALPGWKVECVGDDIAWMRFDSEGRLRAINPENGFFGVAPGTSATTNPNAMATIQSNTIFTNVAETSDGGVYWEGIDQPLPPGVTVTSWLGKPWKPGMCGGEGVAQPPGLSTLMVEKLSPQPPTIF

SEQ ID NO: 31895 - protein, 506 aa, Homo sapiens
MSPADFQRAVDERFPGCMQGRTMYVLPFSMGPVGSPLSRIGVQLTDSAYVVASMRIMTRLGTPVLQALGDGDFVKCLHSVGQPLTGQGEPVSQWPCNPEKTLIGHVPDQREIISFGSGYGGNSLLGKKCFALRIASRLARDEGWLAEHMLILGITSPAGKKRYVAAAFPSACGKTNLAMMRPALPGWKVECVGDDIAWMRFDSEGRLRAINPENGFFGVAPGTSATTNPNAMATIQSNTIFTNVAETSDGGVYWEGIDQPLPPGVTVTSWLGKPWKPGDKEPCAHPNSRFCAPARQCPIMDPAWEAPEGVPIDAIIFGGRRPKGVPLVYEAFNWRHGVFVGSAMRSESTAAAEHKGKIIMHDPFAMRPFFGYNFGHYLEHWLSMEGRKGAQLPRIFHVNWFRRDEAGHFLWPGFGENARVLDWICRRLEGEDSARETPIGLVPKEGALDLSGLRAIDTTQLFSLPKDFWEQEVRDIRSYLTEQVNQDLPKEVLAELEALERRVHKM

SEQ ID NO: 31896 - protein, 930 aa, Homo sapiens
MGGSCAQRRRAGPRQVLFPLLLPLFYPTLSEPIRYSIPEELAKGSVVGNLAKDLGLSVLDVSARKLRVSAEKLHFSVDAESGDLLVKNRIDREQICKERRRCELQLEAVVENPLNIFHVIVVIEDVNDHAPQFDKKEIHLEIFESASAGTRLSLDPATDPDININSIKDYKINSNPYFSLMVRVNSDGGKYPELSLEKLLDREEQRSHSLILTALDGGDPPRSATAHIEISVKDTNDNPPVFSRDEYRISLSENLPPGSPVLQVTATDQDEGVNAEINYYFRSTAQSTKHMFSLDEKTGMIKNNQSFDFEDVERYTMEVEAKDGGGLSTQCKVIIEILDENDNSPEIIITSLSDQILENSPPGMVVALFKTRDLDFGGNGEVRCNIETDIPFKIYSSSNNYYKLVTDGALDREQTPEYNVTIVATDRGKPPLSSSRSITLYVADINDNAPVFDQTSYVVHVAENNPPGASIAQVSASDPDLGLNGHISYSIVASDLEPLAVSSYVSVSAQSGVVFAQRAFDHEQLRAFALTLQARDHGSPTLSANVSLRVLVGDRNDNAPRVLYPALGPDGSAFFDMVPRSAEPGYLVTKVVAVDADSGHNAWLSYHVLQASEPGLFSLGLRTGEVRTARALGDRDAARQRLLVAVRDGGQPPLSATATLHLVFADNLQEILPDLSDRPVLSDPQAELQFYLVVALALISVLFLLAVILAIALRLRRSLSPATWDCFHPGLCVKSGPVVPPNYSEGTLPYSYNLCIAHTGTKEFNFLKCSVPLHSNEDMVCSVSPGALIPPHGGEDLTSHPETLTSQAPPNTDWRFSQAQRPGTSGSQNGDDTGTWPNNQFDTEMLQAMILASASEAADGSSTLGGGAGTMGLSARYGPQFTLQHVPDYRQNVYIPGSNATLTNAAGKRDGKAPAGGNGNKKKSGKKEKK

SEQ ID NO: 31897 - protein, 820 aa, Homo sapiens
MGGSCAQRRRAGPRQVLFPLLLPLFYPTLSEPIRYSIPEELAKGSVVGNLAKDLGLSVLDVSARKLRVSAEKLHFSVDAESGDLLVKNRIDREQICKERRRCELQLEAVVENPLNIFHVIVVIEDVNDHAPQFDKKEIHLEIFESASAGTRLSLDPATDPDININSIKDYKINSNPYFSLMVRVNSDGGKYPELSLEKLLDREEQRSHSLILTALDGGDPPRSATAHIEISVKDTNDNPPVFSRDEYRISLSENLPPGSPVLQVTATDQDEGVNAEINYYFRSTAQSTKHMFSLDEKTGMIKNNQSFDFEDVERYTMEVEAKDGGGLSTQCKVIIEILDENDNSPEIIITSLSDQILENSPPGMVVALFKTRDLDFGGNGEVRCNIETDIPFKIYSSSNNYYKLVTDGALDREQTPEYNVTIVATDRGKPPLSSSRSITLYVADINDNAPVFDQTSYVVHVAENNPPGASIAQVSASDPDLGLNGHISYSIVASDLEPLAVSSYVSVSAQSGVVFAQRAFDHEQLRAFALTLQARDHGSPTLSANVSLRVLVGDRNDNAPRVLYPALGPDGSAFFDMVPRSAEPGYLVTKVVAVDADSGHNAWLSYHVLQASEPGLFSLGLRTGEVRTARALGDRDAARQRLLVAVRDGGQPPLSATATLHLVFADNLQEILPDLSDRPVLSDPQAELQFYLVVALALISVLFLLAVILAIALRLRRSLSPATWDCFHPGLCVKSGPVVPPNYSEGTLPYSYNLCIAHTGTKEFNFLKCSVPLHSNEDMVCSVSPGALIPPHGGEDLTSHPETLTSVSFSFLCVIYLIVY

SEQ ID NO: 31898 - protein, 459 aa, Homo sapiens
MEGSASPPEKPRARPAAAVLCRGPVEPLVFLANFALVLQGPLTTQYLWHRFSADLGYNGTRQRGGCSNRSADPTMQEVETLTSHWTLYMNVGGFLVGLFSSTLLGAWSDSVGRRPLLVLASLGLLLQALVSVFVVQLQLHVGYFVLGRILCALLGDFGGLLAASFASVADVSSSRSRTFRMALLEASIGVAGMLASLLGGHWLRAQGYANPFWLALALLIAMTLYAAFCFGETLKEPKSTRLFTFRHHRSIVQLYVAPAPEKSRKHLALYSLAIFVVITVHFGAQDILTLYELSTPLCWDSKLIGYGSAAQHLPYLTSLLALKLLQYCLADAWVAEIGLAFNILGMVVFAFATITPLMFTGYGLLFLSLVITPVIRAKLSKLVRETEQGALFSAVACVNSLAMLTASGIFNSLYPATLNFMKGFPFLLGAGLLLIPAVLIGMLEKADPHLEFQQFPQSP

SEQ ID NO: 31899 - protein, 431 aa, Homo sapiens
MEGSASPPEKPRARPAAAVLCRGPVEPLVFLANFALVLQGPLTTQYLWHRFSADLGYNGTRQRGGCSNRSADPTMQEVETLTSHWTLYMNVGGFLVGLFSSTLLGAWSDSVGRRPLLVLASLGLLLQALVSVFVVQLQLHVGYFVLGRILCALLGDFGGLLAASFASVADVSSSRSRTFRMALLEASIGVAGMLASLLGGHWLRAQGYANPFWLALALLIAMTLYAAFCFGETLKEPKSTRLFTFRHHRSIVQLYVAPAPEKSRKHLALYSLAIFVVITVHFGAQDILTLYELSTPLCWDSKLIGYGSAAQHLPYLTSLLALKLLQYCLADAWVAEIGLAFNILGMVVFAFATITPLMFTGALFSAVACVNSLAMLTASGIFNSLYPATLNFMKGFPFLLGAGLLLIPAVLIGMLEKADPHLEFQQFPQSP

SEQ ID NO: 31900 - protein, 314 aa, Homo sapiens
MRIAVICFCLLGITCAIPVKQADSGSSEEKQLYNKYPDAVATWLNPDPSQKQNLLAPQNAVSSEETNDFKQETLPSKSNESHDHMDDMDDEDDDDHVDSQDSIDSNDSDDVDDTDDSHQSDESHHSDESDELVTDFPTDLPATEVFTPVVPTVDTYDGRGDSVVYGLRSKSKKFRRPDIQYPDATDEDITSHMESEELNGAYKAIPVAQDLNAPSDWDSRGKDSYETSQLDDQSAETHSHKQSRLYKRKANDESNEHSDVIDSQELSKVSREFHSHEFHSHEDMLVVDPKSKEEDKHLKFRISHELDSASSEVN

SEQ ID NO: 31901 - protein, 287 aa, Homo sapiens
MRIAVICFCLLGITCAIPVKQADSGSSEEKQNAVSSEETNDFKQETLPSKSNESHDHMDDMDDEDDDDHVDSQDSIDSNDSDDVDDTDDSHQSDESHHSDESDELVTDFPTDLPATEVFTPVVPTVDTYDGRGDSVVYGLRSKSKKFRRPDIQYPDATDEDITSHMESEELNGAYKAIPVAQDLNAPSDWDSRGKDSYETSQLDDQSAETHSHKQSRLYKRKANDESNEHSDVIDSQELSKVSREFHSHEFHSHEDMLVVDPKSKEEDKHLKFRISHELDSASSEVN

SEQ ID NO: 31902 - protein, 292 aa, Homo sapiens
MRIAVICFCLLGITCAIPVKQADSGSSEEKQLYNKYPDAVATWLNPDPSQKQNLLAPQNAVSSEETNDFKQETLPSKSNESHDHMDDMDDEDDDSHQSDESHHSDESDELVTDFPTDLPATEVFTPVVPTVDTYDGRGDSVVYGLRSKSKKFRRPDIQYPDATDEDITSHMESEELNGAYKAIPVAQDLNAPSDWDSRGKDSYETSQLDDQSAETHSHKQSRLYKRKANDESNEHSDVIDSQELSKVSREFHSHEFHSHEDMLVVDPKSKEEDKHLKFRISHELDSASSEVN

SEQ ID NO: 31903 - protein, 300 aa, Homo sapiens
MRIAVICFCLLGITCAIPVKQADSGSSEEKQLYNKYPDAVATWLNPDPSQKQNLLAPQTLPSKSNESHDHMDDMDDEDDDDHVDSQDSIDSNDSDDVDDTDDSHQSDESHHSDESDELVTDFPTDLPATEVFTPVVPTVDTYDGRGDSVVYGLRSKSKKFRRPDIQYPDATDEDITSHMESEELNGAYKAIPVAQDLNAPSDWDSRGKDSYETSQLDDQSAETHSHKQSRLYKRKANDESNEHSDVIDSQELSKVSREFHSHEFHSHEDMLVVDPKSKEEDKHLKFRISHELDSASSEVN

SEQ ID NO: 31904 - protein, 375 aa, Homo sapiens
MSSHKGSVVAQGNGAPASNREADTVELAELGPLLEEKGKRVIANPPKAEEEQTCPVPQEEEEEVRVLTLPLQAHHAMEKMEEFVYKVWEGRWRVIPYDVLPDWLKDNDYLLHGHRPPMPSFRACFKSIFRIHTETGNIWTHLLGFVLFLFLGILTMLRPNMYFMAPLQEKVVFGMFFLGAVLCLSFSWLFHTVYCHSEKVSRTFSKLDYSGIALLIMGSFVPWLYYSFYCSPQPRLIYLSIVCVLGISAIIVAQWDRFATPKHRQTRAGVFLGLGLSGVVPTMHFTIAEGFVKATTVGQMGWFFLMAVMYITGAGLYAARIPERFFPGKFDIWFQSHQIFHVLVVAAAFVHFYGVSNLQEFRYGLEGGCTDDTLL

SEQ ID NO: 31905 - protein, 334 aa, Homo sapiens
MEPGPTAAQRRCSLPPWLPLGLLLWSGLALGALPFGSSPHRVFHDLLSEQQLLEVEDLSLSLLQGGGLGPLSLPPDLPDLDPECRELLLDFANSSAELTGCLVRSARPVRLCQTCYPLFQQVVSKMDNISRAAGNTSESQSCARSLLMADRMQIVVILSEFFNTTWQEANCANCLTNNSEELSNSTVYFLNLFNHTLTCFEHNLQGNAHSLLQTKNYSEVCKNCREAYKTLSSLYSEMQKMNELENKAEPGTHLCIDVEDAMNITRKLWSRTFNCSVPCSDTVPVIAVSVFILFLPVVFYLSSFLHSEQKKRKLILPKRLKSSTSFANIQENSN

SEQ ID NO: 31906 - protein, 168 aa, Homo sapiens
MKKFFTVAILAGSVLSTAHGSLLNLKAMVEAVTGRSAILSFVGYGCYCGLGGRGQPKDEVDWCCHAHDCCYQELFDQGCHPYVDHYDHTIENNTEIVCSDLNKTECDKQTCMCDKNMVLCLMNQTYREEYRGFLNVYCQGPTPNCSIYEPPPEEVTCSHQSPAPPAPP

SEQ ID NO: 31907 - protein, 211 aa, Homo sapiens
MADGAKANPKGFKKKVLDRCFSGWRGPRFGASCPSRTSRSSLGMKKFFTVAILAGSVLSTAHGSLLNLKAMVEAVTGRSAILSFVGYGCYCGLGGRGQPKDEVDWCCHAHDCCYQELFDQGCHPYVDHYDHTIENNTEIVCSDLNKTECDKQTCMCDKNMVLCLMNQTYREEYRGFLNVYCQGPTPNCSIYEPPPEEVTCSHQSPAPPAPP

SEQ ID NO: 31908 - protein, 233 aa, Homo sapiens
MAATSGTDEPVSGELVSVAHALSLPAESYGNDPDIEMAWAMRAMQHAEVYYKLISSVDPQFLKLTKVDDQIYSEFRKNFETLRIDVLDPEELKSESAKEKWRPFCLKFNGIVEDFNYGTLLRLDCSQGYTEENTIFAPRIQFFAIEIARNREGYNKAVYISVQDKEGEKGVNNGGEKRADSGEEENTKNGGEKGADSGEEKEEGINREDKTDKGGEKGKEADKEINKSGEKAM

SEQ ID NO: 31909 - protein, 731 aa, Homo sapiens
MASCPDSDNSWVLAGSESLPVETLGPASRMDPESERALQAPHSPSKTDGKELAGTMDGEGTLFQTESPQSGSILTEETEVKGTLEGDVCGVEPPGPGDTVVQGDLQETTVVTGLGPDTQDLEGQSPPQSLPSTPKAAWIREEGRCSSSDDDTDVDMEGLRRRRGREAGPPQPMVPLAVENQAGGEGAGGELGISLNMCLLGALVLLGLGVLLFSGGLSESETGPMEEVERQVLPDPEVLEAVGDRQDGLREQLQAPVPPDSVPSLQNMGLLLDKLAKENQDIRLLQAQLQAQKEELQSLMHQPKGLEEENAQLRGALQQGEAFQRALESELQQLRARLQGLEADCVRGPDGVCLSGGRGPQGDKAIREQGPREQEPELSFLKQKEQLEAEAQALRQELERQRRLLGSVQQDLERSLQDASRGDPAHAGLAELGHRLAQKLQGLENWGQDPGVSANASKAWHQKSHFQNSREWSGKEKWWDGQRDRKAEHWKHKKEESGRERKKNWGGQEDREPAGRWKEGRPRVEESGSKKEGKRQGPKEPPRKSGSFHSSGEKQKQPRWREGTKDSHDPLPSWAELLRPKYRAPQGCSGVDECARQEGLTFFGTELAPVRQQELASLLRTYLARLPWAGQLTKELPLSPAFFGEDGIFRHDRLRFRDFVDALEDSLEEVAVQQTGDDDEVDDFEDFIFSHFFGDKALKKRSGKKDKHSQSPRAAGPREGHSHSHHHHHRG

SEQ ID NO: 31910 - protein, 702 aa, Homo sapiens
MDPESERALQAPHSPSKTDGKELAGTMDGEGTLFQTESPQSGSILTEETEVKGTLEGDVCGVEPPGPGDTVVQGDLQETTVVTGLGPDTQDLEGQSPPQSLPSTPKAAWIREEGRCSSSDDDTDVDMEGLRRRRGREAGPPQPMVPLAVENQAGGEGAGGELGISLNMCLLGALVLLGLGVLLFSGGLSESETGPMEEVERQVLPDPEVLEAVGDRQDGLREQLQAPVPPDSVPSLQNMGLLLDKLAKENQDIRLLQAQLQAQKEELQSLMHQPKGLEEENAQLRGALQQGEAFQRALESELQQLRARLQGLEADCVRGPDGVCLSGGRGPQGDKAIREQGPREQEPELSFLKQKEQLEAEAQALRQELERQRRLLGSVQQDLERSLQDASRGDPAHAGLAELGHRLAQKLQGLENWGQDPGVSANASKAWHQKSHFQNSREWSGKEKWWDGQRDRKAEHWKHKKEESGRERKKNWGGQEDREPAGRWKEGRPRVEESGSKKEGKRQGPKEPPRKSGSFHSSGEKQKQPRWREGTKDSHDPLPSWAELLRPKYRAPQGCSGVDECARQEGLTFFGTELAPVRQQELASLLRTYLARLPWAGQLTKELPLSPAFFGEDGIFRHDRLRFRDFVDALEDSLEEVAVQQTGDDDEVDDFEDFIFSHFFGDKALKKRSGKKDKHSQSPRAAGPREGHSHSHHHHHRG

SEQ ID NO: 31911 - protein, 662 aa, Homo sapiens
MASCPDSDNSWVLAGSESLPVETLGPASRMDPESERALQAPHSPSKTDGKELAGTMDGEGTLFQTESPQSGSILTEETEVKGTLEGDVCGVEPPGPGDTVVQGDLQETTVVTGLGPDTQDLEGQSPPQSLPSTPKAAWIREEGRCSSSDDDTDVDMEGLRRRRGREAGPPQPMVPLAVENQAGGEGAGGELGISLNMCLLGALVLLGLGVLLFSGGLSESETGPMEEVERQVLPDPEVLEAVGDRQDGLREQLQAPVPPDSVPSLQNMGLLLDKLAKENQDIRLLQAQLQAQKEELQSLMHQPKGLEEENAQLRGALQQGEAFQRALESELQQLRARLQGLEADCVRGPDGVCLSGGRGPQGDKAIREQGPREQEPELSFLKQKEQLEAEAQALRQELERQRRLLGSVQQDLERSLQDASRGDPAHAGLAELGHRLAQKLQGLENWGQDPGVSANASKAWHQKSHFQNSREWSGKEKWWDGQRDRKAEHWKHKKEESGRERKKNWGGQEDREPAGRWKEGRPRVEESGSKKEGKRQGPKEPPRKSGSFHSSGEKQKQPRWREGTKELPLSPAFFGEDGIFRHDRLRFRDFVDALEDSLEEVAVQQTGDDDEVDDFEDFIFSHFFGDKALKKRSGKKDKHSQSPRAAGPREGHSHSHHHHHRG

SEQ ID NO: 31912 - protein, 247 aa, Homo sapiens
MAQEKMELDLEPDTSYGGTLRRSSSAPLIHGLSDLSQVFQPYTLRTRRNSTTIMSRHSLEEGLDMVNRETAHEREMQTAMQISQSWDESLSLSDSDFDKPEKLYSPKRIDFTPVSPAPSPTRGFGKMFVSSSGLPPSPVPSPRRFSRRSQSPVKCIRPSVLGPLKRKGEMETESQPKRLFQGTTNMLSPDAAQLSDLSSCSDILDGSSSSSGLSSDPLAKGSATAESPVACSNSCSSFILMDDLSPK

SEQ ID NO: 31913 - protein, 248 aa, Homo sapiens
MAQEKMELDLEPDTSYGGTLRRSSSAPLIHGLSDLSQVFQPYTLRTRRNSTTIMSRHSLEEGLDMVNRETAHEREMQTAMQISQSWDESLSLSDSDFDKPEKLYSPKRIDFTPVSPAPSPTRGFGKMFVSSSGLPPSPVPSPRRFSSRRSQSPVKCIRPSVLGPLKRKGEMETESQPKRLFQGTTNMLSPDAAQLSDLSSCSDILDGSSSSSGLSSDPLAKGSATAESPVACSNSCSSFILMDDLSPK

SEQ ID NO: 31914 - protein, 266 aa, Homo sapiens
MAQEKMELDLEPDTSYGGTLRRSSSAPLIHGLSDLSQVFQPYTLRTRRNSTTIMSRHSLLLSSSPNRIPSSRLHQIKREEGLDMVNRETAHEREMQTAMQISQSWDESLSLSDSDFDKPEKLYSPKRIDFTPVSPAPSPTRGFGKMFVSSSGLPPSPVPSPRRFSRRSQSPVKCIRPSVLGPLKRKGEMETESQPKRLFQGTTNMLSPDAAQLSDLSSCSDILDGSSSSSGLSSDPLAKGSATAESPVACSNSCSSFILMDDLSPK

SEQ ID NO: 31915 - protein, 241 aa, Homo sapiens
MAQEKMELDLEPDTSYGGTLRRSSSAPLIHGLSDLSQVFQPYTLRTRRNSTTIMSRHSLLLSSSPNRIPSSRLHQIKREEGLDMVNRETAHEREMQTAMQISQSWDESLSLSDSDFDKPEKLYSPKRIDFTPVSPAPSPTRGFGKMFVSSSGLPPSPVPSPRRFSRRSQSPVKCIRPSVLGPLKRKGEMETESQPKRLFQGTTNMLSPDAAQLSDLSSWWCYQGEEIPALTRCVEHLQMNE

SEQ ID NO: 31916 - protein, 170 aa, Homo sapiens
MSRHSLEEGLDMVNRETAHEREMQTAMQISQSWDESLSLSDSDFDKPEKLYSPKRIDFTPVSPAPSPTRGFGKMFVSSSGLPPSPVPSPRRFSSRRSQSPVKCIRPSVLGPLKRKGEMETESQPKRLFQGTTNMLSPDAAQLSDLSSWWCYQGEEIPALTRCVEHLQMNE

SEQ ID NO: 31917 - protein, 287 aa, Homo sapiens
MAQEKMELDLELPPGTGGSPAEGGGSGGGGGLRRSNSAPLIHGLSDTSPVFQAEAPSARRNSTTFPSRHGLLLPASPVRMHSSRLHQIKQEEGMDLINRETVHEREVQTAMQISHSWEESFSLSDNDVEKSASPKRIDFIPVSPAPSPTRGIGKQCFSPSLQSFVSSNGLPPSPIPSPTTRFTTRRSQSPINCIRPSVLGPLKRKCEMETEYQPKRFFQGITNMLSSDVAQLSDPGVCVSSDTLDGNSSSAGSSCNSPAKVSTTTDSPVSPAQAASPFIPLDELSSK

SEQ ID NO: 31918 - protein, 536 aa, Homo sapiens
MELSPRSPPEMLEESDCPSPLELKSAPSKKMWIKLRSLLRYMVKQLENGEINIEELKKNLEYTASLLEAVYIDETRQILDTEDELQELRSDAVPSEVRDWLASTFTQQARAKGRRAEEKPKFRSIVHAVQAGIFVERMFRRTYTSVGPTYSTAVLNCLKNLDLWCFDVFSLNQAADDHALRTIVFELLTRHNLISRFKIPTVFLMSFLDALETGYGKYKNPYHNQIHAADVTQTVHCFLLRTGMVHCLSEIELLAIIFAAAIHDYEHTGTTNSFHIQTKSECAIVYNDRSVLENHHISSVFRLMQDDEMNIFINLTKDEFVELRALVIEMVLATDMSCHFQQVKTMKTALQQLERIDKPKALSLLLHAADISHPTKQWLVHSRWTKALMEEFFRQGDKEAELGLPFSPLCDRTSTLVAQSQIGFIDFIVEPTFSVLTDVAEKSVQPLADEDSKSKNQPSFQWRQPSLDVEVGDPNPDVVSFRSTWVKRIQENKQKWKERAASGITNQMSIDELSPCEEEAPPSPAEDEHNQNGNLD

SEQ ID NO: 31919 - protein, 516 aa, Homo sapiens
MANPVPVQRSHLQGPILRLRYMVKQLENGEINIEELKKNLEYTASLLEAVYIDETRQILDTEDELQELRSDAVPSEVRDWLASTFTQQARAKGRRAEEKPKFRSIVHAVQAGIFVERMFRRTYTSVGPTYSTAVLNCLKNLDLWCFDVFSLNQAADDHALRTIVFELLTRHNLISRFKIPTVFLMSFLDALETGYGKYKNPYHNQIHAADVTQTVHCFLLRTGMVHCLSEIELLAIIFAAAIHDYEHTGTTNSFHIQTKSECAIVYNDRSVLENHHISSVFRLMQDDEMNIFINLTKDEFVELRALVIEMVLATDMSCHFQQVKTMKTALQQLERIDKPKALSLLLHAADISHPTKQWLVHSRWTKALMEEFFRQGDKEAELGLPFSPLCDRTSTLVAQSQIGFIDFIVEPTFSVLTDVAEKSVQPLADEDSKSKNQPSFQWRQPSLDVEVGDPNPDVVSFRSTWVKRIQENKQKWKERAASGITNQMSIDELSPCEEEAPPSPAEDEHNQNGNLD

SEQ ID NO: 31920 - protein, 736 aa, Homo sapiens
MLRLLRPLLLLLLLPPPGSPEPPGLTQLSPGAPPQAPDLLYADGLRAYAAGAWAPAVALLREALRSQAALGRVRLDCGASCAADPGAALPAVLLGAPEPDSGPGPTQGSWERQLLRAALRRADCLTQCAARRLGPGGAARLRVGSALRDAFRRREPYNYLQRAYYQLKKLDLAAAAAHTFFVANPMHLQMREDMAKYRRMSGVRPQSFRDLETPPHWAAYDTGLELLGRQEAGLALPRLEEALQGSLAQMESCRADCEGPEEQQGAEEEEDGAASQGGLYEAIAGHWIQVLQCRQRCVGETATRPGRSFPVPDFLPNQLRRLHEAHAQVGNLSQAIENVLSVLLFYPEDEAAKRALNQYQAQLGEPRPGLGPREDIQRFILRSLGEKRQLYYAMEHLGTSFKDPDPWTPAALIPEALREKLREDQEKRPWDHEPVKPKPLTYWKDVLLLEGVTLTQDSRQLNGSERAVLDGLLTPAECGVLLQLAKDAAGAGARSGYRGRRSPHTPHERFEGLTVLKAAQLARAGTVGSQGAKLLLEVSERVRTLTQAYFSPERPLHLSFTHLVCRSAIEGEQEQRMDLSHPVHADNCVLDPDTGECWREPPAYTYRDYSGLLYLNDDFQGGDLFFTEPNALTVTARVRPRCGRLVAFSSGVENPHGVWAVTRGRRCALALWHTWAPEHREQEWIEAKELLQESQEEEEEEEEEMPSKDPSPEPPSRRHQRVQDKTGRAPRVREEL

SEQ ID NO: 31921 - protein, 551 aa, Homo sapiens
MHLQMREDMAKYRRMSGVRPQSFRDLETPPHWAAYDTGLELLGRQEAGLALPRLEEALQGSLAQMESCRADCEGPEEQQGAEEEEDGAASQGGLYEAIAGHWIQVLQCRQRCVGETATRPGRSFPVPDFLPNQLRRLHEAHAQVGNLSQAIENVLSVLLFYPEDEAAKRALNQYQAQLGEPRPGLGPREDIQRFILRSLGEKRQLYYAMEHLGTSFKDPDPWTPAALIPEALREKLREDQEKRPWDHEPVKPKPLTYWKDVLLLEGVTLTQDSRQLNGSERAVLDGLLTPAECGVLLQLAKDAAGAGARSGYRGRRSPHTPHERFEGLTVLKAAQLARAGTVGSQGAKLLLEVSERVRTLTQAYFSPERPLHLSFTHLVCRSAIEGEQEQRMDLSHPVHADNCVLDPDTGECWREPPAYTYRDYSGLLYLNDDFQGGDLFFTEPNALTVTARVRPRCGRLVAFSSGVENPHGVWAVTRGRRCALALWHTWAPEHREQEWIEAKELLQESQEEEEEEEEEMPSKDPSPEPPSRRHQRVQDKTGRAPRVREEL

SEQ ID NO: 31922 - protein, 1112 aa, Homo sapiens
MRRDERDAKAMRSLQPPDGAGSPPESLRNGYVKSCVSPLRQDPPRGFFFHLCRFCNVELRPPPASPQQPRRCSPFCRARLSLGALAAFVLALLLGAEPESWAAGAAWLRTLLSVCSHSLSPLFSIACAFFFLTCFLTRTKRGPGPGRSCGSWWLLALPACCYLGDFLVWQWWSWPWGDGDAGSAAPHTPPEAAAGRLLLVLSCVGLLLTLAHPLRLRHCVLVLLLASFVWWVSFTSLGSLPSALRPLLSGLVGGAGCLLALGLDHFFQIREAPLHPRLSSAAEEKVPVIRPRRRSSCVSLGETAASYYGSCKIFRRPSLPCISREQMILWDWDLKQWYKPHYQNSGGGNGVDLSVLNEARNMVSDLLTDPSLPPQVISSLRSISSLMGAFSGSCRPKINPLTPFPGFYPCSEIEDPAEKGDRKLNKGLNRNSLPTPQLRRSSGTSGLLPVEQSSRWDRNNGKRPHQEFGISSQGCYLNGPFNSNLLTIPKQRSSSVSLTHHVGLRRAGVLSSLSPVNSSNHGPVSTGSLTNRSPIEFPDTADFLNKPSVILQRSLGNAPNTPDFYQQLRNSDSNLCNSCGHQMLKYVSTSESDGTDCCSGKSGEEENIFSKESFKLMETQQEEETEKKDSRKLFQEGDKWLTEEAQSEQQTNIEQEVSLDLILVEEYDSLIEKMSNWNFPIFELVEKMGEKSGRILSQVMYTLFQDTGLLEIFKIPTQQFMNYFRALENGYRDIPYHNRIHATDVLHAVWYLTTRPVPGLQQIHNGCGTGNETDSDGRINHGRIAYISSKSCSNPDESYGCLSSNIPALELMALYVAAAMHDYDHPGRTNAFLVATNAPQAVLYNDRSVLENHHAASAWNLYLSRPEYNFLLHLDHVEFKRFRFLVIEAILATDLKKHFDFLAEFNAKANDVNSNGIEWSNENDRLLVCQVCIKLADINGPAKVRDLHLKWTEGIVNEFYEQGDEEANLGLPISPFMDRSSPQLAKLQESFITHIVGPLCNSYDAAGLLPGQWLEAEEDNDTESGDDEDGEELDTEDEEMENNLNPKPPRRKSRRRIFCQLMHHLTENHKIWKEIVEEEEKCKADGNKLQVENSSLPQADEIQVIEEADEEE

SEQ ID NO: 31923 - protein, 1061 aa, Homo sapiens
MRRDERDAKAMRSLQPPDGAGSPPESLRNGYVKSCVSPLRQDPPRGFFFHLCRFCNVELRPPPASPQQPRRCSPFCRARLSLGALAAFVLALLLGAEPESWAAGAAWLRTLLSVCSHSLSPLFSIACAFFFLTCFLTRTKRGPGPGRSCGSWWLLALPACCYLGDFLVWQWWSWPWGDGDAGSAAPHTPPEAAAGRLLLVLSCVGLLLTLAHPLRLRHCVLVLLLASFVWWVSFTSLGSLPSALRPLLSGLVGGAGCLLALGLDHFFQIREAPLHPRLSSAAEEKVPVIRPRRRSSCVSLGETAASYYGSCKIFRRPSLPCISREQMILWDWDLKQWYKPHYQNSGGGNGVDLSVLNEARNMVSDLLTDPSLPPQGLNRNSLPTPQLRRSSGTSGLLPVEQSSRWDRNNGKRPHQEFGISSQGCYLNGPFNSNLLTIPKQRSSSVSLTHHVGLRRAGVLSSLSPVNSSNHGPVSTGSLTNRSPIEFPDTADFLNKPSVILQRSLGNAPNTPDFYQQLRNSDSNLCNSCGHQMLKYVSTSESDGTDCCSGKSGEEENIFSKESFKLMETQQEEETEKKDSRKLFQEGDKWLTEEAQSEQQTNIEQEVSLDLILVEEYDSLIEKMSNWNFPIFELVEKMGEKSGRILSQVMYTLFQDTGLLEIFKIPTQQFMNYFRALENGYRDIPYHNRIHATDVLHAVWYLTTRPVPGLQQIHNGCGTGNETDSDGRINHGRIAYISSKSCSNPDESYGCLSSNIPALELMALYVAAAMHDYDHPGRTNAFLVATNAPQAVLYNDRSVLENHHAASAWNLYLSRPEYNFLLHLDHVEFKRFRFLVIEAILATDLKKHFDFLAEFNAKANDVNSNGIEWSNENDRLLVCQVCIKLADINGPAKVRDLHLKWTEGIVNEFYEQGDEEANLGLPISPFMDRSSPQLAKLQESFITHIVGPLCNSYDAAGLLPGQWLEAEEDNDTESGDDEDGEELDTEDEEMENNLNPKPPRRKSRRRIFCQLMHHLTENHKIWKEIVEEEEKCKADGNKLQVENSSLPQADEIQVIEEADEEE

SEQ ID NO: 31924 - protein, 886 aa, Homo sapiens
MEPPTVPSERSLSLSLPGPREGQATLKPPPQHLWRQPRTPIRIQQRGYSDSAERAERERQPHRPIERADAMDTSDRPGLRTTRMSWPSSFHGTGTGSGGAGGGSSRRFEAENGPTPSPGRSPLDSQASPGLVLHAGAATSQRRESFLYRSDSDYDMSPKTMSRNSSVTSEAHAEDLIVTPFAQVLASLRSVRSNFSLLTNVPVPSNKRSPLGGPTPVCKATLSEETCQQLARETLEELDWCLEQLETMQTYRSVSEMASHKFKRMLNRELTHLSEMSRSGNQVSEYISTTFLDKQNEVEIPSPTMKEREKQQAPRPRPSQPPPPPVPHLQPMSQITGLKKLMHSNSLNNSNIPRFGVKTDQEELLAQELENLNKWGLNIFCVSDYAGGRSLTCIMYMIFQERDLLKKFRIPVDTMVTYMLTLEDHYHADVAYHNSLHAADVLQSTHVLLATPALDAVFTDLEILAALFAAAIHDVDHPGVSNQFLINTNSELALMYNDESVLENHHLAVGFKLLQEDNCDIFQNLSKRQRQSLRKMVIDMVLATDMSKHMTLLADLKTMVETKKVTSSGVLLLDNYSDRIQVLRNMVHCADLSNPTKPLELYRQWTDRIMAEFFQQGDRERERGMEISPMCDKHTASVEKSQVGFIDYIVHPLWETWADLVHPDAQEILDTLEDNRDWYYSAIRQSPSPPPEEESRGPGHPPLPDKFQFELTLEEEEEEEISMAQIPCTAQEALTAQGLSGVEEALDATIAWEASPAQESLEVMAQEASLEAELEAVYLTQQAQSTGSAPVAPDEFSSREEFVVAVSHSSPSALALQSPLLPAWRTLSVSEHAPGLPGLPSTAAEVEAQREHQAAKRACSACAGTFGEDTSALPAPGGGGSGGDPT

SEQ ID NO: 31925 - protein, 860 aa, Homo sapiens
MARPRGLGRIPELQLVAFPVAVAAEDEAFLPEPLAPRAPRRPRSPPSSPVFFASPSPTFRRRLRLLRSCQDLGRQAWAGAGFEAENGPTPSPGRSPLDSQASPGLVLHAGAATSQRRESFLYRSDSDYDMSPKTMSRNSSVTSEAHAEDLIVTPFAQVLASLRSVRSNFSLLTNVPVPSNKRSPLGGPTPVCKATLSEETCQQLARETLEELDWCLEQLETMQTYRSVSEMASHKFKRMLNRELTHLSEMSRSGNQVSEYISTTFLDKQNEVEIPSPTMKEREKQQAPRPRPSQPPPPPVPHLQPMSQITGLKKLMHSNSLNNSNIPRFGVKTDQEELLAQELENLNKWGLNIFCVSDYAGGRSLTCIMYMIFQERDLLKKFRIPVDTMVTYMLTLEDHYHADVAYHNSLHAADVLQSTHVLLATPALDAVFTDLEILAALFAAAIHDVDHPGVSNQFLINTNSELALMYNDESVLENHHLAVGFKLLQEDNCDIFQNLSKRQRQSLRKMVIDMVLATDMSKHMTLLADLKTMVETKKVTSSGVLLLDNYSDRIQVLRNMVHCADLSNPTKPLELYRQWTDRIMAEFFQQGDRERERGMEISPMCDKHTASVEKSQVGFIDYIVHPLWETWADLVHPDAQEILDTLEDNRDWYYSAIRQSPSPPPEEESRGPGHPPLPDKFQFELTLEEEEEEEISMAQIPCTAQEALTAQGLSGVEEALDATIAWEASPAQESLEVMAQEASLEAELEAVYLTQQAQSTGSAPVAPDEFSSREEFVVAVSHSSPSALALQSPLLPAWRTLSVSEHAPGLPGLPSTAAEVEAQREHQAAKRACSACAGTFGEDTSALPAPGGGGSGGDPT

SEQ ID NO: 31926 - protein, 686 aa, Homo sapiens
MCPFPVTTVPLGGPTPVCKATLSEETCQQLARETLEELDWCLEQLETMQTYRSVSEMASHKFKRMLNRELTHLSEMSRSGNQVSEYISTTFLDKQNEVEIPSPTMKEREKQQAPRPRPSQPPPPPVPHLQPMSQITGLKKLMHSNSLNNSNIPRFGVKTDQEELLAQELENLNKWGLNIFCVSDYAGGRSLTCIMYMIFQERDLLKKFRIPVDTMVTYMLTLEDHYHADVAYHNSLHAADVLQSTHVLLATPALDAVFTDLEILAALFAAAIHDVDHPGVSNQFLINTNSELALMYNDESVLENHHLAVGFKLLQEDNCDIFQNLSKRQRQSLRKMVIDMVLATDMSKHMTLLADLKTMVETKKVTSSGVLLLDNYSDRIQVLRNMVHCADLSNPTKPLELYRQWTDRIMAEFFQQGDRERERGMEISPMCDKHTASVEKSQVGFIDYIVHPLWETWADLVHPDAQEILDTLEDNRDWYYSAIRQSPSPPPEEESRGPGHPPLPDKFQFELTLEEEEEEEISMAQIPCTAQEALTAQGLSGVEEALDATIAWEASPAQESLEVMAQEASLEAELEAVYLTQQAQSTGSAPVAPDEFSSREEFVVAVSHSSPSALALQSPLLPAWRTLSVSEHAPGLPGLPSTAAEVEAQREHQAAKRACSACAGTFGEDTSALPAPGGGGSGGDPT

SEQ ID NO: 31927 - protein, 647 aa, Homo sapiens
MPLVDFFCETCSKPWLVGWWDQFKRMLNRELTHLSEMSRSGNQVSEYISTTFLDKQNEVEIPSPTMKEREKQQAPRPRPSQPPPPPVPHLQPMSQITGLKKLMHSNSLNNSNIPRFGVKTDQEELLAQELENLNKWGLNIFCVSDYAGGRSLTCIMYMIFQERDLLKKFRIPVDTMVTYMLTLEDHYHADVAYHNSLHAADVLQSTHVLLATPALDAVFTDLEILAALFAAAIHDVDHPGVSNQFLINTNSELALMYNDESVLENHHLAVGFKLLQEDNCDIFQNLSKRQRQSLRKMVIDMVLATDMSKHMTLLADLKTMVETKKVTSSGVLLLDNYSDRIQVLRNMVHCADLSNPTKPLELYRQWTDRIMAEFFQQGDRERERGMEISPMCDKHTASVEKSQVGFIDYIVHPLWETWADLVHPDAQEILDTLEDNRDWYYSAIRQSPSPPPEEESRGPGHPPLPDKFQFELTLEEEEEEEISMAQIPCTAQEALTAQGLSGVEEALDATIAWEASPAQESLEVMAQEASLEAELEAVYLTQQAQSTGSAPVAPDEFSSREEFVVAVSHSSPSALALQSPLLPAWRTLSVSEHAPGLPGLPSTAAEVEAQREHQAAKRACSACAGTFGEDTSALPAPGGGGSGGDPT

SEQ ID NO: 31928 - protein, 323 aa, Homo sapiens
MVLPSDQGFKLLGNVLQGPEPYRLLTSGLRLHQELENLNKWGLNIFCVSDYAGGRSLTCIMYMIFQERDLLKKFRIPVDTMVTYMLTLEDHYHADVAYHNSLHAADVLQSTHVLLATPALDAVFTDLEILAALFAAAIHDVDHPGVSNQFLINTNSELALMYNDESVLENHHLAVGFKLLQEDNCDIFQNLSKRQRQSLRKMVIDMVLATDMSKHMTLLADLKTMVETKKVTSSGVLLLDNYSDRIQVLRNMVHCADLSNPTKPLELYRQWTDRIMAEFFQQGDRERERGMEISPMCDKHTASVEKSQVQARGIDGRAQGGFY

SEQ ID NO: 31929 - protein, 825 aa, Homo sapiens
MRSGAAPRARPRPPALALPPTGPESLTHFPFSDEDTRRHPPGRSVSFEAENGPTPSPGRSPLDSQASPGLVLHAGAATSQRRESFLYRSDSDYDMSPKTMSRNSSVTSEAHAEDLIVTPFAQVLASLRSVRSNFSLLTNVPVPSNKRSPLGGPTPVCKATLSEETCQQLARETLEELDWCLEQLETMQTYRSVSEMASHKFKRMLNRELTHLSEMSRSGNQVSEYISTTFLDKQNEVEIPSPTMKEREKQQAPRPRPSQPPPPPVPHLQPMSQITGLKKLMHSNSLNNSNIPRFGVKTDQEELLAQELENLNKWGLNIFCVSDYAGGRSLTCIMYMIFQERDLLKKFRIPVDTMVTYMLTLEDHYHADVAYHNSLHAADVLQSTHVLLATPALDAVFTDLEILAALFAAAIHDVDHPGVSNQFLINTNSELALMYNDESVLENHHLAVGFKLLQEDNCDIFQNLSKRQRQSLRKMVIDMVLATDMSKHMTLLADLKTMVETKKVTSSGVLLLDNYSDRIQVLRNMVHCADLSNPTKPLELYRQWTDRIMAEFFQQGDRERERGMEISPMCDKHTASVEKSQVGFIDYIVHPLWETWADLVHPDAQEILDTLEDNRDWYYSAIRQSPSPPPEEESRGPGHPPLPDKFQFELTLEEEEEEEISMAQIPCTAQEALTAQGLSGVEEALDATIAWEASPAQESLEVMAQEASLEAELEAVYLTQQAQSTGSAPVAPDEFSSREEFVVAVSHSSPSALALQSPLLPAWRTLSVSEHAPGLPGLPSTAAEVEAQREHQAAKRACSACAGTFGEDTSALPAPGGGGSGGDPT

SEQ ID NO: 31930 - protein, 864 aa, Homo sapiens
MKRSRSALSVAGTGDERSRETPESDRANMLGADLRRPRRRLSSGPGLGWAQPEPSDPGVPLPPRPTTLPLLIPPRISITRAENDSFEAENGPTPSPGRSPLDSQASPGLVLHAGAATSQRRESFLYRSDSDYDMSPKTMSRNSSVTSEAHAEDLIVTPFAQVLASLRSVRSNFSLLTNVPVPSNKRSPLGGPTPVCKATLSEETCQQLARETLEELDWCLEQLETMQTYRSVSEMASHKFKRMLNRELTHLSEMSRSGNQVSEYISTTFLDKQNEVEIPSPTMKEREKQQAPRPRPSQPPPPPVPHLQPMSQITGLKKLMHSNSLNNSNIPRFGVKTDQEELLAQELENLNKWGLNIFCVSDYAGGRSLTCIMYMIFQERDLLKKFRIPVDTMVTYMLTLEDHYHADVAYHNSLHAADVLQSTHVLLATPALDAVFTDLEILAALFAAAIHDVDHPGVSNQFLINTNSELALMYNDESVLENHHLAVGFKLLQEDNCDIFQNLSKRQRQSLRKMVIDMVLATDMSKHMTLLADLKTMVETKKVTSSGVLLLDNYSDRIQVLRNMVHCADLSNPTKPLELYRQWTDRIMAEFFQQGDRERERGMEISPMCDKHTASVEKSQVGFIDYIVHPLWETWADLVHPDAQEILDTLEDNRDWYYSAIRQSPSPPPEEESRGPGHPPLPDKFQFELTLEEEEEEEISMAQIPCTAQEALTAQGLSGVEEALDATIAWEASPAQESLEVMAQEASLEAELEAVYLTQQAQSTGSAPVAPDEFSSREEFVVAVSHSSPSALALQSPLLPAWRTLSVSEHAPGLPGLPSTAAEVEAQREHQAAKRACSACAGTFGEDTSALPAPGGGGSGGDPT

SEQ ID NO: 31931 - protein, 544 aa, Homo sapiens
MGPGARLAALLAVLALGTGDPERAAARGDTFSALTSVARALAPERRLLGLLRRYLRGEEARLRDLTRFYDKVLSLHEDSTTPVANPLLAFTLIKRLQSDWRNVVHSLEASENIRALKDGYEKVEQDLPAFEDLEGAARALMRLQDVYMLNVKGLARGVFQRVTGSAITDLYSPKRLFSLTGDDCFQVGKVAYDMGDYYHAIPWLEEAVSLFRGSYGEWKTEDEASLEDALDHLAFAYFRAGNVSCALSLSREFLLYSPDNKRMARNVLKYERLLAESPNHVVAEAVIQRPNIPHLQTRDTYEGLCQTLGSQPTLYQIPSLYCSYETNSNAYLLLQPIRKEVIHLEPYIALYHDFVSDSEAQKIRELAEPWLQRSVVASGEKQLQVEYRISKSAWLKDTVDPKLVTLNHRIAALTGLDVRPPYAEYLQVVNYGIGGHYEPHFDHATSPSSPLYRMKSGNRVATFMIYLSSVEAGGATAFIYANLSVPVVRNAALFWWNLHRSGEGDSDTLHAGCPVLVGDKWVANKWIHEYGQEFRRPCSSSPED

SEQ ID NO: 31932 - protein, 257 aa, Homo sapiens
MGPGARLAALLAVLALGTGDPERAAARGDTFSALTSVARALAPERRLLGLLRRYLRGEEARLRDLTRFYDKVLSLHEDSTTPVANPLLAFTLIKRLQSDWRNVVHSLEASENIRALKDGYEKVEQDLPAFEDLEGAARALMRLQDVYMLNVKGLARGVFQRVTGSAITDLYSPKRLFSLTGDDCFQVGKVAYDMGDYYHAIPWLEEAVSLFRGSYGEWKTEDEASLEDALDHLAFAYFRAGNVSCALSLSREFLLYR

SEQ ID NO: 31933 - protein, 604 aa, Homo sapiens
MGPGARLAALLAVLALGTGDPERAAARGDTFSALTSVARALAPERRLLGLLRRYLRGEEARLRDLTRFYDKVLSLHEDSTTPVANPLLAFTLIKRLQSDWRNVVHSLEASENIRALKDGYEKVEQDLPAFEDLEGAARALMRLQDVYMLNVKGLARGVFQRVTGSAITDLYSPKRLFSLTGDDCFQVGKVAYDMGDYYHAIPWLEEAVSLFRGSYGEWKTEDEASLEDALDHLAFAYFRAGNVSCALSLSREFLLYSPDNKRMARNVLKYERLLAESPNHVVAEAVIQRPNIPHLQTRDTYEGLCQTLGSQPTLYQIPSLYCSYETNSNAYLLLQPIRKEVIHLEPYIALYHDFVSDSEAQKIRELAEPWLQRSVVASGEKQLQVEYRISKSAWLKDTVDPKLVTLNHRIAALTGLDVRPPYAEYLQVVNYGIGGHYEPHFDHATSPSSPLYRMKSGNRVATFMIYLSSVEAGGATAFIYANLSVPVVRHCFGGTCTGVVKGTVTHFMLAVLSWWEISGWPTSGYMSMDRNSADPAAPALKTELLAERSWWSPVAFQRSQEPKAGVGEEKAEQPPGRRPCQLCLCLANQRQGRGCYQGTLRMYI

SEQ ID NO: 31934 - protein, 402 aa, Homo sapiens [sequence omitted]

SEQ ID NO: 31935 - protein, 387 aa, Homo sapiens
MQMSPALTCLVLGLALVFGEGSAVHHPPSYVAQASKDRNVVFSPYGVASVLAMLQLTTGGETQQQIQAAMGFKIDDKGMAPALRHLYKELMGPWNKDEISTTDAIFVQRDLKLVQGFMPHFFRLFRSTVKQVDFSEVERARFIINDWVKTHTKGMISNLLGKGAVDQLTRLVLVNALYFNGQWKTPFPDSSTHRRLFHKSDGSTVSVPMMAQTNKFNYTEFTTPDGHYYDILELPYHGDTLSMFIAAPYEKEVPLSALTNILSAQLISHWKGNMTRLPRLLVLPKFSLETEVDLRKPLENLGMTDMFRQFQADFTSLSDQEPLHVAQALQKVKIEVNESGTVASSSTAVIVSARMAPEEIIMDRPFLFVVRHNPTGTVLFMGQVMEP

SEQ ID NO: 31936 - protein, 479 aa, Homo sapiens
MSDGFDRAPGAGRGRSRGLGRGGGGPEGGGFPNGAGPAERARHQPPQPKAPGFLQPPPLRQPRTTPPPGAQCEVPASPQRPSRPGALPEQTRPLRAPPSSQDKIPQQNSESAMAKPQVVVAPVLMSKLSVNAPEFYPSGYSSSYTESYEDGCEDYPTLSEYVQDFLNHLTEQPGSFETEIEQFAETLNGCVTTDDALQELVELIYQQATSIPNFSYMGARLCNYLSHHLTISPQSGNFRQLLLQRCRTEYEVKDQAAKGDEVTRKRFHAFVLFLGELYLNLEIKGTNGQVTRADILQVGLRELLNALFSNPMDDNLICAVKLLKLTGSVLEDAWKEKGKMDMEEIIQRIENVVLDANCSRDVKQMLLKLVELRSSNWGRVHATSTYREATPENDPNYFMNEPTFYTSDGVPFTAADPDYQEKYQELLEREDFFPDYEENGTDLSGAGDPYLDDIDDEMDPEIEEAYEKFCLESERKRKQ

SEQ ID NO: 31937 - protein, 400 aa, Homo sapiens
MSDGFDRAPEQTRPLRAPPSSQDKIPQQNSESAMAKPQVVVAPVLMSKLSVNAPEFYPSGYSSSYTESYEDGCEDYPTLSEYVQDFLNHLTEQPGSFETEIEQFAETLNGCVTTDDALQELVELIYQQATSIPNFSYMGARLCNYLSHHLTISPQSGNFRQLLLQRCRTEYEVKDQAAKGDEVTRKRFHAFVLFLGELYLNLEIKGTNGQVTRADILQVGLRELLNALFSNPMDDNLICAVKLLKLTGSVLEDAWKEKGKMDMEEIIQRIENVVLDANCSRDVKQMLLKLVELRSSNWGRVHATSTYREATPENDPNYFMNEPTFYTSDGVPFTAADPDYQEKYQELLEREDFFPDYEENGTDLSGAGDPYLDDIDDEMDPEIEEAYEKFCLESERKRKQ

SEQ ID NO: 31938 - protein, 367 aa, Homo sapiens
MAKPQVVVAPVLMSKLSVNAPEFYPSGYSSSYTESYEDGCEDYPTLSEYVQDFLNHLTEQPGSFETEIEQFAETLNGCVTTDDALQELVELIYQQATSIPNFSYMGARLCNYLSHHLTISPQSGNFRQLLLQRCRTEYEVKDQAAKGDEVTRKRFHAFVLFLGELYLNLEIKGTNGQVTRADILQVGLRELLNALFSNPMDDNLICAVKLLKLTGSVLEDAWKEKGKMDMEEIIQRIENVVLDANCSRDVKQMLLKLVELRSSNWGRVHATSTYREATPENDPNYFMNEPTFYTSDGVPFTAADPDYQEKYQELLEREDFFPDYEENGTDLSGAGDPYLDDIDDEMDPEIEEAYEKFCLESERKRKQ

SEQ ID NO: 31939 - protein, 692 aa, Homo sapiens
MGTVSSRRSWWPLPLLLLLLLLLGPAGARAQEDEDGDYEELVLALRSEEDGLAEAPEHGTTATFHRCAKDPWRLPGTYVVVLKEETHLSQSERTARRLQAQAARRGYLTKILHVFHGLLPGFLVKMSGDLLELALKLPHVDYIEEDSSVFAQSIPWNLERITPPRYRADEYQPPDGGSLVEVYLLDTSIQSDHREIEGRVMVTDFENVPEEDGTRFHRQASKCDSHGTHLAGVVSGRDAGVAKGASMRSLRVLNCQGKGTVSGTLIGLEFIRKSQLVQPVGPLVVLLPLAGGYSRVLNAACQRLARAGVVLVTAAGNFRDDACLYSPASAPEVITVGATNAQDQPVTLGTLGTNFGRCVDLFAPGEDIIGASSDCSTCFVSQSGTSQAAAHVAGIAAMMLSAEPELTLAELRQRLIHFSAKDVINEAWFPEDQRVLTPNLVAALPPSTHGAGWQLFCRTVWSAHSGPTRMATAVARCAPDEELLSCSSFSRSGKRRGERMEAQGGKLVCRAHNAFGGEGVYAIARCCLLPQANCSVHTAPPAEASMGTRVHCHQQGHVLTGCSSHWEVEDLGTHKPPVLRPRGQPNQCVGHREASIHASCCHAPGLECKVKEHGIPAPQEQVTVACEEGWTLTGCSALPGTSHVLGAYAVDNTCVVRSRDVSTTGSTSEGAVTAVAICCRSRHLAQASQELQ

SEQ ID NO: 31940 - protein, 196 aa, Homo sapiens
MSPWKDGGSLVEVYLLDTSIQSDHREIEGRVMVTDFENVPEEDGTRFHRQASKCDSHGTHLAGVVSGRDAGVAKGASMRSLRVLNCQGKGTVSGTLIGLEFIRKSQLVQPVGPLVVLLPLAGGYSRVLNAACQRLARAGVVLVTAAGNFRDDACLYSPASAPEGRTSLVPPATAAPALCHRVGHHRLLPTWLALQP

SEQ ID NO: 31941 - protein, 1186 aa, Homo sapiens [sequence omitted]

SEQ ID NO: 31942 - protein, 1383 aa, Homo sapiens
MSGTSSHESFYDSLSDMQEESKNTDFFPGLSAFLSQEEINKSLDLARRAIADSETEDFDSEKEISQIFSTSPASLCEHPSHKETKLGEHASRRPQDNRSTPVQPLAEKQTKSISSPVSKRKPAMSPLLTRPSYIRSLRKAEKRGAKTPSTNVKPKTPHQRKGGPQSQLCDKAANLIEELTSIFKAAKPRNRSPNGESSSPDSGYLSPKNQPSALLSASASQSPMEDQGEMEREVKSPGARHCYQDNQDLAVPHNRKSHPQPHSALHFPAAPRFIQKLRSQEVAEGSRVYLECRVTGNPTPRVRWFCEGKELHNTPDIQIHCEGGDLHTLIIAEAFEDDTGRYTCLATNPSGSDTTSAEVFIEGASSTDSDSESLAFKSRAGAMPQAQKKTTSVSLTIGSSSPKTGVTTAVIQPLSVPVQQVHSPTSYLCRPDGTTTAYFPPVFTKELQNTAVAEGQVVVLECRVRGAPPLQVQWFRQGSEIQDSPDFRILQKKPRSTAEPEEICTLVIAETFPEDAGIFTCSARNDYGSATSTAQLVVTSANTENCSYESMGESNNDHFQHFPPPPPILETSSLELASKKPSEIQQVNNPELGLSRAALQMQFNAAERETNGVHPSRGVNGLINGKANSNKSLPTPAVLLSPTKEPPPLLAKPKLDPLKLQQLQNQIRLEQEAGARQPPPAPRSAPPSPPFPPPPAFPELAACTPPASPEPMSALASRSAPAMQSSGSFNYARPKQFIAAQNLGPASGHGTPASSPSSSSLPSPMSPTPRQFGRAPVPPFAQPFGAEPEAPWGSSSPSPPPPPPPVFSPTAAFPVPDVFPLPPPPPPLPSPGQASHCSSPATRFGHSQTPAAFLSALLPSQPPPAAVNALGLPKGVTPAGFPKKASRTARIASDEEIQGTKDAVIQDLERKLRFKEDLLNNGQPRLTYEERMARRLLGADSATVFNIQEPEEETANQEYKVSSCEQRLISEIEYRLERSPVDESGDEVQYGDVPVENGMAPFFEMKLKHYKIFEGMPVTFTCRVAGNPKPKIYWFKDGKQISPKSDHYTIQRDLDGTCSLHTTASTLDDDGNYTIMAANPQGRISCTGRLMVQAVNQRGRSPRSPSGHPHVRRPRSRSRDSGDENEPIQERFFRPHFLQAPGDLTVQEGKLCRMDCKVSGLPTPDLSWQLDGKPVRPDSAHKMLVRENGVHSLIIEPVTSRDAGIYTCIATNRAGQNSFSLELVVAAKEAHKPPVFIEKLQNTGVADGYPVRLECRVLGVPPPQIFWKKENESLTHSTDRVSMHQDNHGYICLLIQGATKEDAGWYTVSAKNEAGIVSCTARLDVYTQWHQQSQSTKPKKVRPSASRYAALSDQGLDIKAAFQPEANPSHLTLNTALVESEDL

SEQ ID NO: 31943 - protein, 1106 aa, Homo sapiens
MSGTSSHESFYDSLSDMQEESKNTDFFPGLSAFLSQEEINKSLDLARRAIADSETEDFDSEKEISQIFSTSPASLCEHPSHKETKLGEHASRRPQDNRSTPVQPLAEKQTKSISSPVSKRKPAMSPLLTRPSYIRSLRKAEKRGAKTPSTNVKPKTPHQRKGGPQSQLCDKAANLIEELTSIFKAAKPRNRSPNGESSSPDSGYLSPKNQPSALLSASASQSPMEDQGEMEREVKSPGARHCYQDNQDLAVPHNRKSHPQPHSALHFPAAPRFIQKLRSQEVAEGSRVYLECRVTGNPTPRVRWFCEGKELHNTPDIQIHCEGGDLHTLIIAEAFEDDTGRYTCLATNPSGSDTTSAEVFIEGASSTDSDSESLAFKSRAGAMPQAQKKTTSVSLTIGSSSPKTGVTTAVIQPLSVPVQQVHSPTSYLCRPDGTTTAYFPPVFTKELQNTAVAEGQVVVLECRVRGAPPLQVQWFRQGSEIQDSPDFRILQKKPRSTAEPEEICTLVIAETFPEDAGIFTCSARNDYGSATSTAQLVVTSANTENCSYESMGESNNDHFQHFPPPPPILETSSLELASKKPSEIQQVNNPELGLSRAALQMQFNAAERETNGVHPSRGVNGLINGKANSNKSLPTPAVLLSPTKEPPPLLAKPKLGFPKKASRTARIASDEEIQGTKDAVIQDLERKLRFKEDLLNNGQPRLTYEERMARRLLGADSATVFNIQEPEEETANQEYKVSSCEQRLISEIEYRLERSPVDESGDEVQYGDVPVENGMAPFFEMKLKHYKIFEGMPVTFTCRVAGNPKPKIYWFKDGKQISPKSDHYTIQRDLDGTCSLHTTASTLDDDGNYTIMAANPQGRISCTGRLMVQAVNQRGRSPRSPSGHPHVRRPRSRSRDSGDENEPIQERFFRPHFLQAPGDLTVQEGKLCRMDCKVSGLPTPDLSWQLDGKPVRPDSAHKMLVRENGVHSLIIEPVTSRDAGIYTCIATNRAGQNSFSLELVVAAKEAHKPPVFIEKLQNTGVADGYPVRLECRVLGVPPPQIFWKKENESLTHSTDRVSMHQDNHGYICLLIQGATKEDAGWYTVSAKNEAGIVSCTARLDVYISRH

SEQ ID NO: 31944 - protein, 1001 aa, Homo sapiens
MPQAQKKTTSVSLTIGSSSPKTGVTTAVIQPLSVPVQQVHSPTSYLCRPDGTTTAYFPPVFTKELQNTAVAEGQVVVLECRVRGAPPLQVQWFRQGSEIQDSPDFRILQKKPRSTAEPEEICTLVIAETFPEDAGIFTCSARNDYGSATSTAQLVVTSANTENCSYESMGESNNDHFQHFPPPPPILETSSLELASKKPSEIQQVNNPELGLSRAALQMQFNAAERETNGVHPSRGVNGLINGKANSNKSLPTPAVLLSPTKEPPPLLAKPKLDPLKLQQLQNQIRLEQEAGARQPPPAPRSAPPSPPFPPPPAFPELAACTPPASPEPMSALASRSAPAMQSSGSFNYARPKQFIAAQNLGPASGHGTPASSPSSSSLPSPMSPTPRQFGRAPVPPFAQPFGAEPEAPWGSSSPSPPPPPPPVFSPTAAFPVPDVFPLPPPPPPLPSPGQASHCSSPATRFGHSQTPAAFLSALLPSQPPPAAVNALGLPKGVTPAGFPKKASRTARIASDEEIQGTKDAVIQDLERKLRFKEDLLNNGQPRLTYEERMARRLLGADSATVFNIQEPEEETANQEYKVSSCEQRLISEIEYRLERSPVDESGDEVQYGDVPVENGMAPFFEMKLKHYKIFEGMPVTFTCRVAGNPKPKIYWFKDGKQISPKSDHYTIQRDLDGTCSLHTTASTLDDDGNYTIMAANPQGRISCTGRLMVQAVNQRGRSPRSPSGHPHVRRPRSRSRDSGDENEPIQERFFRPHFLQAPGDLTVQEGKLCRMDCKVSGLPTPDLSWQLDGKPVRPDSAHKMLVRENGVHSLIIEPVTSRDAGIYTCIATNRAGQNSFSLELVVAAKEAHKPPVFIEKLQNTGVADGYPVRLECRVLGVPPPQIFWKKENESLTHSTDRVSMHQDNHGYICLLIQGATKEDAGWYTVSAKNEAGIVSCTARLDVYTQWHQQSQSTKPKKVRPSASRYAALSDQGLDIKAAFQPEANPSHLTLNTALVESEDL

SEQ ID NO: 31945 - protein, 672 aa, Homo sapiens
MSALASRSAPAMQSSGSFNYARPKQFIAAQNLGPASGHGTPASSPSSSSLPSPMSPTPRQFGRAPVPPFAQPFGAEPEAPWGSSSPSPPPPPPPVFSPTAAFPVPDVFPLPPPPPPLPSPGQASHCSSPATRFGHSQTPAAFLSALLPSQPPPAAVNALGLPKGVTPAGFPKKASRTARIASDEEIQGTKDAVIQDLERKLRFKEDLLNNGQPRLTYEERMARRLLGADSATVFNIQEPEEETANQEYKVSSCEQRLISEIEYRLERSPVDESGDEVQYGDVPVENGMAPFFEMKLKHYKIFEGMPVTFTCRVAGNPKPKIYWFKDGKQISPKSDHYTIQRDLDGTCSLHTTASTLDDDGNYTIMAANPQGRISCTGRLMVQAVNQRGRSPRSPSGHPHVRRPRSRSRDSGDENEPIQERFFRPHFLQAPGDLTVQEGKLCRMDCKVSGLPTPDLSWQLDGKPVRPDSAHKMLVRENGVHSLIIEPVTSRDAGIYTCIATNRAGQNSFSLELVVAAKEAHKPPVFIEKLQNTGVADGYPVRLECRVLGVPPPQIFWKKENESLTHSTDRVSMHQDNHGYICLLIQGATKEDAGWYTVSAKNEAGIVSCTARLDVYTQWHQQSQSTKPKKVRPSASRYAALSDQGLDIKAAFQPEANPSHLTLNTALVESEDL

SEQ ID NO: 31946 - protein, 1159 aa, Homo sapiens
MSGTSSHESFYDSLSDMQEESKNTDFFPGLSAFLSQEEINKSLDLARRAIADSETEDFDSEKEISQIFSTSPASLCEHPSHKETKLGEHASRRPQDNRSTPVQPLAEKQTKSISSPVSKRKPAMSPLLTRPSYIRSLRKAEKRGAKTPSTNVKPKTPHQRKGGPQSQLCDKAANLIEELTSIFKAAKPRNRSPNGESSSPDSGYLSPKNQPSALLSASASQSPMEDQGEMEREVKSPGARHCYQDNQDLAVPHNRKSHPQPHSALHFPAAPRFIQKLRSQEVAEGSRVYLECRVTGNPTPRVRWFCEGKELHNTPDIQIHCEGGDLHTLIIAEAFEDDTGRYTCLATNPSGSDTTSAEVFIEGASSTDSDSESLAFKSRAGAMPQAQKKTTSVSLTIGSSSPKTGVTTAVIQPLSVPVQQVHSPTSYLCRPDGTTTAYFPPVFTKELQNTAVAEGQVVVLECRVRGAPPLQVQWFRQGSEIQDSPDFRILQKKPRSTAEPEEICTLVIAETFPEDAGIFTCSARNDYGSATSTAQLVVTSANTENCSYESMGESNNDHFQHFPPPPPILETSSLELASKKPSEIQQVNNPELGLSRAALQMQFNAAERETNGVHPSRGVNGLINGKANSNKSLPTPAVLLSPTKEPPPLLAKPKLGFPKKASRTARIASDEEIQGTKDAVIQDLERKLRFKEDLLNNGQPRLTYEERMARRLLGADSATVFNIQEPEEETANQEYKVSSCEQRLISEIEYRLERSPVDESGDEVQYGDVPVENGMAPFFEMKLKHYKIFEGMPVTFTCRVAGNPKPKIYWFKDGKQISPKSDHYTIQRDLDGTCSLHTTASTLDDDGNYTIMAANPQGRISCTGRLMVQAVNQRGRSPRSPSGHPHVRRPRSRSRDSGDENEPIQERFFRPHFLQAPGDLTVQEGKLCRMDCKVSGLPTPDLSWQLDGKPVRPDSAHKMLVRENGVHSLIIEPVTSRDAGIYTCIATNRAGQNSFSLELVVAAKEAHKPPVFIEKLQNTGVADGYPVRLECRVLGVPPPQIFWKKENESLTHSTDRVSMHQDNHGYICLLIQGATKEDAGWYTVSAKNEAGIVSCTARLDVYTQWHQQSQSTKPKKVRPSASRYAALSDQGLDIKAAFQPEANPSHLTLNTALVESEDL

SEQ ID NO: 31947 - protein, 533 aa, Homo sapiens
MSGTSSHESFYDSLSDMQEESKNTDFFPGLSAFLSQEEINKSLDLARRAIADSETEDFDSEKEISQIFSTSPASLCEHPSHKETKLGEHASRRPQDNRSTPVQPLAEKQTKSISSPVSKRKPAMSPLLTRPSYIRSLRKAEKRGAKTPSTNVKPKTPHQRKGGPQSQLCDKAANLIEELTSIFKAAKPRNRSPNGESSSPDSGYLSPKNQPSALLSASASQSPMEDQGEMEREVKSPGARHCYQDNQDLAVPHNRKSHPQPHSALHFPAAPRFIQKLRSQEVAEGSRVYLECRVTGNPTPRVRWFCEGKELHNTPDIQIHCEGGDLHTLIIAEAFEDDTGRYTCLATNPSGSDTTSAEVFIEGASSTDSDSESLAFKSRAGAMPQAQKKTTSVSLTIGSSSPKTGVTTAVIQPLSVPVQQVHSPTSYLCRPDGTTTAYFPPVFTKELQNTAVAEGQVVVLECRVRGAPPLQVQWFRQGSEIQDSPDFRILQKKPRSTAEPDVLYVFVRVRCHQMKIQYYNLAHLISSWLSSFL

SEQ ID NO: 31948 - protein, 385 aa, Homo sapiens
MAPFFEMKLKHYKIFEGMPVTFTCRVAGNPKPKIYWFKDGKQISPKSDHYTIQRDLDGTCSLHTTASTLDDDGNYTIMAANPQGRISCTGRLMVQAVNQRGRSPRSPSGHPHVRRPRSRSRDSGDENEPIQERFFRPHFLQAPGDLTVQEGKLCRMDCKVSGLPTPDLSWQLDGKPVRPDSAHKMLVRENGVHSLIIEPVTSRDAGIYTCIATNRAGQNSFSLELVVAAKEAHKPPVFIEKLQNTGVADGYPVRLECRVLGVPPPQIFWKKENESLTHSTDRVSMHQDNHGYICLLIQGATKEDAGWYTVSAKNEAGIVSCTARLDVYTQWHQQSQSTKPKKVRPSASRYAALSDQGLDIKAAFQPEANPSHLTLNTALVESEDL

SEQ ID NO: 31949 - protein, 777 aa, Homo sapiens
MPQAQKKTTSVSLTIGSSSPKTGVTTAVIQPLSVPVQQVHSPTSYLCRPDGTTTAYFPPVFTKELQNTAVAEGQVVVLECRVRGAPPLQVQWFRQGSEIQDSPDFRILQKKPRSTAEPEEICTLVIAETFPEDAGIFTCSARNDYGSATSTAQLVVTSANTENCSYESMGESNNDHFQHFPPPPPILETSSLELASKKPSEIQQVNNPELGLSRAALQMQFNAAERETNGVHPSRGVNGLINGKANSNKSLPTPAVLLSPTKEPPPLLAKPKLGFPKKASRTARIASDEEIQGTKDAVIQDLERKLRFKEDLLNNGQPRLTYEERMARRLLGADSATVFNIQEPEEETANQEYKVSSCEQRLISEIEYRLERSPVDESGDEVQYGDVPVENGMAPFFEMKLKHYKIFEGMPVTFTCRVAGNPKPKIYWFKDGKQISPKSDHYTIQRDLDGTCSLHTTASTLDDDGNYTIMAANPQGRISCTGRLMVQAVNQRGRSPRSPSGHPHVRRPRSRSRDSGDENEPIQERFFRPHFLQAPGDLTVQEGKLCRMDCKVSGLPTPDLSWQLDGKPVRPDSAHKMLVRENGVHSLIIEPVTSRDAGIYTCIATNRAGQNSFSLELVVAAKEAHKPPVFIEKLQNTGVADGYPVRLECRVLGVPPPQIFWKKENESLTHSTDRVSMHQDNHGYICLLIQGATKEDAGWYTVSAKNEAGIVSCTARLDVYTQWHQQSQSTKPKKVRPSASRYAALSDQGLDIKAAFQPEANPSHLTLNTALVESEDL

SEQ ID NO: 31950 - protein, 1123 aa, Homo sapiens
MSGTSSHESFYDSLSDMQEESKNTDFFPGLSAFLSQEEINKSLDLARRAIADSETEDFDSEKEISQIFSTSPASLCEHPSHKETKLGEHASRRPQDNRSTPVQPLAEKQTKSISSPVSKRKPAMSPLLTRPSYIRSLRKAEKRGAKTPSTNVKPKTPHQRKGGPQSQLCDKAANLIEELTSIFKAAKPRNRSPNGESSSPDSGYLSPKNQPSALLSASASQSPMEDQGEMEREVKSPGARHCYQDNQDLAVPHNRKSHPQPHSALHFPAAPRFIQKLRSQEVAEGSRVYLECRVTGNPTPRVRWFCEGKELHNTPDIQIHCEGGDLHTLIIAEAFEDDTGRYTCLATNPSGSDTTSAEVFIEGASSTDSDSESLAFKSRAGAMPQAQKKTTSVSLTIGSSSPKTGVTTAVIQPLSVPVQQVHSPTSYLCRPDGTTTAYFPPVFTKELQNTAVAEGQVVVLECRVRGAPPLQVQWFRQGSEIQDSPDFRILQKKPRSTAEPEEICTLVIAETFPEDAGIFTCSARNDYGSATSTAQLVVTSANTENCSYESMGESNNDHFQHFPPPPPILETSSLELASKKPSEIQQVNNPELGLSRAALQMQFNAAERETNGVHPSRGVNGLINGKANSNKSLPTPAVLLSPTKEPPPLLAKPKLGFPKKASRTARIASDEEIQGTKDAVIQDLERKLRFKEDLLNNGQPRLTYEERMARRLLGADSATVFNIQEPEEETANQDIGSPHASVGSPLDGQKEYKVSSCEQRLISEIEYRLERSPVDESGDEVQYGDVPVENGMAPFFEMKLKHYKIFEGMPVTFTCRVAGNPKPKIYWFKDGKQISPKSDHYTIQRDLDGTCSLHTTASTLDDDGNYTIMAANPQGRISCTGRLMVQAVNQRGRSPRSPSGHPHVRRPRSRSRDSGDENEPIQERFFRPHFLQAPGDLTVQEGKLCRMDCKVSGLPTPDLSWQLDGKPVRPDSAHKMLVRENGVHSLIIEPVTSRDAGIYTCIATNRAGQNSFSLELVVAAKEAHKPPVFIEKLQNTGVADGYPVRLECRVLGVPPPQIFWKKENESLTHSTDRVSMHQDNHGYICLLIQGATKEDAGWYTVSAKNEAGIVSCTARLDVYISRH

SEQ ID NO: 31951 - protein, 673 aa, Homo sapiens
MAESSLYRQRLEVIAEKRRLQEEIRAARREVEEEKLRVERLKRKSLRERWLMDGAAAVPEPSEDPTSKDPQSPEGQAQARIRNLEDSLFTLQSQLQLLQSASTGAQHKPSGRPSWRRQGHRPLSQSIVEAGSVGQTDLNKRASLPAGLVGTPPESPSEPREDVLGFLPGPRQVPGAAGDSSEANGPCPSPIPTPEQGLSQRAVPSEGRVGEAKGGGVVSVVWEGLRATEDCATGATGPELEAKVEEVVLEAIGDRKGAGSLELPAWVKEDRGIVEVVWEGVGGSDAEAMGEIGRVPEVVQTSSPRLQERLEAAASIEGEDVPQGSPEGDGQGGSGGEEGSFIWVERVTLSEEWEELLVEGLEGPEVAGRERGDESPLGAEGAKTGGGEETWEAEKRKAEESMGIGSEEKPGTGRDEAEMSPVVERKGGEKKLELESRGSAEKLGTEREGGEEPLGIERKVEGHLRAEKEGDEEKRGAEEEEVEEPLGVEKKGGEEEPEATKEPLEAERKGGEETLEAEKRGGEESLETEKTQGTEGDLNLEQGSREGSESQAEEMNEAGPPLEANTETRPEKEGPQPQEKPVGALEEEGVKPQTAAEGQGPLGDATPLLAETPAPEQPAECQPLLQGEGPSANPSAHPVPTYAPARQPEPSAPTEGEEASGPKQKTCQCCAVM

SEQ ID NO: 31952 - protein, 164 aa, Homo sapiens
MVNSVVFFEITRDGKPLGRISIKLFADKIPKTAENFRALSTGEKGFRYKGSCFHRIIPGFMCQGGDFTRPNGTGDKSIYGEKFDDENLIRKHTGSGILSMANAGPNTNGSQFFICAAKTEWLDGKHVAFGKVKERVNIVEAMEHFGYRNSKTSKKITIADCGQF

SEQ ID NO: 31953 - protein, 319 aa, Homo sapiens
MSVGFIGAGQLAFALAKGFTAAGVLAAHKIMASSPDMDLATVSALRKMGVKLTPHNKETVQHSDVLFLAVKPHIIPFILDEIGADIEDRHIVVSCAAGVTISSIEKKLSAFRPAPRVIRCMTNTPVVVREGATVYATGTHAQVEDGRLMEQLLSSVGFCTEVEEDLIDAVTGLSGSGPAYAFTALDALADGGVKMGLPRRLAVRLGAQALLGAAKMLLHSEQHPGQLKDNVSSPGGATIHALHVLESGGFRSLLINAVEASCIRTRELQSMADQEQVSPAAIKKTILDKVKLDSPAGTALSPSGHTKLLPRSLAPAGKD

SEQ ID NO: 31954 - protein, 316 aa, Homo sapiens
MSVGFIGAGQLAFALAKGFTAAGVLAAHKIMASSPDMDLATVSALRKMGVKLTPHNKETVQHSDVLFLAVKPHIIPFILDEIGADIEDRHIVVSCAAGVTISSIEKKLSAFRPAPRVIRCMTNTPVVVREGATVYATGTHAQVEDGRLMEQLLSSVGFCTEVEEDLIDAVTGLSGSGPAYAFTALDALADGGVKMGLPRRLAVRLGAQALLGAAKMLLHSEQHPGQLKDNVSSPGGATIHALHVLESGGFRSLLINAVEASCIRTRELQSMADQEQVSPAAIKKTILDKDHLPLELGSPEGLHPLLLQYQLARAPS

SEQ ID NO: 31955 - protein, 346 aa, Homo sapiens
MVGGGRRVGRDEPVPSVGALGQGSPDSMSVGFIGAGQLAFALAKGFTAAGVLAAHKIMASSPDMDLATVSALRKMGVKLTPHNKETVQHSDVLFLAVKPHIIPFILDEIGADIEDRHIVVSCAAGVTISSIEKKLSAFRPAPRVIRCMTNTPVVVREGATVYATGTHAQVEDGRLMEQLLSSVGFCTEVEEDLIDAVTGLSGSGPAYAFTALDALADGGVKMGLPRRLAVRLGAQALLGAAKMLLHSEQHPGQLKDNVSSPGGATIHALHVLESGGFRSLLINAVEASCIRTRELQSMADQEQVSPAAIKKTILDKVKLDSPAGTALSPSGHTKLLPRSLAPAGKD

SEQ ID NO: 31956 - protein, 320 aa, Homo sapiens
MSVGFIGAGQLAYALARGFTAAGILSAHKIIASSPEMNLPTVSALRKMGVNLTRSNKETVKHSDVLFLAVKPHIIPFILDEIGADVQARHIVVSCAAGVTISSVEKKLMAFQPAPKVIRCMTNTPVVVQEGATVYATGTHALVEDGQLLEQLMSSVGFCTEVEEDLIDAVTGLSGSGPAYAFMALDALADGGVKMGLPRRLAIQLGAQALLGAAKMLLDSEQHPCQLKDNVCSPGGATIHALHFLESGGFRSLLINAVEASCIRTRELQSMADQEKISPAALKKTLLDRVKLESPTVSTLTPSSPGKLLTRSLALGGKKD

SEQ ID NO: 31957 - protein, 164 aa, Homo sapiens
MVNSVIFFDITVDGKPLGRISIKQFADKIPKTAENFRALSTGEKGFRYKGSCFHRIIPGFMCQGGDFTHPNGTGDKSIYGEKFDDENLIRKHTGSGILSMANAGPNTNGSQFFICTAKTEWLDGKHVAFGKVKERVNIVEAMEHFGYRNSKTSKKITIADCGQF

SEQ ID NO: 31958 - protein, 274 aa, Homo sapiens
MAAAEPSPRRVGFVGAGRMAGAIAQGLIRAGKVEAQHILASAPTDRNLCHFQALGCRTTHSNQEVLQSCLLVIFATKPHVLPAVLAEVAPVVTTEHILVSVAAGVSLSTLEELLPPNTRVLRVLPNLPCVVQEGAIVMARGRHVGSSETKLLQHLLEACGRCEEVPEAYVDIHTGLSGSGVAFVCAFSEALAEGAVKMGMPSSLAHRIAAQTLLGTAKMLLHEGQHPAQLRSDVCTPGGTTIYGLHALEQGGLRAATMSAVEAATCRAKELSRK

SEQ ID NO: 31959 - protein, 254 aa, Homo sapiens
MAAAEPSPRRVGFVGAGRMAGAIAQGLIRAGKVEAQHILASAPTDRNLCHFQALGCRTTHSNQEVLQSCLLVIFATKPHVLPAVLAEVAPVVTTEHILVSVAAGVSLSTLEEEGAIVMARGRHVGSSETKLLQHLLEACGRCEEVPEAYVDIHTGLSGSGVAFVCAFSEALAEGAVKMGMPSSLAHRIAAQTLLGTAKMLLHEGQHPAQLRSDVCTPGGTTIYGLHALEQGGLRAATMSAVEAATCRAKELSRK

SEQ ID NO: 31960 - protein, 795 aa, Homo sapiens [sequence omitted]

SEQ ID NO: 31961 - protein, 793 aa, Homo sapiens
MLSQVYRCGFQPFNQHLLPWVKCTTVFRSHCIQPSVIRHVRSWSNIPFITVPLSRTHGKSFAHRSELKHAKRIVVKLGSAVVTRGDECGLALGRLASIVEQVSVLQNQGREMMLVTSGAVAFGKQRLRHEILLSQSVRQALHSGQNQLKEMAIPVLEARACAAAGQSGLMALYEAMFTQYSICAAQILVTNLDFHDEQKRRNLNGTLHELLRMNIVPIVNTNDAVVPPAEPNSDLQGVISVKDNDSLAARLAVEMKTDLLIVLSDVEGLFDSPPGSDDAKLIDIFYPGDQQSVTFGTKSRVGMGGMEAKVKAALWALQGGTSVVIANGTHPKVSGHVITDIVEGKKVGTFFSEVKPAGPTVEQQGEMARSGGRMLATLEPEQRAEIIHHLADLLTDQRDEILLANKKDLEEAEGRLAAPLLKRLSLSTSKLNSLAIGLRQIAASSQDSVGRVLRRTRIAKNLELEQVTVPIGVLLVIFESRPDCLPQVAALAIASGNGLLLKGGKEAAHSNRILHLLTQEALSIHGVKEAVQLVNTREEVEDLCRLDKMIDLIIPRGSSQLVRDIQKAAKGIPVMGHSEGICHMYVDSEASVDKVTRLVRDSKCEYPAACNALETLLIHRDLLRTPLFDQIIDMLRVEQVKIHAGPKFASYLTFSPSEVKSLRTEYGDLELCIEVVDNVQDAIDHIHKYGSSHTDVIVTEDENTAEFFLQHVDSACVFWNASTRFSDGYRFGLGAEVGISTSRIHARGPVGLEGLLTTKWLLRGKDHVVSDFSEHGSLKYLHENLPIPQRNTN

SEQ ID NO: 31962 - protein, 196 aa, Homo sapiens
MSRRSMLLAWALPSLLRLGAAQETEDPACCSPIVPRNEWKALASECAQHLSLPLRYVVVSHTAGSSCNTPASCQQQARNVQHYHMKTLGWCDVGYNFLIGEDGLVYEGRGWNFTGAHSGHLWNPMSIGISFMGNYMDRVPTPQAIRAAQGLLACGVAQGALRSNYVLKGHRDVQRTLSPGNQLYHLIQNWPHYRSP

SEQ ID NO: 31963 - protein, 710 aa, Homo sapiens
MADAKYVLCRWEKRLWPAKVLARTATSTKNKRRKEYFLAVQILSLEEKIKVKSTEVEILEKSQIEAIASSLASQNEVPAAPLEELAYRRSLRVALDVLSEGSIWSQESSAGTGRADRSLRGKPMEHVSSPCDSNSSSLPRGDVLGSSRPHRRRPCVQQSLSSSFTCEKDPECKVDHKKGLRKSENPRGPLVLPAGGGAQDESGSRIHHKNWTLASKRGGNSAQKASLCLNGSSLSEDDTERDMGSKGGSWAAPSLPSGVREDDPCANAEGHDPGLPLGSLTAPPAPEPSACSEPGECPAKKRPRLDGSQRPPAVQLEPMAAGAAPSPGPGPGPRESVTPRSTARLGPPPSHASADATRCLPCPDSQKLEKECQSSEESMGSNSMRSILEEDEEDEEPPRVLLYHEPRSFEVGMLVWHKHKKYPFWPAVVKSVRQRDKKASVLYIEGHMNPKMKGFTVSLKSLKHFDCKEKQTLLNQAREDFNQDIGWCVSLITDYRVRLGCGSFAGSFLEYYAADISYPVRKSIQQDVLGTKLPQLSKGSPEEPVVGCPLGQRQPCRKMLPDRSRAARDRANQKLVEYIVKAKGAESHLRAILKSRKPSRWLQTFLSSSQYVTCVETYLEDEGQLDLVVKYLQGVYQEVGAKVLQRTNGDRIRFILDVLLPEAIICAISAVDEVDYKTAEEKYIKGPSLSYREKEIFDNQLLEERNRRRR

SEQ ID NO: 31964 - protein, 642 aa, Homo sapiens
MVSASQNEVPAAPLEELAYRRSLRVALDVLSEGSIWSQESSAGTGRADRSLRGKPMEHVSSPCDSNSSSLPRGDVLGSSRPHRRRPCVQQSLSSSFTCEKDPECKVDHKKGLRKSENPRGPLVLPAGGGAQDESGSRIHHKNWTLASKRGGNSAQKASLCLNGSSLSEDDTERDMGSKGGSWAAPSLPSGVREDDPCANAEGHDPGLPLGSLTAPPAPEPSACSEPGECPAKKRPRLDGSQRPPAVQLEPMAAGAAPSPGPGPGPRESVTPRSTARLGPPPSHASADATRCLPCPDSQKLEKECQSSEESMGSNSMRSILEEDEEDEEPPRVLLYHEPRSFEVGMLVWHKHKKYPFWPAVVKSVRQRDKKASVLYIEGHMNPKMKGFTVSLKSLKHFDCKEKQTLLNQAREDFNQDIGWCVSLITDYRVRLGCGSFAGSFLEYYAADISYPVRKSIQQDVLGTKLPQLSKGSPEEPVVGCPLGQRQPCRKMLPDRSRAARDRANQKLVEYIVKAKGAESHLRAILKSRKPSRWLQTFLSSSQYVTCVETYLEDEGQLDLVVKYLQGVYQEVGAKVLQRTNGDRIRFILDVLLPEAIICAISAVDEVDYKTAEEKYIKGPSLSYREKEIFDNQLLEERNRRRR

SEQ ID NO: 31965 - protein, 731 aa, Homo sapiens
MADAKYVLCRWEKRLWPAKVLARTATSTKNKRRKEYFLAVQILSLEEKIKVKSTEVEILEKSQIEAIASSLASQNEVPAAPLEELAYRRSLRVALDVLSEGSIWSQESSAGTGRADRSLRGKPMEHVSSPCDSNSSSLPRGDVLGSSRPHRRRPCVQQSLSSSFTCEKDPECKVDHKKGLRKSENPRGPLVLPAGGGAQDESGSRIHHKNWTLASKRGGNSAQKASLCLNGSSLSEDDTERDMGSKGGSWAAPSLPSGVREDDPCANAEGHDPGLPLGSLTAPPAPEPSACSEPGECPAKKRPRLDGSQRPPAVQLEPMAAGAAPSPGPGPGPRESVTPRSTARLGPPPSHASADATRCLPCPDSQKLEKECQSSEESMGSNSMRSILEEDEEDEEPPRVLLYHEPRSFEVGMLVWHKHKKYPFWPAVVKSVRQRDKKASVLYIEGHMNPKMKGFTVSLKSLKHFDCKEKQTLLNQAREDFNQDIGWCVSLITDYRVRLGCGSFAGSFLEYYAADISYPVRKSIQQDVLGTKLPQLSKGSPEEPVVGCPLGQRQPCRKMLPDRSRAARDRANQKLVEYIVKAKGAESHLRAILKSRKPSRWLQTFLSSSQYVTCVETYLEDEGQLDLVVKYLQGVYQEVGAKVLQRTNGDRIRFILDVLLPECWEMRVRALDPVRRRSRLLDPCAEMELLRSCQHQGVRTPSLLRAHRCFPASVGHHLCDLCGGRGGLQDG

SEQ ID NO: 31966 - protein, 301 aa, Homo sapiens
MTTLDDKLLGEKLQYYYSSSEDEDSDHEDKDRGRCAPASSSVPAEAELAGEGISVNTGPKGVINDWRRFKQLETEQREEQCREMERLIKKLSMTCRSHLDEEEEQQKQKDLQEKISGKMTLKEFAIMNEDQDDEEFLQQYRKQRMEEMRQQLHKGPQFKQVFEISSGEGFLDMIDKEQKSIVIMVHIYEDGIPGTEAMNGCMICLAAEYPAVKFCKVKSSVIGASSQFTRNALPALLIYKGGELIGNFVRVTDQLGDDFFAVDLEAFLQEFGLLPEKEVLVLTSVRNSATCHSEDSDLEID

SEQ ID NO: 31967 - protein, 218 aa, Homo sapiens
MERLIKKLSMTCRSHLDEEEEQQKQKDLQEKISGKMTLKEFAIMNEDQDDEEFLQQYRKQRMEEMRQQLHKGPQFKQVFEISSGEGFLDMIDKEQKSIVIMVHIYEDGIPGTEAMNGCMICLAAEYPAVKFCKVKSSVIGASSQFTRNALPALLIYKGGELIGNFVRVTDQLGDDFFAVDLEAFLQEFGLLPEKEVLVLTSVRNSATCHSEDSDLEID

SEQ ID NO: 31968 - protein, 154 aa, Homo sapiens
MAENSGRAGKSSGSGAGKGAVSAEQVIAGFNRLRQEQRGLASKAAELEMELNEHSLVIDTLKEVDETRKCYRMVGGVLVERTVKEVLPALENNKEQIQKIIETLTQQLQAKGKELNEFREKHNIRLMGEDEKPAAKENSEGAGAKASSAGVLVS

SEQ ID NO: 31969 - protein, 368 aa, Homo sapiens
MWPLWRLVSLLALSQALPFEQRGFWDFTLDDGPFMMNDEEASGADTSGVLDPDSVTPTYSAMCPFGCHCHLRVVQCSDLGLKSVPKEISPDTTLLDLQNNDISELRKDDFKGLQHLYALVLVNNKISKIHEKAFSPLRKLQKLYISKNHLVEIPPNLPSSLVELRIHDNRIRKVPKGVFSGLRNMNCIEMGGNPLENSGFEPGAFDGLKLNYLRISEAKLTGIPKDLPETLNELHLDHNKIQAIELEDLLRYSKLYRLGLGHNQIRMIENGSLSFLPTLRELHLDNNKLARVPSGLPDLKLLQVVYLHSNNITKVGVNDFCPMGFGVKRAYYNGISLFNNPVPYWEVQPATFRCVTDRLAIQFGNYKK

SEQ ID NO: 31970 - protein, 197 aa, Homo sapiens
MAAVKDSCGKGEMATGNGRRLHLGIPEAVFVEDVDSFMKQPGNETADTVLKKLDEQYQKYKFMELNLAQKKRRLKGQIPEIKQTLEILKYMQKKKESTNSMETRFLLADNLYCKASVPPTDKVCLWLGANVMLEYDIDEAQALLEKNLSTATKNLDSLEEDLDFLRDQFTTTEVNMARVYNWDVKRRNKDDSTKNKA

SEQ ID NO: 31971 - protein, 192 aa, Homo sapiens
MAPQPMIHTQQGLRTSSPSTPSPEHQEDVDSFMKQPGNETADTVLKKLDEQYQKYKFMELNLAQKKRRLKGQIPEIKQTLEILKYMQKKKESTNSMETRFLLADNLYCKASVPPTDKVCLWLGANVMLEYDIDEAQALLEKNLSTATKNLDSLEEDLDFLRDQFTTTEVNMARVYNWDVKRRNKDDSTKNKA

SEQ ID NO: 31972 - protein, 592 aa, Homo sapiens
MASTSRDVIAGRGIHSKVKSAKLLEVLNAMEEEESNNNREEIFIAPPDNAAGEFTDEDSGDEDSQRGAHLPGSVLHASVLCEDSGTGEDNDDLELQPAKKRQKAVVKPQRIWTKRDIRPDFGSWTASDPHIEDLKSQELSPVGLFELFFDEGTINFIVNETNRYAWQKNVNLSLTAQELKCVLGILILSGYISYPRRRMFWETSPDSHHHLVADAIRRDRFELIFSYLHFADNNELDASDRFAKVRPLIIRMNCNFQKHAPLEEFYSFGESMCEYFGHRGSKQLHRGKPVRLGYKIWCGTTSRGYLVWFEPSQGTLFTKPDRSLDLGGSMVIKFVDALQERGFLPYHIFFDKVFTSVKLMSILRKKGVKATGTVREYRTERCPLKDPKELKKMKRGSFDYKVDESEEIIVCRWHDSSVVNICSNAVGIEPVRLTSRHSGAAKTRTQVHQPSLVKLYQEKVGGVGRMDQNIAKYKVKIRGMKWYSSFIGYVIDAALNNAWQLHRICCQDAQVDLLAFRRYIACVYLESNADTTSQGRRSRRLETESRFDMIGHWIIHQDKRTRCALCHSQTNTRCEKCQKGVHAKCFREYHIR

SEQ ID NO: 31973 - protein, 341 aa, Homo sapiens
MNCNFQKHAPLEEFYSFGESMCEYFGHRGSKQLHRGKPVRLGYKIWCGTTSRGYLVWFEPSQGTLFTKPDRSLDLGGSMVIKFVDALQERGFLPYHIFFDKVFTSVKLMSILRKKGVKATGTVREYRTERCPLKDPKELKKMKRGSFDYKVDESEEIIVCRWHDSSVVNICSNAVGIEPVRLTSRHSGAAKTRTQVHQPSLVKLYQEKVGGVGRMDQNIAKYKVKIRGMKWYSSFIGYVIDAALNNAWQLHRICCQDAQVDLLAFRRYIACVYLESNADTTSQGRRSRRLETESRFDMIGHWIIHQDKRTRCALCHSQTNTRCEKCQKGVHAKCFREYHIR

SEQ ID NO: 31974 - protein, 567 aa, Homo sapiens
MHGRLKVKTSEEQAEAKRLEREQKLKLYQSATQAVFQKRQAGELDESVLELTSQILGANPDFATLWNCRREVLQQLETQKSPEELAALVKAELGFLESCLRVNPKSYGTWHHRCWLLGRLPEPNWTRELELCARFLEVDERNFHCWDYRRFVATQAAVPPAEELAFTDSLITRNFSNYSSWHYRSCLLPQLHPQPDSGPQGRLPEDVLLKELELVQNAFFTDPNDQSAWFYHRWLLGRADPQDALRCLHVSRDEACLTVSFSRPLLVGSRMEILLLMVDDSPLIVEWRTPDGRNRPSHVWLCDLPAASLNDQLPQHTFRVIWTAGDVQKECVLLKGRQEGWCRDSTTDEQLFRCELSVEKSTVLQSELESCKELQELEPENKWCLLTIILLMRALDPLLYEKETLQYFQTLKAVDPMRATYLDDLRSKFLLENSVLKMEYAEVRVLHLAHKDLTVLCHLEQLLLVTHLDLSHNRLRTLPPALAALRCLEVLQASDNAIESLDGVTNLPRLQELLLCNNRLQQPAVLQPLASCPRLVLLNLQGNPLCQAVGILEQLAELLPSVSSVLT

SEQ ID NO: 31975 - protein, 101 aa, Homo sapiens
MSSAAGFCASRPGLLFLGLLLLPLVVAFASAEAEEDGDLQCLCVKTTSQVRPRHITSLEVIKAGPHCPTAQLIATLKNGRKICLDLQAPLYKKIIKKLLES

SEQ ID NO: 31976 - protein, 391 aa, Homo sapiens
MCSQLWFLTDRRIREDYPQVQILRALRQRCSEQDVRFRAVLMDQIAVTIVGGHLGLQLNQKALTTFPDVVLVRVPTPSVQSDSDITVLRHLEKLGCRLVNRPQSILNCINKFWTFQELAGHGVPMPDTFSYGGHEDFSKMIDEAEPLGYPVVVKSTRGHRGKAVFLARDKHHLSDICHLIRHDVPYLFQKYVKESHGKDIRVVVVGGQVIGSMLRCSTDGRMQSNCSLGGVGVKCPLTEQGKQLAIQVSNILGMDFCGIDLLIMDDGSFVVCEANANVGFLAFDQACNLDVGGIIADYTMSLLPNRQTGKMAVLPGLSSPREKNEPDGCASAQGVAESVYTINSGSTSSESEPELGEIRDSSASTMGAPPSMLPEPGYNINNRIASELKLK

SEQ ID NO: 31977 - protein, 259 aa, Homo sapiens
MSKYKLIMLRHGEGAWNKENRFCSWVDQKLNSEGMEEARNCGKQLKALNFEFDLVFTSVLNRSIHTAWLILEELGQEWVPVESSWRLNERHYGALIGLNREQMALNHGEEQVRLWRRSYNVTPPPIEESHPYYQEIYNDRRYKVCDVPLDQLPRSESLKDVLERLLPYWNERIAPEVLRGKTILISAHGNSSRALLKHLEGISDEDIINITLPTGVPILLELDENLRAVGPHQFLGDQEAIQAAIKKVEDQGKVKQAKK

SEQ ID NO: 31978 - protein, 660 aa, Homo sapiens
MDDWKPSPLIKPFGARKKRSWYLTWKYKLTNQRALRRFCQTGAVLFLLVTVIVNIKLILDTRRAISEANEDPEPEQDYDEALGRLEPPRRRGSGPRRVLDVEVYSSRSKVYVAVDGTTVLEDEAREQGRGIHVIVLNQATGHVMAKRVFDTYSPHEDEAMVLFLNMVAPGRVLICTVKDEGSFHLKDTAKALLRSLGSQAGPALGWRDTWAFVGRKGGPVFGEKHSKSPALSSWGDPVLLKTDVPLSSAEEAECHWADTELNRRRRRFCSKVEGYGSVCSCKDPTPIEFSPDPLPDNKVLNVPVAVIAGNRPNYLYRMLRSLLSAQGVSPQMITVFIDGYYEEPMDVVALFGLRGIQHTPISIKNARVSQHYKASLTATFNLFPEAKFAVVLEEDLDIAVDFFSFLSQSIHLLEEDDSLYCISAWNDQGYEHTAEDPALLYRVETMPGLGWVLRRSLYKEELEPKWPTPEKLWDWDMWMRMPEQRRGRECIIPDVSRSYHFGIVGLNMNGYFHEAYFKKHKFNTVPGVQLRNVDSLKKEAYEVEVHRLLSEAEVLDHSKNPCEDSFLPDTEGHTYVAFIRMEKDDDFTTWTQLAKCLHIWDLDVRGNHRGLWRLFRKKNHFLMVGVPASPYSVKKPPSVTPIFLEPPPKEEGAPGAPEQT

SEQ ID NO: 31979 - protein, 748 aa, Homo sapiens
MDDWKPSPLIKPFGARKKRSWYLTWKYKLTNQRALRRFCQTGAVLFLLVTVIVNIKLILDTRRAISEANEDPEPEQDYDEALGRLEPPRRRGSGPRRVLDVEVYSSRSKVYVAVDGTTVLEDEAREQGRGIHVIVLNQATGHVMAKRVFDTYSPHEDEAMVLFLNMVAPGRVLICTVKDEGSFHLKDTAKALLRSLGSQAGPALGWRDTWAFVGRKGGPVFGEKHSKSPALSSWGDPVLLKTDVPLSSAEEAECHWADTELNRRRRRFCSKVEGYGSVCSCKDPTPIEFSPDPLPDNKVLNVPVAVIAGNRPNYLYRMLRSLLSAQGVSPQMITVFIDGYYEEPMDVVALFGLRGIQHTPISIKNARVSQHYKASLTATFNLFPEAKFAVVLEEDLDIAVDFFSFLSQSIHLLEEDDSLYCISAWNDQGYEHTAEDPALLYRVETMPGLGWVLRRSLYKEELEPKWPTPEKLWDWDMWMRMPEQRRGRECIIPDVSRSYHFGIVGLNMNGYFHEAYFKKHKFNTVPGVQLRNVDSLKKEAYEVEVHRLLSEAEVLDHSKNPCEDSFLPDTEGHTYVAFIRMEKDDDFTTWTQLAKCLHIWDLDVRGNHRGLWRLFRKKNHFLMSEEATLSHPNFPGATPKGGGSPRSPRTDMRPPPGPCGAGPGSESNLFIDCPEGLENRPNLEGLDFFLGWNAALRVGLALTQETAVPNPWTGPAGAHMLTQTHSETLRHWTRPPLSLLFVQISKAG

SEQ ID NO: 31980 - protein, 661 aa, Homo sapiens
MDLVLKRCLLHLAVIGALLAVGATKVPRNQDWLGVSRQLRTKAWNRQLYPEWTEAQRLDCWRGGQVSLKVSNDGPTLIGANASFSIALNFPGSQKVLPDGQVIWVNNTIINGSQVWGGQPVYPQETDDACIFPDGGPCPSGSWSQKRSFVYVWKTWGQYWQVLGGPVSGLSIGTGRAMLGTHTMEVTVYHRRGSRSYVPLAHSSSAFTITDQVPFSVSVSQLRALDGGNKHFLRNQPLTFALQLHDPSGYLAEADLSYTWDFGDSSGTLISRALVVTHTYLEPGPVTAQVVLQAAIPLTSCGSSPVPGTTDGHRPTAEAPNTTAGQVPTTEVVGTTPGQAPTAEPSGTTSVQVPTTEVISTAPVQMPTAESTGMTPEKVPVSEVMGTTLAEMSTPEATGMTPAEVSIVVLSGTTAAQVTTTEWVETTARELPIPEPEGPDASSIMSTESITGSLGPLLDGTATLRLVKRQVPLDCVLYRYGSFSVTLDIVQGIESAEILQAVPSGEGDAFELTVSCQGGLPKEACMEISSPGCQPPAQRLCQPVLPSPACQLVLHQILKGGSGTYCLNVSLADTNSLAVVSTQLIMPGQEAGLGQVPLIVGILLVLMAVVLASLIYRRRLMKQDFSVPQLPHSSSHWLRLPRIFCSCPIGENSPLLSGQQV

SEQ ID NO: 31981 - protein, 668 aa, Homo sapiens
MDLVLKRCLLHLAVIGALLAVGATKVPRNQDWLGVSRQLRTKAWNRQLYPEWTEAQRLDCWRGGQVSLKVSNDGPTLIGANASFSIALNFPGSQKVLPDGQVIWVNNTIINGSQVWGGQPVYPQETDDACIFPDGGPCPSGSWSQKRSFVYVWKTWGQYWQVLGGPVSGLSIGTGRAMLGTHTMEVTVYHRRGSRSYVPLAHSSSAFTITDQVPFSVSVSQLRALDGGNKHFLRNQPLTFALQLHDPSGYLAEADLSYTWDFGDSSGTLISRALVVTHTYLEPGPVTAQVVLQAAIPLTSCGSSPVPGTTDGHRPTAEAPNTTAGQVPTTEVVGTTPGQAPTAEPSGTTSVQVPTTEVISTAPVQMPTAESTGMTPEKVPVSEVMGTTLAEMSTPEATGMTPAEVSIVVLSGTTAAQVTTTEWVETTARELPIPEPEGPDASSIMSTESITGSLGPLLDGTATLRLVKRQVPLDCVLYRYGSFSVTLDIVQGIESAEILQAVPSGEGDAFELTVSCQGGLPKEACMEISSPGCQPPAQRLCQPVLPSPACQLVLHQILKGGSGTYCLNVSLADTNSLAVVSTQLIMPVPGILLTGQEAGLGQVPLIVGILLVLMAVVLASLIYRRRLMKQDFSVPQLPHSSSHWLRLPRIFCSCPIGENSPLLSGQQV

SEQ ID NO: 31982 - protein, 575 aa, Homo sapiens
MDLVLKRCLLHLAVIGALLAVGATKGSQVWGGQPVYPQETDDACIFPDGGPCPSGSWSQKRSFVYVWKTWGQYWQVLGGPVSGLSIGTGRAMLGTHTMEVTVYHRRGSRSYVPLAHSSSAFTITDQVPFSVSVSQLRALDGGNKHFLRNQPLTFALQLHDPSGYLAEADLSYTWDFGDSSGTLISRALVVTHTYLEPGPVTAQVVLQAAIPLTSCGSSPVPGTTDGHRPTAEAPNTTAGQVPTTEVVGTTPGQAPTAEPSGTTSVQVPTTEVISTAPVQMPTAESTGMTPEKVPVSEVMGTTLAEMSTPEATGMTPAEVSIVVLSGTTAAQVTTTEWVETTARELPIPEPEGPDASSIMSTESITGSLGPLLDGTATLRLVKRQVPLDCVLYRYGSFSVTLDIVQGIESAEILQAVPSGEGDAFELTVSCQGGLPKEACMEISSPGCQPPAQRLCQPVLPSPACQLVLHQILKGGSGTYCLNVSLADTNSLAVVSTQLIMPGQEAGLGQVPLIVGILLVLMAVVLASLIYRRRLMKQDFSVPQLPHSSSHWLRLPRIFCSCPIGENSPLLSGQQV

SEQ ID NO: 31983 - protein, 619 aa, Homo sapiens
MDLVLKRCLLHLAVIGALLAVGATKVPRNQDWLGVSRQLRTKAWNRQLYPEWTEAQRLDCWRGGQVSLKVSNDGPTLIGANASFSIALNFPGSQKVLPDGQVIWVNNTIINGSQVWGGQPVYPQETDDACIFPDGGPCPSGSWSQKRSFVYVWKTWGQYWQVLGGPVSGLSIGTGRAMLGTHTMEVTVYHRRGSRSYVPLAHSSSAFTITDQVPFSVSVSQLRALDGGNKHFLRNQPLTFALQLHDPSGYLAEADLSYTWDFGDSSGTLISRALVVTHTYLEPGPVTAQVVLQAAIPLTSCGSSPVPGTTDGHRPTAEAPNTTAGQVPTTEVVGTTPGQAPTAEPSGTTSVQVPTTEVISTAPVQMPTAESTAAQVTTTEWVETTARELPIPEPEGPDASSIMSTESITGSLGPLLDGTATLRLVKRQVPLDCVLYRYGSFSVTLDIVQGIESAEILQAVPSGEGDAFELTVSCQGGLPKEACMEISSPGCQPPAQRLCQPVLPSPACQLVLHQILKGGSGTYCLNVSLADTNSLAVVSTQLIMPGQEAGLGQVPLIVGILLVLMAVVLASLIYRRRLMKQDFSVPQLPHSSSHWLRLPRIFCSCPIGENSPLLSGQQV

SEQ ID NO: 31984 - protein, 626 aa, Homo sapiens
MDLVLKRCLLHLAVIGALLAVGATKVPRNQDWLGVSRQLRTKAWNRQLYPEWTEAQRLDCWRGGQVSLKVSNDGPTLIGANASFSIALNFPGSQKVLPDGQVIWVNNTIINGSQVWGGQPVYPQETDDACIFPDGGPCPSGSWSQKRSFVYVWKTWGQYWQVLGGPVSGLSIGTGRAMLGTHTMEVTVYHRRGSRSYVPLAHSSSAFTITDQVPFSVSVSQLRALDGGNKHFLRNQPLTFALQLHDPSGYLAEADLSYTWDFGDSSGTLISRALVVTHTYLEPGPVTAQVVLQAAIPLTSCGSSPVPGTTDGHRPTAEAPNTTAGQVPTTEVVGTTPGQAPTAEPSGTTSVQVPTTEVISTAPVQMPTAESTAAQVTTTEWVETTARELPIPEPEGPDASSIMSTESITGSLGPLLDGTATLRLVKRQVPLDCVLYRYGSFSVTLDIVQGIESAEILQAVPSGEGDAFELTVSCQGGLPKEACMEISSPGCQPPAQRLCQPVLPSPACQLVLHQILKGGSGTYCLNVSLADTNSLAVVSTQLIMPVPGILLTGQEAGLGQVPLIVGILLVLMAVVLASLIYRRRLMKQDFSVPQLPHSSSHWLRLPRIFCSCPIGENSPLLSGQQV

SEQ ID NO: 31985 - protein, 608 aa, Homo sapiens
MEMRWFLSKIQDDFRGGKINLEKTQRLLEKLDIRCSYIHVKQIFKDNDRLKQGRITIEEFRAIYRIITHREEIIEIFNTYSENRKILLASNLAQFLTQEQYAAEMSKAIAFEIIQKYEPIEEVRKAHQMSLEGFTRYMDSRECLLFKNECRKVYQDMTHPLNDYFISSSHNTYLVSDQLLGPSDLWGYVSALVKGCRCLEIDCWDGAQNEPVVYHGYTLTSKLLFKTVIQAIHKYAFMTSDYPVVLSLENHCSTAQQEVMADNLQATFGESLLSDMLDDFPDTLPSPEALKFKILVKNKKIGTLKETHERKGSDKRGDNQDKETGVKKLPGVMLFKKKKTRKLKIALALSDLVIYTKAEKFKSFQHSRLYQQFNENNSIGETQARKLSKLRVHEFIFHTRKFITRIYPKATRADSSNFNPQEFWNIGCQMVALNFQTPGLPMDLQNGKFLDNGGSGYILKPHFLRESKSYFNPSNIKEGMPITLTIRLISGIQLPLTHSSSNKGDSLVIIEVFGVPNDQMKQQTRVIKKNAFSPRWNETFTFIIHVPELALIRFVVEGQGLIAGNEFLGQYTLPLLCMNKGYRRIPLFSRMGESLEPASLFVYVWYVR

SEQ ID NO: 31986 - protein, 415 aa, Homo sapiens
MEMRWFLSKIQDDFRGGKINLEKTQRLLEKLDIRCSYIHVKQIFKTSDYPVVLSLENHCSTAQQEVMADNLQATFGESLLSDMLDDFPDTLPSPEALKFKILVKNKKIGTLKETHERKGSDKRGDNQDKETGVKKLPGVMLFKKKKTRKLKIALALSDLVIYTKAEKFKSFQHSRLYQQFNENNSIGETQARKLSKLRVHEFIFHTRKFITRIYPKATRADSSNFNPQEFWNIGCQMVALNFQTPGLPMDLQNGKFLDNGGSGYILKPHFLRESKSYFNPSNIKEGMPITLTIRLISGIQLPLTHSSSNKGDSLVIIEVFGVPNDQMKQQTRVIKKNAFSPRWNETFTFIIHVPELALIRFVVEGQGLIAGNEFLGQYTLPLLCMNKGYRRIPLFSRMGESLEPASLFVYVWYVR

SEQ ID NO: 31987 - protein, 504 aa, Homo sapiens
MSKAIAFEIIQKYEPIEEVRKAHQMSLEGFTRYMDSRECLLFKNECRKVYQDMTHPLNDYFISSSHNTYLVSDQLLGPSDLWGYVSALVKGCRCLEIDCWDGAQNEPVVYHGYTLTSKLLFKTVIQAIHKYAFMTSDYPVVLSLENHCSTAQQEVMADNLQATFGESLLSDMLDDFPDTLPSPEALKFKILVKNKKIGTLKETHERKGSDKRGDNQDKETGVKKLPGVMLFKKKKTRKLKIALALSDLVIYTKAEKFKSFQHSRLYQQFNENNSIGETQARKLSKLRVHEFIFHTRKFITRIYPKATRADSSNFNPQEFWNIGCQMVALNFQTPGLPMDLQNGKFLDNGGSGYILKPHFLRESKSYFNPSNIKEGMPITLTIRLISGIQLPLTHSSSNKGDSLVIIEVFGVPNDQMKQQTRVIKKNAFSPRWNETFTFIIHVPELALIRFVVEGQGLIAGNEFLGQYTLPLLCMNKGYRRIPLFSRMGESLEPASLFVYVWYVR

SEQ ID NO: 31988 - protein, 538 aa, Homo sapiens
MAAEQDPEARAAARPLLTDLYQATMALGYWRAGRARDAAEFELFFRRCPFGGAFALAAGLRDCVRFLRAFRLRDADVQFLASVLPPDTDPAFFEHLRALDCSEVTVRALPEGSLAFPGVPLLQVSGPLLVVQLLETPLLCLVSYASLVATNAARLRLIAGPEKRLLEMGLRRAQGPDGGLTASTYSYLGGFDSSSNVLAGQLRGVPVAGTLAHSFVTSFSGSEVPPDPMLAPAAGEGPGVDLAAKAQVWLEQVCAHLGLGVQEPHPGERAAFVAYALAFPRAFQGLLDTYSVWRSGLPNFLAVALALGELGYRAVGVRLDSGDLLQQAQEIRKVFRAAAAQFQVPWLESVLIVVSNNIDEEALARLAQEGSEVNVIGIGTSVVTCPQQPSLGGVYKLVAVGGQPRMKLTEDPEKQTLPGSKAAFRLLGSDGSPLMDMLQLAEEPVPQAGQELRVWPPGAQEPCTVRPAQVEPLLRLCLQQGQLCEPLPSLAESRALAQLSLSRLSPEHRRLRSPAQYQVVLSERLQALVNSLCAGQSP

SEQ ID NO: 31989 - protein, 567 aa, Homo sapiens
MAAEQDPEARAAARPLLTDLYQATMALGYWRAGRARDAAEFELFFRRCPFGGAFALAAGLRDCVRFLRAFRLRDADVQFLASVLPPDTDPAFFEHLRALDCSEVTVRALPEGSLAFPGVPLLQVSGPLLVVQLLETPLLCLVSYASLVATNAARLRLIAGPEKRLLEMGLRRAQGPDGGLTASTYSYLGGFDSSSNVLAGQLRGVPVAGTLAHSFVTSFSGSEVPPDPMLAPAAGEGPGVDLAAKAQVWLEQVCAHLGLGVQEPHPGERAAFVAYALAFPRAFQGLLDTYSVWRSGLPNFLAVALALGELGYRAVGVRLDSGDLLQQAQEIRKVFRAAAAQFQVPWLESVLIVVSNNIDEEALARLAQEGSEVNVIGIGTSVVTCPQQPSLGGVYKLVAVGGQPRMKLTEDPEKQTLPGSKAAFRLLGSDGSPLMDMLQLAEEPVPQAGQELRVWPPGAQEPCTVRPAQVEPLLRLCLQQGQLCEPLPSLAESRALAQLSLSRLSPEHRRLRSPAQYQVGGGGPPCHSALCAPALTLPTAPVLCSLQVVLSERLQALVNSLCAGQSP

SEQ ID NO: 31990 - protein, 525 aa, Homo sapiens
MAAEQDPEARAAARPLLTDLYQATMALGYWRAGRARDAAEFELFFRRCPFGGAFALAAGLRDCVRFLRAFRLRDADVQFLASVLPPDTDPAFFEHLRALDCSEVTVRALPEGSLAFPGVPLLQVSGPLLVVQLLETPLLCLVSYASLVATNAARLRLIAGPEKRLLEMGLRRAQGPDGGLTASTYSYLGGFDSSSNVLAGQLRGVPVAGTLAHSFVTSFSGSEVPPDPMLAPAAGEGPGVDLAAKAQVWLEQVCAHLGLGVQEPHPGERAAFVAYALAFPRAFQGLLDTYSVWRSGLPNFLAVALALGELGYRAVGVRLDSGDLLQQAQEIRKVFRAAAAQFQVPWLESVLIVVSNNIDEEALARLAQEGSEVNVIGIGTSVVTCPQQPSLGGVYKLVAVGGQPRMKLTEDPEKQTLPGSKAAFRLLGSDGSPLMDMLQLAEEPVPQAGQELRVWPPGAQEPCTVRPAQLCEPLPSLAESRALAQLSLSRLSPEHRRLRSPAQYQVVLSERLQALVNSLCAGQSP

SEQ ID NO: 31991 - protein, 436 aa, Homo sapiens
MMATQTLSIDSYQDGQQMQVVTELKTEQDPNCSEPDAEGVSPPPVESQTPMDVDKQAIYRHPLFPLLALLFEKCEQSTQGSEGTTSASFDVDIENFVRKQEKEGKPFFCEDPETDNLMVKAIQVLRIHLLELEKVNELCKDFCSRYIACLKTKMNSETLLSGEPGSPYSPVQSQQIQSAITGTISPQGIVVPASALQQGNVAMATVAGGTVYQPVTVVTPQGQVVTQTLSPGTIRIQNSQLQLQLNQDLSILHQDDGSSKNKRGVLPKHATNVMRSWLFQHIGHPYPTEDEKKQIAAQTNLTLLQVNNWFINARRRILQPMLDSSCSETPKTKKKTAQNRPVQRFWPDSIASGVAQPPPSELTMSEGAVVTITTPVNMNVDSLQSLSSDGATLAVQQVMMAGQSEDESVDSTEEDAGALAPAHISGLVLENSDSLQ

SEQ ID NO: 31992 - protein, 405 aa, Homo sapiens
MMATQTLSIDSYQDGQQMQVVTELKTEQDPNCSEPDAEGVSPPPVESQTPMDVDKQAIYRHPLFPLLALLFEKCEQSTQGSEGTTSASFDVDIENFVRKQEKEGKPFFCEDPETDNLMVKAIQVLRIHLLELEKVNELCKDFCSRYIACLKTKMNSETLLSGEPGSPYSPVQSQQIQSAITGTISPQGIVVPASALQQGNVAMATVAGGTVYQPVTVVTPQGQVVTQTLSPGTIRIQNSQLQLQLNQDLSILHQDDGSSKNKRGVLPKHATNVMRSWLFQHIGHPYPTEDEKKQIAAQTNLTLLQVNNWFINARRRILQPMLDSSCSETPKTKKKTAQNRPVQRFWPDSIASGVAQPPPSELTMSEGTGGRPRPDMVDHGVGIMNKRPGSGLLAVSHRARPRMTS

SEQ ID NO: 31993 - protein, 461 aa, Homo sapiens
MATFSRQEFFQQLLQGCLLPTAQQGLDQIWLLLAICLACRLLWRLGLPSYLKHASTVAGGFFSLYHFFQLHMVWVVLLSLLCYLVLFLCRHSSHRGVFLSVTILIYLLMGEMHMVDTVTWHKMRGAQMIVAMKAVSLGFDLDRGEVGTVPSPVEFMGYLYFVGTIVFGPWISFHSYLQAVQGRPLSCRWLQKVARSLALALLCLVLSTCVGPYLFPYFIPLNGDRLLRNKKRKARGTMVRWLRAYESAVSFHFSNYFVGFLSEATATLAGAGFTEEKDHLEWDLTVSKPLNVELPRSMVEVVTSWNLPMSYWLNNYVFKNALRLGTFSAVLVTYAASALLHGFSFHLAAVLLSLAFITYVEHVLRKRLARILSACVLSKRCPPDCSHQHRLGLGVRALNLLFGALAIFHLAYLGSLFDVDVDDTTEEQGYGMAYTVHKWSELSWASHWVTFGCWIFYRLIG

SEQ ID NO: 31994 - protein, 456 aa, Homo sapiens
MATFSRQEFFQQLLQGCLLPTAQQGLDQIWLLLAICLACRLLWRLGLPSYLKHASTVAGGFFSLYHFFQLHMVWVVLLSLLCYLVLFLCRHSSHRGVFLSVTILIYLLMGEMHMVDTVTWHKMRGAQMIVAMKAVSLGFDLDRGEVGTVPSPVEFMGYLYFVGTIVFGPWISFHSYLQAVQGRPLSCRWLQKVARSLALALLCLVLSTCVGPYLFPYFIPLNGDRLLRNKKRKARWLRAYESAVSFHFSNYFVGFLSEATATLAGAGFTEEKDHLEWDLTVSKPLNVELPRSMVEVVTSWNLPMSYWLNNYVFKNALRLGTFSAVLVTYAASALLHGFSFHLAAVLLSLAFITYVEHVLRKRLARILSACVLSKRCPPDCSHQHRLGLGVRALNLLFGALAIFHLAYLGSLFDVDVDDTTEEQGYGMAYTVHKWSELSWASHWVTFGCWIFYRLIG

SEQ ID NO: 31995 - protein, 455 aa, Homo sapiens
MATFSRQEFFQQLLQGCLLPTAQQGLDQIWLLLAICLACRLLWRLGLPSYLKHASTVAGGFFSLYHFFQLHMVWVVLLSLLCYLVLFLCRHSSHRGVFLSVTILIYLLMGEMHMVDTVTWHKMRGAQMIVAMKAVSLGFDLDRGEVGTVPSPVEFMGYLYFVGTIVFGPWISFHSYLQAVQGRPLSCRWLQKVARSLALALLCLVLSTCVGPYLFPYFIPLNGDRLLRKGTMVRWLRAYESAVSFHFSNYFVGFLSEATATLAGAGFTEEKDHLEWDLTVSKPLNVELPRSMVEVVTSWNLPMSYWLNNYVFKNALRLGTFSAVLVTYAASALLHGFSFHLAAVLLSLAFITYVEHVLRKRLARILSACVLSKRCPPDCSHQHRLGLGVRALNLLFGALAIFHLAYLGSLFDVDVDDTTEEQGYGMAYTVHKWSELSWASHWVTFGCWIFYRLIG

SEQ ID NO: 31996 - protein, 450 aa, Homo sapiens
MATFSRQEFFQQLLQGCLLPTAQQGLDQIWLLLAICLACRLLWRLGLPSYLKHASTVAGGFFSLYHFFQLHMVWVVLLSLLCYLVLFLCRHSSHRGVFLSVTILIYLLMGEMHMVDTVTWHKMRGAQMIVAMKAVSLGFDLDRGEVGTVPSPVEFMGYLYFVGTIVFGPWISFHSYLQAVQGRPLSCRWLQKVARSLALALLCLVLSTCVGPYLFPYFIPLNGDRLLRKWLRAYESAVSFHFSNYFVGFLSEATATLAGAGFTEEKDHLEWDLTVSKPLNVELPRSMVEVVTSWNLPMSYWLNNYVFKNALRLGTFSAVLVTYAASALLHGFSFHLAAVLLSLAFITYVEHVLRKRLARILSACVLSKRCPPDCSHQHRLGLGVRALNLLFGALAIFHLAYLGSLFDVDVDDTTEEQGYGMAYTVHKWSELSWASHWVTFGCWIFYRLIG

SEQ ID NO: 31997 - protein, 379 aa, Homo sapiens
MVWVVLLSLLCYLVLFLCRHSSHRGVFLSVTILIYLLMGEMHMVDTVTWHKMRGAQMIVAMKAVSLGFDLDRGEVGTVPSPVEFMGYLYFVGTIVFGPWISFHSYLQAVQGRPLSCRWLQKVARSLALALLCLVLSTCVGPYLFPYFIPLNGDRLLRKWLRAYESAVSFHFSNYFVGFLSEATATLAGAGFTEEKDHLEWDLTVSKPLNVELPRSMVEVVTSWNLPMSYWLNNYVFKNALRLGTFSAVLVTYAASALLHGFSFHLAAVLLSLAFITYVEHVLRKRLARILSACVLSKRCPPDCSHQHRLGLGVRALNLLFGALAIFHLAYLGSLFDVDVDDTTEEQGYGMAYTVHKWSELSWASHWVTFGCWIFYRLIG

SEQ ID NO: 31998 - protein, 635 aa, Homo sapiens
MAMSLLQDWCRSLDVDAHRALLVTGIPEGLEQADVEAVLQPTLLPLGTFRLRHMKALMNEKAQAALVEFVEDVNHAAIPREIPGKDGVWRVLWKDRAQDTRVLRQMRRLLLDDGPTQAAEAGTPGEAPTPPASETQAQDSGEVTGQAGSLLGAARNPRRGRRGRRNRTRRNRLTQKGKKRSRGGRPSAPARSEAEDSSDESLGIVIEEIDQGDLSGEEDQSALYATLQAAARELVRQWAPCNSEGEEDGPREFLALVTVTDKSKKEEAEKEPAGAESIRLNTKEDKNGVPDLVALLAVRDTPDEEPVDSDTSESDSQESGDQETEELDNPEFVAIVAYTDPSDPWAREEMLKIASVIESLGWSDEKDKRDPLRQVLSVMSKDTNGTRVKVEEAGREVDAVVLRKAGDDGDLRECISTLAQPDLPPQAKKAGRGLFGGWSEHREDEGGLLELVALLAAQDMAEVMKEEKENAWEGGKYKYPKGKLGEVLALLAARENMGSNEGSEEASDEQSEEESEDTESEASEPEDRASRKPRAKRARTAPRGLTPAGAPPTASGARKTRAGGRGRGRGVTPEKKAGSRGSAQDDAAGSRKKKGSAGAGAHARAGEAKGQAPTGSKAARGKKARRGRRLPPKCR

SEQ ID NO: 31999 - protein, 279 aa, Homo sapiens
MAMSLLQDWCRSLDVDAHRALLVTGIPEGLEQADVEAVLQPTLLPLGTFRLRHMKALMNEKAQAALVEFVEDVNHAAIPREIPGKDGVWRVLWKDRAQDTRVLRQMRRLLLDDGPTQAAEAGTPGEAPTPPASETQAQDSGEVTGQAGSLLGAARNPRRGRRGRRNRTRRNRLTQKGKKRSRGGRPSAPARSEAEDSSDESLGIVIEEIDQGDLSGEEDQSALYATLQAAARELVRQWAPCNSEGGPCPTCPWEGIGGFGCDLTVQTRLSQSYVRDTQM

SEQ ID NO: 32000 - protein, 1693 aa, Homo sapiens
MADLEVYKNLSPEKVERCMSVMQSGTQMIKLKRGTKGLVRLFYLDEHRTRLRWRPSRKSEKAKILIDSIYKVTEGRQSEIFHRQAEGNFDPSCCFTIYHGNHMESLDLITSNPEEARTWITGLKYLMAGISDEDSLAKRQRTHDQWVKQTFEEADKNGDGLLNIEEIHQLMHKLNVNLPRRKVRQMFQEADTDENQGTLTFEEFCVFYKMMSLRRDLYLLLLSYSDKKDHLTVEELAQFLKVEQKMNNVTTDYCLDIIKKFEVSEENKVKNVLGIEGFTNFMRSPACDIFNPLHHEVYQDMDQPLCNYYIASSHNTYLTGDQLLSQSKVDMYARVLQEGCRCVEVDCWDGPDGEPVVHHGYTLTSKILFRDVVETINKHAFVKNEFPVILSIENHCSIQQQRKIAQYLKGIFGDKLDLSSVDTGECKQLPSPQSLKGKILVKGKKLPYHLGDDAEEGEVSDEDSADEIEDECKFKLHYSNGTTEHQVESFIRKKLESLLKESQIRDKEDPDSFTVRALLKATHEGLNAHLKQSPDVKESGKKSHGRSLMTNFGKHKKTTKSRSKSYSTDDEEDTQQSTGKEGGQLYRLGRRRKTMKLCRELSDLVVYTNSVAAQDIVDDGTTGNVLSFSETRAHQVVQQKSEQFMIYNQKQLTRIYPSAYRIDSSNFNPLPYWNAGCQLVALNYQSEGRMMQLNRAKFKANGNCGYVLKPQQMCKGTFNPFSGDPLPANPKKQLILKVISGQQLPKPPDSMFGDRGEIIDPFVEVEIIGLPVDCCKDQTRVVDDNGFNPVWEETLTFTVHMPEIALVRFLVWDHDPIGRDFVGQRTVTFSSLVPGYRHVYLEGLTEASIFVHITINEIYGKWSPLILNPSYTILHFLGATKNRQLQGLKGLFNKNPRHSSSENNSHYVRKRSIGDRILRRTASAPAKGRKKSKMGFQEMVEIKDSVSEATRDQDGVLRRTTRSLQARPVSMPVDRNLLGALSLPVSETAKDIEGKENSLAEDKDGRRKGKASIKDPHFLNFNKKLSSSSSALLHKDTSQGDTIVSTAHMSVTGEQLGMSSPRGGRTTSNATSNCQENPCPSKSLSPKQHLAPDPVVNPTQDLHGVKIKEKGNPEDFVEGKSILSGSVLSHSNLEIKNLEGNRGKGRAATSFSLSDVSMLCSDIPDLHSTAILQESVISHLIDNVTLTNENEPGSSISALIGQFDETNNQALTVVSHLHNTSVMSGHCPLPSLGLKMPIKHGFCKGKSKSSFLCSSPELIALSSSETTKHATNTVYETTCTPISKTKPDDDLSSKAKTAALESNLPGSPNTSRGWLPKSPTKGEDWETLKSCSPASSPDLTLEDVIADPTLCFNSGESSLVEIDGESENLSLTTCEYRREGTSQLASPLKLKYNQGVVEHFQRGLRNGYCKETLRPSVPEIFNNIQDVKTQSISYLAYQGAGFVHNHFSDSDAKMFQTCVPQQSSAQDMHVPVPKQLAHLPLPALKLPSPCKSKSLGDLTSEDIACNFESKYQCISKSFVTTGIRDKKGVTVKTKSLEPIDALTEQLRKLVSFDQEDNCQVLYSKQDANQLPRALVRKLSSRSQSRVRNIASRAKEKQEANKQKVPNPSNGAGVVLRNKPSAPTPAVNRHSTGSYIAGYLKNTKGGGLEGRGIPEGACTALHYGHVDQFCSDNSVLQTEPSSDDKPEIYFLLRL

SEQ ID NO: 32001 - protein, 1655 aa, Homo sapiens
MSVMQSGTQMIKLKRGTKGLVRLFYLDEHRTRLRWRPSRKSEKAKILIDSIYKVTEGRQSEIFHRQAEGNFDPSCCFTIYHGNHMESLDLITSNPEEARTWITGLKYLMAGISDEDSLAKRQRTHDQWVKQTFEEADKNGDGLLNIEEIHQLMHKLNVNLPRRKVRQMFQEADTDENQGTLTFEEFCVFYKMMSLRRDLYLLLLSYSDKKDHLTVEELAQFLKVEQKMNNVTTDYCLDIIKKFEVSEENKVKNVLGIEGFTNFMRSPACDIFNPLHHEVYQDMDQPLCNYYIASSHNTYLTGDQLLSQSKVDMYARVLQEGCRCVEVDCWDGPDGEPVVHHGYTLTSKILFRDVVETINKHAFVKNEFPVILSIENHCSIQQQRKIAQYLKGIFGDKLDLSSVDTGECKQLPSPQSLKGKILVKGKKLPYHLGDDAEEGEVSDEDSADEIEDECKFKLHYSNGTTEHQVESFIRKKLESLLKESQIRDKEDPDSFTVRALLKATHEGLNAHLKQSPDVKESGKKSHGRSLMTNFGKHKKTTKSRSKSYSTDDEEDTQQSTGKEGGQLYRLGRRRKTMKLCRELSDLVVYTNSVAAQDIVDDGTTGNVLSFSETRAHQVVQQKSEQFMIYNQKQLTRIYPSAYRIDSSNFNPLPYWNAGCQLVALNYQSEGRMMQLNRAKFKANGNCGYVLKPQQMCKGTFNPFSGDPLPANPKKQLILKVISGQQLPKPPDSMFGDRGEIIDPFVEVEIIGLPVDCCKDQTRVVDDNGFNPVWEETLTFTVHMPEIALVRFLVWDHDPIGRDFVGQRTVTFSSLVPGYRHVYLEGLTEASIFVHITINEIYGKNRQLQGLKGLFNKNPRHSSSENNSHYVRKRSIGDRILRRTASAPAKGRKKSKMGFQEMVEIKDSVSEATRDQDGVLRRTTRSLQARPVSMPVDRNLLGALSLPVSETAKDIEGKENSLAEDKDGRRKGKASIKDPHFLNFNKKLSSSSSALLHKDTSQGDTIVSTAHMSVTGEQLGMSSPRGGRTTSNATSNCQENPCPSKSLSPKQHLAPDPVVNPTQDLHGVKIKEKGNPEDFVEGKSILSGSVLSHSNLEIKNLEGNRGKGRAATSFSLSDVSMLCSDIPDLHSTAILQESVISHLIDNVTLTNENEPGSSISALIGQFDETNNQALTVVSHLHNTSVMSGHCPLPSLGLKMPIKHGFCKGKSKSSFLCSSPELIALSSSETTKHATNTVYETTCTPISKTKPDDDLSSKAKTAALESNLPGSPNTSRGWLPKSPTKGEDWETLKSCSPASSPDLTLEDVIADPTLCFNSGESSLVEIDGESENLSLTTCEYRREGTSQLASPLKLKYNQGVVEHFQRGLRNGYCKETLRPSVPEIFNNIQDVKTQSISYLAYQGAGFVHNHFSDSDAKMFQTCVPQQSSAQDMHVPVPKQLAHLPLPALKLPSPCKSKSLGDLTSEDIACNFESKYQCISKSFVTTGIRDKKGVTVKTKSLEPIDALTEQLRKLVSFDQEDNCQVLYSKQDANQLPRALVRKLSSRSQSRVRNIASRAKEKQEANKQKVPNPSNGAGVVLRNKPSAPTPAVNRHSTGSYIAGYLKNTKGGGLEGRGIPEGACTALHYGHVDQFCSDNSVLQTEPSSDDKPEIYFLLRL

SEQ ID NO: 32002 - protein, 1002 aa, Homo sapiens
MADLEVYKNLSPEKVERCMSVMQSGTQMIKLKRGTKGLVRLFYLDEHRTRLRWRPSRKSEKAKILIDSIYKVTEGRQSEIFHRQAEGNFDPSCCFTIYHGNHMESLDLITSNPEEARTWITGLKYLMAGISDEDSLAKRQRTHDQWVKQTFEEADKNGDGLLNIEEIHQLMHKLNVNLPRRKVRQMFQEADTDENQGTLTFEEFCVFYKMMSLRRDLYLLLLSYSDKKDHLTVEELAQFLKVEQKMNNVTTDYCLDIIKKFEVSEENKVKNVLGIEGFTNFMRSPACDIFNPLHHEVYQDMDQPLCNYYIASSHNTYLTGDQLLSQSKVDMYARVLQEGCRCVEVDCWDGPDGEPVVHHGYTLTSKILFRDVVETINKHAFVKNEFPVILSIENHCSIQQQRKIAQYLKGIFGDKLDLSSVDTGECKQLPSPQSLKGKILVKGKKLPYHLGDDAEEGEVSDEDSADEIEDECKFKLHYSNGTTEHQVESFIRKKLESLLKESQIRDKEDPDSFTVRALLKATHEGLNAHLKQSPDVKESGKKSHGRSLMTNFGKHKKTTKSRSKSYSTDDEEDTQQSTGKEGGQLYRLGRRRKTMKLCRELSDLVVYTNSVAAQDIVDDGTTGNVLSFSETRAHQVVQQKSEQFMIYNQKQLTRIYPSAYRIDSSNFNPLPYWNAGCQLVALNYQSEGRMMQLNRAKFKANGNCGYVLKPQQMCKGTFNPFSGDPLPANPKKQLILKVISGQQLPKPPDSMFGDRGEIIDPFVEVEIIGLPVDCCKDQTRVVDDNGFNPVWEETLTFTVHMPEIALVRFLVWDHDPIGRDFVGQRTVTFSSLVPGYRHVYLEGLTEASIFVHITINEIYGKWSPLILNPSYTILHFLGATKNRQLQGLKGLFNKNPRHSSSENNSHYVRKRSIGDRILRRTASAPAKGRKKSKMGFQEMVEIKDSVSEATRDQDGVLRRTTRSLQARPVSMPVDRNLLGALSLPVSETAKDIEGKENSLVQI

SEQ ID NO: 32003 - protein, 1014 aa, Homo sapiens
MADLEVYKNLSPEKVERCMSVMQSGTQMIKLKRGTKGLVRLFYLDEHRTRLRWRPSRKSEKAKILIDSIYKVTEGRQSEIFHRQAEGNFDPSCCFTIYHGNHMESLDLITSNPEEARTWITGLKYLMAGISDEDSLAKRQRTHDQWVKQTFEEADKNGDGLLNIEEIHQLMHKLNVNLPRRKVRQMFQEADTDENQGTLTFEEFCVFYKMMSLRRDLYLLLLSYSDKKDHLTVEELAQFLKVEQKMNNVTTDYCLDIIKKFEVSEENKVKNVLGIEGFTNFMRSPACDIFNPLHHEVYQDMDQPLCNYYIASSHNTYLTGDQLLSQSKVDMYARVLQEGCRCVEVDCWDGPDGEPVVHHGYTLTSKILFRDVVETINKHAFVKNEFPVILSIENHCSIQQQRKIAQYLKGIFGDKLDLSSVDTGECKQLPSPQSLKGKILVKGKKLPYHLGDDAEEGEVSDEDSADEIEDECKFKLHYSNGTTEHQVESFIRKKLESLLKESQIRDKEDPDSFTVRALLKATHEGLNAHLKQSPDVKESGKKSHGRSLMTNFGKHKKTTKSRSKSYSTDDEEDTQQSTGKEGGQLYRLGRRRKTMKLCRELSDLVVYTNSVAAQDIVDDGTTGNVLSFSETRAHQVVQQKSEQFMIYNQKQLTRIYPSAYRIDSSNFNPLPYWNAGCQLVALNYQSEGRMMQLNRAKFKANGNCGYVLKPQQMCKGTFNPFSGDPLPANPKKQLILKVISGQQLPKPPDSMFGDRGEIIDPFVEVEIIGLPVDCCKDQTRVVDDNGFNPVWEETLTFTVHMPEIALVRFLVWDHDPIGRDFVGQRTVTFSSLVPGYRHVYLEGLTEASIFVHITINEIYGKNRQLQGLKGLFNKNPRHSSSENNSHYVRKRSIGDRILRRTASAPAKGRKKSKMGFQEMVEIKDSVSEATRDQDGVLRRTTRSLQARPVSMPVDRNLLGALSLPVSETAKDIEGKENSLDSSFCRPTEQAKAEMCKVPFPRQLECVMKMEISET

SEQ ID NO: 32004 - protein, 163 aa, Homo sapiens
MVRFKHRYLLCELVSDDPRCRLSLDDRVLSSLVRDTIARVHGTFGAAACSIGFAVRYLNAYTGIVLLRCRKEFYQLVWSALPFITYLENKGHRYPCFFNTLHVGGTIRTCQKFLIQYNRRQLLILLQNCTDEGEREAIQKSVTRSCLLEEEEESGEEAAEAME

SEQ ID NO: 32005 - protein, 113 aa, Homo sapiens
MVRFKHRYLLCELVSDDPRCRLSLDDRVLSSLVRDTIARVHGTFGAAACSIGFAGTIRTCQKFLIQYNRRQLLILLQNCTDEGEREAIQKSVTRSCLLEEEEESGEEAAEAME

SEQ ID NO: 32006 - protein, 152 aa, Homo sapiens
MADSERLSAPGCWAACTNFSRTRKGILLFAEIILCLVILICFSASTPGYSSLSVIEMILAAIFFVVYMCDLHTKIPFINWPWSDFFRTLIAAILYLITSIVVLVERGNHSKIVAGVLGLIATCLFGYDAYVTFPVRQPRHTAAPTDPADGPV

SEQ ID NO: 32007 - protein, 145 aa, Homo sapiens
MADSERLSAPGCWAACTNFSRTRKGILLFAEIILCLVILICFSASTPGYSSLSVIEMILAAIFFVVYMCDLHTKIPFINWPWSDFFRTLIAAILYLITSIVVLVERGNHSKIVAGVKAMGAALKHRAKGLRSQGPFLPLLLAEIV

SEQ ID NO: 32008 - protein, 1209 aa, Homo sapiens
MFLMNASPVVALQSKWEAFGPPGSCRFPRCFSEADEGVESASVSARVQMLISTLQRDGAARGTSDERAAQRGHRAEGCHDARPAAKPTVHKEPPALAVCGLVADFDPMGEEETTDFGPLVLDSDSDDSVDRDIEEAIQEYLKAKSGAAQPGAGGAQPGAAQPSRAAGGGSRCKPEPAHGSAPTALCPPKLVPGSGGGPGSQVGSSKDQGSASPVSVSSDDSFEQSIRAEIEQFLNEKRQHETQKCDGSVEKKPDTNENSAKSLLKSHQEPPTKVVHRQGLLGVQKEFAFRKPPRLAKMNVQPRSLRSKVTTTQENEGSTKPATPCRPSEAAQNKGGIKRSASAARRGKRVMSAAQASEASDSSSDDGIEEAIQLYQLQKTRKEADGDLPQRVQLREERAPDPPAHSTSSATKSALPETHRKTPSKKKLVATKTMDPGPGGLDTDHAPKLLKETKAPPPASPASRSEFVERSSCRADTSAELMCAEAILDISKTILPAPVEGSDGSLSASPLFYSPNVPSRSDGDSSSVDSDDSIEQEIRTFLALKAQSGSLLARGESCPQAAQGPLLPPGLNSQTGGHKTPLSKTPDPLLGCKRKRRGGGHVRPSTPKKMQEVVKDGSQDADHSQGRAEPGHERRDLPIQGKASEALGGEGTARGPGDTRMSQGQGKTDEARRLDEKESSEDKSSSLDSDEDLDTAIKDLLRSKRKLKKRCREPRAACRKKVRFSTAQTHFLEQLGGLRRDWKDRGPPVLKSCLSKSKRDSGEGPGKKPPSVFGSTAERMRQEGAASQDAALAFRVRRPASASASEGNPFPRESQGPAPSPGSLSDDSSSVDSNDSIELEIRKFLAEKAKESVSSSEVQAEGPTALGTGGPARPEVLCRKEPAPPPGVCTRSQRARGVPHLAEGLRGTESAGAQGTAGLFSQGGKGLPAAPARGDPVPPRSTSGGVSAKGLSVSRRNVYVHKDQSPRGAEPAAKSAFGQLPSCATAGTEAGGARGTFHMGCGSPSFLTPSPGAERDAGAQADRTPPWSDFAHQSRLPSPWVLRSEGRDAVWRGGVGSERDKGSEGPARGLPSLPLAGFSPLLSTQLFHFGKGVSWGGRQAGLFSPHLGLPLQGPSFSAFREAQAGPSPVFGSPHLLAKKDGGPWPTRKAQAGLSLHDRRSSGSEESILDLRYRRRVNRDDQEQDALGSDASDFSDTSTEDSGGSSVVKV

SEQ ID NO: 32009 - protein, 186 aa, Homo sapiens
MAAWGKKHAGKDPVRDECEERNRFTETREEDVTDEHGEREPFAETDEHTGANTKKPEDTAEDLTAKRKRMKMDKTCSKTKNKSKHALRKKQLKRQKRDYIHSLKLLNVLEEYITDEQKEEEEEEGEEEELIRIFQEQQKKWQQYRSVRRERLKEMKLLRDQFVKALEDFEDLCDRVFSDEDSELDN

SEQ ID NO: 32010 - protein, 226 aa, Homo sapiens
MPGFLSFLSVSLRSPGSGIASSFPGQPATDPVGRRAAKAQLEAQFMAAWGKKHAGKDPVRDECEERNRFTETREEDVTDEHGEREPFAETDEHTGANTKKPEDTAVGANNFKNYPVHIGVSSEQHILLDCSLSRQKRDYIHSLKLLNVLEEYITDEQKEEEEEEGEEEELIRIFQEQQKKWQQYRSVRRERLKEMKLLRDQFVKALEDFEDLCDRVFSDEDSELDN

SEQ ID NO: 32011 - protein, 397 aa, Homo sapiens
MYQSLALAASPRQAAYADSGSFLHAPGAGSPMFVPPARVPSMLSYLSGCEPSPQPPELAARPGWAQTATADSSAFGPGSPHPPAAHPPGATAFPFAHSPSGPGSGGSAGGRDGSAYQGALLPREQFAAPLGRPVGTSYSATYPAYVSPDVAQSWTAGPFDGSVLHGLPGRRPTFVSDFLEEFPGEGRECVNCGALSTPLWRRDGTGHYLCNACGLYHKMNGVNRPLVRPQKRLSSSRRAGLCCTNCHTTNTTLWRRNSEGEPVCNACGLYMKLHGVPRPLAMKKESIQTRKRKPKTIAKARGSSGSTRNASASPSAVASTDSSAATSKAKPSLASPVCPGPSMAPQASGQEDDSLAPGHLEFKFEPEDFAFPSTAPSPQAGLRGALRQEAWCALALA

SEQ ID NO: 32012 - protein, 631 aa, Homo sapiens
MAAHLVKRCTCLLREAARQAPAMAPVGRLRLAWVAHKTLTSSATSPISHLPGSLMEPVEKERASTPYIEKQVDHLIKKATRPEELLELLGGSHDLDSNQAAMVLIRLSHLLSEKPEDKGLLIQDAHFHQLLCLLNSQIASVWHGTLSKLLGSLYALGIPKASKELQSVEQEVRWRMRKLKYKHLAFLAESCATLSQEQHSQELLAELLTHLERRWTEIEDSHTLVTVMMKVGHLSEPLMNRLEDKCLELVEHFGPNELRKVLVMLAAQSRRSVPLLRAISYHLVQKPFSLTKDVLLDVAYAYGKLSFHQTQVSQRLATDLLSLMPSLTSGEVAHCAKSFALLKWLSLPLFEAFAQHVLNRAQDITLPHLCSVLLAFARLNFHPDQEDQFFSLVHEKLGSELPGLEPALQVDLVWALCVLQQAREAELQAVLHPEFHIQFLGGKSQKDQNTFQKLLHINATALLEYPEYSGPLLPASAVAPGPSALDRKVTPLQKELQETLKGLLGSADKGSLEVATQYGWVLDAEVLLDSDGEFLPVRDFVAPHLAQPTGSQSPPPGSKRLAFLRWEFPNFNSRSKDLLGRFVLARRHIVAAGFLIVDVPFYEWLELKSEWQKGAYLKDKMRKAVAEELAK

SEQ ID NO: 32013 - protein, 521 aa, Homo sapiens
MAAHLVKRCTCLLREAARQAPAMAPVGRLRLAWVAHKTLTSSATSPISHLPGSLMEPVEKERASTPYIEKQVDHLIKKATRPEELLELLGGSHDLDSNQAAMVLIRLSHLLSEKPEDKGLLIQDAHFHQLLCLLNSQIASVWHGTLSKLLGSLYALGIPKASKELQSVEQEVRWRMRKLKYKHLAFLAESCATLSQEQHSQELLAELLTHLERRWTEIEDSHTLVTVMMKVGHLSEPLMNRLEDKHVLNRAQDITLPHLCSVLLAFARLNFHPDQEDQFFSLVHEKLGSELPGLEPALQVDLVWALCVLQQAREAELQAVLHPEFHIQFLGGKSQKDQNTFQKLLHINATALLEYPEYSGPLLPASAVAPGPSALDRKVTPLQKELQETLKGLLGSADKGSLEVATQYGWVLDAEVLLDSDGEFLPVRDFVAPHLAQPTGSQSPPPGSKRLAFLRWEFPNFNSRSKDLLGRFVLARRHIVAAGFLIVDVPFYEWLELKSEWQKGAYLKDKMRKAVAEELAK

SEQ ID NO: 32014 - protein, 524 aa, Homo sapiens
MTEDKVTGTLVFTVITAVLGSFQFGYDIGVINAPQQVIISHYRHVLGVPLDDRKAINNYVINSTDELPTISYSMNPKPTPWAEEETVAAAQLITMLWSLSVSSFAVGGMTASFFGGWLGDTLGRIKAMLVANILSLVGALLMGFSKLGPSHILIIAGRSISGLYCGLISGLVPMYIGEIAPTALRGALGTFHQLAIVTGILISQIIGLEFILGNYDLWHILLGLSGVRAILQSLLLFFCPESPRYLYIKLDEEVKAKQSLKRLRGYDDVTKDINEMRKEREEASSEQKVSIIQLFTNSSYRQPILVALMLHVAQQFSGINGIFYYSTSIFQTAGISKPVYATIGVGAVNMVFTAVSVFLVEKAGRRSLFLIGMSGMFVCAIFMSVGLVLLNKFSWMSYVSMIAIFLFVSFFEIGPGPIPWFMVAEFFSQGPRPAALAIAAFSNWTCNFIVALCFQYIADFCGPYVFFLFAGVLLAFTLFTFFKVPETKGKSFEEIAAEFQKKSGSAHRPKAAVEMKFLGATETV

SEQ ID NO: 32015 - protein, 405 aa, Homo sapiens
MHLNRIKAMLVANILSLVGALLMGFSKLGPSHILIIAGRSISGLYCGLISGLVPMYIGEIAPTALRGALGTFHQLAIVTGILISQIIGLEFILGNYDLWHILLGLSGVRAILQSLLLFFCPESPRYLYIKLDEEVKAKQSLKRLRGYDDVTKDINEMRKEREEASSEQKVSIIQLFTNSSYRQPILVALMLHVAQQFSGINGIFYYSTSIFQTAGISKPVYATIGVGAVNMVFTAVSVFLVEKAGRRSLFLIGMSGMFVCAIFMSVGLVLLNKFSWMSYVSMIAIFLFVSFFEIGPGPIPWFMVAEFFSQGPRPAALAIAAFSNWTCNFIVALCFQYIADFCGPYVFFLFAGVLLAFTLFTFFKVPETKGKSFEEIAAEFQKKSGSAHRPKAAVEMKFLGATETV

SEQ ID NO: 32016 - protein, 410 aa, Homo sapiens
MADSSGRGAGKPATGPTNSSSAKKKDKRVQGGRVIESRYLQYEKKTTQKAPAGDGSQTRGKMSEGGRKSSLLQKSKADSSGVGKGDLQSTLLEGHGTAPPDLDLSAINDKSIVKKTPQLAKTISKKPESTSFSAPRKKSPDLSEAMEMMESQTLLLTLLSVKMENNLAEFERRAEKNLLIMCKEKEKLQKKAHELKRRLLLSQRKRELADVLDAQIEMLSPFEAVATRFKEQYRTFATALDTTRHELPVRSIHLEGDGQQLLDALQHELVTTQRLLGELDVGDSEENVQVLDLLSELKDVTAKKDLELRRSFAQVLELSAEASKEAALANQEVWEETQGMAPPSRWYFNQDSACRESGGAPKNTPLSEDDNPGASSAPAQATFISPSEDFSSSSQAEVPPSLSRSGRDLS

SEQ ID NO: 32017 - protein, 349 aa, Homo sapiens
MSEGGRKSSLLQKSKADSSGVGKGDLQSTLLEGHGTAPPDLDLSAINDKSIVKKTPQLAKTISKKPESTSFSAPRKKSPDLSEAMEMMESQTLLLTLLSVKMENNLAEFERRAEKNLLIMCKEKEKLQKKAHELKRRLLLSQRKRELADVLDAQIEMLSPFEAVATRFKEQYRTFATALDTTRHELPVRSIHLEGDGQQLLDALQHELVTTQRLLGELDVGDSEENVQVLDLLSELKDVTAKKDLELRRSFAQVLELSAEASKEAALANQEVWEETQGMAPPSRWYFNQDSACRESGGAPKNTPLSEDDNPGASSAPAQATFISPSEDFSSSSQAEVPPSLSRSGRDLS

SEQ ID NO: 32018 - protein, 409 aa, Homo sapiens
MADSSGRGAGKPATGPTNSSSAKKKDKRVQGGRVIESRYLQYEKKTTQKAPAGDGSQTRGKMSEGGRKSSLLQKSKDSSGVGKGDLQSTLLEGHGTAPPDLDLSAINDKSIVKKTPQLAKTISKKPESTSFSAPRKKSPDLSEAMEMMESQTLLLTLLSVKMENNLAEFERRAEKNLLIMCKEKEKLQKKAHELKRRLLLSQRKRELADVLDAQIEMLSPFEAVATRFKEQYRTFATALDTTRHELPVRSIHLEGDGQQLLDALQHELVTTQRLLGELDVGDSEENVQVLDLLSELKDVTAKKDLELRRSFAQVLELSAEASKEAALANQEVWEETQGMAPPSRWYFNQDSACRESGGAPKNTPLSEDDNPGASSAPAQATFISPSEDFSSSSQAEVPPSLSRSGRDLS

SEQ ID NO: 32019 - protein, 222 aa, Homo sapiens
MAGKPKLHYFNGRGRMEPIRWLLAAAGVEFEEKFIGSAEDLGKLRNDGSLMFQQVPMVEIDGMKLVQTRAILNYIASKYNLYGKDIKERALIDMYTEGMADLNEMILLLPLCRPEEKDAKIALIKEKTKSRYFPAFEKVLQSHGQDYLVGNKLSRADISLVELLYYVEELDSSLISNFPLLKALKTRISNLPTVKKFLQPGSPRKPPADAKALEEARKIFRF

SEQ ID NO: 32020 - protein, 221 aa, Homo sapiens
MTTQLRVVHLLPLLLACFVQTSPKQEKMKMDCHKDEKGTIYDYEAIALNKNEYVSFKQYVGKHILFVNVATYCGLTAQYPELNALQEELKPYGLVVLGFPCNQFGKQEPGDNKEILPGLKYVRPGGGFVPSFQLFEKGDVNGEKEQKVFSFLKHSCPHPSEILGTFKSISWDPVKVHDIRWNFEKFLVGPDGIPVMRWSHRATVSSVKTDILAYLKQFKTK

SEQ ID NO: 32021 - protein, 100 aa, Homo sapiens
MTTQLRVVHLLPLLLACFVQTSPKQEKMKMDCHKDEKGTIYDYEAIALNKNEYVSFKQYVGKHILFVNVATYCGLTAQYPGMSVQGEDLYLVSSFLRKGM

SEQ ID NO: 32022 - protein, 359 aa, Homo sapiens
MAEPFLSEYQHQPQTSNCTGAAAVQEELNPERPPGAEERVPEEDSRWQSRAFPQLGGRPGPEGEGSLESQPPPLQTQACPESSCLREGEKGQNGDDSSAGGDFPPPAEVEPTPEAELLAQPCHDSEASKLGAPAAGGEEEWGQQQRQLGKKKHRRRPSKKKRHWKPYYKLTWEEKKKFDEKQSLRASRIRAEMFAKGQPVAPYNTTQFLMDDHDQEEPDLKTGLYSKRAAAKSDDTSDDDFMEEGGEEDGGSDGMGGDGSEFLQRDFSETYERYHTESLQNMSKQELIKEYLELEKCLSRMEDENNRLRLESKRLGGDDARVRELELELDRLRAENLQLLTENELHRQQERAPLSKFGD

SEQ ID NO: 32023 - protein, 462 aa, Homo sapiens
MARVLGAPVALGLWSLCWSLAIATPLPPTSAHGNVAEGETKPDPDVTERCSDGWSFDATTLDDNGTMLFFKGEFVWKSHKWDRELISERWKNFPSPVDAAFRQGHNSVFLIKGDKVWVYPPEKKEKGYPKLLQDEFPGIPSPLDAAVECHRGECQAEGVLFFQGDREWFWDLATGTMKERSWPAVGNCSSALRWLGRYYCFQGNQFLRFDPVRGEVPPRYPRDVRDYFMPCPGRGHGHRNGTGHGNSTHHGPEYMRCSPHLVLSALTSDNHGATYAFSGTHYWRLDTSRDGWHSWPIAHQWPQGPSAVDAAFSWEEKLYLVQGTQVYVFLTKGGYTLVSGYPKRLEKEVGTPHGIILDSVDAAFICPGSSRLHIMAGRRLWWLDLKSGAQATWTELPWPHEKVDGALCMEKSLGPNSCSANGPGLYLIHGPNLYCYSDVEKLNAAKALPQPQNVTSLLGCTH

SEQ ID NO: 32024 - protein, 126 aa, Homo sapiens
MADEIAKAQVARPGGDTIFGKIIRKEIPAKIIFEDDRCLAFHDISPQAPTHFLVIPKKHISQISVAEDDDESLLGHLMIVGKKCAADLGLNKGYRMVVNEGSDGGQSVYHVHLHVLGGRQMHWPPG

SEQ ID NO: 32025 - protein, 106 aa, Homo sapiens
MATPGPVIPEVPFEPSKPPVIEGLSPTVYRNPESFKEKFVRKTRENPVVPIGCLATAAALTYGLYSFHRGNSQRSQLMMRTRIAAQGFTVAAILLGLAVTAMKSRP

SEQ ID NO: 32026 - protein, 861 aa, Homo sapiens
MAGPGPGAVLESPRQLLGRVRFLAEAARSLRAGRPLPAALAFVPREVLYKLYKDPAGPSRVLLPVWEAEGLGLRVGAAGPAPGTGSGPLRAARDSIELRRGACVRTTGEELCNGHGLWVKLTKEQLAEHLGDCGLQEGWLLVCRPAEGGARLVPIDTPNHLQRQQQLFGVDYRPVLRWEQVVDLTYSHRLGSRPQPAEAYAEAVQRLLYVPPTWTYECDEDLIHFLYDHLGKEDENLGSVKQYVESIDVSSYTEEFNVSCLTDSNADTYWESDGSQCQHWVRLTMKKGTIVKKLLLTVDTTDDNFMPKRVVVYGGEGDNLKKLSDVSIDETLIGDVCVLEDMTVHLPIIEIRIVECRDDGIDVRLRGVKIKSSRQRELGLNADLFQPTSLVRYPRLEGTDPEVLYRRAVLLQRFIKILDSVLHHLVPAWDHTLGTFSEIKQVKQFLLLSRQRPGLVAQCLRDSESSKPSFMPRLYINRRLAMEHRACPSRDPACKNAVFTQVYEGLKPSDKYEKPLDYRWPMRYDQWWECKFIAEGIIDQGGGFRDSLADMSEELCPSSADTPVPLPFFVRTANQGNGTGEARDMYVPNPSCRDFAKYEWIGQLMGAALRGKEFLVLALPGFVWKQLSGEEVSWSKDFPAVDSVLVKLLEVMEGMDKETFEFKFGKELTFTTVLSDQQVVELIPGGAGIVVGYGDRSRFIQLVQKARLEESKEQVAAMQAGLLKVVPQAVLDLLTWQELEKKVCGDPEVTVDALRKLTRFEDFEPSDSRVQYFWEALNNFTNEDRSRFLRFVTGRSRLPARIYIYPDKLGYETTDALPESSTCSSTLFLPHYASAKVCEEKLRYAAYNCVAIDTDMSPWEE

SEQ ID NO: 32027 - protein, 471 aa, Homo sapiens
MLGSWGCYRYAKLFSCSLSTHARFIKILDSVLHHLVPAWDHTLGTFSEIKQVKQFLLLSRQRPGLVAQCLRDSESSKPSFMPRLYINRRLAMEHRACPSRDPACKNAVFTQVYEGLKPSDKYEKPLDYRWPMRYDQWWECKFIAEGIIDQGGGFRDSLADMSEELCPSSADTPVPLPFFVRTANQGNGTGEARDMYVPNPSCRDFAKYEWIGQLMGAALRGKEFLVLALPGFVWKQLSGEEVSWSKDFPAVDSVLVKLLEVMEGMDKETFEFKFGKELTFTTVLSDQQVVELIPGGAGIVVGYGDRSRFIQLVQKARLEESKEQVAAMQAGLLKVVPQAVLDLLTWQELEKKVCGDPEVTVDALRKLTRFEDFEPSDSRVQYFWEALNNFTNEDRSRFLRFVTGRSRLPARIYIYPDKLGYETTDALPESSTCSSTLFLPHYASAKVCEEKLRYAAYNCVAIDTDMSPWEE

SEQ ID NO: 32028 - protein, 363 aa, Homo sapiens [sequence omitted]

SEQ ID NO: 32029 - protein, 499 aa, Homo sapiens
MKHSLNALLIFLIITSAWGGSKGPLDQLEKGGETAQSADPQWEQLNNKNLSMPLLPADFHKENTVTNDWIPEGEEDDDYLDLEKIFSEDDDYIDIVDSLSVSPTDSDVSAGNILQLFHGKSRIQRLNILNAKFAFNLYRVLKDQVNTFDNIFIAPVGISTAMGMISLGLKGETHEQVHSILHFKDFVNASSKYEITTIHNLFRKLTHRLFRRNFGYTLRSVNDLYIQKQFPILLDFKTKVREYYFAEAQIADFSDPAFISKTNNHIMKLTKGLIKDALENIDPATQMMILNCIYFKGSWVNKFPVEMTHNHNFRLNEREVVKVSMMQTKGNFLAANDQELDCDILQLEYVGGISMLIVVPHKMSGMKTLEAQLTPRVVERWQKSMTNRTREVLLPKFKLEKNYNLVESLKLMGIRMLFDKNGNMAGISDQRIAIDLFKHQGTITVNEEGTQATTVTTVGFMPLSTQVRFTVDRPFLFLIYEHRTSCLLFMGRVANPSRS

SEQ ID NO: 32030 - protein, 536 aa, Homo sapiens
MKQSSNVPAFLSKLWTLVEETHTNEFITWSQNGQSFLVLDEQRFAKEILPKYFKHNNMASFVRQLNMYGFRKVVHIDSGIVKQERDGPVEFQHPYFKQGQDDLLENIKRKVSSSKPEENKIRQEDLTKIISSAQKVQIKQETIESRLSELKSENESLWKEVSELRAKHAQQQQVIRKIVQFIVTLVQNNQLVSLKRKRPLLLNTNGAQKKNLFQHIVKEPTDNHHHKVPHSRTEGLKPRERISDDIIIYDVTDDNADEENIPVIPETNEDVISDPSNCSQYPDIVIVEDDNEDEYAPVIQSGEQNEPARESLSSGSDGSSPLMSSAVQLNGSSSLTSEDPVTMMDSILNDNINLLGKVELLDYLDSIDCSLEDFQAMLSGRQFSIDPDLLVDLFTSSVQMNPTDYINNTKSENKGLETTKNNVVQPVSEEGRKSKSKPDKQLIQYTAFPLLAFLDGNPASSVEQASTTASSEVLSSVDKPIEVDELLDSSLDPEPTQSKLVRLEPLTEAEASEATLFYLCELAPAPLDSDMPLLDS

SEQ ID NO: 32031 - protein, 518 aa, Homo sapiens
MKQSSNVPAFLSKLWTLVEETHTNEFITWSQNGQSFLVLDEQRFAKEILPKYFKHNNMASFVRQLNMYGFRKVVHIDSGIVKQERDGPVEFQHPYFKQGQDDLLENIKRKVSSSKPEENKIRQEDLTKIISSAQKVQIKQETIESRLSELKSENESLWKEVSELRAKHAQQQQVIRKIVQFIVTLVQNNQLVSLKRKRPLLLNTNGAQKKNLFQHIVKEPTDNHHHKVPHSRTEGLKPRERISDDIIIYDVTDDNADEENIPVIPETNEDVISDPSNCSQYPDIVIVEDDNEDEYAPVIQSGEQNEPARESLSSGSDGSSPLMSSAVQLNGSSSLTSEDPVTMMDSILNDNINLLGKVELLDYLDSIDCSLEDFQAMLSGRQFSIDPDLLVDSENKGLETTKNNVVQPVSEEGRKSKSKPDKQLIQYTAFPLLAFLDGNPASSVEQASTTASSEVLSSVDKPIEVDELLDSSLDPEPTQSKLVRLEPLTEAEASEATLFYLCELAPAPLDSDMPLLDS

SEQ ID NO: 32032 - protein, 390 aa, Homo sapiens
MPDTNSTINLSLSTRVTLAFFMSLVAFAIMLGNALVILAFVVDKNLRHRSSYFFLNLAISDFFVGVISIPLYIPHTLFEWDFGKEICVFWLTTDYLLCTASVYNIVLISYDRYLSVSNAVSYRTQHTGVLKIVTLMVAVWVLAFLVNGPMILVSESWKDEGSECEPGFFSEWYILAITSFLEFVIPVILVAYFNMNIYWSLWKRDHLSRCQSHPGLTAVSSNICGHSFRGRLSSRRSLSASTEVPASFHSERQRRKSSLMFSSRTKMNSNTIASKMGSFSQSDSVALHQREHVELLRARRLAKSLAILLGVFAVCWAPYSLFTIVLSFYSSATGPKSVWYRIAFWLQWFNSFVNPLLYPLCHKRFQKAFLKIFCIKKQPLPSQHSRSVSS

SEQ ID NO: 32033 - protein, 302 aa, Homo sapiens
MPDTNSTINLSLSTRVTLAFFMSLVAFAIMLGNALVILAFVVDKNLRHRSSYFFLNLAISDFFVVSESWKDEGSECEPGFFSEWYILAITSFLEFVIPVILVAYFNMNIYWSLWKRDHLSRCQSHPGLTAVSSNICGHSFRGRLSSRRSLSASTEVPASFHSERQRRKSSLMFSSRTKMNSNTIASKMGSFSQSDSVALHQREHVELLRARRLAKSLAILLGVFAVCWAPYSLFTIVLSFYSSATGPKSVWYRIAFWLQWFNSFVNPLLYPLCHKRFQKAFLKIFCIKKQPLPSQHSRSVSS

SEQ ID NO: 32034 - protein, 492 aa, Homo sapiens
MQEAPAALPTEPGPSPVPAFLGKLWALVGDPGTDHLIRWSPSGTSFLVSDQSRFAKEVLPQYFKHSNMASFVRQLNMYGFRKVVSIEQGGLLRPERDHVEFQHPSFVRGREQLLERVRRKVPALRGDDGRWRPEDLGRLLGEVQALRGVQESTEARLRELRQQNEILWREVVTLRQSHGQQHRVIGKLIQCLFGPLQAGPSNAGGKRKLSLMLDEGSSCPTPAKFNTCPLPGALLQDPYFIQSPLPETNLGLSPHRARGPIISDIPEDSPSPEGTRLSPSSDGRREKGLALLKEEPASPGGDGEAGLALAPNECDFCVTAPPPLPVAVVQAILEGKGSFSPEGPRNAQQPEPGDPREIPDRGPLGLESGDRSPESLLPPMLLQPPQESVEPAGPLDVLGPSLQGREWTLMDLDMELSLMQPLVPERGEPELAVKGLNSPSPGKDPTLGAPLLLDVQAALGGPALGLPGALTIYSTPESRTASYLGPEASPSP

SEQ ID NO: 32035 - protein, 462 aa, Homo sapiens
MQEAPAALPTEPGPSPVPAFLGKLWALVGDPGTDHLIRWSPSGTSFLVSDQSRFAKEVLPQYFKHSNMASFVRQLNMYGFRKVVSIEQGGLLRPERDHVEFQHPSFVRGREQLLERVRRKVPALRGDDGRWRPEDLGRLLGEVQALRGVQESTEARLRELRQQNEILWREVVTLRQSHGQQHRVIGKLIQCLFGPLQAGPSNAGGKRKLSLMLDEGSSCPTPAKFNTCPLPGALLQDPYFIQSPSTYSLSQRQIWALALTGPGAPSSLTSQKTLHPLRGPGFLPPVMAGAPPPLPVAVVQAILEGKGSFSPEGPRNAQQPEPGDPREIPDRGPLGLESGDRSPESLLPPMLLQPPQESVEPAGPLDVLGPSLQGREWTLMDLDMELSLMQPLVPERGEPELAVKGLNSPSPGKDPTLGAPLLLDVQAALGGPALGLPGALTIYSTPESRTASYLGPEASPSP

SEQ ID NO: 32036 - protein, 553 aa, Homo sapiens
MATDTSQGELVHPKALPLIVGAQLIHADKLGEKVEDSTMPIRRTVNSTRETPPKSKLAEGEEEKPEPDISSEESVSTVEEQENETPPATSSEAEQPKGEPENEEKEENKSSEETKKDEKDQSKEKEKKVKKTIPSWATLSASQLARAQKQTPMASSPRPKMDAILTEAIKACFQKSGASVVAIRKYIIHKYPSLELERRGYLLKQALKRELNRGVIKQVKGKGASGSFVVVQKSRKTPQKSRNRKNRSSAVDPEPQVKLEDVLPLAFTRLCEPKEASYSLIRKYVSQYYPKLRVDIRPQLLKNALQRAVERGQLEQITGKGASGTFQLKKSGEKPLLGGSLMEYAILSAIAAMNEPKTCSTTALKKYVLENHPGTNSNYQMHLLKKTLQKCEKNGWMEQISGKGFSGTFQLCFPYYPSPGVLFPKKEPDDSRDEDEDEDESSEEDSEDEEPPPKRRLQKKTPAKSPGKAASVKQRGSKPAPKVSAAQRGKARPLPKKAPPKAKTPAKKTRPSSTVIKKPSGGSSKKPATSARKEVKLPGKGKSTMKKSFRVKK

SEQ ID NO: 32037 - protein, 515 aa, Homo sapiens
MPIRRTVNSTRETPPKSKLAEGEEEKPEPDISSEESVSTVEEQENETPPATSSEAEQPKGEPENEEKEENKSSEETKKDEKDQSKEKEKKVKKTIPSWATLSASQLARAQKQTPMASSPRPKMDAILTEAIKACFQKSGASVVAIRKYIIHKYPSLELERRGYLLKQALKRELNRGVIKQVKGKGASGSFVVVQKSRKTPQKSRNRKNRSSAVDPEPQVKLEDVLPLAFTRLCEPKEASYSLIRKYVSQYYPKLRVDIRPQLLKNALQRAVERGQLEQITGKGASGTFQLKKSGEKPLLGGSLMEYAILSAIAAMNEPKTCSTTALKKYVLENHPGTNSNYQMHLLKKTLQKCEKNGWMEQISGKGFSGTFQLCFPYYPSPGVLFPKKEPDDSRDEDEDEDESSEEDSEDEEPPPKRRLQKKTPAKSPGKAASVKQRGSKPAPKVSAAQRGKARPLPKKAPPKAKTPAKKTRPSSTVIKKPSGGSSKKPATSARKEVKLPGKGKSTMKKSFRVKK

SEQ ID NO: 32038 - protein, 401 aa, Homo sapiens
MASSPRPKMDAILTEAIKACFQKSGASVVAIRKYIIHKYPSLELERRGYLLKQALKRELNRGVIKQVKGKGASGSFVVVQKSRKTPQKSRNRKNRSSAVDPEPQVKLEDVLPLAFTRLCEPKEASYSLIRKYVSQYYPKLRVDIRPQLLKNALQRAVERGQLEQITGKGASGTFQLKKSGEKPLLGGSLMEYAILSAIAAMNEPKTCSTTALKKYVLENHPGTNSNYQMHLLKKTLQKCEKNGWMEQISGKGFSGTFQLCFPYYPSPGVLFPKKEPDDSRDEDEDEDESSEEDSEDEEPPPKRRLQKKTPAKSPGKAASVKQRGSKPAPKVSAAQRGKARPLPKKAPPKAKTPAKKTRPSSTVIKKPSGGSSKKPATSARKEVKLPGKGKSTMKKSFRVKK

SEQ ID NO: 32039 - protein, 133 aa, Homo sapiens
MATDTSQGELVHPKALPLIVGAQLIHADKLGEKVEDSTMPIRRTVNSTRETPPKSKLAEGEEEKPEPDISSEESVSTVEEQENETPPATSSEAEQPKGEPENEEKEENKSSEETKKERADSIHSTLFIIGQNS

SEQ ID NO: 32040 - protein, 686 aa, Homo sapiens
MLAVPEMGLQGLYIGSSPERSPVPSPPGSPRTQESCGIAPLTPSQSPKPEVRAPQQASFSVVVAIDFGTTSSGYAFSFASDPEAIHMMRKWEGGDPGVAHQKTPTCLLLTPEGAFHSFGYTARDYYHDLDPEEARDWLYFEKFKMKIHSATDLTLKTQLEAVNGKTMPALEVFAHALRFFREHALQELREQSPSLPEKDTVRWVLTVPAIWKQPAKQFMREAAYLAGLVSRENAEQLLIALEPEAASVYCRKLRLHQLLDLSGRAPGGGRLGERRSIDSSFRQAREQLRRSRHSRTFLVESGVGELWAEMQAGDRYVVADCGGGTVDLTVHQLEQPHGTLKELYKASGGPYGAVGVDLAFEQLLCRIFGEDFIATFKRQRPAAWVDLTIAFEARKRTAGPHRAGALNISLPFSFIDFYRKQRGHNVETALRRSSVNFVKWSSQGMLRMSCEAMNELFQPTVSGIIQHIEALLARPEVQGVKLLFLVGGFAESAVLQHAVQAALGARGLRVVVPHDVGLTILKGAVLFGQAPGVVRVRRSPLTYGVGVLNRFVPGRHPPEKLLVRDGRRWCTDVFERFVAAEQSVALGEEVRRSYCPARPGQRRVLINLYCCAAEDARFITDPGVRKCGALSLELEPADCGQDTAGAPPGRREIRAAMQFGDTEIKVTAVDVSTNRSVRASIDFLSN

SEQ ID NO: 32041 - protein, 675 aa, Homo sapiens
MADKEAGGSDGPRETAPTSAYSSPARSLGDTGITPLSPSHIVNDTDSNVSEQQSFLVVVAVDFGTTSSGYAYSFTKEPECIHVMRRWEGGDPGVSNQKTPTTILLTPERKFHSFGYAARDFYHDLDPNEAKQWLYLEKFKMKLHTTGDLTMDTDLTAANGKKVKALEIFAYALQYFKEQALKELSDQAGSEFENSDVRWVITVPAIWKQPAKQFMRQAAYQAGLASPENSEQLIIALEPEAASIYCRKLRLHQMIELSSKAAVNGYSGSDTVGAGFTQAKEHIRRNRQSRTFLVENVIGEIWSELEEGDKYVVVDSGGGTVDLTVHQIRLPEGHLKELYKATGGPYGSLGVDYEFEKLLYKIFGEDFIEQFKIKRPAAWVDLMIAFESRKRAAAPDRTNPLNITLPFSFIDYYKKFRGHSVEHALRKSNVDFVKWSSQGMLRMSPDAMNALFKPTIDSIIEHLRDLFQKPEVSTVKFLFLVGGFAEAPLLQQAVQAAFGDQCRIIIPQDVGLTILKGAVLFGLDPAVIKVRRSPLTYGVGVLNRYVEGKHPPEKLLVKDGTRWCTDVFDKFISADQSVALGELVKRSYTPAKPSQLVIVINIYSSEHDNVSFITDPGVKKCGTLRLDLTGTSGTAVPARREIQTLMQFGDTEIKATAIDIATSKSVKVGIDFLNY

SEQ ID NO: 32042 - protein, 278 aa, Homo sapiens
MKFRAKITGKGCLELFIHVSGTVARLAKVCVLRVRPDSLCFGPAGSGGLHEARLWCEVRQGAFQQFRMEGVSEDLDEIHLELTAEHLSRAARSAAGASSLKLQLTHKRRPSLTVAVELVSSLGRARSVVHDLPVRVLPRRVWRDCLPPSLRASDASIRLPRWRTLRSIVERMANVGSHVLVEANLSGRMTLSIETEVVSIQSYFKNLGNPPQSAVGVPENRDLESMVQVRVDNRKLLQFLEGQQIHPTTALCNIWDNTLLQLVLVQEDVSLQYFIPAL

SEQ ID NO: 32043 - protein, 346 aa, Homo sapiens
MLFKQQAWLRQKLLVLGSLAVGSLLYLVARVGSLDRLQPICPIEGRLGGARTQAEFPLRALQFKRGLLHEFRKGNASKEQVRLHDLVQQLPKAIIIGVRKGGTRALLEMLNLHPAVVKASQEIHFFDNDENYGKGIEWYRKKMPFSYPQQITIEKSPAYFITEEVPERIYKMNSSIKLLIIVREPTTRAISDYTQVLEGKERKNKTYYKFEKLAIDPNTCEVNTKYKAVRTSIYTKHLERWLKYFPIEQFHVVDGDRLITEPLPELQLVEKFLNLPPRISQYNLYFNATRGFYCLRFNIIFNKCLAGSKGRIHPEVDPSVITKLRKFFHPFNQKFYQITGRTLNWP

SEQ ID NO: 32044 - protein, 193 aa, Homo sapiens
MGKQNSKLRPEVLQDLRENTEFTDHELQEWYKGFLKDCPTGHLTVDEFKKIYANFFPYGDASKFAEHVFRTFDTNGDGTIDFREFIIALSVTSRGKLEQKLKWAFSMYDLDGNGYISRSEMLEIVQAIYKMVSSVMKMPEDESTPEKRTDKIFRQMDTNNDGKLSLEEFIRGAKSDPSIVRLLQCDPSSASQF

SEQ ID NO: 32045 - protein, 367 aa, Homo sapiens
MASELCKTISVARLEKHKNLFLNYRNLHHFPLELLKDEGLQYLERLYMKRNSLTSLPENLAQKLPNLVELYLHSNNIVVVPEAIGSLVKLQCLDLSDNALEIVCPEIGRLRALRHLRLANNQLQFLPPEVGDLKELQTLDISTNRLLTLPERLHMCLSLQYLTVDRNRLWYVPRHLCQLPSLNELSMAGNRLAFLPLDLGRSRELQYVYVDNNIHLKGLPSYLYNKVIGCSGCGAPIQVSEVKLLSFSSGQRTVFLPAEVKAIGTEHDHVLPLQELAMRGLYHTYHSLLKDLNFLSPISLPRSLLELLHCPLGHCHRCSEPMFTIVYPKLFPLRETPMAGLHQWKTTVSFVAYCCSTQCLQTFDLLS

SEQ ID NO: 32046 - protein, 312 aa, Homo sapiens
MASELCKTISVARLEKHKNLFLNYRNLHHFPLELLKDEGLQYLERLYMKRNSLTSLPENLAQKLPNLVELYLHSNNIVVVPEAIGSLVKLQCLDLSDNALEIVCPEIGRLRALRHLRLANNQLQFLPPEVGDLKELQTLDISTNRLLTLPERLHMCLSLQYLTVDRNRLWYVPRHLCQLPSLNELSMAGNRLAFLPLDLGRSRELQYVYVDNNIHLKGLPSYLYNKVIGCSGCGAPIQVSEVKLLSFSSGQRTVFLPAEVKAIGTEHDHVLPLQELAMRGLYHTYHSLLKGRQLLVLWLTAAPPSVCRLLTC

SEQ ID NO: 32047 - protein, 279 aa, Homo sapiens
MFMGIVAATDFIWLNCYNIDSFCLFQFIRMQFILILILVVEVGDLKELQTLDISTNRLLTLPERLHMCLSLQYLTVDRNRLWYVPRHLCQLPSLNELSMAGNRLAFLPLDLGRSRELQYVYVDNNIHLKGLPSYLYNKVIGCSGCGAPIQVSEVKLLSFSSGQRTVFLPAEVKAIGTEHDHVLPLQELAMRGLYHTYHSLLKDLNFLSPISLPRSLLELLHCPLGHCHRCSEPMFTIVYPKLFPLRETPMAGLHQWKTTVSFVAYCCSTQCLQTFDLLS

SEQ ID NO: 32048 - protein, 408 aa, Homo sapiens
MNTTDNGVNCLCAICGDRATGKHYGASSCDGCKGFFRRSIRKSHVYSCRFSRQCVVDKDKRNQCRYCRLRKCFRAGMKKEAVQNERDRISTRRSTFDGSNIPSINTLAQAEVRSRQISVSSPGSSTDINVKKIASIGDVCESMKQQLLVLVEWAKYIPAFCELPLDDQVALLRAHAGEHLLLGATKRSMMYKDILLLGNNYVIHRNSCEVEISRVANRVLDELVRPFQEIQIDDNEYACLKAIVFFDPDAKGLSDPVKIKNMRFQVQIGLEDYINDRQYDSRGRFGELLLLLPTLQSITWQMIEQIQFVKLFGMVKIDNLLQEMLLGGASNDGSHLHHPMHPHLSQDPLTGQTILLGPMSTLVHADQISTPETPLPSPPQGSGQEQYKIAANQASVISHQHLSKQKQL

SEQ ID NO: 32049 - protein, 445 aa, Homo sapiens
MDMANYSEVLDPTYTTLEFETMQILYNSSDSSAPETSMNTTDNGVNCLCAICGDRATGKHYGASSCDGCKGFFRRSIRKSHVYSCRFSRQCVVDKDKRNQCRYCRLRKCFRAGMKKEAVQNERDRISTRRSTFDGSNIPSINTLAQAEVRSRQISVSSPGSSTDINVKKIASIGDVCESMKQQLLVLVEWAKYIPAFCELPLDDQVALLRAHAGEHLLLGATKRSMMYKDILLLGNNYVIHRNSCEVEISRVANRVLDELVRPFQEIQIDDNEYACLKAIVFFDPDAKGLSDPVKIKNMRFQVQIGLEDYINDRQYDSRGRFGELLLLLPTLQSITWQMIEQIQFVKLFGMVKIDNLLQEMLLGGASNDGSHLHHPMHPHLSQDPLTGQTILLGPMSTLVHADQISTPETPLPSPPQGSGQEQYKIAANQASVISHQHLSKQKQL

SEQ ID NO: 32050 - protein, 273 aa, Homo sapiens
MGSKEDAGKGCPAAGGVSSFTIQSILGGGPSEAPREPVGWPARKRSLSVSSEEEEPDDGWKAPACFCPDQHGPKEQGPKHHPPIPFPCLGTPKGSGGSGPGGLERTPFLSPSHSDFKEEKERLLPAGSPSPGSERPRDGGAERQAGAAKKKTRTVFSRSQVYQLESTFDMKRYLSSSERACLASSLQLTETQVKTWFQNRRNKWKRQLSAELEAANMAHASAQTLVSMPLVFRDSSLLRVPVPRSLAFPAPLYYPGSNLSALPLYNLYNKLDY

SEQ ID NO: 32051 - protein, 602 aa, Homo sapiens
MSRLKRIAGQDLRAGFKAGGRDCGTSVPQGLLKAARKSGQLNLSGRNLSEVPQCVWRINVDIPEEANQNLSFGATERWWEQTDLTKLIISNNKLQSLTDDLRLLPALTVLDIHDNQLTSLPSAIRELENLQKLNVSHNKLKILPEEITNLRNLKCLYLQHNELTCISEGFEQLSNLEDLDLSNNHLTTVPASFSSLSSLVRLNLSSNELKSLPAEINRMKRLKHLDCNSNLLETIPPELAGMESLELLYLRRNKLRFLPEFPSCSLLKELHVGENQIEMLEAEHLKHLNSILVLDLRDNKLKSVPDEIILLRSLERLDLSNNDISSLPYSLGNLHLKFLALEGNPLRTIRREIISKGTQEVLKYLRSKIKDDGPSQSESATETAMTLPSESRVNIHAIITLKILDYSDKQATLIPDEVFDAVKSNIVTSINFSKNQLCEIPKRMVELKEMVSDVDLSFNKLSFISLELCVLQKLTFLDLRNNFLNSLPEEMESLVRLQTINLSFNRFKMLPEVLYRIFTLETILISNNQVGSVDPQKMKMMENLTTLDLQNNDLLQIPPELGNCVNLRTLLLDGNPFRVPRAAILMKGTAAILEYLRDRIPT

SEQ ID NO: 32052 - protein, 641 aa, Homo sapiens; identical to SEQ ID NO: 23826

SEQ ID NO: 32053 - protein, 177 aa, Homo sapiens
MFHVSFRYIFGLPPLILVLLPVASSDCDIEGKDGKQYESVLMVSIDQLLDSMKEIGSNCLNNEFNFFKRHICDANKEGMFLFRAARKLRQFLKMNSTGDFDLHLLKVSEGTTILLNCTGQVKGRKPAALGEAQPTKSLEENKSLKEQKKLNDLCFLKRLLQEIKTCWNKILMGTKEH

SEQ ID NO: 32054 - protein, 133 aa, Homo sapiens
MFHVSFRYIFGLPPLILVLLPVASSDCDIEGKDGKQYESVLMVSIDQLLDSMKEIGSNCLNNEFNFFKRHICDANKVKGRKPAALGEAQPTKSLEENKSLKEQKKLNDLCFLKRLLQEIKTCWNKILMGTKEH

SEQ ID NO: 32055 - protein, 64 aa, Homo sapiens
MKEIGSNCLNNEFNFFKRHICDANKEENKSLKEQKKLNDLCFLKRLLQEIKTCWNKILMGTKEH

SEQ ID NO: 32056 - protein, 139 aa, Homo sapiens
MASLFRSYLPAIWLLLSQLLRESLAAELRGCGPRFGKHLLSYCPMPEKTFTTTPGGWLLESGRPKEMVSTSNNKDGQALGTTSEFIPNLSPELKKPLSEGQPSLKKIILSRKKRSGRHRFDPFCCEVICDDGTSVKLCT

SEQ ID NO: 32057 - protein, 824 aa, Homo sapiens
MADRAEMFSLSTFHSLSPPGCRPPQDISLEEFDDEDLSEITDDCGLGLSYDSDHCEKDSLSLGRSEQPHPICSFQDDFQEFEMIDDNEEEDDEDEEEEEEEEEGDGEGQEGGDPGSEAPAPGPLIPSPSVEEPHKHRPTTLRLTTLGAQDSLNNNGGFDLVRPASWQETALCSPAPEALRELPGPLPATDTGPGGAQSPVRPGCDCEGNRPAEPPAPGGTSPSSDPGIEADLRSRSSGGRGGRRSSQELSSPGSDSEDAGGARLGRMISSISETELELSSDGGSSSSGRSSHLTNSIEEASSPASEPEPPREPPRRPAFLPVGPDDTNSEYESGSESEPDLSEDADSPWLLSNLVSRMISEGSSPIRCPGQCLSPAPRPPGEPVSPAGGAAQDSQDPEAAAGPGGVELVDMETLCAPPPPAPAAPRPGPAQPGPCLFLSNPTRDTITPLWAAPGRAARPGRACSAACSEEEDEEDDEEEEDAEDSAGSPGGRGTGPSAPRDASLVYDAVKYTLVVDEHTQLELVSLRRCAGLGHDSEEDSGGEASEEEAGAALLGGGQVSGDTSPDSPDLTFSKKFLNVFVNSTSRSSSTESFGLFSCLVNGEEREQTHRAVFRFIPRHPDELELDVDDPVLVEAEEDDFWFRGFNMRTGERGVFPAFYAHAVPGPAKDLLGSKRSPCWVERFDVQFLGSVEVPCHQGNGILCAAMQKIATARKLTVHLRPPASCDLEISLRGVKLSLSGGGPEFQRCSHFFQMKNISFCGCHPRNSCYFGFITKHPLLSRFACHVFVSQESMRPVAQSVGRAFLEYYQEHLAYACPTEDIYLE

SEQ ID NO: 32058 - protein, 797 aa, Homo sapiens
MLPDFPSPSTWAPGLLLPSGPALLSPSVLQDSLSLGRSEQPHPICSFQDDFQEFEMIDDNEEEDDEDEEEEEEEEEGDGEGQEGGDPGSEAPAPGPLIPSPSVEEPHKHRPTTLRLTTLGAQDSLNNNGGFDLVRPASWQETALCSPAPEALRELPGPLPATDTGPGGAQSPVRPGCDCEGNRPAEPPAPGGTSPSSDPGIEADLRSRSSGGRGGRRSSQELSSPGSDSEDAGGARLGRMISSISETELELSSDGGSSSSGRSSHLTNSIEEASSPASEPEPPREPPRRPAFLPVGPDDTNSEYESGSESEPDLSEDADSPWLLSNLVSRMISEGSSPIRCPGQCLSPAPRPPGEPVSPAGGAAQDSQDPEAAAGPGGVELVDMETLCAPPPPAPAAPRPGPAQPGPCLFLSNPTRDTITPLWAAPGRAARPGRACSAACSEEEDEEDDEEEEDAEDSAGSPGGRGTGPSAPRDASLVYDAVKYTLVVDEHTQLELVSLRRCAGLGHDSEEDSGGEASEEEAGAALLGGGQVSGDTSPDSPDLTFSKKFLNVFVNSTSRSSSTESFGLFSCLVNGEEREQTHRAVFRFIPRHPDELELDVDDPVLVEAEEDDFWFRGFNMRTGERGVFPAFYAHAVPGPAKDLLGSKRSPCWVERFDVQFLGSVEVPCHQGNGILCAAMQKIATARKLTVHLRPPASCDLEISLRGVKLSLSGGGPEFQRCSHFFQMKNISFCGCHPRNSCYFGFITKHPLLSRFACHVFVSQESMRPVAQSVGRAFLEYYQEHLAYACPTEDIYLE

SEQ ID NO: 32059 - protein, 598 aa, Homo sapiens
MLPDFPSPSTWAPGLLLPSGPALLSPSVLQDSLSLGRSEQPHPICSFQDDFQEFEMIDDNEEEDDEDEEEEEEEEEGDGEGQEGGDPGSEAPAPGPLIPSPSVEEPHKHRPTTLRLTTLGAQDSQDPEAAAGPGGVELVDMETLNPTRDTITPLWAAPGRAARPGRACSAACSEEEDEEDDEEEEDAEDSAGSPGGRGTGPSAPRDASLVYDAVKYTLVVDEHTQLELVSLRRCAGLGHDSEEDSGGEASEEEAGAALLGGGQVSGDTSPDSPDLTFSKKFLNVFVNSTSRSSSTESFGLFSCLVNGEEREQTHRAVFRFIPRHPDELELDVDDPVLVEAEEDDFWFRGFNMRTGERGVFPAFYAHAVPGPAKDLLGSKRSPCWVERFDVQFLGSVEVPCHQGNGILCAAMQKIATARKLTVHLRPPASCDLEISLRGVKLSLSGGGPEFQRCSHFFQMKNISFCGCHPRNSCEAPQGAAFQWERGVDRKRVLQTRGNVQPHLGAGQGAALNRATEGSSTGSEKGEWTPLVIMELTQSVNSCYFGFITKHPLLSRFACHVFVSQESMRPVAQSVGRAFLEYYQEHLAYACPTEDIYLE

SEQ ID NO: 32060 - protein, 443 aa, Homo sapiens
MADRAEMFSLSTFHSLSPPGCRPPQDISLEEFDDEDLSEITDDCGLGLSYDSDHCEKDSLSLGRSEQPHPICSFQDDFQEFEMIDDNEEEDEEDDEEEEDAEDSAGSPGGRGTGPSAPRDASLVYDAVKYTLVVDEHTQLELVSLRRCAGLGHDSEEDSGGEASEEEAGAALLGGGQVSGDTSPDSPDLTFSKKFLNVFVNSTSRSSSTESFGLFSCLVNGEEREQTHRAVFRFIPRHPDELELDVDDPVLVEAEEDDFWFRGFNMRTGERGVFPAFYAHAVPGPAKDLLGSKRSPCWVERFDVQFLGSVEVPCHQGNGILCAAMQKIATARKLTVHLRPPASCDLEISLRGVKLSLSGGGPEFQRCSHFFQMKNISFCGCHPRNSCYFGFITKHPLLSRFACHVFVSQESMRPVAQSVGRAFLEYYQEHLAYACPTEDIYLE

SEQ ID NO: 32061 - protein, 163 aa, Homo sapiens
MMPGQIPDPSVTTGSLPGLGPLTGLPSSALTVEELKYADIRNLGAMIAPLHFLEVKLGKRPQPVKSELDEEEERRKRRREKNKVAAARCRNKKKERTEFLQRESERLELMNAELKTQIEELKQERQQLILMLNRHRPTCIVRTDSVKTPESEGNPLLEQLEKK

SEQ ID NO: 32062 - protein, 174 aa, Homo sapiens
MVAGWPATPPAMMPGQIPDPSVTTGSLPGLGPLTGLPSSALTVEELKYADIRNLGAMIAPLHFLEVKLGKRPQPVKSELDEEEERRKRRREKNKVAAARCRNKKKERTEFLQRESERLELMNAELKTQIEELKQERQQLILMLNRHRPTCIVRTDSVKTPESEGNPLLEQLEKK

SEQ ID NO: 32063 - protein, 1081 aa, Homo sapiens
MESAGLEQLLRELLLPDTERIRRATEQLQIVLRAPAALPALCDLLASAADPQIRQFAAVLTRRRLNTRWRRLAAEQRESLKSLILTALQRETEHCVSLSLAQLSATIFRKEGLEAWPQLLQLLQHSTHSPHSPEREMGLLLLSVVVTSRPEAFQPHHRELLRLLNETLGEVGSPGLLFYSLRTLTTMAPYLSTEDVPLARMLVPKLIMAMQTLIPIDEAKACEALEALDELLESEVPVITPYLSEVLTFCLEVARNVALGNAIRIRILCCLTFLVKVKSKALLKNRLLPPLLHTLFPIVAAEPPPGQLDPEDQDSEEEELEIELMGETPKHFAVQVVDMLALHLPPEKLCPQLMPMLEEALRSESPYQRKAGLLVLAVLSDGAGDHIRQRLLPPLLQIVCKGLEDPSQVVRNAALFALGQFSENLQPHISSYSREVMPLLLAYLKSVPLGHTHHLAKACYALENFVENLGPKVQPYLPELMECMLQLLRNPSSPRAKELAVSALGAIATAAQASLLPYFPAIMEHLREFLLTGREDLQPVQIQSLETLGVLARAVGEPMRPLAEECCQLGLGLCDQVDDPDLRRCTYSLFAALSGLMGEGLAPHLEQITTLMLLSLRSTEGIVPQYDGSSSFLLFDDESDGEEEEELMDEDVEEEDDSEISGYSVENAFFDEKEDTCAAVGEISVNTSVAFLPYMESVFEEVFKLLECPHLNVRKAAHEALGQFCCALHKACQSCPSEPNTAALQAALARVVPSYMQAVNRERERQVVMAVLEALTGVLRSCGTLTLKPPGRLAELCGVLKAVLQRKTACQDTDEEEEEEDDDQAEYDAMLLEHAGEAIPALAAAAGGDSFAPFFAGFLPLLVCKTKQGCTVAEKSFAVGTLAETIQGLGAASAQFVSRLLPVLLSTAQEADPEVRSNAIFGMGVLAEHGGHPAQEHFPKLLGLLFPLLARERHDRVRDNICGALARLLMASPTRKPEPQVLAALLHALPLKEDLEEWVTIGRLFSFLYQSSPDQVIDVAPELLRICSLILADNKIPPDTKAALLLLLTFLAKQHTDSFQAALGSLPVDKAQELQAVLGLS

SEQ ID NO: 32064 - protein, 1083 aa, Homo sapiens
MESAGLEQLLRELLLPDTERIRRATEQLQIVLRAPAALPALCDLLASAADPQIRQFAAVLTRRRLNTRWRRLAAEQRESLKSLILTALQRETEHCVSLSLAQLSATIFRKEGLEAWPQLLQLLQHSTHSPHSPEREMGLLLLSVVVTSRPEAFQPHHRELLRLLNETLGEVGSPGLLFYSLRTLTTMAPYLSTEDVPLARMLVPKLIMAMQTLIPIDEAKACEALEALDELLESEVPVITPYLSEVLTFCLEVARNVALGNAIRIRILCCLTFLVKVKSKALLKNRLLPPLLHTLFPIVAAEPPPGQLDPEDQDSEEEELEIELMGETPKHFAVQVVDMLALHLPPEKLCPQLMPMLEEALRSESPYQRKAGLLVLAVLSDGAGDHIRQRLLPPLLQIVCKGLEDPSQVVRNAALFALGQFSENLQPHISSYSREVMPLLLAYLKSVPLGHTHHLAKACYALENFVENLGPKVQPYLPELMECMLQLLRNPSSPRAKELAVSALGAIATAAQASLLPYFPAIMEHLREFLLTGREDLQPVQIQSLETLGVLARAVGEPMRPLAEECCQLGLGLCDQVDDPDLRRCTYSLFAALSGLMGEGLAPHLEQITTLMLLSLRSTEGIVPQYDGSSSFLLFDDESDGEEEEELMDEDVEEEDDSEISGYSVENAFFDEKEDTCAAVGEISVNTSVAFLPYMESVFEEVFKLLECPHLNVRKAAHEALGQFCCALHKACQSCPSEPNTAALQAALARVVPSYMQAVNRERERQVVMAVLEALTGVLRSCGTLTLKPPGRLAELCGVLKAVLQRKTACQDTDEEEEEEDDDQAEYDAMLLEHAGEAIPALAAAAGGDSFAPFFAGFLPLLVCKTKQGCTVAEKSFAVGTLAETIQGLGAASAQFVSRLLPVLLSTAQEADPEVRSNAIFGMGVLAEHGGHPAQEHFPKLLGLLFPLLARERHDRVRDNICGALARLLMASPTRKPEPQVLAALLHALPLKEDLEEWVTIGRLFSFLYQSSPDQVIDVAPELLRICSLILADNKIPPGEDTKAALLLLLTFLAKQHTDSFQAALGSLPVDKAQELQAVLGLS

SEQ ID NO: 32065 - protein, 706 aa, Homo sapiens
MKIFSESHKTVFVVDHCPYMAESCRQHVEFDMLVKNRTQGIIPLAPISKSLWTCSVESSMEYCRIMYDIFPFKKLVNFIVSDSGAHVLNSWTQEDQNLQELMAALAAVGPPNPRADPECCSILHGLVAAVETLCKITEYQHEARTLLMENAERVGNRGRIICITNAKSDSHVRMLEDCVQETIHEHNKLAANSDHLMQIQKCELVLIHTYPVGEDSLVSDRSKKELSPVLTSEVHSVRAGRHLATKLNILVQQHFDLASTTITNIPMKEEQHANTSANYDVELLHHKDAHVDFLKSGDSHLGGGSREGSFKETITLKWCTPRTNNIELHYCTGAYRISPVDVNSRPSSCLTNFLLNGRSVLLEQPRKSGSKVISHMLSSHGGEIFLHVLSSSRSILEDPPSISEGCGGRVTDYRITDFGEFMRENRLTPFLDPRYKIDGSLEVPLERAKDQLEKHTRYWPMIISQTTIFNMQAVVPLASVIVKESLTEEDVLNCQKTIYNLVDMERKNDPLPISTVGTRGKGPKRDEQYRIMWNELETLVRAHINNSEKHQRVLECLMACRSKPPEEEERKKRGRKREDKEDKSEKAVKDYEQEKSWQDSERLKGILERGKEELAEAEIIKDSPDSPEPPNKKPLVEMDETPQVEKSKGPVSLLSLWSNRINTANSRKHQEFAGRLNSVNNRAELYQHLKEENGMETTENGKASRQ

SEQ ID NO: 32066 - protein, 605 aa, Homo sapiens
MAALAAVGPPNPRADPECCSILHGLVAAVETLCKITEYQHEARTLLMENAERVGNRGRIICITNAKSDSHVRMLEDCVQETIHEHNKLAANSDHLMQIQKCELVLIHTYPVGEDSLVSDRSKKELSPVLTSEVHSVRAGRHLATKLNILVQQHFDLASTTITNIPMKEEQHANTSANYDVELLHHKDAHVDFLKSGDSHLGGGSREGSFKETITLKWCTPRTNNIELHYCTGAYRISPVDVNSRPSSCLTNFLLNGRSVLLEQPRKSGSKVISHMLSSHGGEIFLHVLSSSRSILEDPPSISEGCGGRVTDYRITDFGEFMRENRLTPFLDPRYKIDGSLEVPLERAKDQLEKHTRYWPMIISQTTIFNMQAVVPLASVIVKESLTEEDVLNCQKTIYNLVDMERKNDPLPISTVGTRGKGPKRDEQYRIMWNELETLVRAHINNSEKHQRVLECLMACRSKPPEEEERKKRGRKREDKEDKSEKAVKDYEQEKSWQDSERLKGILERGKEELAEAEIIKDSPDSPEPPNKKPLVEMDETPQVEKSKGPVSLLSLWSNRINTANSRKHQEFAGRLNSVNNRAELYQHLKEENGMETTENGKASRQ

SEQ ID NO: 32067 - protein, 1801 aa, Homo sapiens
MPENPATDKLQVLQVLDRLKMKLQEKGDTSQNEKLSMFYETLKSPLFNQILTLQQSIKQLKGQLNHIPSDCSANFDFSRKGLLVFTDGSITNGNVHRPSNNSTVSGLFPWTPKLGNEDFNSVIQQMAQGRQIEYIDIERPSTGGLGFSVVALRSQNLGKVDIFVKDVQPGSVADRDQRLKENDQILAINHTPLDQNISHQQAIALLQQTTGSLRLIVAREPVHTKSSTSSSLNDTTLPETVCWGHVEEVELINDGSGLGFGIVGGKTSGVVVRTIVPGGLADRDGRLQTGDHILKIGGTNVQGMTSEQVAQVLRNCGNSVRMLVARDPAGDISVTPPAPAALPVALPTVASKGPGSDSSLFETYNVELVRKDGQSLGIRIVGYVGTSHTGEASGIYVKSIIPGSAAYHNGHIQVNDKIVAVDGVNIQGFANHDVVEVLRNAGQVVHLTLVRRKTSSSTSPLEPPSDRGTVVEPLKPPALFLTGAVETETNVDGEDEEIKERIDTLKNDNIQALEKLEKVPDSPENELKSRWENLLGPDYEVMVATLDTQIADDAELQKYSKLLPIHTLRLGVEVDSFDGHHYISSIVSGGPVDTLGLLQPEDELLEVNGMQLYGKSRREAVSFLKEVPPPFTLVCCRRLFDDEASVDEPRRTETSLPETEVDHNMDVNTEEDDDGELALWSPEVKIVELVKDCKGLGFSILDYQDPLDPTRSVIVIRSLVADGVAERSGGLLPGDRLVSVNEYCLDNTSLAEAVEILKAVPPGLVHLGICKPLVEDNEEESCYILHSSSNEDKTEFSGTIHDINSSLILEAPKGFRDEPYFKEELVDEPFLDLGKSFHSQQKEIEQSKEAWEMHEFLTPRLQEMDEEREILVDEEYELYQDPSPSMELYPLSHIQEATPVPSVNELHFGTQWLHDNEPSESQEARTGRTVYSQEAQPYGYCPENVMKENFVMESLPSVPSTEGNSQQGRFDDLENLNSLAKTSLDLGMIPNDVQGPSLLIDLPVVAQRREQEDLPLYQHQATRVISKASAYTGMLSSRYATDTCELPEREEGEGEETPNFSHWGPPRIVEIFREPNVSLGISIVGGQTVIKRLKNGEELKGIFIKQVLEDSPAGKTNALKTGDKILEVSGVDLQNASHSEAVEAIKNAGNPVVFIVQSLSSTPRVIPNVHNKANKITGNQNQDTQEKKEKRQGTAPPPMKLPPPYKALTDDSDENEEEDAFTDQKIRQRYADLPGELHIIELEKDKNGLGLSLAGNKDRSRMSIFVVGINPEGPAAADGRMRIGDELLEINNQILYGRSHQNASAIIKTAPSKVKLVFIRNEDAVNQMAVTPFPVPSSSPSSIEDQSGTEPISSEEDGSVEVGIKQLPESESFKLAVSQMKQQKYPTKVSFSSQEIPLAPASSYHSTDADFTGYGGFQAPLSVDPATCPIVPGQEMIIEISKGRSGLGLSIVGGKDTPLNAIVIHEVYEEGAAARDGRLWAGDQILEVNGVDLRNSSHEEAITALRQTPQKVRLVVYRDEAHYRDEENLEIFPVDLQKKAGRGLGLSIVGKRNGSGVFISDIVKGGAADLDGRLIQGDQILSVNGEDMRNASQETVATILKCAQGLVQLEIGRLRAGSWTSARTTSQNSQGSQQSAHSSCHPSFAPVITGLQNLVGTKRVSDPSQKNSGTDMEPRTVEINRELSDALGISIAGGRGSPLGDIPVFIAMIQASGVAARTQKLKVGDRIVSINGQPLDGLSHADVVNLLKNAYGRIILQVVADTNISAIAAQLENMSTGYHLGSPTAEHHPEDTEEQLQMTAD

SEQ ID NO: 32068 - protein, 1582 aa, Homo sapiens
MPENPATDKLQVLQVLDRLKMKLQEKGDTSQNEKLSMFYETLKSPLFNQILTLQQSIKQLKGQLNHIPSDCSANFDFSRKGLLVFTDGSITNGNVHRPSNNSTVSGLFPWTPKLGNEDFNSVIQQMAQGRQIEYIDIERPSTGGLGFSVVALRSQNLGKVDIFVKDVQPGSVADRDQRLKENDQILAINHTPLDQNISHQQAIALLQQTTGSLRLIVAREPVHTKSSTSSSLNDTTLPETVCWGHVEEVELINDGSGLGFGIVGGKTSGVVVRTIVPGGLADRDGRLQTGDHILKIGGTNVQGMTSEQVAQVLRNCGNSVRMLVARDPAGDISVTPPAPAALPVALPTVASKGPGSDSSLFETYNVELVRKDGQSLGIRIVGYVGTSHTGEASGIYVKSIIPGSAAYHNGHIQVNDKIVAVDGVNIQGFANHDVVEVLRNAGQVVHLTLVRRKTSSSTSPLEPPSDRGTVVEPLKPPALFLTGAVETETNVDGEDEEIKERIDTLKNDNIQALEKLEKVPDSPENELKSRWENLLGPDYEVMVATLDTQIADDAELQKYSKLLPIHTLRLGVEVDSFDGHHYISSIVSGGPVDTLGLLQPEDELLEVNGMQLYGKSRREAVSFLKEVPPPFTLVCCRRLFDDEASVDEPRRTETSLPETEVDHNMDVNTEEDDDGELALWSPEVKIVELVKDCKGLGFSILDYQDPLDPTRSVIVIRSLVADGVAERSGGLLPGDRLVSVNEYCLDNTSLAEAVEILKAVPPGLVHLGICKPLVEDNEEESCYILHSSSNEDKTEFSGTIHDINSSLILEAPKGFRDEPYFKEELVDEPFLDLGKSFHSQQKEIEQSKEAWEMHEFLTPRLQEMDEEREILVDEEYELYQDPSPSMELYPLSHIQEATPVPSVNELHFGTQWLHDNEPSESQEARTGRTVYSQEAQPYGYCPENVMKENFVMESLPSVPSTEGNSQQGRFDDLENLNSLAKTSLDLGMIPNDVQGPSLLIDLPVVAQRREQEDLPLYQHQATRVISKASAYTGMLSSRYATDTCELPEREEGEGEETPNFSHWGPPRIVEIFREPNVSLGISIVGGQTVIKRLKNGEELKGIFIKQVLEDSPAGKTNALKTGDKILEVSGVDLQNASHSEAVEAIKNAGNPVVFIVQSLSSTPRVIPNVHNKANKITGNQNQDTQEKKEKRQGTAPPPMKLPPPYKALTDDSDENEEEDAFTDQKIRQRYADLPGELHIIELEKDKNGLGLSLAGNKDRSRMSIFVVGINPEGPAAADGRMRIGDELLEINNQILYGRSHQNASAIIKTAPSKVKLVFIRNEDAVNQMAVTPFPVPSSSPSSIEDQSGTEPISSEEDGSVEVGIKQLPESESFKLAVSQMKQQKYPTKVSFSSQEIPLAPASSYHSTDADFTGYGGFQAPLSVDPATCPIVPGQEMIIEISKGRSGLGLSIVGGKDTPLFWRLGSPRAWSQHLVRAFMLHHPVTEVEGQNAIVIHEVYEEGAAARDGRLWAGDQILEVNGVDLRNSSHEEAITALRQTPQKVRLVVYRDEAHYRDEENLEIFPVDLQKKAGRGLGLSIVGKR

SEQ ID NO: 32069 - protein, 1552 aa, Homo sapiens
MPENPATDKLQVLQVLDRLKMKLQEKGDTSQNEKLSMFYETLKSPLFNQILTLQQSIKQLKGQLNHIPSDCSANFDFSRKGLLVFTDGSITNGNVHRPSNNSTVSGLFPWTPKLGNEDFNSVIQQMAQGRQIEYIDIERPSTGGLGFSVVALRSQNLGKVDIFVKDVQPGSVADRDQRLKENDQILAINHTPLDQNISHQQAIALLQQTTGSLRLIVAREPVHTKSSTSSSLNDTTLPETVCWGHVEEVELINDGSGLGFGIVGGKTSGVVVRTIVPGGLADRDGRLQTGDHILKIGGTNVQGMTSEQVAQVLRNCGNSVRMLVARDPAGDISVTPPAPAALPVALPTVASKGPGSDSSLFETYNVELVRKDGQSLGIRIVGYVGTSHTGEASGIYVKSIIPGSAAYHNGHIQVNDKIVAVDGVNIQGFANHDVVEVLRNAGQVVHLTLVRRKTSSSTSPLEPPSDRGTVVEPLKPPALFLTGAVETETNVDGEDEEIKERIDTLKNDNIQALEKLEKVPDSPENELKSRWENLLGPDYEVMVATLDTQIADDAELQKYSKLLPIHTLRLGVEVDSFDGHHYISSIVSGGPVDTLGLLQPEDELLEVNGMQLYGKSRREAVSFLKEVPPPFTLVCCRRLFDDEASVDEPRRTETSLPETEVDHNMDVNTEEDDDGELALWSPEVKIVELVKDCKGLGFSILDYQDPLDPTRSVIVIRSLVADGVAERSGGLLPGDRLVSVNEYCLDNTSLAEAVEILKAVPPGLVHLGICKPLVEDNEEESCYILHSSSNEDKTEFSGTIHDINSSLILEAPKGFRDEPYFKEELVDEPFLDLGKSFHSQQKEIEQSKEAWEMHEFLTPRLQEMDEEREILVDEEYELYQDPSPSMELYPLSHIQEATPVPSVNELHFGTQWLHDNEPSESQEARTGRTVYSQEAQPYGYCPENVMKENFVMESLPSVPSTEGNSQQGRFDDLENLNSLAKTSLDLGMIPNDVQGPSLLIDLPVVAQRREQEDLPLYQHQATRVISKASAYTGMLSSRYATDTCELPEREEGEGEETPNFSHWGPPRIVEIFREPNVSLGISIVGGQTVIKRLKNGEELKGIFIKQVLEDSPAGKTNALKTGDKILEVSGVDLQNASHSEAVEAIKNAGNPVVFIVQSLSSTPRVIPNVHNKANKITGNQNQDTQEKKEKRQGTAPPPMKLPPPYKALTDDSDENEEEDAFTDQKIRQRYADLPGELHIIELEKDKNGLGLSLAGNKDRSRMSIFVVGINPEGPAAADGRMRIGDELLEINNQILYGRSHQNASAIIKTAPSKVKLVFIRNEDAVNQMAVTPFPVPSSSPSSIEDQSGTEPISSEEDGSVEVGIKQLPESESFKLAVSQMKQQKYPTKVSFSSQEIPLAPASSYHSTDADFTGYGGFQAPLSVDPATCPIVPGQEMIIEISKGRSGLGLSIVGGKDTPLNAIVIHEVYEEGAAARDGRLWAGDQILEVNGVDLRNSSHEEAITALRQTPQKVRLVVYRDEAHYRDEENLEIFPVDLQKKAGRGLGLSIVGKR

SEQ ID NO: 32070 - protein, 1524 aa, Homo sapiens
MPENPATDKLQVLQVLDRLKMKLQEKGDTSQNEKLSMFYETLKSPLFNQILTLQQSIKQLKGQLNHIPSDCSANFDFSRKGLLVFTDGSITNGNVHRPSNNSTVSGLFPWTPKLGNEDFNSVIQQMAQGRQIEYIDIERPSTGGLGFSVVALRSQNLGKVDIFVKDVQPGSVADRDQRLKENDQILAINHTPLDQNISHQQAIALLQQTTGSLRLIVAREPVHTKSSTSSSLNDTTLPETVCWGHVEEVELINDGSGLGFGIVGGKTSGVVVRTIVPGGLADRDGRLQTGDHILKIGGTNVQGMTSEQVAQVLRNCGNSVRMLVARDPAGDISVTPPAPAALPVALPTVASKGPGSDSSLFETYNVELVRKDGQSLGIRIVGYVGTSHTGEASGIYVKSIIPGSAAYHNGHIQVNDKIVAVDGVNIQGFANHDVVEVLRNAGQVVHLTLVRRKTSSSTSPLEPPSDRGTVVEPLKPPALFLTGAVETETNVDGEDEEIKERIDTLKNDNIQALEKLEKVPDSPENELKSRWENLLGPDYEVMVATLDTQIADDAELQKYSKLLPIHTLRLGVEVDSFDGHHYISSIVSGGPVDTLGLLQPEDELLEVNGMQLYGKSRREAVSFLKEVPPPFTLVCCRRLFDDEASVDEPRRTETSLPETEVDHNMDVNTEEDDDGELALWSPEVKIVELVKDCKGLGFSILDYQDPLDPTRSVIVIRSLVADGVAERSGGLLPGDRLVSVNEYCLDNTSLAEAVEILKAVPPGLVHLGICKPLVEDNEEESCYILHSSSNEDKTEFSGTIHDINSSLILEAPKGFRDEPYFKEELVDEPFLDLGKSFHSQQKEIEQSKEAWEMHEFLTPRLQEMDEEREILVDEEYELYQDPSPSMELYPLSHIQEATPVPSVNELHFGTQWLHDNEPSESQEARTGRTVYSQEAQPYGYCPENVMKENFVMESLPSVPSTEGNSQQGRFDDLENLNSLAKTSLDLGMIPNDVQGPSLLIDLPVVAQRREQEDLPLYQHQATRVISKASAYTGMLSSRYATDTCELPEREEGEGEETPNFSHWGPPRIVEIFREPNVSLGISIVGGQTVIKRLKNGEELKGIFIKQVLEDSPAGKTNALKTGDKILEVSGVDLQNASHSEAVEAIKNAGNPVVFIVQSLSSTPRVIPNVHNKANKITGNQNQDTQEKKEKRQGTAPPPMKLPPPYKALTDDSDENEEEDAFTDQKIRQRYADLPGELHIIELEKDKNGLGLSLAGNKDRSRMSIFVVGINPEGPAAADGRMRIGDELLEINNQILYGRSHQNASAIIKTAPSKVKLVFIRNEDAVNQMAVTPFPVPSSSPSSIEDQSGTEPISSEEDGSVEVGIKQLPESESFKLAVSQMKQQKYPTKVSFSSQEIPLAPASSYHSTDADFTGYGGFQAPLSVDPATCPIVPGQEMIIEISKGRSGLGLSIVGGKDTPLVNGVDLRNSSHEEAITALRQTPQKVRLVVYRDEAHYRDEENLEIFPVDLQKKAGRGLGLSIVGKR

SEQ ID NO: 32071 - protein, 1134 aa, Homo sapiens
MVATLDTQIADDAELQKYSKLLPIHTLRLGVEVDSFDGHHYISSIVSGGPVDTLGLLQPEDELLEVNGMQLYGKSRREAVSFLKEVPPPFTLVCCRRLFDDEASVDEPRRTETSLPETEVDHNMDVNTEEDDDGELALWSPEVKIVELVKDCKGLGFSILDYQDPLDPTRSVIVIRSLVADGVAERSGGLLPGDRLVSVNEYCLDNTSLAEAVEILKAVPPGLVHLGICKPLVEDNEEESCYILHSSSNEDKTEFSGTIHDINSSLILEAPKGFRDEPYFKEELVDEPFLDLGKSFHSQQKEIEQSKEAWEMHEFLTPRLQEMDEEREILVDEEYELYQDPSPSMELYPLSHIQEATPVPSVNELHFGTQWLHDNEPSESQEARTGRTVYSQEAQPYGYCPENVMKENFVMESLPSVPSTEGNSQQGRFDDLENLNSLAKTSLDLGMIPNDVQGPSLLIDLPVVAQRREQEDLPLYQHQATRVISKASAYTGMLSSRYATDTCELPEREEGEGEETPNFSHWGPPRIVEIFREPNVSLGISIVGGQTVIKRLKNGEELKGIFIKQVLEDSPAGKTNALKTGDKILEVSGVDLQNASHSEAVEAIKNAGNPVVFIVQSLSSTPRVIPNVHNKANKITGNQNQDTQEKKEKRQGTAPPPMKLPPPYKALTDDSDENEEEDAFTDQKIRQRYADLPGELHIIELEKDKNGLGLSLAGNKDRSRMSIFVVGINPEGPAAADGRMRIGDELLEINNQILYGRSHQNASAIIKTAPSKVKLVFIRNEDAVNQMAVTPFPVPSSSPSSIEDQSGTEPISSEEDGSVEVGIKQLPESESFKLAVSQMKQQKYPTKVSFSSQEIPLAPASSYHSTDADFTGYGGFQAPLSVDPATCPIVPGQEMIIEISKGRSGLGLSIVGGKDTPLNAIVIHEVYEEGAAARDGRLWAGDQILEVNGVDLRNSSHEEAITALRQTPQKVRLVVYRDEAHYRDEENLEIFPVDLQKKAGRGLGLSIVGKRNGSGVFISDIVKGGAADLDGRLIQGDQILSVNGEDMRNASQETVATILKCAQGLVQLEIGRLRAGSWTSARTTSQNSQSAECTQQLSSLLRSCHHWPAKPGWHKKSFRSFPEKFRHRYGTKDC

SEQ ID NO: 32072 - protein, 639 aa, Homo sapiens
MSCQISCKSRGRGGGGGGFRGFSSGSAVVSGGSRRSTSSFSCLSRHGGGGGGFGGGGFGSRSLVGLGGTKSISISVAGGGGGFGAAGGFGGRGGGFGGGSSFGGGSGFSGGGFGGGGFGGGRFGGFGGPGGVGGLGGPGGFGPGGYPGGIHEVSVNQSLLQPLNVKVDPEIQNVKAQEREQIKTLNNKFASFIDKVRFLEQQNQVLQTKWELLQQMNVGTRPINLEPIFQGYIDSLKRYLDGLTAERTSQNSELNNMQDLVEDYKKKYEDEINKRTAAENDFVTLKKDVDNAYMIKVELQSKVDLLNQEIEFLKVLYDAEISQIHQSVTDTNVILSMDNSRNLDLDSIIAEVKAQYEEIAQRSKEEAEALYHSKYEELQVTVGRHGDSLKEIKIEISELNRVIQRLQGEIAHVKKQCKNVQDAIADAEQRGEHALKDARNKLNDLEEALQQAKEDLARLLRDYQELMNVKLALDVEIATYRKLLEGEECRMSGDLSSNVTVSVTSSTISSNVASKAAFGGSGGRGSSSGGGYSSGSSSYGSGGRQSGSRGGSGGGGSISGGGYGSGGGSGGRYGSGGGSKGGSISGGGYGSGGGKHSSGGGSRGGSSSGGGYGSGGGGSSSVKGSSGEAFGSSVTFSFR

SEQ ID NO: 32073 - protein, 200 aa, Homo sapiens
MFRKGKKRHSSSSSQSSEISTKSKSVDSSLGGLSRSSTVASLDTDSTKSSGQSNNNSDTCAEFRIKYVGAIEKLKLSEGKGLEGPLDLINYIDVAQQDGKLPFVPPEEEFIMGVSKYGIKVSTSDQYDVLHRHALYLIIRMVCYDDGLGAGKSLLALKTTDASNEEYSLWVYQCNSLEQAQAICKVLSTAFDSVLTSEKP

SEQ ID NO: 32074 - protein, 150 aa, Homo sapiens
MFRKGKKRHSSSSSQSSEISTKSKSVDSSLGGLSRSSTVASLDTDSTKSSGQSNNNSDTCAEFRIKYVGAIEKLKLSEGKGLEGPLDLINYIDVAQQDGKLPFVPPEEEFIMGVSKYGIKVSTSDQYEQAQAICKVLSTAFDSVLTSEKP

SEQ ID NO: 32075 - protein, 861 aa, Homo sapiens
MPILLFLIDTSASMNQRTDLGTSYLDIAKGAVELFLKLRARDPASRGDRYMLVTYDEPPYCIKAGWKENHATFMSELKNLQASGLTTLGQALRSSFDLLNLNRLISGIDNYGQGRNPFFLEPSILITITDGNKLTSTAGVQEELHLPLNSPLPGSELTKEPFRWDQRLFALVLRLPGVASTEPEQLGSVPTDESAITQMCEVTGGRSYCVRTQRMLNQCLESLVQKVQSGVVINFEKTGPDPLPIGEDGLMDSSRPSNSFAAQPWHSCHKLIYVRPNSKTGVPVGHWPIPESFWPDQNLPSLPPRTSHPVVRFSCVDCEPMVIDKLPFDKYELEPSPLTQYILERKSPHTCWQVFVTSSGKYNELGYPFGYLKASTTLTCVNLFVMPYNYPVLLPLLDDLFKVHKLKPNLKWRQAFDSYLKTLPPYYLLTKLESERILASVGKKPPQEIGIKVKNHSGGGMSLTHNKNFRKLLKEITGETALRLTELNTKEFAGFQIGLLNKDLKPQTYRNAYDIPRRGLLDQLTRMRSNLLKTHKFIVGQDEDSLHSVPVAQMGNYQEYLKTLASPLREIDPDQPKRLHTFGNPFKQDKKGMMIDEADEFVAGPQNKVKRPGEPNSPMSSKRRRSMSLLLRKPQTPPTVTNHVGGKGPPSASWFPSYPNLIKPTLVHTDATIIHDGHEEKMENGQITPDGFLSKSAPSELINMTGDLMPPNQVDSLSDDFTSLSKDGLIQKPGSNAFVGGAKNCSLSVDDQKDPVASTLGAMPNTLQITPAMAQGINADIKHQLMKEVRKFGRKYERIFILLEEVQGPLEMKKQFVEFTIKEAARFKRRVLIQYLEKVLEKINSHHLHNNISHINSRSSC

SEQ ID NO: 32076 - protein, 308 aa, Homo sapiens
MGNYQEYLKTLASPLREIDPDQPKRLHTFGNPFKQDKKGMMIDEADEFVAGPQNKVKRPGEPNSPMSSKRRRSMSLLLRKPQTPPTVTNHVGGKGPPSASWFPSYPNLIKPTLVHTDATIIHDGHEEKMENGQITPDGFLSKSAPSELINMTGDLMPPNQVDSLSDDFTSLSKDGLIQKPGSNAFVGGAKNCSLSVDDQKDPVASTLGAMPNTLQITPAMAQGINADIKHQLMKEVRKFGRKYERIFILLEEVQGPLEMKKQFVEFTIKEAARFKRRVLIQYLEKVLEKINSHHLHNNISHINSRSSC

SEQ ID NO: 32077 - protein, 418 aa, Homo sapiens
MLYLEDYLEMIEQLPMDLRDRFTEMREMDLQVQNAMDQLEQRVSEFFMNAKKNKPEWREEQMASIKKDYYKALEDADEKVQLANQIYDLVDRHLRKLDQELAKFKMELEADNAGITEILERRSLELDTPSQPVNNHHAHSHTPVEKRKYNPTSHHTTTDHIPEKKFKSEALLSTLTSDASKENTLGCRNNNSTASSNNAYNVNSSQPLGSYNIGSLSSGTGAGAITMAAAQAVQATAQMKEGRRTSSLKASYEAFKNNDFQLGKEFSMARETVGYSSSSALMTTLTQNASSSAADSRSGRKSKNNNKSSSQQSSSSSSSSSLSSCSSSSTVVQEISQQTTVVPESDSNSQVDWTYDPNEPRYCICNQVSYGEMVGCDNQDCPIEWFHYGCVGLTEAPKGKWYCPQCTAAMKRRGSRHK

SEQ ID NO: 32078 - protein, 92 aa, Homo sapiens
MLYLEDYLEMIEQLPMDLRDRFTEMREMDLQVQNAMDQLEQRVSEFFMNAKKNKPEWREEQMASIKKDYYKALEDADEKVQLANQIYDLQHF

SEQ ID NO: 32079 - protein, 93 aa, Homo sapiens
MLYLEDYLEMIEQLPMDLRDRFTEMREMDLQVQNAMDQLEQRVSEFFMNAKKNKPEWREEQMASIKKDYYKALEDADEKVQLANQIYDLDLWN

SEQ ID NO: 32080 - protein, 511 aa, Homo sapiens
MSRQLTHFPRGERLGFSGCSAVLSGGIGSSSASFRARVKGSASFGSKSLSCLGGSRSLALSAAARRGGGRLGGFVGTAFGSAGLGPKCPSVCPPGGIPQVTVNKSLLAPLNVEMDPEIQRVRAQEREQIKALNNKFASFIDKVRFLEQQNQVLETKWNLLQQLDLNNCRKNLEPIYEGYISNLQKQLEMLSGDGVRLDSELRNMQDLVEDYKKRYEVEINRRTAAENEFVVLKKDVDAAYMNKVELQAKVDSLTDEIKFFKCLYEGEITQIQSHISDTSIVLSMDNNRDLDLDSIIAEVRAQYEEIALKSKAEAETLYQTKIQELQVTAGQHGDDLKLTKAEISELNRLIQRIRSEIGNVKKQCADLETAIADAEQRGDCALKDARAKLDELEGALHQAKEELARMLREYQELVSLKLALDMEIATYRKLLESEECRMSGEYPNSVSISVISSTNAGAGGAGFSMGFGASSSYSYKTAAADVKTKGSCGSELKDPLAKTSGSSCATKKASR

SEQ ID NO: 32081 - protein, 510 aa, Homo sapiens
MSRQLTHFPRGERLGFSGCSAVLSGGIGSSSASFRARVKGSASFGSKSLSCLGGSRSLALSAAARRGGGRLGGFVGTAFGSAGLGPKCPSVCPPGGIPQVTVNKSLLAPLNVEMDPEIQRVRAQEREQIKALNNKFASFIDKVRFLEQQNQVLETKWNLLQQLDLNNCRKNLEPIYEGYISNLQKQLEMLSGDGVRLDSELRNMQDLVEDYKKRYEVEINRRTAAENEFVVLKKDVDAAYMNKVELQAKVDSLTDEIKFFKCLYEGEITQIQSHISDTSIVLSMDNNRDLDLDSIIAEVRAQYEEIALKSKAEAETLYQTKIQELQVTAGQHGDDLKLTKAEISELNRLIQRIRSEIGNVKKCADLETAIADAEQRGDCALKDARAKLDELEGALHQAKEELARMLREYQELVSLKLALDMEIATYRKLLESEECRMSGEYPNSVSISVISSTNAGAGGAGFSMGFGASSSYSYKTAAADVKTKGSCGSELKDPLAKTSGSSCATKKASR

SEQ ID NO: 32082 - protein, 469 aa, Homo sapiens
MSRQLTHFPRGERLGFSGCSAVLSGGIGSSSASFRARVKGSASFGSKSLSCLGGSRSLALSAAARRGGGRLGGFVGTAFGSAGLGPKCPSVCPPGGIPQVTVNKSLLAPLNVEMDPEIQRVRAQEREQIKALNNKFASFIDKVRFLEQQNQVLETKWNLLQQLDLNNCRKNLEPIYEGYISNLQKQLEMLSGDGVRLDSELRNMQDLVEDYKKRYEVEINRRTAAENEFVVLKKDVDAAYMNKVELQAKVDSLTDEIKFFKCLYEGEITQIQSHISDTSIVLSMDNNRDLDLDSIIAEVRAQYEEIALKSKAEAETLYQTKCADLETAIADAEQRGDCALKDARAKLDELEGALHQAKEELARMLREYQELVSLKLALDMEIATYRKLLESEECRMSGEYPNSVSISVISSTNAGAGGAGFSMGFGASSSYSYKTAAADVKTKGSCGSELKDPLAKTSGSSCATKKASR

SEQ ID NO: 32083 - protein, 234 aa, Homo sapiens
MAASRWARKAVVLLCASDLLLLLLLLPPPGSCAAEGSPGTPDESTPPPRKKKKDIRDYNDADMARLLEQWEKDDDIEEGDLPEHKRPSAPVDFSKIDPSKPESILKMTKKGKTLMMFVTVSGSPTEKETEEITSLWQGSLFNANYDVQRFIVGSDRAIFMLRDGSYAWEIKDFLVGQDRCADVTLEGQVYPGKGGGSKEKNKTKQDKGKKKKEGDLKSRSSKEENRAGNKREDL

SEQ ID NO: 32084 - protein, 138 aa, Homo sapiens
MAASRWARKAVVLLCASDLLLLLLLLPPPGSCAAEGSPGTPDESTPPPRKKKKDIRDYNDADMARLLEQWETPEPLPVLPEVPSTCACLSSASLIWTCFSHLSPHALVKRVWPPAKQGLGGKESPASAWLPHRGGELK

SEQ ID NO: 32085 - protein, 1581 aa, Homo sapiens
MKAQGETEESEKLSKMSSLLERLHAKFNQNRPWSETIKLVRQVMEKRVVMSSGGHQHLVSCLETLQKALKVTSLPAMTDRLESIARQNGLGSHLSASGTECYITSDMFYVEVQLDPAGQLCDVKVAHHGENPVSCPELVQQLREKNFDEFSKHLKGLVNLYNLPGDNKLKTKMYLALQSLEQDLSKMAIMYWKATNAGPLDKILHGSVGYLTPRSGGHLMNLKYYVSPSDLLDDKTASPIILHENNVSRSLGMNASVTIEGTSAVYKLPIAPLIMGSHPVDNKWTPSFSSITSANSVDLPACFFLKFPQPIPVSRAFVQKLQNCTGIPLFETQPTYAPLYELITQFELSKDPDPIPLNHNMRFYAALPGQQHCYFLNKDAPLPDGRSLQGTLVSKITFQHPGRVPLILNLIRHQVAYNTLIGSCVKRTILKEDSPGLLQFEVCPLSESRFSVSFQHPVNDSLVCVVMDVQDSTHVSCKLYKGLSDALICTDDFIAKVVQRCMSIPVTMRAIRRKAETIQADTPALSLIAETVEDMVKKNLPPASSPGYGMTTGNNPMSGTTTPTNTFPGGPITTLFNMSMSIKDRHESVGHGEDFSKVSQNPILTSLLQITGNGGSTIGSSPTPPHHTPPPVSSMAGNTKNHPMLMNLLKDNPAQDFSTLYGSSPLERQNSSSGSPRMEICSGSNKTKKKKSSRLPPEKPKHQTEDDFQRELFSMDVDSQNPIFDVNMTADTLDTPHITPAPSQCSTPPTTYPQPVPHPQPSIQRMVRLSSSDSIGPDVTDILSDIAEEASKLPSTSDDCPAIGTPLRDSSSSGHSQSTLFDSDVFQTNNNENPYTDPADLIADAAGSPSSDSPTNHFFHDGVDFNPDLLNSQSQSGFGEEYFDESSQSGDNDDFKGFASQALNTLGVPMLGGDNGETKFKGNNQADTVDFSIISVAGKALAPADLMEHHSGSQGPLLTTGDLGKEKTQKRVKEGNGTSNSTLSGPGLDSKPGKRSRTPSNDGKSKDKPPKRKKADTEGKSPSHSSSNRPFTPPTSTGGSKSPGSAGRSQTPPGVATPPIPKITIQIPKGTVMVGKPSSHSQYTSSGSVSSSGSKSHHSHSSSSSSSASTSGKMKSSKSEGSSSSKLSSSMYSSQGSSGSSQSKNSSQSGGKPGSSPITKHGLSSGSSSTKMKPQGKPSSLMNPSLSKPNISPSHSRPPGGSDKLASPMKPVPGTPPSSKAKSPISSGSGGSHMSGTSSSSGMKSSSGLGSSGSLSQKTPPSSNSCTASSSSFSSSGSSMSSSQNQHGSSKGKSPSRNKKPSLTAVIDKLKHGVVTSGPGGEDPLDGQMGVSTNSSSHPMSSKHNMSGGEFQGKREKSDKDKSKVSTSGSSVDSSKKTSESKNVGSTGVAKIIISKHDGGSPSIKAKVTLQKPGESSGEGLRPQMASSKNYGSPLISGSTPKHERGSPSHSKSPAYTPQNLDSESESGSSIAEKSYQNSPSSDDGIRPLPEYSTEKHKKHKKEKKKVKDKDRDRDRDKDRDKKKSHSIKPESWSKSPISSDQSLSMTSNTILSADRPSRLSPDFMIGEEDDDLMDVALIGN

SEQ ID NO: 32086 - protein, 556 aa, Homo sapiens
MKAQGETEESEKLSKMSSLLERLHAKFNQNRPWSETIKLVRQVMEKRVVMSSGGHQHLVSCLETLQKALKVTSLPAMTDRLESIARQNGLGSHLSASGTECYITSDMFYVEVQLDPAGQLCDVKVAHHGENPVSCPELVQQLREKNFDEFSKHLKGLVNLYNLPGDNKLKTKMYLALQSLEQDLSKMAIMYWKATNAGPLDKILHGSVGYLTPRSGGHLMNLKYYVSPSDLLDDKTASPIILHENNVSRSLGMNASVTIEGTSAVYKLPIAPLIMGSHPVDNKWTPSFSSITSANSVDLPACFFLKFPQPIPVSRAFVQKLQNCTGIPLFETQPTYAPLYELITQFELSKDPDPIPLNHNMRFYAALPGQQHCYFLNKDAPLPDGRSLQGTLVSKITFQHPGRVPLILNLIRHQVAYNTLIGSCVKRTILKEDSPGLLQFEVCPLSESRFSVSFQHPVNDSLVCVVMDVQDSTHVSCKLYKGLSDALICTDDFIAKVVQRCMSIPVTMRAIRRKAETIQADTPALSLIAETVEDMVKKNLPPASSPGSKNPELGSG

SEQ ID NO: 32087 - protein, 179 aa, Homo sapiens
MGSEAAQLLEAADFAARKHRQQRRKDPEGTPYINHPIGVARILTHEAGITDIVVLQAALLHDTVEDTDTTLDEVELHFGAQVRRLVEEVTDDKTLPKLERKRLQVEQAPHSSPGAKLVKLADKLYNLRDLNRCTPEGWSEHRVQEYFEWAAQVVKGLQGTNRQLEEALKHLFKQRGLTI

SEQ ID NO: 32088 - protein, 140 aa, Homo sapiens
MGSEAAQLLEAADFAARKHRQQRRKDPEGTPYINHPIGVARILTHEAGITDIVVLQAALLHDTVEDTDTTLDEVELHFGAQVRRLVEEVTDDKTLPKLERKRLQVEQAPHSSPGAKLVKLADKLYNLRDLNRCTPEVKIQ

SEQ ID NO: 32089 - protein, 1230 aa, Homo sapiens
MRSKGRARKLATNNECVYGNYPEIPLEEMPDADGVASTPSLNIQEPCSPATSSEAFTPKEGSPYKAPIYIPDDIPIPAEFELRESNMPGAGLGIWTKRKIEVGEKFGPYVGEQRSNLKDPSYGWEILDEFYNVKFCIDASQPDVGSWLKYIRFAGCYDQHNLVACQINDQIFYRVVADIAPGEELLLFMKSEDYPHETMAPDIHEERQYRCEDCDQLFESKAELADHQKFPCSTPHSAFSMVEEDFQQKLESENDLQEIHTIQECKECDQVFPDLQSLEKHMLSHTEEREYKCDQCPKAFNWKSNLIRHQMSHDSGKHYECENCAKVFTDPSNLQRHIRSQHVGARAHACPECGKTFATSSGLKQHKHIHSSVKPFICEVCHKSYTQFSNLCRHKRMHADCRTQIKCKDCGQMFSTTSSLNKHRRFCEGKNHFAAGGFFGQGISLPGTPAMDKTSMVNMSHANPGLADYFGANRHPAGLTFPTAPGFSFSFPGLFPSGLYHRPPLIPASSPVKGLSSTEQTNKSQSPLMTHPQILPATQDILKALSKHPSVGDNKPVELQPERSSEERPFEKISDQSESSDLDDVSTPSGSDLETTSGSDLESDIESDKEKFKENGKMFKDKVSPLQNLASINNKKEYSNHSIFSPSLEEQTAVSGAVNDSIKAIASIAEKYFGSTGLVGLQDKKVGALPYPSMFPLPFFPAFSQSMYPFPDRDLRSLPLKMEPQSPGEVKKLQKGSSESPFDLTTKRKDEKPLTPVPSKPPVTPATSQDQPLDLSMGSRSRASGTKLTEPRKNHVFGGKKGSNVESRPASDGSLQHARPTPFFMDPIYRVEKRKLTDPLEALKEKYLRPSPGFLFHPQMSAIENMAEKLESFSALKPEASELLQSVPSMFNFRAPPNALPENLLRKGKERYTCRYCGKIFPRSANLTRHLRTHTGEQPYRCKYCDRSFSISSNLQRHVRNIHNKEKPFKCHLCDRCFGQQTNLDRHLKKHENGNMSGTATSSPHSELESTGAILDDKEDAYFTEIRNFIGNSNHGSQSPRNVEERMNGSHFKDEKALVTSQNSDLLDDEEVEDEVLLDEEDEDNDITGKTGKEPVTSNLHEGNPEDDYEETSALEMSCKTSPVRYKEEEYKSGLSALDHIRHFTDSLKMRKMEDNQYSEAELSSFSTSHVPEELKQPLHRKSKSQAYAMMLSLSDKESLHSTSHSSSNVWHSMARAAAESSAIQSISHV

SEQ ID NO: 32090 - protein, 1051 aa, Homo sapiens
MKSEDYPHETMAPDIHEERQYRCEDCDQLFESKAELADHQKFPCSTPHSAFSMVEEDFQQKLESENDLQEIHTIQECKECDQVFPDLQSLEKHMLSHTEEREYKCDQCPKAFNWKSNLIRHQMSHDSGKHYECENCAKVFTDPSNLQRHIRSQHVGARAHACPECGKTFATSSGLKQHKHIHSSVKPFICEVCHKSYTQFSNLCRHKRMHADCRTQIKCKDCGQMFSTTSSLNKHRRFCEGKNHFAAGGFFGQGISLPGTPAMDKTSMVNMSHANPGLADYFGANRHPAGLTFPTAPGFSFSFPGLFPSGLYHRPPLIPASSPVKGLSSTEQTNKSQSPLMTHPQILPATQDILKALSKHPSVGDNKPVELQPERSSEERPFEKISDQSESSDLDDVSTPSGSDLETTSGSDLESDIESDKEKFKENGKMFKDKVSPLQNLASINNKKEYSNHSIFSPSLEEQTAVSGAVNDSIKAIASIAEKYFGSTGLVGLQDKKVGALPYPSMFPLPFFPAFSQSMYPFPDRDLRSLPLKMEPQSPGEVKKLQKGSSESPFDLTTKRKDEKPLTPVPSKPPVTPATSQDQPLDLSMGSRSRASGTKLTEPRKNHVFGGKKGSNVESRPASDGSLQHARPTPFFMDPIYRVEKRKLTDPLEALKEKYLRPSPGFLFHPQFQLPDQRTWMSAIENMAEKLESFSALKPEASELLQSVPSMFNFRAPPNALPENLLRKGKERYTCRYCGKIFPRSANLTRHLRTHTGEQPYRCKYCDRSFSISSNLQRHVRNIHNKEKPFKCHLCDRCFGQQTNLDRHLKKHENGNMSGTATSSPHSELESTGAILDDKEDAYFTEIRNFIGNSNHGSQSPRNVEERMNGSHFKDEKALVTSQNSDLLDDEEVEDEVLLDEEDEDNDITGKTGKEPVTSNLHEGNPEDDYEETSALEMSCKTSPVRYKEEEYKSGLSALDHIRHFTDSLKMRKMEDNQYSEAELSSFSTSHVPEELKQPLHRKSKSQAYAMMLSLSDKESLHSTSHSSSNVWHSMARAAAESSAIQSISHV

SEQ ID NO: 32091 - protein, 1239 aa, Homo sapiens
MRSKGRARKLATNNECVYGNYPEIPLEEMPDADGVASTPSLNIQEPCSPATSSEAFTPKEGSPYKAPIYIPDDIPIPAEFELRESNMPGAGLGIWTKRKIEVGEKFGPYVGEQRSNLKDPSYGWEILDEFYNVKFCIDASQPDVGSWLKYIRFAGCYDQHNLVACQINDQIFYRVVADIAPGEELLLFMKSEDYPHETMAPDIHEERQYRCEDCDQLFESKAELADHQKFPCSTPHSAFSMVEEDFQQKLESENDLQEIHTIQECKECDQVFPDLQSLEKHMLSHTEEREYKCDQCPKAFNWKSNLIRHQMSHDSGKHYECENCAKVFTDPSNLQRHIRSQHVGARAHACPECGKTFATSSGLKQHKHIHSSVKPFICEVCHKSYTQFSNLCRHKRMHADCRTQIKCKDCGQMFSTTSSLNKHRRFCEGKNHFAAGGFFGQGISLPGTPAMDKTSMVNMSHANPGLADYFGANRHPAGLTFPTAPGFSFSFPGLFPSGLYHRPPLIPASSPVKGLSSTEQTNKSQSPLMTHPQILPATQDILKALSKHPSVGDNKPVELQPERSSEERPFEKISDQSESSDLDDVSTPSGSDLETTSGSDLESDIESDKEKFKENGKMFKDKVSPLQNLASINNKKEYSNHSIFSPSLEEQTAVSGAVNDSIKAIASIAEKYFGSTGLVGLQDKKVGALPYPSMFPLPFFPAFSQSMYPFPDRDLRSLPLKMEPQSPGEVKKLQKGSSESPFDLTTKRKDEKPLTPVPSKPPVTPATSQDQPLDLSMGSRSRASGTKLTEPRKNHVFGGKKGSNVESRPASDGSLQHARPTPFFMDPIYRVEKRKLTDPLEALKEKYLRPSPGFLFHPQFQLPDQRTWMSAIENMAEKLESFSALKPEASELLQSVPSMFNFRAPPNALPENLLRKGKERYTCRYCGKIFPRSANLTRHLRTHTGEQPYRCKYCDRSFSISSNLQRHVRNIHNKEKPFKCHLCDRCFGQQTNLDRHLKKHENGNMSGTATSSPHSELESTGAILDDKEDAYFTEIRNFIGNSNHGSQSPRNVEERMNGSHFKDEKALVTSQNSDLLDDEEVEDEVLLDEEDEDNDITGKTGKEPVTSNLHEGNPEDDYEETSALEMSCKTSPVRYKEEEYKSGLSALDHIRHFTDSLKMRKMEDNQYSEAELSSFSTSHVPEELKQPLHRKSKSQAYAMMLSLSDKESLHSTSHSSSNVWHSMARAAAESSAIQSISHV

SEQ ID NO: 32092 - protein, 1116 aa, Homo sapiens
MILDEFYNVKFCIDASQPDVGSWLKYIRFAGCYDQHNLVACQINDQIFYRVVADIAPGEELLLFMKSEDYPHETMAPDIHEERQYRCEDCDQLFESKAELADHQKFPCSTPHSAFSMVEEDFQQKLESENDLQEIHTIQECKECDQVFPDLQSLEKHMLSHTEEREYKCDQCPKAFNWKSNLIRHQMSHDSGKHYECENCAKQVFTDPSNLQRHIRSQHVGARAHACPECGKTFATSSGLKQHKHIHSSVKPFICEVCHKSYTQFSNLCRHKRMHADCRTQIKCKDCGQMFSTTSSLNKHRRFCEGKNHFAAGGFFGQGISLPGTPAMDKTSMVNMSHANPGLADYFGANRHPAGLTFPTAPGFSFSFPGLFPSGLYHRPPLIPASSPVKGLSSTEQTNKSQSPLMTHPQILPATQDILKALSKHPSVGDNKPVELQPERSSEERPFEKISDQSESSDLDDVSTPSGSDLETTSGSDLESDIESDKEKFKENGKMFKDKVSPLQNLASINNKKEYSNHSIFSPSLEEQTAVSGAVNDSIKAIASIAEKYFGSTGLVGLQDKKVGALPYPSMFPLPFFPAFSQSMYPFPDRDLRSLPLKMEPQSPGEVKKLQKGSSESPFDLTTKRKDEKPLTPVPSKPPVTPATSQDQPLDLSMGSRSRASGTKLTEPRKNHVFGGKKGSNVESRPASDGSLQHARPTPFFMDPIYRVEKRKLTDPLEALKEKYLRPSPGFLFHPQFQLPDQRTWMSAIENMAEKLESFSALKPEASELLQSVPSMFNFRAPPNALPENLLRKGKERYTCRYCGKIFPRSANLTRHLRTHTGEQPYRCKYCDRSFSISSNLQRHVRNIHNKEKPFKCHLCDRCFGQQTNLDRHLKKHENGNMSGTATSSPHSELESTGAILDDKEDAYFTEIRNFIGNSNHGSQSPRNVEERMNGSHFKDEKALVTSQNSDLLDDEEVEDEVLLDEEDEDNDITGKTGKEPVTSNLHEGNPEDDYEETSALEMSCKTSPVRYKEEEYKSGLSALDHIRHFTDSLKMRKMEDNQYSEAELSSFSTSHVPEELKQPLHRKSKSQAYAMMLSLSDKESLHSTSHSSSNVWHSMARAAAESSAIQSISHV

SEQ ID NO: 32093 - protein, 1042 aa, Homo sapiens
MKSEDYPHETMAPDIHEERQYRCEDCDQLFESKAELADHQKFPCSTPHSAFSMVEEDFQQKLESENDLQEIHTIQECKECDQVFPDLQSLEKHMLSHTEEREYKCDQCPKAFNWKSNLIRHQMSHDSGKHYECENCAKVFTDPSNLQRHIRSQHVGARAHACPECGKTFATSSGLKQHKHIHSSVKPFICEVCHKSYTQFSNLCRHKRMHADCRTQIKCKDCGQMFSTTSSLNKHRRFCEGKNHFAAGGFFGQGISLPGTPAMDKTSMVNMSHANPGLADYFGANRHPAGLTFPTAPGFSFSFPGLFPSGLYHRPPLIPASSPVKGLSSTEQTNKSQSPLMTHPQILPATQDILKALSKHPSVGDNKPVELQPERSSEERPFEKISDQSESSDLDDVSTPSGSDLETTSGSDLESDIESDKEKFKENGKMFKDKVSPLQNLASINNKKEYSNHSIFSPSLEEQTAVSGAVNDSIKAIASIAEKYFGSTGLVGLQDKKVGALPYPSMFPLPFFPAFSQSMYPFPDRDLRSLPLKMEPQSPGEVKKLQKGSSESPFDLTTKRKDEKPLTPVPSKPPVTPATSQDQPLDLSMGSRSRASGTKLTEPRKNHVFGGKKGSNVESRPASDGSLQHARPTPFFMDPIYRVEKRKLTDPLEALKEKYLRPSPGFLFHPQMSAIENMAEKLESFSALKPEASELLQSVPSMFNFRAPPNALPENLLRKGKERYTCRYCGKIFPRSANLTRHLRTHTGEQPYRCKYCDRSFSISSNLQRHVRNIHNKEKPFKCHLCDRCFGQQTNLDRHLKKHENGNMSGTATSSPHSELESTGAILDDKEDAYFTEIRNFIGNSNHGSQSPRNVEERMNGSHFKDEKALVTSQNSDLLDDEEVEDEVLLDEEDEDNDITGKTGKEPVTSNLHEGNPEDDYEETSALEMSCKTSPVRYKEEEYKSGLSALDHIRHFTDSLKMRKMEDNQYSEAELSSFSTSHVPEELKQPLHRKSKSQAYAMMLSLSDKESLHSTSHSSSNVWHSMARAAAESSAIQSISHV

SEQ ID NO: 32094 - protein, 1043 aa, Homo sapiens
MKSEDYPHETMAPDIHEERQYRCEDCDQLFESKAELADHQKFPCSTPHSAFSMVEEDFQQKLESENDLQEIHTIQECKECDQVFPDLQSLEKHMLSHTEEREYKCDQCPKAFNWKSNLIRHQMSHDSGKHYECENCAKQVFTDPSNLQRHIRSQHVGARAHACPECGKTFATSSGLKQHKHIHSSVKPFICEVCHKSYTQFSNLCRHKRMHADCRTQIKCKDCGQMFSTTSSLNKHRRFCEGKNHFAAGGFFGQGISLPGTPAMDKTSMVNMSHANPGLADYFGANRHPAGLTFPTAPGFSFSFPGLFPSGLYHRPPLIPASSPVKGLSSTEQTNKSQSPLMTHPQILPATQDILKALSKHPSVGDNKPVELQPERSSEERPFEKISDQSESSDLDDVSTPSGSDLETTSGSDLESDIESDKEKFKENGKMFKDKVSPLQNLASINNKKEYSNHSIFSPSLEEQTAVSGAVNDSIKAIASIAEKYFGSTGLVGLQDKKVGALPYPSMFPLPFFPAFSQSMYPFPDRDLRSLPLKMEPQSPGEVKKLQKGSSESPFDLTTKRKDEKPLTPVPSKPPVTPATSQDQPLDLSMGSRSRASGTKLTEPRKNHVFGGKKGSNVESRPASDGSLQHARPTPFFMDPIYRVEKRKLTDPLEALKEKYLRPSPGFLFHPQMSAIENMAEKLESFSALKPEASELLQSVPSMFNFRAPPNALPENLLRKGKERYTCRYCGKIFPRSANLTRHLRTHTGEQPYRCKYCDRSFSISSNLQRHVRNIHNKEKPFKCHLCDRCFGQQTNLDRHLKKHENGNMSGTATSSPHSELESTGAILDDKEDAYFTEIRNFIGNSNHGSQSPRNVEERMNGSHFKDEKALVTSQNSDLLDDEEVEDEVLLDEEDEDNDITGKTGKEPVTSNLHEGNPEDDYEETSALEMSCKTSPVRYKEEEYKSGLSALDHIRHFTDSLKMRKMEDNQYSEAELSSFSTSHVPEELKQPLHRKSKSQAYAMMLSLSDKESLHSTSHSSSNVWHSMARAAAESSAIQSISHV

SEQ ID NO: 32095 - protein, 954 aa, Homo sapiens
MRSKGRARKLATNNECVYGNYPEIPLEEMPDADGVASTPSLNIQEPCSPATSSEAFTPKEGSPYKAPIYIPDDIPIPAEFELRESNMPGAGLGIWTKRKIEVGEKFGPYVGEQRSNLKDPSYGWEILDEFYNVKFCIDASQPDVGSWLKYIRFAGCYDQHNLVACQINDQIFYRVVADIAPGEELLLFMKSEDYPHETMAPDIHEERQYRCEDCDQLFESKAELADHQKFPCSTPHSAFSMVEEDFQQKLESENDLQEIHTIQECKECDQVFPDLQSLEKHMLSHTEEREYKCDQCPKAFNWKSNLIRHQMSHDSGKHYECENCAKVFTDPSNLQRHIRSQHVGARAHACPECGKTFATSSGLKQHKHIHSSVKPFICEVCHKSYTQFSNLCRHKRMHADCRTQIKCKDCGQMFSTTSSLNKHRRFCEGKNHFAAGGFFGQGISLPGTPAMDKTSMVNMSHANPGLADYFGANRHPAGLTFPTAPGFSFSFPGLFPSGLYHRPPLIPASSPVKGLSSTEQTNKSQSPLMTHPQILPATQDILKALSKHPSVGDNKPVELQPERSSEERPFEKISDQSESSDLDDVSTPSGSDLETTSGSDLESDIESDKEKFKENGKMFKDKVSPLQNLASINNKKEYSNHSIFSPSLEEQTAVSGAVNDSIKAIASIAEKYFGSTGLVGLQDKKVGALPYPSMFPLPFFPAFSQSMYPFPDRDLRSLPLKMEPQSPGEVKKLQKGSSESPFDLTTKRKDEKPLTPVPSKPPVTPATSQDQPLDLSMGSRSRASGTKLTEPRKNHVFGGKKGSNVESRPASDGSLQHARPTPFFMDPIYRVEKRKLTDPLEALKEKYLRPSPGFLFHPQFQLPDQRTWMSAIENMAEKLESFSALKPEASELLQSVPSMFNFRAPPNALPENLLRKGKERYTCRYCGKIFPRSANLTRHLRTHTGEQLKNKDLQ

SEQ ID NO: 32096 - protein, 169 aa, Homo sapiens
MRSKGRARKLATNNECVYGNYPEIPLEEMPDADGVASTPSLNIQEPCSPATSSEAFTPKEGSPYKAPIYIPDDIPIPAEFELRESNMPGAGLGIWTKRKIEVGEKFGPYVGEQRSNLKDPSYGWEVHLPRSRRVSVHSWLYLGKRSSDVGIAFSQADVYMPGLQCAFLS

SEQ ID NO: 32097 - protein, 3664 aa, Homo sapiens
MVRETRHLWVGNLPENVREEKIIEHFKRYGRVESVKILPKRGSEGGVAAFVDFVDIKSAQKAHNSVNKMGDRDLRTDYNEPGTIPSAARGLDDTVSIASRSREVSGFRGGGGGPAYGPPPSLHAREGRYERRLDGASDNRERAYEHSAYGHHERGTGGFDRTRHYDQDYYRDPRERTLQHGLYYASRSRSPNRFDAHDPRYEPRAREQFTLPSVVHRDIYRDDITREVRGRRPERNYQHSRSRSPHSSQSRNQSPQRLASQASRPTRSPSGSGSRSRSSSSDSISSSSSTSSDSSDSSSSSSDDSPARSVQSAAVPAPTSQLLSSLEKDEPRKSFGIKVQNLPVRSTDTSLKDGLFHEFKKFGKVTSVQIHGTSEERYGLVFFRQQEDQEKALTASKGKLFFGMQIEVTAWIGPETESENEFRPLDERIDEFHPKATRTLFIGNLEKTTTYHDLRNIFQRFGEIVDIDIKKVNGVPQYAFLQYCDIASVCKAIKKMDGEYLGNNRLKLGFGKSMPTNCVWLDGLSSNVSDQYLTRHFCRYGPVVKVVFDRLKGMALVLYNEIEYAQAAVKETKGRKIGGNKIKVDFANRESQLAFYHCMEKSGQDIRDFYEMLAERREERRASYDYNQDRTYYESVRTPGTYPEDSRRDYPARGREFYSEWETYQGDYYESRYYDDPREYRDYRNDPYEQDIREYSYRQRERERERERFESDRDRDHERRPIERSQSPVHLRRPQSPGASPSQAERLPSDSERRLYSRSSDRSGSCSSLSPPRYEKLDKSRLERYTKNEKTDKERTFDPERVERERRLIRKEKVEKDKTDKQKRKGKVHSPSSQSSETDQENEREQSPEKPRSCNKLSREKADKEGIAKNRLELMPCVVLTRVKEKEGKVIDHTPVEKLKAKLDNDTVKSSALDQKLQVSQTEPAKSDLSKLESVRMKVPKEKGLSSHVEVVEKEGRLKARKHLKPEQPADGVSAVDLEKLEARKRRFADSNLKAEKQKPEVKKSSPEMEDARVLSKKQPDVSSREVILLREGEAERKPVRKEILKRESKKIKLDRLNTVASPKDCQELASISVGSGSRPSSDLQARLGELAGESVENQEVQSKKPIPSKPQLKQLQVLDDQGPEREDVRKNYCSLRDETPERKSGQEKSHSVNTEEKIGIDIDHTQSYRKQMEQSRRKQQMEMEIAKSEKFGSPKKDVDEYERRSLVHEVGKPPQDVTDDSPPSKKKRMDHVDFDICTKRERNYRSSRQISEDSERTGGSPSVRHGSFHEDEDPIGSPRLLSVKGSPKVDEKVLPYSNITVREESLKFNPYDSSRREQMADMAKIKLSVLNSEDELNRWDSQMKQDAGRFDVSFPNSIIKRDSLRKRSVRDLEPGEVPSDSDEDGEHKSHSPRASALYESSRLSFLLRDREDKLRERDERLSSSLERNKFYSFALDKTITPDTKALLERAKSLSSSREENWSFLDWDSRFANFRNNKDKEKVDSAPRPIPSWYMKKKKIRTDSEGKMDDKKEDHKEEEQERQELFASRFLHSSIFEQDSKRLQHLERKEEDSDFISGRIYGKQTSEGANSTTDSIQEPVVLFHSRFMELTRMQQKEKEKDQKPKEVEKQEDTENHPKTPESAPENKDSELKTPPSVGPPSVTVVTLESAPSALEKTTGDKTVEAPLVTEEKTVEPATVSEEAKPASEPAPAPVEQLEQVDLPPGADPDKEAAMMPAGVEEGSSGDQPPYLDAKPPTPGASFSQAESNVDPEPDSTQPLSKPAQKSEEANEPKAEKPDATADAEPDANQKAEAAPESQPPASEDLEVDPPVAAKDKKPNKSKRSKTPVQAAAVSIVEKPVTRKSERIDREKLKRSNSPRGEAQKLLELKMEAEKITRTASKNSAADLEHPEPSLPLSRTRRRNVRSVYATMGDHENRSPVKEPVEQPRVTRKRLERELQEAAAVPTTPRRGRPPKTRRRADEEEENEAKEPAETLKPPEGWRSPRSQKTAAGGGPQGKKGKNEPKVDATRPEATTEVGPQIGVKESSMEPKAAEEEAGSEQKRDRKDAGTDKNPPETAPVEVVEKKPAPEKNSKSKRGRSRNSRLAVDKSASLKNVDAAVSPRGAAAQAGERESGVVAVSPEKSESPQKEDGLSSQLKSDPVDPDKEPEKEDVSASGPSPEATQLAKQMELEQAVEHIAKLAEASASAAYKADAPEGLAPEDRDKPAHQASETELAAAIGSIINDISGEPENFPAPPPYPGESQTDLQPPAGAQALQPSEEGMETDEAVSGILETEAATESSRPPVNAPDPSAGPTDTKEARGNSSETSHSVPEAKGSKEVEVTLVRKDKGRQKTTRSRRKRNTNKKVVAPVESHVPESNQAQGESPAANEGTTVQHPEAPQEEKQSEKPHSTPPQSCTSDLSKIPSTENSSQEISVEERTPTKASVPPDLPPPPQPAPVDEEPQARFRVHSIIESDPVTPPSDPSIPIPTLPSVTAAKLSPPVASGGIPHQSPPTKVTEWITRQEEPRAQSTPSPALPPDTKASDVDTSSSTLRKILMDPKYVSATSVTSTSVTTAIAEPVSAAPCLHEAPPPPVDSKKPLEEKTAPPVTNNSEIQASEVLVAADKEKVAPVIAPKITSVISRMPVSIDLENSQKITLAKPAPQTLTGLVSALTGLVNVSLVPVNALKGPVKGSVTTLKSLVSTPAGPVNVLKGPVNVLTGPVNVLTTPVNATVGTVNAAPGTVNAAASAVNATASAVTVTAGAVTAASGGVTATTGTVTMAGAVIAPSTKCKQRASANENSRFHPGSMPVIDDRPADAGSGAGLRVNTSEGVVLLSYSGQKTEGPQRISAKISQIPPASAMDIEFQQSVSKSQVKPDSVTASQPPSKGPQAPAGYANVATHSTLVLTAQTYNASPVISSVKADRPSLEKPEPIHLSVSTPVTQGGTVKVLTQGINTPPVLVHNQLVLTPSIVTTNKKLADPVTLKIETKVLQPANLGSTLTPHHPPALPSKLPTEVNHVPSGPSIPADRTVSHLAAAKLDAHSPRPSGPGPSSFPRASHPSSTASTALSTNATVMLAAGIPVPQFISSIHPEQSVIMPPHSITQTVSLSHLSQGEVRMNTPTLPSITYSIRPEALHSPRAPLQPQQIEVRAPQRASTPQPAPAGVPALASQHPPEEEVHYHLPVARATAPVQSEVLVMQSEYRLHPYTVPRDVRIMVHPHVTAVSEQPRAADGVVKVPPASKAPQQPGKEAAKTPDAKAAPTPTPAPVPVPVPLPAPAPAPHGEARILTVTPSNQLQGLPLTPPVVVTHGVQIVHSSGELFQEYRYGDIRTYHPPAQLTHTQFPAASSVGLPSRTKTAAQGPPPEGEPLQPPQPVQSTQPAQPAPPCPPSQLGQPGQPPSSKMPQVSQEAKGTQTGVEQPRLPAGPANRPPEPHTQVQRAQAETGPTSFPSPVSVSMKPDLPVSLPTQTAPKQPLFVPTTSGPSTPPGLVLPHTEFQPAPKQDSSPHLTSQRPVDMVQLLKKYPIVWQGLLALKNDTAAVQLHFVSGNNVLAHRSLPLSEGGPPLRIAQRMRLEATQLEGVARRMTVETDYCLLLALPCGRDQEDVVSQTESLKAAFITYLQAKQAAGIINVPNPGSNQPAYVLQIFPPCEFSESHLSRLAPDLLASISNISPHLMIVIASV

SEQ ID NO: 32098 - protein, 268 aa, Homo sapiens
MAQPLCPPLSESWMLSAAWGPTRRPPPSDKDCGRSLVSSPDSWGSTPADSPVASPARPGTLRDPRAPSVGRRGARSSRLGSGQRQSASEREKLRMRTLARALHELRRFLPPSVAPAGQSLTKIETLRLAIRYIGHLSAVLGLSEESLQRRCRQRGDAGSPRGCPLCPDDCPAQMQTRTQAEGQGQGRGLGLVSAVRAGASWGSPPACPGARAAPEPRDPPALFAEAACPEGQAMEPSPPSPLLPGDVLALLETWMPLSPLEWLPEEPK

SEQ ID NO: 32099 - protein, 397 aa, Homo sapiens
MAQSPPPQSLLGHDHWIFAQGWGWAGHWDSTSPASSSDSSGSCPCDGARGLPQPQPPSCSSRAAEAAATTPRRARTGPAGGQRQSASEREKLRMRTLARALHELRRFLPPSLAPAGQSLTKIETLRLAIRYIGHLSAVLGLSEESLQCRRRQRGDAGSPWGCPLCPDRGPAEAQTQAEGQGQGQGQGQGQGQGQGQGQGQGQGQGRRPGLVSAVLAEASWGSPSACPGAQAAPERLGRGVHDTDPWATPPYCPKIQSPPYSSQGTTSDASLWTPPQGCPWTQSSPEPRNPPVPWTAAPATLELAAVYQGLSVSPEPCLSLGAPSLLPHPSCQRLQPQTPGRCWSHSAEVVPNSEDQGPGAAFQLSEASPPQSSGLRFSGCPELWQEDLEGARLGIFY

SEQ ID NO: 32100 - protein, 486 aa, Homo sapiens; identical to SEQ ID NO: 170

SEQ ID NO: 32101 - protein, 498 aa, Homo sapiens [sequence omitted]

SEQ ID NO: 32102 - protein, 1313 aa, Homo sapiens
MSGWRYLICVSFLLTILLELTYQGPPVPASSSTKLLMTSYSMRSTVVSRYAHTLVTSVLFNPHAEAHEAIFDLDLPHLAFISNFTMTINNKVYIAEVKEKHQAKKIYEEAHQQGKTAAHVGIRDRESEKFRISTSLAAGTEVTFSLAYEELLQRHQGQYQLVVSLRPGQLVKRLSIEVTVSERTGISYVHIPPLRTGRLRTNAHASEVDSPPSTRIERGETCVRITYCPTLQDQSSISGSGIMADFLVQYDVVMEDIIGDVQIYDDYFIHYFAPRGLPPMEKNVVFVIDVSSSMFGTKMEQTKTAMNVILSDLQANDYFNIISFSDTVNVWKAGGSIQATIQNVHSAKDYLHCMEADGWTDVNSALLAAASVLNHSNQEPGRGPSVGRIPLIIFLTDGEPTAGVTTPSVILSNVRQALGHRVSLFSLAFGDDADFTLLRRLSLENRGIARRIYEDTDAALQLKGLYEEISMPLLADVRLNYLGGLVGASPWAVFPNYFGGSELVVAGQVQPGKQELGIHLAARGPKDQLLVAHHSEGATNNSQKAFGCPGEPAPNVAHFIRRLWAYVTIGELLDAHFQARDTTTRHLLAAKVLNLSLEYNFVTPLTSLVMVQPKQASEETRRQTSTSAGPDTIMPSSSSRHGLGVSTAQPALVPKVISPKSRPVKPKFYLSSTTTASTKKMLSSKELEPLGESPHTLSMPTYPKAKIPAQQDSGTLAQPTLRTKPTILVPSNSGTLLPLKPGSLSHQNPDILPTNSRTQVPPVKPGIPASPKADTVKCVTPLHSKPGAPSHPQLGALTSQAPKGLPQSRPGVSTLQVPKYPLHTRPRVPAPKTRNNMPHLGPGILLSKTPKILLSLKPSAPPHQISTSISLSKPETPNPHMPQTPLPPRPDRPRPPLPESLSTFPNTISSSTGPSSTTTTSVLGEPLPMPFTPTLPPGRFWHQYDLLPGPQRTRQVLGPSRPGVPTMSLLNSSRPTPEGSPPNLPILLPSSILPEAISLLLLPEELELLSESMVESKFVESLNPPAFYTFLTPDEDGSPNWDGNSEEILGGAGGSMESQGSSVGLAKGTLPSIFTFSSSVDGDPHFVIQIPHSEEKICFTLNGHPGDLLQLIEDPKAGLHVSGKLLGAPPRPGHKDQTRTYFQIITVTTDKPRAYTITISRSSISLRGEGTLRLSWDQPALLKRPQLELYVAAAARLTLRLGPYLEFLVLRHRYRHPSTLQLPHLGFYVANGSGLSPSARGLIGQFQHADIRLVTGPMGPCLRRHHGPDVPVILGKRLLKDSPRLLPRWASCWLVKRSHVELLLGHPYLSYVL

SEQ ID NO: 32103 - protein, 360 aa, Homo sapiens [sequence omitted]

SEQ ID NO: 32104 - protein, 316 aa, Homo sapiens
MAAAAAAGAGPEMVRGQVFDVGPRYTNLSYIGEGAYGMVCSAYDNVNKVRVAIKKISPFEHQTYCQRTLREIKILLRFRHENIIGINDIIRAPTIEQMKDVYIVQDLMETDLYKLLKTQHLSNDHICYFLYQILRGLKYIHSANVLHRDLKPSNLLLNTTCDLKICDFGLARVADPDHDHTGFLTEYVATRWYRAPEIMLNSKGYTKSIDIWSVGCILAEMLSNRPIFPGKHYLDQLNHILALDLLDKMLTFNPHKRIEVEQALAHPYLEQYYDPSDEPIAEAPFKFDMELDDLPKEKLKELIFEETARFQPGYRS

SEQ ID NO: 32105 - protein, 521 aa, Homo sapiens
MADNEKLDNQRLKNFKNKGRDLETMRRQRNEVVVELRKNKRDEHLLKRRNVPHEDICEDSDIDGDYRVQNTSLEAIVQNASSDNQGIQLSAVQAARKLLSSDRNPPIDDLIKSGILPILVHCLERDDNPSLQFEAAWALTNIASGTSEQTQAVVQSNAVPLFLRLLHSPHQNVCEQAVWALGNIIGDGPQCRDYVISLGVVKPLLSFISPSIPITFLRNVTWVMVNLCRHKDPPPPMETIQEILPALCVLIHHTDVNILVDTVWALSYLTDAGNEQIQMVIDSGIVPHLVPLLSHQEVKVQTAALRAVGNIVTGTDEQTQVVLNCDALSHFPALLTHPKEKINKEAVWFLSNITAGNQQQVQAVIDANLVPMIIHLLDKGDFGTQKEAAWAISNLTISGRKDQVAYLIQQNVIPPFCNLLTVKDAQVVQVVLDGLSNILKMAEDEAETIGNLIEECGGLEKIEQLQNHENEDIYKLAYEIIDQFFSSDDIDEDPSLVPEAIQGGTFGFNSSANVPTEGFQF

SEQ ID NO: 32106 - protein, 175 aa, Homo sapiens
MSYNCCSGNFSSRSCGDYLRYPASSRGFSYPSNLVYSTDLCSPSTCQLGSSLYRGCQEICWEPTSCQTSYVESSPCQTSCYRPRTSLLCSPCKTTYSGSLGFGSSSCRSLGYGSRSCYSVGCGSSGVRSLGYGSCGFPSLGYGSGFCRPTYLASRSCQSPCYRPAYGSTFCRSTC

SEQ ID NO: 32107 - protein, 505 aa, Homo sapiens
MEGGPAVCCQDPRAELVERVAAIDVTHLEEADGGPEPTRNGVDPPPRARAASVIPGSTSRLLPARPSLSARKLSLQERPAGSYLEAQAGPYATGPASHISPRAWRRPTIESHHVAISDAEDCVQLNQYKLQSEIGKGAYGVVRLAYNESEDRHYAMKVLSKKKLLKQYGFPRRPPPRGSQAAQGGPAKQLLPLERVYQEIAILKKLDHVNVVKLIEVLDDPAEDNLYLVFDLLRKGPVMEVPCDKPFSEEQARLYLRDVILGLEYLHCQKIVHRDIKPSNLLLGDDGHVKIADFGVSNQFEGNDAQLSSTAGTPAFMAPEAISDSGQSFSGKALDVWATGVTLYCFVYGKCPFIDDFILALHRKIKNEPVVFPEEPEISEELKDLILKMLDKNPETRIGVPDIKLHPWVTKNGEEPLPSEEEHCSVVEVTEEEVKNSVRLIPSWTTVILVKSMLRKRSFGNPFEPQARREERSMSAPGNLLVKEGFGEGGKSPELPGVQEDEAAS

SEQ ID NO: 32108 - protein, 520 aa, Homo sapiens
MEGGPAVCCQDPRAELVERVAAIDVTHLEEADGGPEPTRNGVDPPPRARAASVIPGSTSRLLPARPSLSARKLSLQERPAGSYLEAQAGPYATGPASHISPRAWRRPTIESHHVAISDAEDCVQLNQYKLQSEIGKGAYGVVRLAYNESEDRHYAMKVLSKKKLLKQYGFPRRPPPRGSQAAQGGPAKQLLPLERVYQEIAILKKLDHVNVVKLIEVLDDPAEDNLYLALQNQAQNIQLDSTNIAKPHSLLPSEQQDSGSTWAARSVFDLLRKGPVMEVPCDKPFSEEQARLYLRDVILGLEYLHCQKIVHRDIKPSNLLLGDDGHVKIADFGVSNQFEGNDAQLSSTAGTPAFMAPEAISDSGQSFSGKALDVWATGVTLYCFVYGKCPFIDDFILALHRKIKNEPVVFPEEPEISEELKDLILKMLDKNPETRIGVPDIKLHPWVTKNGEEPLPSEEEHCSVVEVTEEEVKNSVRLIPSWTTVILVKSMLRKRSFGNPFEPQARREERSMSAPGNLLV

SEQ ID NO: 32109 - protein, 298 aa, Homo sapiens
MAASTMSVCSSAYSDSWQVDDCPESCCEPPCSAPSCCAPAPSLSLVCTPVSCVSSPCCQAACEPSACQSGCTSSCTPSCCQQSSCQPACCTSSPCQQACCVPVCCKTVCCKPVCCVPVCCGAASSCCRQSSCQPACCASSSCQPACCVPVCCKPVCCVSTCSEDSSSCCQQSSCQPACCTSSSYQQACCVPVCCKTVYCKPICCVPVCSRASSSRCQQPSCQPACCTTSCCRPSSSVSLLCHPVCRSTCCVPVSSCCAPTSSCQSSCCRPASCVSLLCRPASSRLACYSLCSGKKSSC

SEQ ID NO: 32110 - protein, 48 aa, Homo sapiens
MSFDNNYHGGQGYAKGGLGCSYGCGLSGYGYACYCPWCYERSWFSGCF

SEQ ID NO: 32111 - protein, 45 aa, Homo sapiens
MCYYHNYYGSLDYGCSYGSEYGNSGYACNFPCSYGRFLLAPRKKF

SEQ ID NO: 32112 - protein, 1858 aa, Homo sapiens
MSIVIPLGVDTAETSYLEMAAGSEPESVEASPVVVEKSNSYPHQLYTSSSHHSHSYIGLPYADHNYGARPPPTPPASPPPSVLISKNEVGIFTTPNFDETSSATTISTSEDGSYGTDVTRCICGFTHDDGYMICCDKCSVWQHIDCMGIDRQHIPDTYLCERCQPRNLDKERAVLLQRRKRENMSDGDTSATESGDEVPVELYTAFQHTPTSITLTASRVSKVNDKRRKKSGEKEQHISKCKKAFREGSRKSSRVKGSAPEIDPSSDGSNFGWETKIKAWMDRYEEANNNQYSEGVQREAQRIALRLGNGNDKKEMNKSDLNTNNLLFKPPVESHIQKNKKILKSAKDLPPDALIIEYRGKFMLREQFEANGYFFKRPYPFVLFYSKFHGLEMCVDARTFGNEARFIRRSCTPNAEVRHEIQDGTIHLYIYSIHSIPKGTEITIAFDFDYGNCKYKVDCACLKENPECPVLKRSSESMENINSGYETRRKKGKKDKDISKEKDTQNQNITLDCEGTTNKMKSPETKQRKLSPLRLSVSNNQEPDFIDDIEEKTPISNEVEMESEEQIAERKRKMTREERKMEAILQAFARLEKREKRREQALERISTAKTEVKTECKDTQIVSDAEVIQEQAKEENASKPTPAKVNRTKQRKSFSRSRTHIGQQRRRHRTVSMCSDIQPSSPDIEVTSQQNDIENTVLTIEPETETALAEIITETEVPALNKCPTKYPKTKKHLVNEWLSEKNEKTGKPSDGLSERPLRITTDPEVLATQLNSLPGLTYSPHVYSTPKHYIRFTSPFLSEKRRRKEPTENISGSCKKRWLKQALEEENSAILHRFNSPCQERSRSPAVNGENKSPLLLNDSCSLPDLTTPLKKRRFYQLLDSVYSETSTPTPSPYATPTHTDITPMDPSFATPPRIKSDDETCRNGYKPIYSPVTPVTPGTPGNTMHFENISSPESSPEIKRRTYSQEGYDRSSTMLTLGPFRNSNLTELGLQEIKTIGYTSPRSRTEVNRQCPGEKEPVSDLQLGLDAVEPTALHKTLETPAHDRAEPNSQLDSTHSGRGTMYSSWVKSPDRTGVNFSVNSNLRDLTPSHQLEVGGGFRISESKCLMQDDTRGMFMETTVFCTSEDGLVSGFGRTVNDNLIDGNCTPQNPPQKKKVSLLEYRKRQREARKSGSKTENFPLISVSPHASGSLSNNGDGCASSNDNGEQVDHTASLPLPTPATVYNATSEETSNNCPVKDATASEKNEPEVQWTASTSVEQVRERSYQRALLLSDHRKDKDSGGESPCVSCSPSHVQSSPSSHSNHIPQLQAKGPVPSFSELMEDPDPENPEPTTTNECPSPDTSQNTCKSPPKMSKPGSPGSVIPAQAHGKIFTKPDPQWDSTVSASEAENGVHLKTELQQKQLSNNNQALSKNHPPQTHVRNSSEQLSQKLPSVPTKLHCPPSPHLENPPKSSTPHTPVQHGYLSPKPPSQQLGSPYRPHHSQSPQVGTPQREPQRNFYPAAQNLPANTQQATSGTLFTQTPSGQSSATYSQFNQQSLNSTAPPPPPPPPPSSSYYQNQQPSANFQNYNQLKGSLSQQTVFTSGPNQALPGTTSQQTVPGHHVTPGHFLPSQNPTIHHQTAAAVVPPPPPPPPAPGPHLVQQPNSHQQHSVAHVVGPVHAVTPGSHIHSQTAGHHLPPPPPPPGPAPHHHPPPHPSTGLQGLQAQHQHVVNSAPPPPPPPPPSSVLASGHHTTSAQALHHPPHQGPPLFPSSAHPTVPPYPSQATHHTTLGPGPQHQPSGTGPHCPLPVTGPHLQPQGPNSIPTPTASGFCPHPGSVALPHGVQGPQQASPVPGQIPIHRAQVPPTFQNNYHGSGWH

SEQ ID NO: 32113 - protein, 1778 aa, Homo sapiens
MSIVIPLGVDTAETSYLEMAAGSEPESVEASPVVVEKSNSYPHQLYTSSSHHSHSYIGLPYADHNYGARPPPTPPASPPPSVLISKNEVGIFTTPNFDETSSATTISTSEDGSYGTDVTRCICGFTHDDGYMICCDKCSVWQHIDCMGIDRQHIPDTYLCERCQPRNLDKERAVLLQRRKRENMSDGDTSATESGDEVPVELYTAFQHTPTSITLTASRVSKVNDKRRKKSGEKEQHISKCKKAFREGSRKSSRVKGSAPEIDPSSDGSNFGWETKIKAWMDRYEEANNNQYSEGVQREAQRIALRLGNGNDKKEMNKSDLNTNNLLFKPPVESHIQKNKKILKSAKDLPPDALIIEYRGKFMLREQFEANGYFFKRPYPFVLFYSKFHGLEMCVDARTFGNEARFIRRSCTPNAEVRHEIQDGTIHLYIYSIHSIPKGTEITIAFDFDYGNCKYKVDCACLKENPECPVLKRSSESMENINSGYETRRKKGKMTREERKMEAILQAFARLEKREKRREQALERISTAKTEVKTECKDTQIVSDAEVIQEQAKEENASKPTPAKVNRTKQRKSFSRSRTHIGQQRRRHRTVSMCSDIQPSSPDIEVTSQQNDIENTVLTIEPETETALAEIITETEVPALNKCPTKYPKTKKHLVNEWLSEKNEKTGKPSDGLSERPLRITTDPEVLATQLNSLPGLTYSPHVYSTPKHYIRFTSPFLSEKRRRKEPTENISGSCKKRWLKQALEEENSAILHRFNSPCQERSRSPAVNGENKSPLLLNDSCSLPDLTTPLKKRRFYQLLDSVYSETSTPTPSPYATPTHTDITPMDPSFATPPRIKSDDETCRNGYKPIYSPVTPVTPGTPGNTMHFENISSPESSPEIKRRTYSQEGYDRSSTMLTLGPFRNSNLTELGLQEIKTIGYTSPRSRTEVNRQCPGEKEPVSDLQLGLDAVEPTALHKTLETPAHDRAEPNSQLDSTHSGRGTMYSSWVKSPDRTGVNFSVNSNLRDLTPSHQLEVGGGFRISESKCLMQDDTRGMFMETTVFCTSEDGLVSGFGRTVNDNLIDGNCTPQNPPQKKKVSLLEYRKRQREARKSGSKTENFPLISVSPHASGSLSNNGDGCASSNDNGEQVDHTASLPLPTPATVYNATSEETSNNCPVKDATASEKNEPEVQWTASTSVEQVRERSYQRALLLSDHRKDKDSGGESPCVSCSPSHVQSSPSSHSNHIPQLQAKGPVPSFSELMEDPDPENPEPTTTNECPSPDTSQNTCKSPPKMSKPGSPGSVIPAQAHGKIFTKPDPQWDSTVSASEAENGVHLKTELQQKQLSNNNQALSKNHPPQTHVRNSSEQLSQKLPSVPTKLHCPPSPHLENPPKSSTPHTPVQHGYLSPKPPSQQLGSPYRPHHSQSPQVGTPQREPQRNFYPAAQNLPANTQQATSGTLFTQTPSGQSSATYSQFNQQSLNSTAPPPPPPPPPSSSYYQNQQPSANFQNYNQLKGSLSQQTVFTSGPNQALPGTTSQQTVPGHHVTPGHFLPSQNPTIHHQTAAAVVPPPPPPPPAPGPHLVQQPNSHQQHSVAHVVGPVHAVTPGSHIHSQTAGHHLPPPPPPPGPAPHHHPPPHPSTGLQGLQAQHQHVVNSAPPPPPPPPPSSVLASGHHTTSAQALHHPPHQGPPLFPSSAHPTVPPYPSQATHHTTLGPGPQHQPSGTGPHCPLPVTGPHLQPQGPNSIPTPTASGFCPHPGSVALPHGVQGPQQASPVPGQIPIHRAQVPPTFQNNYHGSGWH

SEQ ID NO: 32114 - protein, 609 aa, Homo sapiens
MSIVIPLGVDTAETSYLEMAAGSEPESVEASPVVVEKSNSYPHQLYTSSSHHSHSYIGLPYADHNYGARPPPTPPASPPPSVLISKNEVGIFTTPNFDETSSATTISTSEDGSYGTDVTRCICGFTHDDGYMICCDKCSVWQHIDCMGIDRQHIPDTYLCERCQPRNLDKERAVLLQRRKRENMSDGDTSATESGDEVPVELYTAFQHTPTSITLTASRVSKVNDKRRKKSGEKEQHISKCKKAFREGSRKSSRVKGSAPEIDPSSDGSNFGWETKIKAWMDRYEEANNNQYSEGVQREAQRIALRLGNGNDKKEMNKSDLNTNNLLFKPPVESHIQKNKKILKSAKDLPPDALIIEYRGKFMLREQFEANGYFFKRPYPFVLFYSKFHGLEMCVDARTFGNEARFIRRSCTPNAEVRHEIQDGTIHLYIYSIHSIPKGTEITIAFDFDYGNCKYKVDCACLKENPECPVLKRSSESMENINSGYETRRKKGKKDKDISKEKDTQNQNITLDCEGTTNKMKSPETKQRKLSPLRLSVSNNQEPDFIDDIEEKTPISNEVEMESEEQIAERKRKMVSWEASSLGLVTAALHMVIVAAFTWAFTLFFEVSE

SEQ ID NO: 32115 - protein, 865 aa, Homo sapiens
MSIVIPLGVDTAETSYLEMAAGSEPESVEASPVVVEKSNSYPHQLYTSSSHHSHSYIGLPYADHNYGARPPPTPPASPPPSVLISKNEVGIFTTPNFDETSSATTISTSEDGSYGTDVTRCICGFTHDDGYMICCDKCSVWQHIDCMGIDRQHIPDTYLCERCQPRNLDKERAVLLQRRKRENMSDGDTSATESGDEVPVELYTAFQHTPTSITLTASRVSKVNDKRRKKSGEKEQHISKCKKAFREGSRKSSRVKGSAPEIDPSSDGSNFGWETKIKAWMDRYEEANNNQYSEGVQREAQRIALRLGNGNDKKEMNKSDLNTNNLLFKPPVESHIQKNKKILKSAKDLPPDALIIEYRGKFMLREQFEANGYFFKRPYPFVLFYSKFHGLEMCVDARTFGNEARFIRRSCTPNAEVRHEIQDGTIHLYIYSIHSIPKGTEITIAFDFDYGNCKYKVDCACLKENPECPVLKRSSESMENINSGYETRRKKGKKDKDISKEKDTQNQNITLDCEGTTNKMKSPETKQRKLSPLRLSVSNNQEPDFIDDIEEKTPISNEVEMESEEQIAERKRKMTREERKMEAILQAFARLEKREKRREQALERISTAKTEVKTECKDTQIVSDAEVIQEQAKEENASKPTPAKVNRTKQRKSFSRSRTHIGQQRRRHRTVSMCSDIQPSSPDIEVTSQQNDIENTVLTIEPETETALAEIITETEVPALNKCPTKYPKTKKHLVNEWLSEKNEKTGKPSDGLSERPLRITTDPEVLATQLNSLPGLTYSPHVYSTPKHYIRFTSPFLSEKRRRKEPTENISGSCKKRWLKQALEEENSAILHRFNSPCQERSRSPAVNEYFFPRKFSRNKETHL

SEQ ID NO: 32116 - protein, 1653 aa, Homo sapiens
MSIVIPLGVDTAETSYLEMAAGSEPESVEASPVVVEKSNSYPHQLYTSSSHHSHSYIGLPYADHNYGARPPPTPPASPPPSVLISKNEVGIFTTPNFDETSSATTISTSEDGSYGTDVTRCICGFTHDDGYMICCDKCSVWQHIDCMGIDRQHIPDTYLCERCQPRNLDKERAVLLQRRKRENMSDGDTSATESGDEVPVELYTAFQHTPTSITLTASRVSKVNDKRRKKSGEKEQHISKCKKAFREGSRKSSRVKGSAPEIDPSSDGSNFGWETKIKAWMDRYEEANNNQYSEGVQREAQRIALRLGNGNDKKEMNKSDLNTNNLLFKPPVESHIQKNKKILKSAKDLPPDALIIEYRGKFMLREQFEANGYFFKRPYPFVLFYSKFHGLEMCVDARTFGNEARFIRRSCTPNAEVRHEIQDGTIHLYIYSIHSIPKGTEITIAFDFDYGNCKYKVDCACLKENPECPVLKRSSESMENINSGYETRRKKGKKDKDISKEKDTQNQNITLDCEGTTNKMKSPETKQRKLSPLRLSVSNNQEPDFIDDIEEKTPISNEVEMESEEQIAERKRKMTREERKMEAILQAFARLEKREKRREQALERISTAKTEVKTECKDTQIVSDAEVIQEQAKEENASKPTPAKVNRTKQRKSFSRSRTHIGQQRRRHRTVSMCSDIQPSSPDIEVTSQQNDIENTVLTIEPETETALAEIITETEVPALNKCPTKYPKTKKHLVNEWLSEKNEKTGKPSDGLSERPLRITTDPEVLATQLNSLPGLTYSPHVYSTPKHYIRFTSPFLSEKRRRKEPTENISGSCKKRWLKQALEEENSAILHRFNSPCQERSRSPAVNGENKSPLLLNDSCSLPDLTTPLKKRRFYQLLDSVYSETSTPTPSPYATPTHTDITPMDPSFATPPRIKSDDETCRNGYKPIYSPVTPVTPGTPGNTMHFENISSPESSPEIKRRTYSQEGYDRSSTMLTLGPFRNSNLTELGLQEIKTIGYTSPRSRTEVNRQCPGEKEPVSDLQLGLDAVEPTALHKTLETPAHDRAEPNSQLDSTHSGRGTMYSSWVKSPDRTGVNFSVNSNLRDLTPSHQLEVGGGFRISESKCLMQDDTRGMFMETTVFCTSEDGLVSGFGRTVNDNLIDGNCTPQNPPQKKKVSLLEYRKRQREARKSGSKTENFPLISVSPHASGSLSNNGDGCASSNDNGEQVDHTASLPLPTPATVYNATSEETSNNCPVKDATASEKNEPEVQWTASTSVEQVRERSYQRALLLSDHRKDKDSGGESPCVSCSPSHVQSSPSSHSNHIPQLQAKGPVPSFSELMEDPDPENPEPTTTNECPSPDTSQNTCKSPPKMSKPGSPGSVIPAQAHGKIFTKPDPQWDSTVSASEAENGVHLKTELQQKQLSNNNQALSKNHPPQTHVRNSSEQLSQKLPSVPTKLHCPPSPHLENPPKSSTPHTPVQHGYLSPKPPSQQLGSPYRPHHSQSPQVGTPQREPQRNFYPAAQNLPVFWLLGIIPHQLKPYTTHLIKDLHFFLRVLIQLYHRIPHKLHIIPLWDRDPSTSLLEQGHIVHYLSQVLISSPKDQTVFQHLLLQGSVLILALWPCHMGFKDLSRHLQCLDRFQFTEHRCHQHFKTITMGQGGIKMDSKNIFLNVL

SEQ ID NO: 32117 - protein, 1621 aa, Homo sapiens
MSIVIPLGVDTAETSYLEMAAGSEPESVEASPVVVEKSNSYPHQLYTSSSHHSHSYIGLPYADHNYGARPPPTPPASPPPSVLISKNEVGIFTTPNFDETSSATTISTSEDGSYGTDVTRCICGFTHDDGYMICCDKCSVWQHIDCMGIDRQHIPDTYLCERCQPRNLDKERAVLLQRRKRENMSDGDTSATESGDEVPVELYTAFQHTPTSITLTASRVSKVNDKRRKKSGEKEQHISKCKKAFREGSRKSSRVKGSAPEIDPSSDGSNFGWETKIKAWMDRYEEANNNQYSEGVQREAQRIALRLGNGNDKKEMNKSDLNTNNLLFKPPVESHIQKNKKILKSAKDLPPDALIIEYRGKFMLREQFEANGYFFKRPYPFVLFYSKFHGLEMCVDARTFGNEARFIRRSCTPNAEVRHEIQDGTIHLYIYSIHSIPKGTEITIAFDFDYGNCKYKVDCACLKENPECPVLKRSSESMENINSGYETRRKKGKKDKDISKEKDTQNQNITLDCEGTTNKMKSPETKQRKLSPLRLSVSNNQEPDFIDDIEEKTPISNEVEMESEEQIAERKRKMTREERKMEAILQAFARLEKREKRREQALERISTAKTEVKTECKDTQIVSDAEVIQEQAKEENASKPTPAKVNRTKQRKSFSRSRTHIGQQRRRHRTVSMCSDIQPSSPDIEVTSQQNDIENTVLTIEPETETALAEIITETEVPALNKCPTKYPKTKKHLVNEWLSEKNEKTGKPSDGLSERPLRITTDPEVLATQLNSLPGLTYSPHVYSTPKHYIRFTSPFLSEKRRRKEPTENISGSCKKRWLKQALEEENSAILHRFNSPCQERSRSPAVNGENKSPLLLNDSCSLPDLTTPLKKRRFYQLLDSVYSETSTPTPSPYATPTHTDITPMDPSFATPPRIKSDDETCRNGYKPIYSPVTPVTPGTPGNTMHFENISSPESSPEIKRRTYSQEGYDRSSTMLTLGPFRNSNLTELGLQEIKTIGYTSPRSRTEVNRQCPGEKEPVSDLQLGLDAVEPTALHKTLETPAHDRAEPNSQLDSTHSGRGTMYSSWVKSPDRTGVNFSVNSNLRDLTPSHQLEVGGGFRISESKCLMQDDTRGMFMETTVFCTSEDGLVSGFGRTVNDNLIDGNCTPQNPPQKKKVSLLEYRKRQREARKSGSKTENFPLISVSPHASGSLSNNGDGCASSNDNGEQVDHTASLPLPTPATVYNATSEETSNNCPVKDATASEKNEPEVQWTASTSVEQVRERSYQRALLLSDHRKDKDSGGESPCVSCSPSHVQSSPSSHSNHIPQLQAKGPVPSFSELMEDPDPENPEPTTTNECPSPDTSQNTCKSPPKMSKPGSPGSVIPAQAHGKIFTKPDPQWDSTVSASEAENGVHLKTELQQKQLSNNNQALSKNHPPQTHVRNSSEQLSQKLPSVPTKLHCPSSPSTTPSIHRTPRSTSTTPACCKFSTPTTPSAATFQCFGFWASYHISSSLTPPTSSRTSTFSFECSSNCTTVSLTSYTSYHFGTGTPAPAFWNRATLSITCHRSSSPAPRTKQYSNTYCFRVLSSSWLCGPATWGSRTSAGISSAWTDSNSQSTGATNISKQLPWVRVALKWTPKTFF

SEQ ID NO: 32118 - protein, 1816 aa, Homo sapiens
MSIVIPLGVDTAETSYLEMAAGSEPESVEASPVVVEKSNSYPHQLYTSSSHHSHSYIGLPYADHNYGARPPPTPPASPPPSVLISKNEVGIFTTPNFDETSSATTISTSEDGSYGTDVTRCICGFTHDDGYMICCDKCSVWQHIDCMGIDRQHIPDTYLCERCQPRNLDKERAVLLQRRKRENMSDGDTSATESGDEVPVELYTAFQHTPTSITLTASRVSKVNDKRRKKSGEKEQHISKCKKAFREGSRKSSRVKGSAPEIDPSSDGSNFGWETKIKAWMDRYEEANNNQYSEGVQREAQRIALRLGNGNDKKEMNKSDLNTNNLLFKPPVESHIQKNKKILKSAKDLPPDALIIEYRGKFMLREQFEANGYFFKRPYPFVLFYSKFHGLEMCVDARTFGNEARFIRRSCTPNAEVRHEIQDGTIHLYIYSIHSIPKGTEITIAFDFDYGNCKYKVDCACLKENPECPVLKRSSESMENINSGYETRRKKGKKDKDISKEKDTQNQNITLDCEGTTNKMKSPETKQRKLSPLRLSVSNNQEPDFIDDIEEKTPISNEVEMESEEQIAERKRKMTREERKMEAILQAFARLEKREKRREQALERISTAKTEVKTECKDTQIVSDAEVIQEQAKEENASKPTPAKVNRTKQRKSFSRSRTHIGQQRRRHRTVSMCSDIQPSSPDIEVTSQQNDIENTVLTIEPETETALAEIITETEVPALNKCPTKYPKTKKHLVNEWLSEKNEKTGKPSDGLSERPLRITTDPEVLATQLNSLPGLTYSPHVYSTPKHYIRFTSPFLSEKRRRKEPTENISGSCKKRWLKQALEEENSAILHRFNSPCQERSRSPAVNGENKSPLLLNDSCSLPDLTTPLKKRRFYQLLDSVYSETSTPTPSPYATPTHTDITPMDPSFATPPRIKSDDETCRNGYKPIYSPVTPVTPGTPGNTMHFENISSPESSPEIKRRTYSQEGYDRSSTMLTLGPFRNSNLTELGLQEIKTIGYTSPRSRTEVNRQCPGEKEPVSDLQLGLDAVEPTALHKTLETPAHDRAEPNSQLDSTHSGRGTMYSSWVKSPDRTGVNFSVNSNLRDLTPSHQLEVGGGFRISESKCLMQDDTRGMFMETTVFCTSEDGLVSGFGRTVNDNLIDGNCTPQNPPQKKKVSLLEYRKRQREARKSGSKTENFPLISVSPHASGSLSNNGDGCASSNDNGEQVDHTASLPLPTPATVYNATSEETSNNCPVKDATASEKNEPEVQWTASTSVEQVRERSYQRALLLSDHRKDKDSDPDPENPEPTTTNECPSPDTSQNTCKSPPKMSKPGSPGSVIPAQAHGKIFTKPDPQWDSTVSASEAENGVHLKTELQQKQLSNNNQALSKNHPPQTHVRNSSEQLSQKLPSVPTKLHCPPSPHLENPPKSSTPHTPVQHGYLSPKPPSQQLGSPYRPHHSQSPQVGTPQREPQRNFYPAAQNLPANTQQATSGTLFTQTPSGQSSATYSQFNQQSLNSTAPPPPPPPPPSSSYYQNQQPSANFQNYNQLKGSLSQQTVFTSGPNQALPGTTSQQTVPGHHVTPGHFLPSQNPTIHHQTAAAVVPPPPPPPPAPGPHLVQQPNSHQQHSVAHVVGPVHAVTPGSHIHSQTAGHHLPPPPPPPGPAPHHHPPPHPSTGLQGLQAQHQHVVNSAPPPPPPPPPSSVLASGHHTTSAQALHHPPHQGPPLFPSSAHPTVPPYPSQATHHTTLGPGPQHQPSGTGPHCPLPVTGPHLQPQGPNSIPTPTASGFCPHPGSVALPHGVQGPQQASPVPGQIPIHRAQVPPTFQNNYHGSGWH

SEQ ID NO: 32119 - protein, 1168 aa, Homo sapiens
MSIVIPLGVDTAETSYLEMAAGSEPESVEASPVVVEKSNSYPHQLYTSSSHHSHSYIGLPYADHNYGARPPPTPPASPPPSVLISKNEVGIFTTPNFDETSSATTISTSEDGSYGTDVTRCICGFTHDDGYMICCDKCSVWQHIDCMGIDRQHIPDTYLCERCQPRNLDKERAVLLQRRKRENMSDGDTSATESGDEVPVELYTAFQHTPTSITLTASRVSKVNDKRRKKSGEKEQHISKCKKAFREGSRKSSRVKGSAPEIDPSSDGSNFGWETKIKAWMDRYEEANNNQYSEGVQREAQRIALRLGNGNDKKEMNKSDLNTNNLLFKPPVESHIQKNKKILKSAKDLPPDALIIEYRGKFMLREQFEANGYFFKRPYPFVLFYSKFHGLEMCVDARTFGNEARFIRRSCTPNAEVRHEIQDGTIHLYIYSIHSIPKGTEITIAFDFDYGNCKYKVDCACLKENPECPVLKRSSESMENINSGYETRRKKGKKDKDISKEKDTQNQNITLDCEGTTNKMKSPETKQRKLSPLRLSVSNNQEPDFIDDIEEKTPISNEVEMESEEQIAERKRKMTREERKMEAILQAFARLEKREKRREQALERISTAKTEVKTECKDTQIVSDAEVIQEQAKEENASKPTPAKVNRTKQRKSFSRSRTHIGQQRRRHRTVSMCSDIQPSSPDIEVTSQQNDIENTVLTIEPETETALAEIITETEVPALNKCPTKYPKTKKHLVNEWLSEKNEKTGKPSDGLSERPLRITTDPEVLATQLNSLPGLTYSPHVYSTPKHYIRFTSPFLSEKRRRKEPTENISGSCKKRWLKQALEEENSAILHRFNSPCQERSRSPAVNGENKSPLLLNDSCSLPDLTTPLKKRRFYQLLDSVYSETSTPTPSPYATPTHTDITPMDPSFATPPRIKSDDETCRNGYKPIYSPVTPVTPGTPGNTMHFENISSPESSPEIKRRTYSQEGYDRSSTMLTLGPFRNSNLTELGLQEIKTIGYTSPRSRTEVNRQCPGEKEPVSDLQLGLDAVEPTALHKTLETPAHDRAEPNSQLDSTHSGRGTMYSSWVKSPDRTGVNFSVNSNLRDLTPSHQLEVGGGFRISESKCLMQDDTRGMFMETTVFCTSEDGLVSGFGRTVNDNLIDGNCTPQNPPQKKKSPVGNFVGSNVV

SEQ ID NO: 32120 - protein, 885 aa, Homo sapiens
MKWLGESKNMVVNGRRNGGKLSNDHQQNQSKLQHTGKDTLKAGKNAVERRSNRCNGNSGFEGQSRYVPSSGMSAKELCENDDLATSLVLDPYLGFQTHKMNTSAFPSRSSRHFSKSDSFSHNNPVRFRPIKGRQEELKEVIERFKKDEHLEKAFKCLTSGEWARHYFLNKNKMQEKLFKEHVFIYLRMFATDSGFEILPCNRYSSEQNGAKIVATKEWKRNDKIELLVGCIAELSEIEENMLLRHGENDFSVMYSTRKNCAQLWLGPAAFINHDCRPNCKFVSTGRDTACVKALRDIEPGEEISCYYGDGFFGENNEFCECYTCERRGTGAFKSRVGLPAPAPVINSKYGLRETDKRLNRLKKLGDSSKNSDSQSVSSNTDADTTQEKNNATSNRKSSVGVKKNSKSRTLTRQSMSRIPASSNSTSSKLTHINNSRVPKKLKKPAKPLLSKIKLRNHCKRLEQKNASRKLEMGNLVLKEPKVVLYKNLPIKKDKEPEGPAQAAVASGCLTRHAAREHRQNPVRGAHSQGESSPCTYITRRSVRTRTNLKEASDIKLEPNTLNGYKSSVTEPCPDSGEQLQPAPVLQEEELAHETAQKGEAKCHKSDTGMSKKKSRQGKLVKQFAKIEESTPVHDSPGKDDAVPDLMGPHSDQGEHSGTVGVPVSYTDCAPSPVGCSVVTSDSFKTKDSFRTAKSKKKRRITRYDAQLILENNSGIPKLTLRRRHDSSSKTNDQENDGMNSSKISIKLSKDHDNDNNLYVAKLNNGFNSGSGSSSTKLKIQLKRDEENRGSYTEGLHENGVCCSDPLSLLESRMEVDDYSQYEEESTDDSSSSEGDEEEDDYDDDFEDDFIPLPPAKRLRLIVGKDSIDIDISSRRREDQSLRLNA

SEQ ID NO: 32121 - protein, 393 aa, Homo sapiens
MKWLGESKNMVVNGRRNGGKLSNDHQQNQSKLQHTGKDTLKAGKNAVERRSNRCNGNSGFEGQSRYVPSSGMSAKELCENDDLATSLVLDPYLGFQTHKMNTSAFPSRSSRHFSKSDSFSHNNPVRFRPIKGRQEELKEVIERFKKDEHLEKAFKCLTSGEWARHYFLNKNKMQEKLFKEHVFIYLRMFATDSGFEILPCNRYSSEQNGAKIVATKEWKRNDKIELLVGCIAELSEIEENMLLRHGENDFSVMYSTRKNCAQLWLGPAAFINHDCRPNCKFVSTGRDTACVKALRDIEPGEEISCYYGDGFFGENNEFCECYTCERRGTGAFKSRVGLPAPAPVINSKYGLRETDKRLNRLKKLGDSSKNSDSQSVSSNTDADTTQEKNNASK

SEQ ID NO: 32122 - protein, 278 aa, Homo sapiens
MKWLGESKNMVVNGRRNGGKLSNDHQQNQSKLQHTGKDTLKAGKNAVERRSNRCNGNSGFEGQSRYVPSSGMSAKELCENDDLATSLVLDPYLGFQTHKMNTSAFPSRSSRHFSKSDSFSHNNPVRFRPIKGRQEELKEVIERFKKDEHLEKAFKCLTSGEWARHYFLNKNKMQEKLFKEHVFIYLRMFATDSGFEILPCNRYSSEQNGAKIVATKEWKRNDKIELLVGCIAELSEIEENMLLRHGENDFSVMYSTRKNCAQLWLGPAAFINHDLINS

SEQ ID NO: 32123 - protein, 65 aa, Homo sapiens
MSYNCCCGNFSSHSCEGYLCYSGYSRGGSSYPSNLVYSTEPLISQHLPAGFLSLQGLSGDLLGNP

SEQ ID NO: 32124 - protein, 254 aa, Homo sapiens
MPAGSMSTTGYPGVCSTTSYRTHCYIPVTSSVTLSSSDLSPTFGHCLPSSYQGNLWLLDYCQESYGEAPTCKSPSCEPKTCSTTGCDPSNSSVPCNSPSAGQVFSVCETTNVSPSPSCSPSTQTNGYVCNCHIPTRNASKACQTLRNGSNCFGQLNCLSKSFQTLNHCRLSTLGYKSYQNPCFIPSYVSPLCYISNSCQPQSYLVRNYHYSSYRPTSCRPLSYLSRSFRSLSYIPSTFPPLRYLCSGSRPLKCY

SEQ ID NO: 32125 - protein, 44 aa, Homo sapiens
MSYYSHLSGGLGCGLAVAVTMGRTVAVAEYGRCRHGCHSSYSAR

SEQ ID NO: 32126 - protein, 473 aa, Homo sapiens
MALKDTGSGGSTILPISEMVSSSSSPGASAAAAPGPCAPSPFPEVVELNVGGQVYVTKHSTLLSVPDSTLASMFSPSSPRGGARRRGELPRDSRARFFIDRDGFLFRYVLDYLRDKQLALPEHFPEKERLLREAEYFQLTDLVKLLSPKVTKQNSLNDEGCQSDLEDNVSQGSSDALLLRGAAAAVPSGPGAHGGGGGGGAQDKRSGFLTLGYRGSYTTVRDNQADAKFRRVARIMVCGRIALAKEVFGDTLNESRDPDRQPEKYTSRFYLKFTYLEQAFDRLSEAGFHMVACNSSGTAAFVNQYRDDKIWSSYTEYIFFRPPQKIVSPKQEHEDRKHDKVTDKGSESGTSCNELSTSSCDSHSEASTPQDNPSSAQQATAHQPNTLTLDRPSKKAPVQWIPPPDKRRNSELFQTLISKSRETNLSKKKVCEKLSVEEEMKKCIQDFKKIHIPDYFPERKRQWQSELLQKYGL

SEQ ID NO: 32127 - protein, 112 aa, Homo sapiens
MCHTSHSSGCPMACPGSPCCVPSTCYPPEGYGTSCCCSAPCVALLCRPLCGVSTCCQPACCVPSPCQVACCVPVSCKPVLCVASFCPTSGCCQPFCPTLVYRPVTWSTPTGC

SEQ ID NO: 32128 - protein, 105 aa, Homo sapiens
MGCCPGDCFTCCTQEQNCCEECCCQPGCCGCCGSCCGCGGSGCGGSGCGGSCCGSSCCGSGCGGCGGCGGCGGGCCGSSCCGSSCCGSGCCGPVCCQPTPICDTK

SEQ ID NO: 32129 - protein, 63 aa, Homo sapiens
MSYSGSYYGGLGYGCGGFGGLGYGYSCGCGSFRRLGYGCGYGGYRYSCCHPSCYGGYWSSGFY

SEQ ID NO: 32130 - protein, 163 aa, Homo sapiens
MSFNCSTRNCSSRPIGGRCIVPVAQVTTTSTTDADCLGGICLPSSFQTGSWLLDHCQETCCEPTACQPTCYRRTSCVSNPCQVTCSRQTTCISNPCSTTYSRPLTFVSSGCQPLGGISSVCQPVGGISTVCQPVGGVSTVCQPACGVSRTYQQSCVSSCRRTC

SEQ ID NO: 32131 - protein, 341 aa, Homo sapiens
MADGCCPGNTTAIPAVPTITTYPVKGGFRHALCLPSSCHSRMWQLVTCQESCQPSIGAPSGCDPASCQPTRLPATSCVGFVCQPMCSHAACYQSGTGQSPCLVSSCQPSCSESTCCQEKCCDASPCQQSSCQESVCMSGSCQAACGQSVCCDAGSCQPSCSEVTSCPETSCLPTICTASPCQPTWCQGSSCQPVSGEGQPCKSTYYQPICYIFKPCQSALYMPVPCQPSTCVFSSCNTTCCVPSHCQPPHCQLVPSTCFIYQPVANCQAPCSTKNCCKPASCDTVISGQPTCDGPPSYNQSGCKSACCVTGLGTSPSSGSNCLPTSCQPSCESSFCKATLC

SEQ ID NO: 32132 - protein, 71 aa, Homo sapiens
MCGSYYGNYYGTPGYGFCGYGGLGYGYGGLGCGYGSCCGCGFRRLGCGYGYGSRSLCGYGYGCGSGSGYYY

SEQ ID NO: 32133 - protein, 350 aa, Homo sapiens
MEVPNVKDFQWKRLAPLPSRRVYCSLLETGGQVYAIGGCDDNGVPMDCFEVYSPEADQWTALPRLPTARAGVAVTALGKRIMVIGGVGTNQLPLKVVEMYNIDEGKWKKRSMLREAAMGISVTAKDYRVYAAGGMGLDLRPHNHLQHYDMLKDMWVSLAPMPTPRYAATSFLRGSKIYVLGGRQSKYAVNAFEVFDIETRSWTKFPNIPYKRAFSSFVTLDNHLYSLGGLRQGRLYRQPKFLRTMDVFDMEQGGWLKMERSFFLKKRRADFVAGSLSGRVIVAGGLGNQPTVLETAEAFHPGKNKWEILPAMPTPRCACSSIVVKNCLLAVGGVNQGLSDAVEALCVSDS

SEQ ID NO: 32134 - protein, 697 aa, Homo sapiens
MAGLGPGVGDSEGGPRPLFCRKGALRQKVVHEVKSHKFTARFFKQPTFCSHCTDFIWGIGKQGLQCQVCSFVVHRRCHEFVTFECPGAGKGPQTDDPRNKHKFRLHSYSSPTFCDHCGSLLYGLVHQGMKCSCCEMNVHRRCVRSVPSLCGVDHTERRGRLQLEIRAPTADEIHVTVGEARNLIPMDPNGLSDPYVKLKLIPDPRNLTKQKTRTVKATLNPVWNETFVFNLKPGDVERRLSVEVWDWDRTSRNDFMGAMSFGVSELLKAPVDGWYKLLNQEEGEYYNVPVADADNCSLLQKFEACNYPLELYERVRMGPSSSPIPSPSPSPTDPKRCFFGASPGRLHISDFSFLMVLGKGSFGKVMLAERRGSDELYAIKILKKDVIVQDDDVDCTLVEKRVLALGGRGPGGRPHFLTQLHSTFQTPDRLYFVMEYVTGGDLMYHIQQLGKFKEPHAAFYAAEIAIGLFFLHNQGIIYRDLKLDNVMLDAEGHIKITDFGMCKENVFPGTTTRTFCGTPDYIAPEIIAYQPYGKSVDWWSFGVLLYEMLAGQPPFDGEDEEELFQAIMEQTVTYPKSLSREAVAICKGFLTKHPGKRLGSGPDGEPTIRAHGFFRWIDWERLERLEIPPPFRPRPCGRSGENFDKFFTRAAPALTPPDRLVLASIDQADFQGFTYVNPDFVHPDARSPTSPVPVPVM

SEQ ID NO: 32135 - protein, 548 aa, Homo sapiens
MPRICDLRVSRRWEGPPDGRCEMNVHRRCVRSVPSLCGVDHTERRGRLQLEIRAPTADEIHVTVGEARNLIPMDPNGLSDPYVKLKLIPDPRNLTKQKTRTVKATLNPVWNETFVFNLKPGDVERRLSVEVWDWDRTSRNDFMGAMSFGVSELLKAPVDGWYKLLNQEEGEYYNVPVADADNCSLLQKFEACNYPLELYERVRMGPSSSPIPSPSPSPTDPKRCFFGASPGRLHISDFSFLMVLGKGSFGKVMLAERRGSDELYAIKILKKDVIVQDDDVDCTLVEKRVLALGGRGPGGRPHFLTQLHSTFQTPDRLYFVMEYVTGGDLMYHIQQLGKFKEPHAAFYAAEIAIGLFFLHNQGIIYRDLKLDNVMLDAEGHIKITDFGMCKENVFPGTTTRTFCGTPDYIAPEIIAYQPYGKSVDWWSFGVLLYEMLAGQFLTKHPGKRLGSGPDGEPTIRAHGFFRWIDWERLERLEIPPPFRPRPCGRSGENFDKFFTRAAPALTPPDRLVLASIDQADFQGFTYVNPDFVHPDARSPTSPVPVPVM

SEQ ID NO: 32136 - protein, 169 aa, Homo sapiens
MTHCCSPCCQPTCCRTTCWKPTTVTTCSSTPCCQPSCCVSSCCQPCCHPTCCQNTCCRTTCCQPTCVTSCCQPSCCSTPCCQPICCGSSCCGQTSCGSSCCQPSSCAPIYCRRTCYHPTSVYLPGCLNQSCGSSCCQPCCRPACCETTCCRTTCFQPTCVTSCCQPACC

SEQ ID NO: 32137 - protein, 354 aa, Homo sapiens
MSAGGGRAFAWQVFPPMPTCRVYGTVAHQDGHLLVLGGCGRAGLPLDTAETLDMASHTWLALAPLPTARAGAAAVVLGKQVLVVGGVDEVQSPVAAVEAFLMDEGRWERRATLPQAAMGVATVERDGMVYALGGMGPDTAPQAQVRVYEPRRDCWLSLPSMPTPCYGASTFLHGNKIYVLGGRQGKLPVTAFEAFDLEARTWTRHPSLPSRRAFAGCAMAEGSVFSLGGLQQPGPHNFYSRPHFVNTVEMFDLEHGSWTKLPRSLRMRDKRADFVVGSLGGHIVAIGGLGNQPCPLGSVESFSLARRRWEALPAMPTARCSCSSLQAGPRLFVIGGVAQGPSQAVEALCLRDGV

SEQ ID NO: 32138 - protein, 737 aa, Homo sapiens
MVVFNGLLKIKICEAVSLKPTAWSLRHAVGPRPQTFLLDPYIALNVDDSRIGQTATKQKTNSPAWHDEFVTDVCNGRKIELAVFHDAPIGYDDFVANCTIQFEELLQNGSRHFEDWIDLEPEGRVYVIIDLSGSSGEAPKDNEERVFRERMRPRKRQGAVRRRVHQVNGHKFMATYLRQPTYCSHCRDFIWGVIGKQGYQCQVCTCVVHKRCHELIITKCAGLKKQETPDQVGSQRFSVNMPHKFGIHNYKVPTFCDHCGSLLWGLLRQGLQCKVCKMNVHRRCETNVAPNCGVDARGIAKVLADLGVTPDKITNSGQRRKKLIAGAESPQPASGSSPSEEDRSKSAPTSPCDQEIKELENNIRKALSFDNRGEEHRAASSPDGQLMSPGENGEVRQGQAKRLGLDEFNFIKVLGKGSFGKVMLAELKGKDEVYAVKVLKKDVILQDDDVDCTMTEKRILALARKHPYLTQLYCCFQTKDRLFFVMEYVNGGDLMFQIQRSRKFDEPRSRFYAAEVTSALMFLHQHGVIYRDLKLDNILLDAEGHCKLADFGMCKEGILNGVTTTTFCGTPDYIAPEILQELEYGPSVDWWALGVLMYEMMAGQPPFEADNEDDLFESILHDDVLYPVWLSKEAVSILKAFMTKNPHKRLGCVASQNGEDAIKQHPFFKEIDWVLLEQKKIKPPFKPRIKTKRDVNNFDQDFTREEPVLTLVDEAIVKQINQEEFKGFSYFGEDLMP

SEQ ID NO: 32139 - protein, 416 aa, Homo sapiens
MVDHLLPVDENFSSPKCPVGYLGDRLVGRRAYHMLPSPVSEDDSDASSPCSCSSPDSQALCSCYGGGLGTESQDSILDFLLSQATLGSGGGSGSSIGASSGPVAWGPWRRAAAPVKGEHFCLPEFPLGDPDDVPRPFQPTLEEIEEFLEENMEPGVKEVPEGNSKDLDACSQLSAGPHKSHLHPGSSGRERCSPPPGGASAGGAQGPGGGPTPDGPIPVLLQIQPVPVKQESGTGPASPGQAPENVKVAQLLVNIQGQTFALVPQVVPSSNLNLPSKFVRIAPVPIAAKPVGSGPLGPGPAGLLMGQKFPKNPAAELIKMHKCTFPGCSKMYTKSSHLKAHLRRHTGEKPFACTWPGCGWRFSRSDELSRHRRSHSGVKPYQCPVCEKKFARSDHLSKHIKVHRFPRSSRSVRSVN

SEQ ID NO: 32140 - protein, 706 aa, Homo sapiens
MSPFLRIGLSNFDCGSCQSCQGEAVNPYCAVLVKEYVESENGQMYIQKKPTMYPPWDSTFDAHINKGRVMQIIVKGKNVDLISETTVELYSLAERCRKNNGKTEIWLELKPQGRMLMNARYFLEMSDTKDMNEFETEGFFALHQRRGAIKQAKVHHVKCHEFTATFFPQPTFCSVCHEFVWGLNKQGYQCRQCNAAIHKKCIDKVIAKCTGSAINSRETMFHKERFKIDMPHRFKVYNYKSPTFCEHCGTLLWGLARQGLKCDACGMNVHHRCQTKVANLCGINQKLMAEALAMIESTQQARCLRDTEQIFREGPVEIGLPCSIKNEARPPCLPTPGKREPQGISWESPLDEVDKMCHLPEPELNKERPSLQIKLKIEDFILHKMLGKGSFGKVFLAEFKKTNQFFAIKALKKDVVLMDDDVECTMVEKRVLSLAWEHPFLTHMFCTFQTKENLFFVMEYLNGGDLMYHIQSCHKFDLSRATFYAAEIILGLQFLHSKGIVYRDLKLDNILLDKDGHIKIADFGMCKENMLGDAKTNTFCGTPDYIAPEILLGQKYNHSVDWWSFGVLLYEMLIGQSPFHGQDEEELFHSIRMDNPFYPRWLEKEAKDLLVKLFVREPEKRLGVRGDIRQHPLFREINWEELERKEIDPPFRPKVKSPFDCSNFDKEFLNEKPRLSFADRALINSMDQNMFRNFSFMNPGMERLIS

SEQ ID NO: 32141 - protein, 643 aa, Homo sapiens
MSPFLRIGLSNFDCGSCQSCQGEAVNPYCAVLVKEYVESENGQMYIQKKPTMYPPWDSTFDAHINKGRVMQIIVKGKNVDLISETTVELYSLAERCRKNNGKTEIWLELKPQGRMLMNARYFLEMSDTKDMNEFETEGFFALHQRRGAIKQAKVHHVKCHEFTATFFPQPTFCSVCHEFVWGLNKQGYQCRQCNAAIHKKCIDKVIAKCTGSAINSRETMFHKERFKIDMPHRFKVYNYKSPTFCEHCGTLLWGLARQGLKCDACGMNVHHRCQTKVANLCGINQKLMAEALAMIESTQQARCLRDTEQIFREGPVEIGLPCSIKNEARPPCLPTPGKREPQGISWESPLDEVDKMCHLPEPELNKERPSLQIKLKIEDFILHKMLGKGSFGKVFLAEFKKTNQFFAIKALKKDVVLMDDDVECTMVEKRVLSLAWEHPFLTHMFCTFQTKENLFFVMEYLNGGDLMYHIQSCHKFDLSRATFYAAEIILGLQFLHSKGIVYRDLKLDNILLDKDGHIKIADFGMCKENMLGDAKTNTFCGTPDYIAPELFVREPEKRLGVRGDIRQHPLFREINWEELERKEIDPPFRPKVKSPFDCSNFDKEFLNEKPRLSFADRALINSMDQNMFRNFSFMNPGMERLIS

SEQ ID NO: 32142 - protein, 581 aa, Homo sapiens
MDTKDMNEFETEGFFALHQRRGAIKQAKVHHVKCHEFTATFFPQPTFCSVCHEFVWGLNKQGYQCRQCNAAIHKKCIDKVIAKCTGSAINSRETMFHKERFKIDMPHRFKVYNYKSPTFCEHCGTLLWGLARQGLKCDACGMNVHHRCQTKVANLCGINQKLMAEALAMIESTQQARCLRDTEQIFREGPVEIGLPCSIKNEARPPCLPTPGKREPQGISWESPLDEVDKMCHLPEPELNKERPSLQIKLKIEDFILHKMLGKGSFGKVFLAEFKKTNQFFAIKALKKDVVLMDDDVECTMVEKRVLSLAWEHPFLTHMFCTFQTKENLFFVMEYLNGGDLMYHIQSCHKFDLSRATFYAAEIILGLQFLHSKGIVYRDLKLDNILLDKDGHIKIADFGMCKENMLGDAKTNTFCGTPDYIAPEILLGQKYNHSVDWWSFGVLLYEMLIGQSPFHGQDEEELFHSIRMDNPFYPRWLEKEAKDLLVKLFVREPEKRLGVRGDIRQHPLFREINWEELERKEIDPPFRPKVKSPFDCSNFDKEFLNEKPRLSFADRALINSMDQNMFRNFSFMNPGMERLIS

SEQ ID NO: 32143 - protein, 259 aa, Homo sapiens
MKHSKKTYDSFQDELEDYIKVQKARGLEPKTCFRKMKGDYLETCGYKGEVNSRPTYRMFDQRLPSETIQTYPRSCNIPQTVENRLPQWLPAHDSRLRLDSLSYCQFTRDCFSEKPVPLNFNQQEYICGSHGVEHRVYKHFSSDNSTSTHQASHKQIHQKRKRHPEEGREKSEEERSKHKRKKSCEEIDLDKHKSIQRKKTEVEIETVHVSTEKLKNRKEKKSRDVVSKKEERKRTKKKKEQGQERTEEEMLWDQSILGF

SEQ ID NO: 32144 - protein, 473 aa, Homo sapiens
MAPPAARLALLSAAALTLAARPAPSPGLGPECFTANGADYRGTQNWTALQGGKPCLFWNETFQHPYNTLKYPNGEGGLGEHNYCRNPDGDVSPWCYVAEHEDGVYWKYCEIPACQMPGNLGCYKDHGNPPPLTGTSKTSNKLTIQTCISFCRSQRFKFAGMESGYACFCGNNPDYWKYGEAASTECNSVCFGDHTQPCGGDGRIILFDTLVGACGGNYSAMSSVVYSPDFPDTYATGRVCYWTIRVPGASHIHFSFPLFDIRDSADMVELLDGYTHRVLARFHGRSRPPLSFNVSLDFVILYFFSDRINQAQGFAVLYQAVKEELPQERPAVNQTVAEVITEQANLSVSAARSSKVLYVITTSPSHPPQTVPGSNSWAPPMGAGSHRVEGWTVYGLATLLILTVTAIVAKILLHVTFKSHRVPASGDLRDCHQPGTSGEIWSIFYKPSTSISIFKKKLKGQSQQDDRNPLVSD

SEQ ID NO: 32145 - protein, 492 aa, Homo sapiens
MAPPAARLALLSAAALTLAARPAPSPGLGPGPECFTANGADYRGTQNWTALQGGKPCLFWNETFQHPYNTLKYPNGEGGLGEHNYCRNPDGDVSPWCYVAEHEDGVYWKYCEIPACQMPGNLGCYKDHGNPPPLTGTSKTSNKLTIQTCISFCRSQRFKFAGMESGYACFCGNNPDYWKYGEAASTECNSVCFGDHTQPCGGDGRIILFDTLVGACGGNYSAMSSVVYSPDFPDTYATGRVCYWTIRVPGASHIHFSFPLFDIRDSADMVELLDGYTHRVLARFHGRSRPPLSFNVSLDFVILYFFSDRINQAQGFAVLYQAVKEELPQERPAVNQTVAEVITEQANLSVSAARSSKVLYVITTSPSHPPQTVPGSNSWAPPMGAGSHRVEGWTVYGLATLLILTVTAIVAKILLHVTFKSHRVPASGDLRDCHQPGTSGEIWSIFYKPSTSISIFKKKLKGQSQQDDRNPLAIQDSEVTSLIWSQGQPRSI

SEQ ID NO: 32146 - protein, 458 aa, Homo sapiens
MAPPAARLALLSAAALTLAARPAPSPGLGPGPECFTANGADYRGTQNWTALQGGKPCLFWNETFQHPYNTLKYPNGEGGLGEHNYCRNPDGDVSPWCYVAEHEDGVYWKYCEIPACQMPGNLGCYKDHGNPPPLTGTSKTSNKLTIQTCISFCRSQRFKFAGMESGYACFCGNNPDYWKYGEAASTECNSVCFGDHTQPCGGDGRIILFDTLVGACGGNYSAMSSVVYSPDFPDTYATGRVCYWTIRVPGASHIHFSFPLFDIRDSADMVELLDGYTHRVLARFHGRSRPPLSFNVSLDFVILYFFSDRINQAQGFAVLYQAVKEELPQERPAVNQTVAEVITEQANLSVSAARSSKVLYVITTSPSHPPQTVPGWTVYGLATLLILTVTAIVAKILLHVTFKSHRVPASGDLRDCHQPGTSGEIWSIFYKPSTSISIFKKKLKGQSQQDDRNPLVSD

SEQ ID NO: 32147 - protein, 597 aa, Homo sapiens
MERPAPLAVLPFSDPAHALSLLRGLSQLRAERKFLDVTLEAAGGRDFPAHRAVLAAASPYFRAMFAGQLRESRAERVRLHGVPPDMLQLLLDFSYTGRVAVSGDNAEPLLRAADLLQFPAVKEACGAFLQQQLDLANCLDMQDFAEAFSCSGLASAAQRFILRHVGELGAEQLERLPLARLLRYLRDDGLCVPKEEAAYQLALRWVRADPPRRAAHWPQLLEAVRLPFVRRFYLLAHVEAEPLVARCPPCLRLLREARDFQAARYDRHDRGPCPRMRPRPSTGLAEILVLVGGCDQDCDELVTVDCYNPQTGQWRYLAEFPDHLGGGYSIVALGNDIYVTGGSDGSRLYDCVWRYNSSVNEWAEVAPMLKAREYHSSSVLDGLLYVVAADSTERYDHTTDSWEALQPMTYPMDNCSTTACRGRLYAIGSLAGKETMVMQCYDPDTDLWSLVDCGQLPPWSFAPKTATLNGLMYFVRDDSAEVDVYNPTRNEWDKIPSMNQVHVGGSLAVLGGKLYVSGGYDNTFELSDVVEAYDPETRAWSVVGRLPEPTFWHGSVSIFRQFMPQTFSGGRGFELDSGSDDMDPGRPRPPRDPDELH

SEQ ID NO: 32148 - protein, 539 aa, Homo sapiens
MERPAPLAVLPFSDPAHALSLLRGLSQLRAERKFLDVTLEAAGGRDFPAHRAVLAAASPYFRAMFAGQLRESRAERVRLHGVPPDMLQLLLDFSYTGRVAVSGDNAEPLLRAADLLQFPAVKEACGAFLQQQLDLANCLDMQDFAEAFSCSGLASAAQRFILRHVGELGAEQLERLPLARLLRYLRDDGLCVPKEEAAYQLALRWVRADPPRRAAHWPQLLEAVRLPFVRRFYLLAHVEAEPLVARCPPCLRLLREARDFQAARYDRHDRGPCPRMRPRPSTGLAEILVLVGGCDQDCDELVTVDCYNPQTGQWRYLAEFPDHLGGGYSIVALGNDIYVTGGSDGSRLYDCVWRYNSSVNEWAEVAPMLKAREYHSSSVLDGLLYVVAADSTERYDHTTDSWEALQPMTYPMDNCSTTACRGRLYAIGSLAGKETMVMQCYDPDTDLWSLVDCGQLPPWSFAPKTATLNGLMYFVRDDSAEVDVYNPTRNEWDKIPSMNQVNFQAGQHWKHRLVLILQPKCHRDECLGSTAMMGGSHLN

SEQ ID NO: 32149 - protein, 616 aa, Homo sapiens
MMEGSRQTRVSRPYKISESSKVYRWADHSSTVLQRLNEQRLRGLFCDVVLVADEQRVPAHRNLLAVCSDYFNSMFTIGMREAFQKEVELIGASYIGLKAVVDFLYGGELVLDGGNIDYVLETAHLLQIWTVVDFCCEYLEQEVSEDNYLYLQELASIYSLKRLDAFIDGFILNHFGTLSFTPDFLQNVSMQKLCVYLSSSEVQRECEHDLLQAALQWLTQQPEREAHARQVLENIHFPLIPKNDLLHRVKPAVCSLLPKEANCEGFIEEAVRYHNNLAAQPVMQTKRTALRTNQERLLFVGGEVSERCLELSDDTCYLDAKSEQWVKETPLPARRSHHCVAVLGGFIFIAGGSFSRDNGGDAASNLLYRYDPRCKQWIKVASMNQRRVDFYLASIEDMLVAIGGRNENGALSSVETYSPKTDSWSYVAGLPRFTYGHAGTIYKDFVYISGGHDYQIGPYRKNLLCYDHRTDVWEERRPMTTARGWHSMCSLGDSIYSIGGSDDNIESMERFDVLGVEAYSPQCNQWTRVAPLLHANSESGVAVWEGRIYILGGYSWENTAFSKTVQVYDREADKWSRGVDLPKAIAGGSACVCALEPRPEDKKKKGKGKRHQDRGQ

SEQ ID NO: 32150 - protein, 553 aa, Homo sapiens
MMEGSRQTRVSRPYKISESSKVYRWADHSSTVLQRLNEQRLRGLFCDVVLVADEQRVPAHRNLLAVCSDYFNSMFTIGMREAFQKEVELIGASYIGLKAVVDFLYGGELVLDGGNIDYVLETAHLLQIWTVVDFCCEYLEQEVSEDNYLYLQELASIYSLKRLDAFIDGFILNHFGTLSFTPDFLQNVSMQKLCVYLSSSEVQRECEHDLLQAALQWLTQQPEREAHARQVLENIHFPLIPKNDLLHRVKPAVCSLLPKEANCEGFIEEAVRYHNNLAAQPVMQTKRTALRTNQERLLFVGGEVSERCLELSDDTCYLDAKSEQWVKETPLPARRSHHCVAVLGGFIFIAGGSFSRDNGGDAASNLLYRFTYGHAGTIYKDFVYISGGHDYQIGPYRKNLLCYDHRTDVWEERRPMTTARGWHSMCSLGDSIYSIGGSDDNIESMERFDVLGVEAYSPQCNQWTRVAPLLHANSESGVAVWEGRIYILGGYSWENTAFSKTVQVYDREADKWSRGVDLPKAIAGGSACVCALEPRPEDKKKKGKGKRHQDRGQ

SEQ ID NO: 32151 - protein, 436 aa, Homo sapiens
MTFGRSGAASVVLNVGGARYSLSRELLKDFPLRRVSRLHGCRSERDVLEVCDDYDRERNEYFFDRHSEAFGFILLYVRGHGKLRFAPRMCELSFYNEMIYWGLEGAHLEYCCQRRLDDRMSDTYTFYSADEPGVLGRDEARPGGAEAAPSRRWLERMRRTFEEPTSSLAAQILASVSVVFVIVSMVVLCASTLPDWRNAAADNRSLDDRSRYSAGPGREPSGIIEAICIGWFTAECIVRFIVSKNKCEFVKRPLNIIDLLAITPYYISVLMTVFTGENSQLQRAGVTLRVLRMMRIFWVIKLARHFIGLQTLGLTLKRCYREMVMLLVFICVAMAIFSALSQLLEHGLDLETSNKDFTSIPAACWWVIISMTTVGYGDMYPITVPGRILGGVCVVSGIVLLALPITFIYHSFVQCYHELKFRSARYSRSLSTEFLN

SEQ ID NO: 32152 - protein, 425 aa, Homo sapiens
MTFGRSGAASVVLNVGGARYSLSRELLKDFPLRRVSRLHGCRSERDVLEVCDDYDRERNEYFFDRHSEAFGFILLYVRGHGKLRFAPRMCELSFYNEMIYWGLEGAHLEYCCQRRLDDRMSDTYTFYSADEPGVLGRDEARPGGAEAAPSRRWLERMRRTFEEPTSSLAAQILASVSVVFVIVSMVVLCASTLPDWRNAAADNRSLDDRSRIIEAICIGWFTAECIVRFIVSKNKCEFVKRPLNIIDLLAITPYYISVLMTVFTGENSQLQRAGVTLRVLRMMRIFWVIKLARHFIGLQTLGLTLKRCYREMVMLLVFICVAMAIFSALSQLLEHGLDLETSNKDFTSIPAACWWVIISMTTVGYGDMYPITVPGRILGGVCVVSGIVLLALPITFIYHSFVQCYHELKFRSARYSRSLSTEFLN

SEQ ID NO: 32153 - protein, 614 aa, Homo sapiens [sequence omitted]

SEQ ID NO: 32154 - protein, 564 aa, Homo sapiens
MSAGSATHPGAGGRRSKWDQPAPAPLLFLPPAAPGGEVTSSGGSPGGTTAAPSGALDAAAAVAAKINAMLMAKGKLKPTQNASEKLQAPGKGLTSNKSKDDLVVAEVEINDVPLTCRNLLTRGQTQDEISRLSGAAVSTRGRFMTTEEKAKVGPGDRPLYLHVQGQTRELVDRAVNRIKEIITNGVVKAATGTSPTFNGATVTVYHQPAPIAQLSPAVSQKPPFQSGMHYVQDKLFVGLEHAVPTFNVKEKVEGPGCSYLQHIQIETGAKVFLRGKGSGCIEPASGREAFEPMYIYISHPKPEGLAAAKKLCENLLQTVHAEYSRFVNQINTAVPLPGYTQPSAISSVPPQPPYYPSNGYQSGYPVVPPPQQPVQPPYGVPSIVPPAVSLAPGVLPALPTGVPPVPTQYPITQVQPPASTGQSPMGGPFIPAAPVKTALPAGPQPQPQPQPPLPSQPQAQKRRFTEELPDERESGLLGYQHGPIHMTNLGTGFSSQNEIEGAGSKPASSSGKERERDRQLMPPPAFPVTGIKTESDERNGSGTLTGSHGECDIAGGTGEWLRLV

SEQ ID NO: 32155 - protein, 384 aa, Homo sapiens
MSAGSATHPGAGGRRSKWDQPAPAPLLFLPPAAPGGEVTSSGGSPGGTTAAPSGALDAAAAVAAKINAMLMAKGKLKPTQNASEKLQAPGKGLTSNKSKDDLVVAEVEINDVPLTCRNLLTRGQTQDEISRLSGAAVSTRGRFMTTEEKAKVGPGDRPLYLHVQGQTRELVDRAVNRIKEIITNGVVKAATGTSPTFNGATVTVYHQPAPIAQLSPAVSQKPPFQSGMHYVQDKLFVGLEHAVPTFNVKEKVEGPGCSYLQHIQIETGAKVFLRGKGSGCIEPASGREAFEPMYIYISHPKPEGLAAAKKLCENLLQTVHAEYSRFVNQINTAVPLPAASSTSLRSTKHSATSCFISTWSLAGITYWSPTCANTIPDNTSAASS

SEQ ID NO: 32156 - protein, 241 aa, Homo sapiens
MSAGSATHPGAGGRRSKWDQPAPAPLLFLPPAAPGGEVTSSGGSPGGTTAAPSGALDAAAAVAAKINAMLMAKGKLKPTQNASEKLQAPGKGLTSNKSKDDLVVAEVEINDVPLTCRNLLTRGQTQDEISRLSGAAVSTRGRFMTTEEKAKVGPGDRPLYLHVQGQTRELVDRAVNRIKEIITNGVVKAATGTSPTFNGATVTVYHQPAPIAQLSPAVSQKPPFQSGVCFGEGSLIALSFL

SEQ ID NO: 32157 - protein, 142 aa, Homo sapiens
MNCSESQRLRTLLSRLLLELHHRGNASGLGAGPRPSMGMGVVPDPFVGREVTSAKGDDAYLYILLIMIFYACLAGGLILAYTRSRKLVEAKDEPSQACAEHEWAPGGALTADAEAAAGSQAEGRRQLASEGLPALAQGAERV

SEQ ID NO: 32158 - protein, 346 aa, Homo sapiens
MEEKYLPELMAEKDSLDPSFTHALRLVNQEIEKFQKGEGKDEEKYIDVVINKNMKLGQKVLIPVKQFPKFNFVGKLLGPRGNSLKRLQEETLTKMSILGKGSMRDKAKEEELRKSGEAKYFHLNDDLHVLIEVFAPPAEAYARMGHALEEIKKFLIPDYNDEIRQAQLQELTYLNGGSENADVPVVRGKPTLRTRGVPAPAITRGRGGVTARPVGVVVPRGTPTPRGVLSTRGPVSRGRGLLTPRARGVPPTGYRPPPPPPTQETYGEYDYDDGYGTAYDEQSYDSYDNSYSTPAQSGADYYDYGHGLSEETYDSYGQEEWTNSRHKAPSARTAKGVYRDQPYGRY

SEQ ID NO: 32159 - protein, 271 aa, Homo sapiens
MEEKYLPELMAEKDSLDPSFTHALRLVNQEIEKFQKGEGKDEEKYIDVVINKNMKLGQKVLIPVKQFPKFNFVGKLLGPRGNSLKRLQEETLTKMSILGKGSMRDKAKEEELRKSGEAKYFHLNDDLHVLIEVFAPPAEAYARMGHALEEIKKFLIPDYNDEIRQAQLQELTYLNGGSENADVPVVRGKPTLRTRGVPAPAITRGRGGVTARPVGVVVPRGTPTPRGVLSTRGPVSRGRGLLTPRARGVPPTGYRPPPPPPTQETYGEYWC

SEQ ID NO: 32160 - protein, 233 aa, Homo sapiens
MVSMSFKRNRSDRFYSTRCCGCCHVRTGTIILGTWYMVVNLLMAILLTVEVTHPNSMPAVNIQYEVIGNYYSSERMADNACVLFAVSVLMFIISSMLVYGAISYQVGWLIPFFCYRLFDFVLSCLVAISSLTYLPRIKEYLDQLPDFPYKDDLLALDSSCLLFIVLVFFALFIIFKAYLINCVWNCYKYINNRNVPEIAVYPAFEAPPQYVLPTYEMAVKMPEKEPPPPYLPA

SEQ ID NO: 32161 - protein, 214 aa, Homo sapiens
MGLRDWLRTVCCCCGCECLEERALPEKEPLVSDNNPYSSFGATLVRDDEKNLWSMPHDVSHTEADDDRTLYNLIVIRNQQAKDSEEWQKLNYDIHTLRQVRREVRNRWKCILEDLGFQKEADSLLSVTKLSTISDSKNTRKAREMLLKLAEETNIFPTSWELSERYLFVVDRLIALDAAEEFFKLARRTYPKKPGVPCLADGQKELHYLPFPSP

SEQ ID NO: 32162 - protein, 224 aa, Homo sapiens
MGLRDWLRTVCCCCGCECLEERALPEKEPLVSDNNPYSSFGATLVRDDEKNLWSMPHDVSHTEADDDRTLYNLIVIRNQQAKDSEEWQKLNYDIHTLRQVRREVRNRWKCILEDLGFQKEADSLLSVTKLSTISDSKNTRKAREMLLKLAEETNIFPTSWELSERYLFVVDRLIALDAAEEFFKLARRTYPKKPGVPCLADGQKELHLWGDLSCRLAHMQGVLH

SEQ ID NO: 32163 - protein, 283 aa, Homo sapiens
MPHRKERPSGSSLHTHGSTGTAEGGNMSRLSLTRSPVSPLAAQGIPLPAQLTKSNAPVHIDVGGHMYTSSLATLTKYPDSRISRLFNGTEPIVLDSLKQHYFIDRDGEIFRYVLSFLRTSKLLLPDDFKDFSLLYEEARYYQLQPMVRELERWQQEQEQRRRSRACDCLVVRVTPDLGERIALSGEKALIEEVFPETGDVMCNSVNAGWNQDPTHVIRFPLNGYCRLNSVQVLERLFQRGFSVAASCGGGVDSSQFSEYVLCREERRPQPTPTAVRIKQEPLD

SEQ ID NO: 32164 - protein, 234 aa, Homo sapiens
MPHRKERPSGSSLHTHGSTGTAEGGNMSRLSLTRSPVSPLAAQGIPLPAQLTKSNAPVHIDVGGHMYTSSLATLTKYPDSRISRLFNGTEPIVLDSLKQHYFIDRDGEIFRYVLSFLRTSKLLLPDDFKDFSLLYEEARYYQLQPMVRELERWQQEQEQRRRSRACDCLVVRVTPDLGERIALSGEKALIEEVFPETGDVMCNSVNAGWNQDPTHVIRFPLNGYCRLNSVQDVL

SEQ ID NO: 32165 - protein, 325 aa, Homo sapiens
MALADSTRGLPNGGGGGGGSGSSSSSAEPPLFPDIVELNVGGQVYVTRRCTVVSVPDSLLWRMFTQQQPQELARDSKGRFFLDRDGFLFRYILDYLRDLQLVLPDYFPERSRLQREAEYFELPELVRRLGAPQQPGPGPPPSRRGVHKEGSLGDELLPLGYSEPEQQEGASAGAPSPTLELASRSPSGGAAGPLLTPSQSLDGSRRSGYITIGYRGSYTIGRDAQADAKFRRVARITVCGKTSLAKEVFGDTLNESRDPDRPPERYTSRYYLKFNFLEQAFDKLSESGFHMVACSSTGTCAFASSTDQSEDKIWTSYTEYVFCRE

SEQ ID NO: 32166 - protein, 543 aa, Homo sapiens
MNSHSYNGSVGRPLGSGPGALGRDPPDPEAGHPPQPPHSPGLQVVVAKSEPARPSPGSPRGQPQDQDDDEDDEEDEAGRQRASGKPSNVGHRLGHRRALFEKRKRLSDYALIFGMFGIVVMVTETELSWGVYTKESLYSFALKCLISLSTAILLGLVVLYHAREIQLFMVDNGADDWRIAMTCERVFLISLELAVCAIHPVPGHYRFTWTARLAFTYAPSVAEADVDVLLSIPMFLRLYLLGRVMLLHSKIFTDASSRSIGALNKITFNTRFVMKTLMTICPGTVLLVFSISSWIIAAWTVRVCERYHDKQEVTSNFLGAMWLISITFLSIGYGDMVPHTYCGKGVCLLTGIMGAGCTALVVAVVARKLELTKAEKHVHNFMMDTQLTKRVKNAAANVLRETWLIYKHTRLVKKPDQARVRKHQRKFLQAIHQAQKLRSVKIEQGKLNDQANTLTDLAKTQTVMYDLVSELHAQHEELEARLATLESRLDALGASLQALPGLIAQAIRPPPPPLPPRPGPGPQDQAARSSPCRWTPVAPSDCG

SEQ ID NO: 32167 - protein, 561 aa, Homo sapiens
MPGPRAACSEPNPCTQVVMNSHSYNGSVGRPLGSGPGALGRDPPDPEAGHPPQPPHSPGLQVVVAKSEPARPSPGSPRGQPQDQDDDEDDEEDEAGRQRASGKPSNVGHRLGHRRALFEKRKRLSDYALIFGMFGIVVMVTETELSWGVYTKESLYSFALKCLISLSTAILLGLVVLYHAREIQLFMVDNGADDWRIAMTCERVFLISLELAVCAIHPVPGHYRFTWTARLAFTYAPSVAEADVDVLLSIPMFLRLYLLGRVMLLHSKIFTDASSRSIGALNKITFNTRFVMKTLMTICPGTVLLVFSISSWIIAAWTVRVCERYHDKQEVTSNFLGAMWLISITFLSIGYGDMVPHTYCGKGVCLLTGIMGAGCTALVVAVVARKLELTKAEKHVHNFMMDTQLTKRVKNAAANVLRETWLIYKHTRLVKKPDQARVRKHQRKFLQAIHQAQKLRSVKIEQGKLNDQANTLTDLAKTQTVMYDLVSELHAQHEELEARLATLESRLDALGASLQALPGLIAQAIRPPPPPLPPRPGPGPQDQAARSSPCRWTPVAPSDCG

SEQ ID NO: 32168 - protein, 695 aa, Homo sapiens [sequence omitted]

SEQ ID NO: 32169 - protein, 641 aa, Homo sapiens
MAEAPPRRLGLGPPPGDAPRAELVALTAVQSEQGEAGGGGSPRRLGLLGSPLPPGAPLPGPGSGSGSACGQRSSAAHKRYRRLQNWVYNVLERPRGWAFVYHVFIFLLVFSCLVLSVLSTIQEHQELANECLLILEFVMIVVFGLEYIVRVWSAGCCCRYRGWQGRFRFARKPFCVIDFIVFVASVAVIAAGTQGNIFATSALRSMRFLQILRMVRMDRRGGTWKLLGSVVYAHSKELITAWYIGFLVLIFASFLVYLAEKDANSDFSSYADSLWWGTITLTTIGYGDKTPHTWLGRVLAAGFALLGISFFALPAGILGSGFALKVQEQHRQKHFEKRRMPAANLIQAAWRLYSTDMSRAYLTATWYYYDSILPSFSSRMGIKDRIRMGSSQRRTGPSKQHLAPPTMPTSPSSEQVGEATSPTKVQKSWSFNDRTRFRASLRLKPRTSAEDAPSEEVAEEKSYQCELTVDDIMPAVKTVIRSIRILKFLVAKRKFKETLRPYDVKDVIEQYSAGHLDMLGRIKSLQTRVDQIVGRGPGDRKAREKGDKGPSDAEVVDEISMMGRVVKVEKQVQSIEHKLDLLLGFYSRCLRSGTSASLGAVQVPLFDPDITSDYHSPVDHEDISVSAQTLSISRSVSTNMD

SEQ ID NO: 32170 - protein, 190 aa, Homo sapiens
MAGAGPKRRALAAPVAEEKEEAREKMMAAKRADGAAPAGEGEGVTLQGNITLLKGVAVIVVAIMSSGIFVTPTGVLKEAGSPGLALVVWAACGVFSIVGALCYAELGTTISKSGGDYAYMLDVYGSLPAFLKLWIELLIIRPSSQYIVALVFATYLLKPLFPTCPVPEEAAKLVACHSVQLIVHQPTQVI

SEQ ID NO: 32171 - protein, 180 aa, Homo sapiens
MAGAGPKRRALAAPVAEEKEEAREKMMAAKRADGAAPAGEGEGVTLQGNITLLKGVAVIVVAIMSSGIFVTPTGVLKEAGSPGLALVVWAACGVFSIVGALCYAELGTTISKSGGDYAYMLDVYGSLPAFLKLWIELLIIRPSSQYIVALVFATYLLKPLFPTCPVPEEAAKLVACHSVH

SEQ ID NO: 32172 - protein, 316 aa, Homo sapiens
MTQGKLSVANKAPGTEGQQQVHGEKKEAPAVPSAPPSYEEATSGEGMKAGAFPPAPTAVPLHPSWAYVDPSSSSSYDNGFPTGDHELFTTFSWDDQKVRRVFVRKVYTILLIQLLVTLAVVALFTFCDPVKDYVQANPGWYWASYAVFFATYLTLACCSGPRRHFPWNLILLTVFTLSMAYLTGMLSSYYNTTSVLLCLGITALVCLSVTVFSFQTKFDFTSCQGVLFVLLMTLFFSGLILAILLPFQYVPWLHAVYAALGAGVFTLFLALDTQLLMGNRRHSLSPEEYIFGALNIYLDIIYIFTFFLQLFGTNRE

SEQ ID NO: 32173 - protein, 270 aa, Homo sapiens
MKAGAFPPAPTAVPLHPSWAYVDPSSSSSYDNGFPTGDHELFTTFSWDDQKVRRVFVRKVYTILLIQLLVTLAVVALFTFCDPVKDYVQANPGWYWASYAVFFATYLTLACCSGPRRHFPWNLILLTVFTLSMAYLTGMLSSYYNTTSVLLCLGITALVCLSVTVFSFQTKFDFTSCQGVLFVLLMTLFFSGLILAILLPFQYVPWLHAVYAALGAGVFTLFLALDTQLLMGNRRHSLSPEEYIFGALNIYLDIIYIFTFFLQLFGTNRE

SEQ ID NO: 32174 - protein, 114 aa, Homo sapiens
MSPSQLIGFLLLWVPASRGEIVLTQSPDFQSVTPKEKVTITCRASQSIGSSLHWYQQKPDQSPKLLIKYASQSISGVPSRFSGSGSGTDFTLTINSLEAEDAAAYYCHQSSSLP

SEQ ID NO: 32175 - protein, 117 aa, Homo sapiens
MDMRVPAQLLGLLLLWLPGARCDIQLTQSPSFLSASVGDRVTITCRASQGISSYLAWYQQKPGKAPKLLIYAASTLQSGVPSRFSGSGSGTEFTLTISSLQPEDFATYYCQQLNSYP

SEQ ID NO: 32176 - protein, 3333 aa, Homo sapiens
MAAAARPRGRALGPVLPPTPLLLLVLRVLPACGATARDPGAAAGLSLHPTYFNLAEAARIWATATCGERGPGEGRPQPELYCKLVGGPTAPGSGHTIQGQFCDYCNSEDPRKAHPVTNAIDGSERWWQSPPLSSGTQYNRVNLTLDLGQLFHVAYILIKFANSPRPDLWVLERSVDFGSTYSPWQYFAHSKVDCLKEFGREANMAVTRDDDVLCVTEYSRIVPLENGEVVVSLINGRPGAKNFTFSHTLREFTKATNIRLRFLRTNTLLGHLISKAQRDPTVTRRYYYSIKDISIGGQCVCNGHAEVCNINNPEKLFRCECQHHTCGETCDRCCTGYNQRRWRPAAWEQSHECEACNCHGHASNCYYDPDVERQQASLNTQGIYAGGGVCINCQHNTAGVNCEQCAKGYYRPYGVPVDAPDGCIPCSCDPEHADGCEQGSGRCHCKPNFHGDNCEKCAIGYYNFPFCLRIPIFPVSTPSSEDPVAGDIKGCDCNLEGVLPEICDAHGRCLCRPGVEGPRCDTCRSGFYSFPICQACWCSALGSYQMPCSSVTGQCECRPGVTGQRCDRCLSGAYDFPHCQGSSSACDPAGTINSNLGYCQCKLHVEGPTCSRCKLLYWNLDKENPSGCSECKCHKAGTVSGTGECRQGDGDCHCKSHVGGDSCDTCEDGYFALEKSNYFGCQGCQCDIGGALSSMCSGPSGVCQCREHVVGKVCQRPENNYYFPDLHHMKYEIEDGSTPNGRDLRFGFDPLAFPEFSWRGYAQMTSVQNDVRITLNVGKSSGSLFRVILRYVNPGTEAVSGHITIYPSWGAAQSKEIIFLPSKEPAFVTVPGNGFADPFSITPGIWVACIKAEGVLLDYLVLLPRDYYEASVLQLPVTEPCAYAGPPQENCLLYQHLPVTRFPCTLACEARHFLLDGEPRPVAVRQPTPAHPVMVDLSGREVELHLRLRIPQVGHYVVVVEYSTEAAQLFVVDVNVKSSGSVLAGQVNIYSCNYSVLCRSAVIDHMSRIAMYELLADADIQLKGHMARFLLHQVCIIPIEEFSAEYVRPQVHCIASYGRFVNQSATCVSLAHETPPTALILDVLSGRPFPHLPQQSSPSVDVLPGVTLKAPQNQVTLRGRVPHLGRYVFVIHFYQAAHPTFPAQVSVDGGWPRAGSFHASFCPHVLGCRDQVIAEGQIEFDISEPEVAATVKVPEGKSLVLVRVLVVPAENYDYQILHKKSMDKSLEFITNCGKNSFYLDPQTASRFCKNSARSLVAFYHKGALPCECHPTGATGPHCSPEGGQCPCQPNVIGRQCTRCATGHYGFPRCKPCSCGRRLCEEMTGQCRCPPRTVRPQCEVCETHSFSFHPMAGCEGCNCSRRGTIEAAMPECDRDSGQCRCKPRITGRQCDRCASGFYRFPECVPCNCNRDGTEPGVCDPGTGACLCKENVEGTECNVCREGSFHLDPANLKGCTSCFCFGVNNQCHSSHKRRTKFVDMLGWHLETADRVDIPVSFNPGSNSMVADLQELPATIHSASWVAPTSYLGDKVSSYGGYLTYQAKSFGLPGDMVLLEKKPDVQLTGQHMSIIYEETNTPRPDRLHHGRVHVVEGNFRHASSRAPVSREELMTVLSRLADVRIQGLYFTETQRLTLSEVGLEEASDTGSGRIALAVEICACPPAYAGDSCQGCSPGYYRDHKGLYTGRCVPCNCNGHSNQCQDGSGICVNCQHNTAGEHCERCQEGYYGNAVHGSCRACPCPHTNSFATGCVVNGGDVRCSCKAGYTGTQCERCAPGYFGNPQKFGGSCQPCSCNSNGQLGSCHPLTGDCINQEPKDSSPAEECDDCDSCVMTLLNDLATMGEQLRLVKSQLQGLSASAGLLEQMRHMETQAKDLRNQLLNYRSAISNHGSKIEGLERELTDLNQEFETLQEKAQVNSRKAQTLNNNVNRATQSAKELDVKIKNVIRNVHILLKQISGTDGEGNNVPSGDFSREWAEAQRMMRELRNRNFGKHLREAEADKRESQLLLNRIRTWQKTHQGENNGLANSIRDSLNEYEAKLSDLRARLQEAAAQAKQANGLNQENERALGAIQRQVKEINSLQSDFTKYLTTADSSLLQTNIALQLMEKSQKEYEKLAASLNEARQELSDKVRELSRSAGKTSLVEEAEKHARSLQELAKQLEEIKRNASGDELVRCAVDAATAYENILNAIKAAEDAANRAASASESALQTVIKEDLPRKAKTLSSNSDKLLNEAKMTQKKLKQEVSPALNNLQQTLNIVTVQKEVIDTNLTTLRDGLHGIQRGDIDAMISSAKSMVRKANDITDEVLDGLNPIQTDVERIKDTYGRTQNEDFKKALTDADNSVNKLTNKLPDLWRKIESINQQLLPLGNISDNMDRIRELIQQARDAASKVAVPMRFNGKSGVEVRLPNDLEDLKGYTSLSLFLQRPNSRENGGTENMFVMYLGNKDASRDYIGMAVVDGQLTCVYNLGDREAELQVDQILTKSETKEAVMDRVKFQRIYQFARLNYTKGATSSKPETPGVYDMDGRNSNTLLNLDPENVVFYVGGYPPDFKLPSRLSFPPYKGCIELDDLNENVLSLYNFKKTFNLNTTEVEPCRRRKEESDKNYFEGTGYARVPTQPHAPIPTFGQTIQTTVDRGLLFFAENGDRFISLNIEDGKLMVRYKLNSELPKERGVGDAINNGRDHSIQIKIGKLQKRMWINVDVQNTIIDGEVFDFSTYYLGGIPIAIRERFNISTPAFRGCMKNLKKTSGVVRLNDTVGVTKKCSEDWKLVRSASFSRGGQLSFTDLGLPPTDHLQASFGFQTFQPSGILLDHQTWTRNLQVTLEDGYIELSTSDSGSPIFKSPQTYMDGLLHYVSVISDNSGLRLLIDDQLLRNSKRLKHISSSRQSLRLGGSNFEGCISNVFVQRLSLSPEVLDLTSNSLKRDVSLGGCSLNKPPFLMLLKGSTRFNKTKTFRINQLLQDTPVASPRSVKVWQDACSPLPKTQANHGALQFGDIPTSHLLFKLPQELLKPRSQFAVDMQTTSSRGLVFHTGTKNSFMALYLSKGRLVFALGTDGKKLRIKSKEKCNDGKWHTVVFGHDGEKGRLVVDGLRAREGSLPGNSTISIRAPVYLGSPPSGKPKSLPTNSFVGCLKNFQLDSKPLYTPSSSFGVSSCLGGPLEKGIYFSEEGGHVVLAHSVLLGPEFKLVFSIRPRSLTGILIHIGSQPGKHLCVYLEAGKVTASMDSGAGGTSTSVTPKQSLCDGQWHSVAVTIKQHILHLELDTDSSYTAGQIPFPPASTQEPLHLGGAPANLTTLRIPVWKSFFGCLRNIHVNHIPVPVTEALEVQGPVSLNGCPDQ

SEQ ID NO: 32177 - protein, 1724 aa, Homo sapiens
MPPAVRRSACSMGWLWIFGAALGQCLGYSSQQQRVPFLQPPGQSQLQASYVEFRPSQGCSPGYYRDHKGLYTGRCVPCNCNGHSNQCQDGSGICVNCQHNTAGEHCERCQEGYYGNAVHGSCRACPCPHTNSFATGCVVNGGDVRCSCKAGYTGTQCERCAPGYFGNPQKFGGSCQPCSCNSNGQLGSCHPLTGDCINQEPKDSSPAEECDDCDSCVMTLLNDLATMGEQLRLVKSQLQGLSASAGLLEQMRHMETQAKDLRNQLLNYRSAISNHGSKIEGLERELTDLNQEFETLQEKAQVNSRKAQTLNNNVNRATQSAKELDVKIKNVIRNVHILLKQISGTDGEGNNVPSGDFSREWAEAQRMMRELRNRNFGKHLREAEADKRESQLLLNRIRTWQKTHQGENNGLANSIRDSLNEYEAKLSDLRARLQEAAAQAKQANGLNQENERALGAIQRQVKEINSLQSDFTKYLTTADSSLLQTNIALQLMEKSQKEYEKLAASLNEARQELSDKVRELSRSAGKTSLVEEAEKHARSLQELAKQLEEIKRNASGDELVRCAVDAATAYENILNAIKAAEDAANRAASASESALQTVIKEDLPRKAKTLSSNSDKLLNEAKMTQKKLKQEVSPALNNLQQTLNIVTVQKEVIDTNLTTLRDGLHGIQRGDIDAMISSAKSMVRKANDITDEVLDGLNPIQTDVERIKDTYGRTQNEDFKKALTDADNSVNKLTNKLPDLWRKIESINQQLLPLGNISDNMDRIRELIQQARDAASKVAVPMRFNGKSGVEVRLPNDLEDLKGYTSLSLFLQRPNSRENGGTENMFVMYLGNKDASRDYIGMAVVDGQLTCVYNLGDREAELQVDQILTKSETKEAVMDRVKFQRIYQFARLNYTKGATSSKPETPGVYDMDGRNSNTLLNLDPENVVFYVGGYPPDFKLPSRLSFPPYKGCIELDDLNENVLSLYNFKKTFNLNTTEVEPCRRRKEESDKNYFEGTGYARVPTQPHAPIPTFGQTIQTTVDRGLLFFAENGDRFISLNIEDGKLMVRYKLNSELPKERGVGDAINNGRDHSIQIKIGKLQKRMWINVDVQNTIIDGEVFDFSTYYLGGIPIAIRERFNISTPAFRGCMKNLKKTSGVVRLNDTVGVTKKCSEDWKLVRSASFSRGGQLSFTDLGLPPTDHLQASFGFQTFQPSGILLDHQTWTRNLQVTLEDGYIELSTSDSGSPIFKSPQTYMDGLLHYVSVISDNSGLRLLIDDQLLRNSKRLKHISSSRQSLRLGGSNFEGCISNVFVQRLSLSPEVLDLTSNSLKRDVSLGGCSLNKPPFLMLLKGSTRFNKTKTFRINQLLQDTPVASPRSVKVWQDACSPLPKTQANHGALQFGDIPTSHLLFKLPQELLKPRSQFAVDMQTTSSRGLVFHTGTKNSFMALYLSKGRLVFALGTDGKKLRIKSKEKCNDGKWHTVVFGHDGEKGRLVVDGLRAREGSLPGNSTISIRAPVYLGSPPSGKPKSLPTNSFVGCLKNFQLDSKPLYTPSSSFGVSSCLGGPLEKGIYFSEEGGHVVLAHSVLLGPEFKLVFSIRPRSLTGILIHIGSQPGKHLCVYLEAGKVTASMDSGAGGTSTSVTPKQSLCDGQWHSVAVTIKQHILHLELDTDSSYTAGQIPFPPASTQEPLHLGGAPANLTTLRIPVWKSFFGCLRNIHVNHIPVPVTEALEVQGPVSLNGCPDQ

SEQ ID NO: 32178 - protein, 3277 aa, Homo sapiens
MAAAARPRGRALGPVLPPTPLLLLVLRVLPACGATARDPGAAAGLSLHPTYFNLAEAARIWATATCGERGPGEGRPQPELYCKLVGGPTAPGSGHTIQGQFCDYCNSEDPRKAHPVTNAIDGSERWWQSPPLSSGTQYNRVNLTLDLGQLFHVAYILIKFANSPRPDLWVLERSVDFGSTYSPWQYFAHSKVDCLKEFGREANMAVTRDDDVLCVTEYSRIVPLENGEVVVSLINGRPGAKNFTFSHTLREFTKATNIRLRFLRTNTLLGHLISKAQRDPTVTRRYYYSIKDISIGGQCVCNGHAEVCNINNPEKLFRCECQHHTCGETCDRCCTGYNQRRWRPAAWEQSHECEACNCHGHASNCYYDPDVERQQASLNTQGIYAGGGVCINCQHNTAGVNCEQCAKGYYRPYGVPVDAPDGCIPCSCDPEHADGCEQGSGRCHCKPNFHGDNCEKCAIGYYNFPFCLRIPIFPVSTPSSEDPVAGDIKGCDCNLEGVLPEICDAHGRCLCRPGVEGPRCDTCRSGFYSFPICQACWCSALGSYQMPCSSVTGQCECRPGVTGQRCDRCLSGAYDFPHCQGSSSACDPAGTINSNLGYCQCKLHVEGPTCSRCKLLYWNLDKENPSGCSECKCHKAGTVSGTGECRQGDGDCHCKSHVGGDSCDTCEDGYFALEKSNYFGCQGCQCDIGGALSSMCSGPSGVCQCREHVVGKVCQRPENNYYFPDLHHMKYEIEDGSTPNGRDLRFGFDPLAFPEFSWRGYAQMTSVQNDVRITLNVGKSSGSLFRVILRYVNPGTEAVSGHITIYPSWGAAQSKEIIFLPSKEPAFVTVPGNGFADPFSITPGIWVACIKAEGVLLDYLVLLPRDYYEASVLQLPVTEPCAYAGPPQENCLLYQHLPVTRFPCTLACEARHFLLDGEPRPVAVRQPTPAHPVMVDLSGREVELHLRLRIPQVGHYVVVVEYSTEAAQLFVVDVNVKSSGSVLAGQVNIYSCNYSVLCRSAVIDHMSRIAMYELLADADIQLKGHMARFLLHQVCIIPIEEFSAEYVRPQVHCIASYGRFVNQSATCVSLAHETPPTALILDVLSGRPFPHLPQQSSPSVDVLPGVTLKAPQNQVTLRGRVPHLGRYVFVIHFYQAAHPTFPAQVSVDGGWPRAGSFHASFCPHVLGCRDQVIAEGQIEFDISEPEVAATVKVPEGKSLVLVRVLVVPAENYDYQILHKKSMDKSLEFITNCGKNSFYLDPQTASRFCKNSARSLVAFYHKGALPCECHPTGATGPHCSPEGGQCPCQPNVIGRQCTRCATGHYGFPRCKPCSCGRRLCEEMTGQCRCPPRTVRPQCEVCETHSFSFHPMAGCEGCNCSRRGTIEAAMPECDRDSGQCRCKPRITGRQCDRCASGFYRFPECVPCNCNRDGTEPGVCDPGTGACLCKENVEGTECNVCREGSFHLDPANLKGCTSCFCFGVNNQCHSSHKRRTKFVDMLGWHLETADRVDIPVSFNPGSNSMVADLQELPATIHSASWVAPTSYLGDKVSSYGGYLTYQAKSFGLPGDMVLLEKKPDVQLTGQHMSIIYEETNTPRPDRLHHGRVHVVEGNFRHASSRAPVSREELMTVLSRLADVRIQGLYFTETQRLTLSEVGLEEASDTGSGRIALAVEICACPPAYAGDSCQGCSPGYYRDHKGLYTGRCVPCNCNGHSNQCQDGSGICVNCQHNTAGEHCERCQEGYYGNAVHGSCRACPCPHTNSFATGCVVNGGDVRCSCKAGYTGTQCERCAPGYFGNPQKFGGSCQPCSCNSNGQLGSCHPLTGDCINQEPKDSSPAEECDDCDSCVMTLLNDLATMGEQLRLVKSQLQGLSASAGLLEQMRHMETQAKDLRNQLLNYRSAISNHGSKIEGLERELTDLNQEFETLQEKAQVNSRKAQTLNNNVNRATQSAKELDVKIKNVIRNVHMLNRIRTWQKTHQGENNGLANSIRDSLNEYEAKLSDLRARLQEAAAQAKQANGLNQENERALGAIQRQVKEINSLQSDFTKYLTTADSSLLQTNIALQLMEKSQKEYEKLAASLNEARQELSDKVRELSRSAGKTSLVEEAEKHARSLQELAKQLEEIKRNASGDELVRCAVDAATAYENILNAIKAAEDAANRAASASESALQTVIKEDLPRKAKTLSSNSDKLLNEAKMTQKKLKQEVSPALNNLQQTLNIVTVQKEVIDTNLTTLRDGLHGIQRGDIDAMISSAKSMVRKANDITDEVLDGLNPIQTDVERIKDTYGRTQNEDFKKALTDADNSVNKLTNKLPDLWRKIESINQQLLPLGNISDNMDRIRELIQQARDAASKVAVPMRFNGKSGVEVRLPNDLEDLKGYTSLSLFLQRPNSRENGGTENMFVMYLGNKDASRDYIGMAVVDGQLTCVYNLGDREAELQVDQILTKSETKEAVMDRVKFQRIYQFARLNYTKGATSSKPETPGVYDMDGRNSNTLLNLDPENVVFYVGGYPPDFKLPSRLSFPPYKGCIELDDLNENVLSLYNFKKTFNLNTTEVEPCRRRKEESDKNYFEGTGYARVPTQPHAPIPTFGQTIQTTVDRGLLFFAENGDRFISLNIEDGKLMVRYKLNSELPKERGVGDAINNGRDHSIQIKIGKLQKRMWINVDVQNTIIDGEVFDFSTYYLGGIPIAIRERFNISTPAFRGCMKNLKKTSGVVRLNDTVGVTKKCSEDWKLVRSASFSRGGQLSFTDLGLPPTDHLQASFGFQTFQPSGILLDHQTWTRNLQVTLEDGYIELSTSDSGSPIFKSPQTYMDGLLHYVSVISDNSGLRLLIDDQLLRNSKRLKHISSSRQSLRLGGSNFEGCISNVFVQRLSLSPEVLDLTSNSLKRDVSLGGCSLNKPPFLMLLKGSTRFNKTKTFRINQLLQDTPVASPRSVKVWQDACSPLPKTQANHGALQFGDIPTSHLLFKLPQELLKPRSQFAVDMQTTSSRGLVFHTGTKNSFMALYLSKGRLVFALGTDGKKLRIKSKEKCNDGKWHTVVFGHDGEKGRLVVDGLRAREGSLPGNSTISIRAPVYLGSPPSGKPKSLPTNSFVGCLKNFQLDSKPLYTPSSSFGVSSCLGGPLEKGIYFSEEGGHVVLAHSVLLGPEFKLVFSIRPRSLTGILIHIGSQPGKHLCVYLEAGKVTASMDSGAGGTSTSVTPKQSLCDGQWHSVAVTIKQHILHLELDTDSSYTAGQIPFPPASTQEPLHLGGAPANLTTLRIPVWKSFFGCLRNIHVNHIPVPVTEALEVQGPVSLNGCPDQ

SEQ ID NO: 32179 - protein, 1668 aa, Homo sapiens
MPPAVRRSACSMGWLWIFGAALGQCLGYSSQQQRVPFLQPPGQSQLQASYVEFRPSQGCSPGYYRDHKGLYTGRCVPCNCNGHSNQCQDGSGICVNCQHNTAGEHCERCQEGYYGNAVHGSCRACPCPHTNSFATGCVVNGGDVRCSCKAGYTGTQCERCAPGYFGNPQKFGGSCQPCSCNSNGQLGSCHPLTGDCINQEPKDSSPAEECDDCDSCVMTLLNDLATMGEQLRLVKSQLQGLSASAGLLEQMRHMETQAKDLRNQLLNYRSAISNHGSKIEGLERELTDLNQEFETLQEKAQVNSRKAQTLNNNVNRATQSAKELDVKIKNVIRNVHMLNRIRTWQKTHQGENNGLANSIRDSLNEYEAKLSDLRARLQEAAAQAKQANGLNQENERALGAIQRQVKEINSLQSDFTKYLTTADSSLLQTNIALQLMEKSQKEYEKLAASLNEARQELSDKVRELSRSAGKTSLVEEAEKHARSLQELAKQLEEIKRNASGDELVRCAVDAATAYENILNAIKAAEDAANRAASASESALQTVIKEDLPRKAKTLSSNSDKLLNEAKMTQKKLKQEVSPALNNLQQTLNIVTVQKEVIDTNLTTLRDGLHGIQRGDIDAMISSAKSMVRKANDITDEVLDGLNPIQTDVERIKDTYGRTQNEDFKKALTDADNSVNKLTNKLPDLWRKIESINQQLLPLGNISDNMDRIRELIQQARDAASKVAVPMRFNGKSGVEVRLPNDLEDLKGYTSLSLFLQRPNSRENGGTENMFVMYLGNKDASRDYIGMAVVDGQLTCVYNLGDREAELQVDQILTKSETKEAVMDRVKFQRIYQFARLNYTKGATSSKPETPGVYDMDGRNSNTLLNLDPENVVFYVGGYPPDFKLPSRLSFPPYKGCIELDDLNENVLSLYNFKKTFNLNTTEVEPCRRRKEESDKNYFEGTGYARVPTQPHAPIPTFGQTIQTTVDRGLLFFAENGDRFISLNIEDGKLMVRYKLNSELPKERGVGDAINNGRDHSIQIKIGKLQKRMWINVDVQNTIIDGEVFDFSTYYLGGIPIAIRERFNISTPAFRGCMKNLKKTSGVVRLNDTVGVTKKCSEDWKLVRSASFSRGGQLSFTDLGLPPTDHLQASFGFQTFQPSGILLDHQTWTRNLQVTLEDGYIELSTSDSGSPIFKSPQTYMDGLLHYVSVISDNSGLRLLIDDQLLRNSKRLKHISSSRQSLRLGGSNFEGCISNVFVQRLSLSPEVLDLTSNSLKRDVSLGGCSLNKPPFLMLLKGSTRFNKTKTFRINQLLQDTPVASPRSVKVWQDACSPLPKTQANHGALQFGDIPTSHLLFKLPQELLKPRSQFAVDMQTTSSRGLVFHTGTKNSFMALYLSKGRLVFALGTDGKKLRIKSKEKCNDGKWHTVVFGHDGEKGRLVVDGLRAREGSLPGNSTISIRAPVYLGSPPSGKPKSLPTNSFVGCLKNFQLDSKPLYTPSSSFGVSSCLGGPLEKGIYFSEEGGHVVLAHSVLLGPEFKLVFSIRPRSLTGILIHIGSQPGKHLCVYLEAGKVTASMDSGAGGTSTSVTPKQSLCDGQWHSVAVTIKQHILHLELDTDSSYTAGQIPFPPASTQEPLHLGGAPANLTTLRIPVWKSFFGCLRNIHVNHIPVPVTEALEVQGPVSLNGCPDQ

SEQ ID NO: 32180 - protein, 486 aa, Homo sapiens
MTCGSYCGGRAFSCISACGPRPGRCCITAAPYRGISCYRGLTGGFGSHSVCGGFRAGSCGRSFGYRSGGVCGPSPPCITTVSVNESLLTPLNLEIDPNAQCVKQEEKEQIKSLNSRFAAFIDKVRFLEQQNKLLETKLQFYQNRECCQSNLEPLFEGYIETLRREAECVEADSGRLASELNHVQEVLEGYKKKYEEEVSLRATAENEFVALKKDVDCAYLRKSDLEANVEALIQEIDFLRRLYEEEIRVLQSHISDTSVVVKLDNSRDLNMDCIIAEIKAQYDDIVTRSRAEAESWYRSKCEEMKATVIRHGETLRRTKEEINELNRMIQRLTAEVENAKCQNSKLEAAVAQSEQQGEAALSDARCKLAELEGALQKAKQDMACLIREYQEVMNSKLGLDIEIATYRRLLEGEEQRLCEGVGSVNVCVSSSRGGVVCGDLCASTTAPVVSTRVSSVPSNSNVVVGTTNACAPSARVGVCGGSCKRC

SEQ ID NO: 32181 - protein, 493 aa, Homo sapiens
MTCGFNSIGCGFRPGNFSCVSACGPRPSRCCITAAPYRGISCYRGLTGGFGSHSVCGGFRAGSCGRSFGYRSGGVCGPSPPCITTVSVNESLLTPLNLEIDPNAQCVKQEEKEQIKSLNSRFAAFIDKVRFLEQQNKLLETKLQFYQNRECCQSNLEPLFAGYIETLRREAECVEADSGRLASELNHVQEVLEGYKKKYEEEVALRATAENEFVALKKDVDCAYLRKSDLEANVEALIQEIDFLRRLYEEEIRILQSHISDTSVVVKLDNSRDLNMDCIVAEIKAQYDDIATRSRAEAESWYRSKCEEMKATVIRHGETLRRTKEEINELNRMIQRLTAEVENAKCQNSKLEAAVAQSEQQGEAALSDARCKLAELEGALQKAKQDMACLIREYQEVMNSKLGLDIEIATYRRLLEGEEQRLCEGVEAVNVCVSSSRGGVVCGDLCVSGSRPVTGSVCSAPCNGNLVVSTGLCKPCGQLNTTCGGGSCGQGRH

SEQ ID NO: 32182 - protein, 467 aa, Homo sapiens
MATQTCTPTFSTGSIKGLCGTAGGISRVSSIRSVGSCRVPSLAGAAGYISSARSGLSGLGSCLPGSYLSSECHTSGFVGSGGWFCEGSFNGSEKETMQFLNDRLANYLEKVRQLERENAELESRIQEWYEFQIPYICPDYQSYFKTIEDFQQKILLTKSENARLVLQIDNAKLAADDFRTKYETELSLRQLVEADINGLRRILDELTLCKADLEAQVESLKEELMCLKKNHEEEVSVLRCQLGDRLNVEVDAAPPVDLNKILEDMRCQYEALVENNRRDVEAWFNTQTEELNQQVVSSSEQLQCCQTEIIELRRTVNALEIELQAQHSMRNSLESTLAETEARYSSQLAQMQCLISNVEAQLSEIRCDLERQNQEYQVLLDVKARLEGEIATYRHLLEGEDCKLPPQPCATACKPVIRVPSVPPVPCVPSVPCTPAPQVGTQIRTITEEIRDGKVISSREHVQSRPL

SEQ ID NO: 32183 - protein, 417 aa, Homo sapiens
MLRSGLSGLGSCLPGSYLSSECHTSGFVGSGGWFCEGSFNGSEKETMQFLNDRLANYLEKVRQLERENAELESRIQEWYEFQIPYICPDYQSYFKTIEDFQQKILLTKSENARLVLQIDNAKLAADDFRTKYETELSLRQLVEADINGLRRILDELTLCKADLEAQVESLKEELMCLKKNHEEEVSVLRCQLGDRLNVEVDAAPPVDLNKILEDMRCQYEALVENNRRDVEAWFNTQTEELNQQVVSSSEQLQCCQTEIIELRRTVNALEIELQAQHSMRNSLESTLAETEARYSSQLAQMQCLISNVEAQLSEIRCDLERQNQEYQVLLDVKARLEGEIATYRHLLEGEDCKLPPQPCATACKPVIRVPSVPPVPCVPSVPCTPAPQVGTQIRTITEEIRDGKVISSREHVQSRPL

SEQ ID NO: 32184 - protein, 1700 aa, Homo sapiens
MSSAQCPALVCVMSRLRFWGPWPLLMWQLLWLLVKEAQPLEWVKDPLQLTSNPLGPPESWSSHSSHFPRESPHAPTLPADPWDFDHLGPSASSEMPAPPQESTENLVPFLDTWDSAGEQPLEPEQFLASQQDLKDKLSPQERLPVSPKKLKKDPAQRWSLAEIIGITRQLSTPQSQKQTLQNEYSSTDTPYPGSLPPELRVKSDEPPGPSEQVGPSQFHLEPETQNPETLEDIQSSSLQQEAPAQLPQLLEEEPSSMQQEAPALPPESSMESLTLPNHEVSVQPPGEDQAYYHLPNITVKPADVEVTITSEPTNETESSQAQQETPIQFPEEVEPSATQQEAPIEPPVPPMEHELSISEQQQPVQPSESPREVESSPTQQETPGQPPEHHEVTVSPPGHHQTHHLASPSVSVKPPDVQLTIAAEPSAEVGTSLVHQEATTRLSGSGNDVEPPAIQHGGPPLLPESSEEAGPLAVQQETSFQSPEPINNENPSPTQQEAAAEHPQTAEEGESSLTHQEAPAQTPEFPNVVVAQPPEHSHLTQATVQPLDLGFTITPESKTEVELSPTMKETPTQPPKKVVPQLRVYQGVTNPTPGQDQAQHPVSPSVTVQLLDLGLTITPEPTTEVGHSTPPKRTIVSPKHPEVTLPHPDQVQTQHSHLTRATVQPLDLGFTITPKSMTEVEPSTALMTTAPPPGHPEVTLPPSDKGQAQHSHLTQATVQPLDLELTITTKPTTEVKPSPTTEETSTQPPDLGLAIIPEPTTETGHSTALEKTTAPRPDRVQTLHRSLTEVTGPPTELEPAQDSLVQSESYTQNKALTAPEEHKASTSTNICELCTCGDEMLSCIDLNPEQRLRQVPVPEPNTHNGTFTILNFQGNYISYIDGNVWKAYSWTEKLILRENNLTELHKDSFEGLLSLQYLDLSCNKIQSIERHTFEPLPFLKFINLSCNVITELSFGTFQAWHGMQFLHKLILNHNPLTTVEDPYLFKLPALKYLDMGTTLVPLTTLKNILMMTVELEKLILPSHMACCLCQFKNSIEAVCKTVKLHCNSACLTNTTHCPEEASVGNPEGAFMKVLQARKNYTSTELIVEPEEPSDSSGINLSGFGSEQLDTNDESDFISTLSYILPYFSAVNLDVKSLLLPFIKLPTTGNSLAKIQTVGQNRQRVKRVLMGPRSIQKRHFKEVGRQSIRREQGAQASVENAAEEKRLTSPAPREVEQPHTQQGPEKLAGNAVYTKPSFTQEHKAAVSVLKPFSKGTPSTSSPAKALPQVRDRSKDLTHAISILESAKARVTNTKTSKPIVHARKKYRFHKTRSHVTHRTTKVKKSPKVRKKSYLSRLMLANRLPFSAAKSLINSPSQGAFSSLGDLSPQENPFLEVSALSEHFIEKNNTKHTTARNAFEENDFMENTNMPEGTISENTNYNHPPEADSAGTAFNLGPTVKQTETKWEYNNVGTDLSPEPKSFNYPLLSSPGDQFEIQLTQQLQSLIPNNNVRRLIAHVIRTLKMDCSGAHVQVTCAKLISRTGHLMKLLSGQQEVKASKIEWDTDQWKIENYINESTEAQSEQKEKSLELKKEVPGYGYTDKLILALIVTGILTILIILFCLIVICCHRRSLQEDEEGFSRGIFRFLPWRGCSSRRESQDGLSSFGQPLWFKDLYKPLSATRINNHAWKLHKKSSNEDKILNRDPGDSEAPTEEEESEALP

SEQ ID NO: 32185 - protein, 735 aa, Homo sapiens
MPLAQLKEPWPLMELVPLDPENGQTSGEEAGLQPSKDEGVLKEISITHHVKAGSEKADPSHFELLKVLGQGSFGKVFLVRKVTRPDSGHLYAMKVLKKATLKVRDRVRTKMERDILADVNHPFVVKLHYAFQTEGKLYLILDFLRGGDLFTRLSKEVMFTEEDVKFYLAELALGLDHLHSLGIIYRDLKPENILLDEEGHIKLTDFGLSKEAIDHEKKAYSFCGTVEYMAPEVVNRQGHSHSADWWSYGVLMFEMLTGSLPFQGKDRKETMTLILKAKLGMPQFLSTEAQSLLRALFKRNPANRLGSGPDGAEEIKRHVFYSTIDWNKLYRREIKPPFKPAVAQPDDTFYFDTEFTSRTPKDSPGIPPSAGAHQLFRGFSFVATGLMEDDGKPRAPQAPLHSVVQQLHGKNLVFSDGYVVKETIGVGSYSECKRCVHKATNMEYAVKVIDKSKRDPSEEIEILLRYGQHPNIITLKDVYDDGKHVYLVTELMRGGELLDKILRQKFFSEREASFVLHTIGKTVEYLHSQGVVHRDLKPSNILYVDESGNPECLRICDFGFAKQLRAENGLLMTPCYTANFVAPEVLKRQGYDEGCDIWSLGILLYTMLAGYTPFANGPSDTPEEILTRIGSGKFTLSGGNWNTVSETAKDLVSKMLHVDPHQRLTAKQVLQHPWVTQKDKLPQSQLSHQDLQLVKGAMAATYSALNSSKPTPQLKPIESSILAQRRVRKLPSTTL

SEQ ID NO: 32186 - protein, 744 aa, Homo sapiens
MEQDPKPPRLRLWALIPWLPRKQRPRISQTSLPVPGPGSGPQRDSDEGVLKEISITHHVKAGSEKADPSHFELLKVLGQGSFGKVFLVRKVTRPDSGHLYAMKVLKKATLKVRDRVRTKMERDILADVNHPFVVKLHYAFQTEGKLYLILDFLRGGDLFTRLSKEVMFTEEDVKFYLAELALGLDHLHSLGIIYRDLKPENILLDEEGHIKLTDFGLSKEAIDHEKKAYSFCGTVEYMAPEVVNRQGHSHSADWWSYGVLMFEMLTGSLPFQGKDRKETMTLILKAKLGMPQFLSTEAQSLLRALFKRNPANRLGSGPDGAEEIKRHVFYSTIDWNKLYRREIKPPFKPAVAQPDDTFYFDTEFTSRTPKDSPGIPPSAGAHQLFRGFSFVATGLMEDDGKPRAPQAPLHSVVQQLHGKNLVFSDGYVVKETIGVGSYSECKRCVHKATNMEYAVKVIDKSKRDPSEEIEILLRYGQHPNIITLKDVYDDGKHVYLVTELMRGGELLDKILRQKFFSEREASFVLHTIGKTVEYLHSQGVVHRDLKPSNILYVDESGNPECLRICDFGFAKQLRAENGLLMTPCYTANFVAPEVLKRQGYDEGCDIWSLGILLYTMLAGYTPFANGPSDTPEEILTRIGSGKFTLSGGNWNTVSETAKDLVSKMLHVDPHQRLTAKQVLQHPWVTQKDKLPQSQLSHQDLQLVKGAMAATYSALNSSKPTPQLKPIESSILAQRRVRKLPSTTL

SEQ ID NO: 32187 - protein, 643 aa, Homo sapiens
MKVLKKATLKVRDRVRTKMERDILADVNHPFVVKLHYAFQTEGKLYLILDFLRGGDLFTRLSKEVMFTEEDVKFYLAELALGLDHLHSLGIIYRDLKPENILLDEEGHIKLTDFGLSKEAIDHEKKAYSFCGTVEYMAPEVVNRQGHSHSADWWSYGVLMFEMLTGSLPFQGKDRKETMTLILKAKLGMPQFLSTEAQSLLRALFKRNPANRLGSGPDGAEEIKRHVFYSTIDWNKLYRREIKPPFKPAVAQPDDTFYFDTEFTSRTPKDSPGIPPSAGAHQLFRGFSFVATGLMEDDGKPRAPQAPLHSVVQQLHGKNLVFSDGYVVKETIGVGSYSECKRCVHKATNMEYAVKVIDKSKRDPSEEIEILLRYGQHPNIITLKDVYDDGKHVYLVTELMRGGELLDKILRQKFFSEREASFVLHTIGKTVEYLHSQGVVHRDLKPSNILYVDESGNPECLRICDFGFAKQLRAENGLLMTPCYTANFVAPEVLKRQGYDEGCDIWSLGILLYTMLAGYTPFANGPSDTPEEILTRIGSGKFTLSGGNWNTVSETAKDLVSKMLHVDPHQRLTAKQVLQHPWVTQKDKLPQSQLSHQDLQLVKGAMAATYSALNSSKPTPQLKPIESSILAQRRVRKLPSTTL

SEQ ID NO: 32188 - protein, 719 aa, Homo sapiens
MQTPADFPRVERDLVPCPRKDEGVLKEISITHHVKAGSEKADPSHFELLKVLGQGSFGKVFLVRKVTRPDSGHLYAMKVLKKATLKVRDRVRTKMERDILADVNHPFVVKLHYAFQTEGKLYLILDFLRGGDLFTRLSKEVMFTEEDVKFYLAELALGLDHLHSLGIIYRDLKPENILLDEEGHIKLTDFGLSKEAIDHEKKAYSFCGTVEYMAPEVVNRQGHSHSADWWSYGVLMFEMLTGSLPFQGKDRKETMTLILKAKLGMPQFLSTEAQSLLRALFKRNPANRLGSGPDGAEEIKRHVFYSTIDWNKLYRREIKPPFKPAVAQPDDTFYFDTEFTSRTPKDSPGIPPSAGAHQLFRGFSFVATGLMEDDGKPRAPQAPLHSVVQQLHGKNLVFSDGYVVKETIGVGSYSECKRCVHKATNMEYAVKVIDKSKRDPSEEIEILLRYGQHPNIITLKDVYDDGKHVYLVTELMRGGELLDKILRQKFFSEREASFVLHTIGKTVEYLHSQGVVHRDLKPSNILYVDESGNPECLRICDFGFAKQLRAENGLLMTPCYTANFVAPEVLKRQGYDEGCDIWSLGILLYTMLAGYTPFANGPSDTPEEILTRIGSGKFTLSGGNWNTVSETAKDLVSKMLHVDPHQRLTAKQVLQHPWVTQKDKLPQSQLSHQDLQLVKGAMAATYSALNSSKPTPQLKPIESSILAQRRVRKLPSTTL

SEQ ID NO: 32189 - protein, 491 aa, Homo sapiens
MSLLMISENVKLAREYALLGNYDSAMVYYQGVLDQMNKYLYSVKDTYLQQKWQQVWQEINVEAKHVKDIMKTLESFKLDSTPLKAAQHDLPASEGEVWSMPVPVERRPSPGPRKRQSSQYSDPKSHGNRPSTTVRVHRSSAQNVHNDRGKAVRCREKKEQNKGREEKNKSPAAVTEPETNKFDSTGYDKDLVEALERDIISQNPNVRWDDIADLVEAKKLLKEAVVLPMWMPEFFKGIRRPWKGVLMVGPPGTGKTLLAKAVATECKTTFFNVSSSTLTSKYRGESEKLVRLLFEMARFYSPATIFIDEIDSICSRRGTSEEHEASRRVKAELLVQMDGVGGTSENDDPSKMVMVLAATNFPWDIDEALRRRLEKRIYIPLPSAKGREELLRISLRELELADDVDLASIAENMEGYSGADITNVCRDASLMAMRRRIEGLTPEEIRNLSKEEMHMPTTMEDFEMALKKVSKSVSAADIERYEKWIFEFGSC

SEQ ID NO: 32190 - protein, 311 aa, Homo sapiens
MSLLMISENVKLAREYALLGNYDSAMVYYQGVLDQMNKYLYSVKDTYLQQKWQQVWQEINVEAKHVKDIMKTLESFKLDSTPLKAAQHDLPASEGEVWSMPVPVERRPSPGPRKRQSSQYSDPKSHGNRPSTTVRVHRSSAQNVHNDRGKAVRCREKKEQNKGREEKGVLMVGPPGTGKTLLAKAVATECKTTFFNVSSSTLTSKYRGESEKLVRLLFEMARFYSPATIFIDEIDSICSRRGTSEEHEASRRVKAELLVQMDGVGGTSENDDPSKMVMVLAATNFPWDIDEALRRRLEKRIYIPLPSGMRP

SEQ ID NO: 32191 - protein, 567 aa, Homo sapiens
MKPVWVATLLWMLLLVPRLGAARKGSPEEASFYYGTFPLGFSWGVGSSAYQTEGAWDQDGKGPSIWDVFTHSGKGKVLGNETADVACDGYYKVQEDIILLRELHVNHYRFSLSWPRLLPTGIRAEQVNKKGIEFYSDLIDALLSSNITPIVTLHHWDLPQLLQVKYGGWQNVSMANYFRDYANLCFEAFGDRVKHWITFSDPRAMAEKGYETGHHAPGLKLRGTGLYKAAHHIIKAHAKAWHSYNTTWRSKQQGLVGISLNCDWGEPVDISNPKDLEAAERYLQFCLGWFANPIYAGDYPQVMKDYIGRKSAEQGLEMSRLPVFSLQEKSYIKGTSDFLGLGHFTTRYITERNYPSRQGPSYQNDRDLIELVDPNWPDLGSKWLYSVPWGFRRLLNFAQTQYGDPPIYVMENGASQKFHCTQLCDEWRIQYLKGYINEMLKAIKDGANIKGYTSWSLLDKFEWEKGYSDRYGFYYVEFNDRNKPRYPKASVQYYKKIIIANGFPNPREVESWYLKALETCSINNQMLAAEPLLSHMQMVTEIVVPTVCSLCVLITAVLLMLLLRRQS

SEQ ID NO: 32192 - protein, 394 aa, Homo sapiens
MANYFRDYANLCFEAFGDRVKHWITFSDPRAMAEKGYETGHHAPGLKLRGTGLYKAAHHIIKAHAKAWHSYNTTWRSKQQGLVGISLNCDWGEPVDISNPKDLEAAERYLQFCLGWFANPIYAGDYPQVMKDYIGRKSAEQGLEMSRLPVFSLQEKSYIKGTSDFLGLGHFTTRYITERNYPSRQGPSYQNDRDLIELVDPNWPDLGSKWLYSVPWGFRRLLNFAQTQYGDPPIYVMENGASQKFHCTQLCDEWRIQYLKGYINEMLKAIKDGANIKGYTSWSLLDKFEWEKGYSDRYGFYYVEFNDRNKPRYPKASVQYYKKIIIANGFPNPREVESWYLKALETCSINNQMLAAEPLLSHMQMVTEIVVPTVCSLCVLITAVLLMLLLRRQS

SEQ ID NO: 32193 - protein, 463 aa, Homo sapiens
MVPALRYLVGACGRARGLFAGGSPGACGFASGRPRPLCGGSRSASTSSFDIVIVGGGIVGLASARALILRHPSLSIGVLEKEKDLAVHQTGHNSGVIHSGIYYKPESLKAKLCVQGAALLYEYCQQKGISYKQCGKLIVAVEQEEIPRLQALYEKGLQNGVPGLRLIQQEDIKKKEPYCRGLMAIDCPHTGIVDYRQVALSFAQDFQEAGGSVLTNFEVKGIEMAKESPSRSIDGMQYPIVIKNTKGEEIRCQYVVTCAGLYSDRISELSGCTPDPRIVPFRGDYLLLKPEKCYLVKGNIYPVPDSRFPFLGVHFTPRMDGSIWLGPNAVLAFKREGYRPFDFSATDVMDIIINSGLIKLASQNFSYGVTEMYKACFLGATVKYLQKFIPEITISDILRGPAGVRAQALDRDGNLVEDFVFDAGVGDIGNRILHVRNAPSPAATSSIAISGMIADEVQQRFEL

SEQ ID NO: 32194 - protein, 441 aa, Homo sapiens
MVPALRYLVGACGRARGLFAGGSPGACGFASGRPRPLCGGSRSASTSSFDIVIVGGGIVGLASARALILRHPSLSIGVLEKEKDLAVHQTGHNSGVIHSGIYYKPESLKAKLCVQGAALLYEYCQQKGISYKQCGKLIVAVEQEEIPRLQALYEKGLQNGVPGLRLIQQEDIKKKEPYCRGLMAIDCPHTGIVDYRQVALSFAQDFQEAGGSVLTNFEVKGIEMAKESPSRSIDGMQYPIVIKNTKGEEIRCQYVVTCAGLYSDRISELSGCTPDPRIVPFRGDYLLLKPEKCYLVKGNIYPVPDSRFPFLGVHFTPRMDGSIWLGPNAVLAFKREGYRPFDFSATDVMDIIINSGLIKLASQNFSYGVTEMYKACFLGATVKYLQKFIPEITISDILRQVAVRGPSWLWQQPMKVSDNNIYCFLWRCFALLLTGSTCSFK

SEQ ID NO: 32195 - protein, 923 aa, Homo sapiens [sequence omitted]

SEQ ID NO: 32196 - protein, 877 aa, Homo sapiens
MDRAALRAAAMGEKKEGGGGGDAAAAEGGAGAAASRALQQCGQLQKLIDISIGSLRGLRTKCAVSNDLTQQEIRTLEAKLVRYICKQRQCKLSVAPGERTPELNSYPRFSDWLYTFNVRPEVVQEIPRDLTLDALLEMNEAKVKETLRRCGASGDECGRLQYALTCLRKVTGLGGEHKEDSSWSSLDARRESGSGPSTDTLSAASLPWPPGSSQLGRAGNSAQGPRSISVSALPASDSPTPSFSEGLSDTCIPLHASGRLTPRALHSFITPPTTPQLRRHTKLKPPRTPPPPSRKVFQLLPSFPTLTRSKSHESQLGNRIDDVSSMRFDLSHGSPQMVRRDIGLSVTHRFSTKSWLSQVCHVCQKSMIFGVKCKHCRLKCHNKCTKEAPACRISFLPLTRLRRTESVPSDINNPVDRAAEPHFGTLPKALTKKEHPPAMNHLDSSSNPSSTTSSTPSSPAPFPTSSNPSSATTPPNPSPGQRDSRFNFPAAYFIHHRQQFIFPDISAFAHAAPLPEAADGTRLDDQPKADVLEAHEAEAEEPEAGKSEAEDDEDEVDDLPSSRRPWRGPISRKASQTSVYLQEWDIPFEQVELGEPIGQGRWGRVHRGRWHGEVAIRLLEMDGHNQDHLKLFKKEVMNYRQTRHENVVLFMGACMNPPHLAIITSFCKGRTLHSFVRDPKTSLDINKTRQIAQEIIKGMGYLHAKGIVHKDLKSKNVFYDNGKVVITDFGLFGISGVVREGRRENQLKLSHDWLCYLAPEIVREMTPGKDEDQLPFSKAADVYAFGTVWYELQARDWPLKNQAAEASIWQIGSGEGMKRVLTSVSLGKEVSEILSACWAFDLQERPSFSLLMDMLEKLPKLNRRLSHPGHFWKSAEL

SEQ ID NO: 32197 - protein, 786 aa, Homo sapiens
MNEAKVKETLRRCGASGDECGRLQYALTCLRKVTGLGGEHKEDSSWSSLDARRESGSGPSTDTLSAASLPWPPGSSQLGRAGNSAQGPRSISVSALPASDSPTPSFSEGLSDTCIPLHASGRLTPRALHSFITPPTTPQLRRHTKLKPPRTPPPPSRKVFQLLPSFPTLTRSKSHESQLGNRIDDVSSMRFDLSHGSPQMVRRDIGLSVTHRFSTKSWLSQVCHVCQKSMIFGVKCKHCRLKCHNKCTKEAPACRISFLPLTRLRRTESVPSDINNPVDRAAEPHFGTLPKALTKKEHPPAMNHLDSSSNPSSTTSSTPSSPAPFPTSSNPSSATTPPNPSPGQRDSRFNFPAAYFIHHRQQFIFPVPSAGHCWKCLLIAESLKENAFNISAFAHAAPLPEAADGTRLDDQPKADVLEAHEAEAEEPEAGKSEAEDDEDEVDDLPSSRRPWRGPISRKASQTSVYLQEWDIPFEQVELGEPIGQGRWGRVHRGRWHGEVAIRLLEMDGHNQDHLKLFKKEVMNYRQTRHENVVLFMGACMNPPHLAIITSFCKGRTLHSFVRDPKTSLDINKTRQIAQEIIKGMGYLHAKGIVHKDLKSKNVFYDNGKVVITDFGLFGISGVVREGRRENQLKLSHDWLCYLAPEIVREMTPGKDEDQLPFSKAADVYAFGTVWYELQARDWPLKNQAAEASIWQIGSGEGMKRVLTSVSLGKEVSEILSACWAFDLQERPSFSLLMDMLEKLPKLNRRLSHPGHFWKSADINSSKVVPRFERFGLGVLESSNPKM

SEQ ID NO: 32198 - protein, 762 aa, Homo sapiens
MNEAKVKETLRRCGASGDECGRLQYALTCLRKVTGLGGEHKEDSSWSSLDARRESGSGPSTDTLSAASLPWPPGSSQLGRAGNSAQGPRSISVSALPASDSPTPSFSEGLSDTCIPLHASGRLTPRALHSFITPPTTPQLRRHTKLKPPRTPPPPSRKVFQLLPSFPTLTRSKSHESQLGNRIDDVSSMRFDLSHGSPQMVRRDIGLSVTHRFSTKSWLSQVCHVCQKSMIFGVKCKHCRLKCHNKCTKEAPACRISFLPLTRLRRTESVPSDINNPVDRAAEPHFGTLPKALTKKEHPPAMNHLDSSSNPSSTTSSTPSSPAPFPTSSNPSSATTPPNPSPGQRDSRFNFPAAYFIHHRQQFIFPVPSAGHCWKCLLIAESLKENAFNISAFAHAAPLPEAADGTRLDDQPKADVLEAHEAEAEEPEAGKSEAEDDEDEVDDLPSSRRPWRGPISRKASQTSVYLQEWDIPFEQVELGEPIGQGRWGRVHRGRWHGEVAIRLLEMDGHNQDHLKLFKKEVMNYRQTRHENVVLFMGACMNPPHLAIITSFCKGRTLHSFVRDPKTSLDINKTRQIAQEIIKGMGYLHAKGIVHKDLKSKNVFYDNGKVVITDFGLFGISGVVREGRRENQLKLSHDWLCYLAPEIVREMTPGKDEDQLPFSKAADVYAFGTVWYELQARDWPLKNQAAEASIWQIGSGEGMKRVLTSVSLGKEVSEILSACWAFDLQERPSFSLLMDMLEKLPKLNRRLSHPGHFWKSAEL

SEQ ID NO: 32199 - protein, 136 aa, Homo sapiens
MVVGTGTSLALSSLLSLLLFAGMQMYSRQLASTEWLTIQGGLLGSGLFVFSLTAFNNLENLVFGKGFQAKIFPEILLCLLLALFASGLIHRVCVTTCFIFSMVGLYYINKISSTLYQAAAPVLTPAKVTGKSKKRN

SEQ ID NO: 32200 - protein, 162 aa, Homo sapiens
MRIANRTRFSSPFLARGAGWTHGRGMMVVGTGTSLALSSLLSLLLFAGMQMYSRQLASTEWLTIQGGLLGSGLFVFSLTAFNNLENLVFGKGFQAKIFPEILLCLLLALFASGLIHRVCVTTCFIFSMVGLYYINKISSTLYQAAAPVLTPAKVTGKSKKRN

SEQ ID NO: 32201 - protein, 635 aa, Homo sapiens
MASSGMADSANHLPFFFGNITREEAEDYLVQGGMSDGLYLLRQSRNYLGGFALSVAHGRKAHHYTIERELNGTYAIAGGRTHASPADLCHYHSQESDGLVCLLKKPFNRPQGVQPKTGPFEDLKENLIREYVKQTWNLQGQALEQAIISQKPQLEKLIATTAHEKMPWFHGKISREESEQIVLIGSKTNGKFLIRARDNNGSYALCLLHEGKVLHYRIDKDKTGKLSIPEGKKFDTLWQLVEHYSYKADGLLRVLTVPCQKIGTQGNVNFGGRPQLPGSHPATWSAGGIISRIKSYSFPKPGHRKSSPAQGNRQESTVSFNPYEPELAPWAADKGPQREALPMDTEVYESPYADPEEIRPKEVYLDRKLLTLEDKELGSGNFGTVKKGYYQMKKVVKTVAVKILKNEANDPALKDELLAEANVMQQLDNPYIVRMIGICEAESWMLVMEMAELGPLNKYLQQNRHVKDKNIIELVHQVSMGMKYLEESNFVHRDLAARNVLLVTQHYAKISDFGLSKALRADENYYKAQTHGKWPVKWYAPECINYYKFSSKSDVWSFGVLMWEAFSYGQKPYRGMKGSEVTAMLEKGERMGCPAGCPREMYDLMNLCWTYDVENRPGFAAVELRLRNYYYDVVN

SEQ ID NO: 32202 - protein, 612 aa, Homo sapiens
MASSGMADSANHLPFFFGNITREEAEDYLVQGGMSDGLYLLRQSRNYLGGFALSVAHGRKAHHYTIERELNGTYAIAGGRTHASPADLCHYHSQESDGLVCLLKKPFNRPQGVQPKTGPFEDLKENLIREYVKQTWNLQGQALEQAIISQKPQLEKLIATTAHEKMPWFHGKISREESEQIVLIGSKTNGKFLIRARDNNGSYALCLLHEGKVLHYRIDKDKTGKLSIPEGKKFDTLWQLVEHYSYKADGLLRVLTVPCQKIGTQGNVNFGGRPQLPGSHPASSPAQGNRQESTVSFNPYEPELAPWAADKGPQREALPMDTEVYESPYADPEEIRPKEVYLDRKLLTLEDKELGSGNFGTVKKGYYQMKKVVKTVAVKILKNEANDPALKDELLAEANVMQQLDNPYIVRMIGICEAESWMLVMEMAELGPLNKYLQQNRHVKDKNIIELVHQVSMGMKYLEESNFVHRDLAARNVLLVTQHYAKISDFGLSKALRADENYYKAQTHGKWPVKWYAPECINYYKFSSKSDVWSFGVLMWEAFSYGQKPYRGMKGSEVTAMLEKGERMGCPAGCPREMYDLMNLCWTYDVENRPGFAAVELRLRNYYYDVVN

SEQ ID NO: 32203 - protein, 404 aa, Homo sapiens
MPYNFCLPSLSCRTSCSSRPCVPPSCHGYTLPGACNIPANVSNCNWFCEGSFNGSEKETMQFLNDRLASYLEKVRQLERDNAELENLIRERSQQQEPLLCPSYQSYFKTIEELQQKILCSKSENARLVVQIDNAKLAADDFRTKYQTEQSLRQLVESDINSLRRILDELTLCRSDLEAQMESLKEELLSLKQNHEQEVNTLRCQLGDRLNVEVDAAPAVDLNQVLNETRNQYEALVETNRREVEQWFATQTEELNKQVVSSSEQLQSYQAEIIELRRTVNALEIELQAQHNLRYSLENTLTESEARYSSQLSQVQSLITNVESQLAEIRSDLERQNQEYQVLLDVRARLECEINTYRSLLESEDCKLPSNPCATTNACEKPIGSCVTNPCGPRSRCGPCNTFGY

SEQ ID NO: 32204 - protein, 630 aa, Homo sapiens
MALPTARPLLGSCGTPALGSLLFLLFSLGWVQPSRTLAGETGQEAAPLDGVLANPPNISSLSPRQLLGFPCAEVSGLSTERVRELAVALAQKNVKLSTEQLRCLAHRLSEPPEDLDALPLDLLLFLNPDAFSGPQACTRFFSRITKANVDLLPRGAPERQRLLPAALACWGVRGSLLSEADVRALGGLACDLPGRFVAESAEVLLPRLVSCPGPLDQDQQEAARAALQGGGPPYGPPSTWSVSTMDALRGLLPVLGQPIIRSIPQGIVAAWRQRSSRDPSWRQPERTILRPRFRREVEKTACPSGKKAREIDESLIFYKKWELEACVDAALLATQMDRVNAIPFTYEQLDVLKHKLDELYPQGYPESVIQHLGYLFLKMSPEDIRKWNVTSLETLKALLEVNKGHEMSPQAPRRPLPQVATLIDRFVKGRGQLDKDTLDTLTAFYPGYLCSLSPEELSSVPPSSIWAVRPQDLDTCDPRQLDVLYPKARLAFQNMNGSEYFVKIQSFLGGAPTEDLKALSQQNVSMDLATFMKLRTDAVLPLTVAEVQKLLGPHVEGLKAEERHRPVRDWILRQRQDDLDTLGLGLQGGIPNGYLVLDLSMQEALSGTPCLLGPGPVLTVLALLLASTLA

SEQ ID NO: 32205 - protein, 622 aa, Homo sapiens
MALPTARPLLGSCGTPALGSLLFLLFSLGWVQPSRTLAGETGQEAAPLDGVLANPPNISSLSPRQLLGFPCAEVSGLSTERVRELAVALAQKNVKLSTEQLRCLAHRLSEPPEDLDALPLDLLLFLNPDAFSGPQACTRFFSRITKANVDLLPRGAPERQRLLPAALACWGVRGSLLSEADVRALGGLACDLPGRFVAESAEVLLPRLVSCPGPLDQDQQEAARAALQGGGPPYGPPSTWSVSTMDALRGLLPVLGQPIIRSIPQGIVAAWRQRSSRDPSWRQPERTILRPRFRREVEKTACPSGKKAREIDESLIFYKKWELEACVDAALLATQMDRVNAIPFTYEQLDVLKHKLDELYPQGYPESVIQHLGYLFLKMSPEDIRKWNVTSLETLKALLEVNKGHEMSPQVATLIDRFVKGRGQLDKDTLDTLTAFYPGYLCSLSPEELSSVPPSSIWAVRPQDLDTCDPRQLDVLYPKARLAFQNMNGSEYFVKIQSFLGGAPTEDLKALSQQNVSMDLATFMKLRTDAVLPLTVAEVQKLLGPHVEGLKAEERHRPVRDWILRQRQDDLDTLGLGLQGGIPNGYLVLDLSMQEALSGTPCLLGPGPVLTVLALLLASTLA

SEQ ID NO: 32206 - protein, 656 aa, Homo sapiens [sequence omitted]

SEQ ID NO: 32207 - protein, 621 aa, Homo sapiens
MALPTARPLLGSCGTPALGSLLFLLFSLGWVQPSRTLAGETGQAAPLDGVLANPPNISSLSPRQLLGFPCAEVSGLSTERVRELAVALAQKNVKLSTEQLRCLAHRLSEPPEDLDALPLDLLLFLNPDAFSGPQACTRFFSRITKANVDLLPRGAPERQRLLPAALACWGVRGSLLSEADVRALGGLACDLPGRFVAESAEVLLPRLVSCPGPLDQDQQEAARAALQGGGPPYGPPSTWSVSTMDALRGLLPVLGQPIIRSIPQGIVAAWRQRSSRDPSWRQPERTILRPRFRREVEKTACPSGKKAREIDESLIFYKKWELEACVDAALLATQMDRVNAIPFTYEQLDVLKHKLDELYPQGYPESVIQHLGYLFLKMSPEDIRKWNVTSLETLKALLEVNKGHEMSPQVATLIDRFVKGRGQLDKDTLDTLTAFYPGYLCSLSPEELSSVPPSSIWAVRPQDLDTCDPRQLDVLYPKARLAFQNMNGSEYFVKIQSFLGGAPTEDLKALSQQNVSMDLATFMKLRTDAVLPLTVAEVQKLLGPHVEGLKAEERHRPVRDWILRQRQDDLDTLGLGLQGGIPNGYLVLDLSMQEALSGTPCLLGPGPVLTVLALLLASTLA

SEQ ID NO: 32208 - protein, 623 aa, Homo sapiens
MKQPNRKRKLNMDSKERLDQDGRLEQAEEEKKPKDSTTPLSHVPSAAAQGAWSWEWYLKEQKAVAAPVELFSKDQSFPEHENGFQIGMRLEGIDPRHPSVFCVLSVAEVCGYRLRLHFDGYLSCYDFWTNAGSPDIHPVGWCEKTKHELHIPKGYRKDKFVWMDYLKACKLQNAPKKLFRNRSPNGPMSKEFQVGMKLEAVDRKNPSLVCVATIADIVEDRLLVHFDNWDDSYDYWCDVNSPYVQPVGWCQENGRTLIAPQGYPNPENFSWTEYLEATQTNAVPAKVFKMRLPHGFLPNMKLEVVDKRNPRLIRVATIVDVDDQRVKVHFDGWDHKYDYWVEADSPDIHPIGWCDVTGHPLEVPQRTNDLKILPGQAVCPTPGCRGIGHIRGPRYSGHHSAFGCPYSDMNLKKEATLHDRLREQTQANLESDSSHSKSKSLCSLNFNGKHEKVNSQPRLVQQAKCLKIKGKEDIDLDNLFRVLVLHPRGLEYSVEQAQQVLHQSVSMSTVSAHPFRDLPLGREQHCKLLPGVADIRASQVARWTVDEVAEFVQSLLGCEEHAKCFKKEQIDGKAFLLLTQTDIVKVMKIKLGPALKIYNSILMFRHSQELPEEDIASGQEVRG

SEQ ID NO: 32209 - protein, 534 aa, Homo sapiens
MKQPNRKRKLNMDSKERLDQDGRLEQAEEEKKPKDSTTPLSHVPSAAAQGAWSWEWYLKEQKAVAAPVELFSKDQSFPEHENGFQIGMRLEGIDPRHPSVFCVLSVAEVCGYRLRLHFDGYLSCYDFWTNAGSPDIHPVGWCEKTKHELHIPKGYRKDKFVWMDYLKACKLQNAPKKLFRNRSPNGPMSKEFQVGMKLEAVDRKNPSLVCVATIADIVEDRLLVHFDNWDDSYDYWCDVNSPYVQPVGWCQENGRTLIAPQGYPNPENFSWTEYLEATQTNAVPAKVFKMRLPHGFLPNMKLEVVDKRNPRLIRVATIVDVDDQRVKVHFDGWDHKYDYWVEADSPDIHPIGWCDVTGHPLEVPQRTNDLKILPGQAVCPTPGCRGIGHIRGPRYSGHHSAFGCPYSDMNLKKEATLHDRLREQTQANLESDSSHSKSKSLCSLNFNGKHEKVNSQPRLVQQAKCLKIKGKEDIDLDNLFRGRVRWLMPVIPALWEAEAGRSRDQEIKTILANAVKPRLYQKYKKLARRGGGCL

SEQ ID NO: 32210 - protein, 583 aa, Homo sapiens
MAAAAVSESWPELELAERERRRELLLTGPGLEERVRAAGGQLPPRLFTLPLLHYLEVSGCGSLRAPGPGLAQGLPQLHSLVLRRNALGPGLSPELGPLPALRVLDLSGNALEALPPGQGLGPAEPPGLPQLQSLNLSGNRLRELPADLARCAPRLQSLNLTGNCLDSFPAELFRPGALPLLSELAAADNCLRELSPDIAHLASLKTLDLSNNQLSEIPAELADCPKLKEINFRGNKLRDKRLEKMVSGCQTRSILEYLRVGGRGGGKGKGRAEGSEKEESRRKRRERKQRREGGDGEEQDVGDAGRLLLRVLHVSENPVPLTVRVSPEVRDVRPYIVGAVVRGMDLQPGNALKRFLTSQTKLHEDLCEKRTAATLATHELRAVKGPLLYCARPPQDLKIVPLGRKEAKAKELVRQLQLEAEEQRKQKKRQSVSGLHRYLHLLDGNENYPCLVDADGDVISFPPITNSEKTKVKKTTSDLFLEVTSATSLQICKDVMDALILKMAEMKKYTLENKEEGSLSDTEADAVSGQLPDPTTNPSAGKDGPSLLVVEQVRVVDLEGSLKVVYPSKADLATAPPHVTVVR

SEQ ID NO: 32211 - protein, 371 aa, Homo sapiens
MEEAGAAVVTAGEAELNWSRLSVSTETLESELEARGEERRGAREALLRLLLPHNRLVSLPRALGSGFPHLQLLDVSGNALTALGPELLALRGLRTLLAKNNRLGGPSALPKGLAQSPLCRSLQVLNLSGNCFQEVPASLLELRALQTLSLGGNQLQSIPAEIENLQSLECLYLGGNFIKEIPPELGNLPSLNYLVLCDNKIQSIPPQLSQLHSLRSLSLHNNLLTYLPREILNLIHLEELSLRGNPLVVRFVRDLTYDPPTLLELAARTIKIRNISYTPYDLPGNLLRYLGSASNCPNPKCGGVYFDCCVRQIKFVDFCGKYRLPLMHYLCSPECSSPCSSASHSSTSQSESDSEDEASVAARRMQKVLLG

SEQ ID NO: 32212 - protein, 759 aa, Homo sapiens
MESSPFNRRQWTSLSLRVTAKELSLVNKNKSSAIVEIFSKYQKAAEETNMEKKRSNTENLSQHFRKGTLTVLKKKWENPGLGAESHTDSLRNSSTEIRHRADHPPAEVTSHAASGAKADQEEQIHPRSRLRSPPEALVQGRYPHIKDGEDLKDHSTESKKMENCLGESRHEVEKSEISENTDASGKIEKYNVPLNRLKMMFEKGEPTQTKILRAQSRSASGRKISENSYSLDDLEIGPGQLSSSTFDSEKNESRRNLELPRLSETSIKDRMAKYQAAVSKQSSSTNYTNELKASGGEIKIHKMEQKENVPPGPEVCITHQEGEKISANENSLAVRSTPAEDDSRDSQVKSEVQQPVHPKPLSPDSRASSLSESSPPKAMKKFQAPARETCVECQKTVYPMERLLANQQVFHISCFRCSYCNNKLSLGTYASLHGRIYCKPHFNQLFKSKGNYDEGFGHRPHKDLWASKNENEEILERPAQLANARETPHSPGVEDAPIAKVGVLAASMEAKASSQQEKEDKPAETKKLRIAWPPPTELGSSGSALEEGIKMSKPKWPPEDEISKPEVPEDVDLDLKKLRRSSSLKERSRPFTVAASFQSTSVKSPKTVSPPIRKGWSMSEQSEESVGGRVAERKQVENAKASKKNGNVGKTTWQNKESKGETGKRSKEGHSLEMENENLVENGADSDEDDNSFLKQQSPQEPKSLNWSSFVDNTFAEEFTTQNQKSQDVELWEGEVVKELSVEEQIKRNRYYDEDEDEE

SEQ ID NO: 32213 - protein, 599 aa, Homo sapiens
MENCLGESRHEVEKSEISENTDASGKIEKYNVPLNRLKMMFEKGEPTQTKILRAQSRSASGRKISENSYSLDDLEIGPGQLSSSTFDSEKNESRRNLELPRLSETSIKDRMAKYQAAVSKQSSSTNYTNELKASGGEIKIHKMEQKENVPPGPEVCITHQEGEKISANENSLAVRSTPAEDDSRDSQVKSEVQQPVHPKPLSPDSRASSLSESSPPKAMKKFQAPARETCVECQKTVYPMERLLANQQVFHISCFRCSYCNNKLSLGTYASLHGRIYCKPHFNQLFKSKGNYDEGFGHRPHKDLWASKNENEEILERPAQLANARETPHSPGVEDAPIAKVGVLAASMEAKASSQQEKEDKPAETKKLRIAWPPPTELGSSGSALEEGIKMSKPKWPPEDEISKPEVPEDVDLDLKKLRRSSSLKERSRPFTVAASFQSTSVKSPKTVSPPIRKGWSMSEQSEESVGGRVAERKQVENAKASKKNGNVGKTTWQNKESKGETGKRSKEGHSLEMENENLVENGADSDEDDNSFLKQQSPQEPKSLNWSSFVDNTFAEEFTTQNQKSQDVELWEGEVVKELSVEEQIKRNRYYDEDEDEE

SEQ ID NO: 32214 - protein, 457 aa, Homo sapiens
MEQKENVPPGPEVCITHQEGEKISANENSLAVRSTPAEDDSRDSQVKSEVQQPVHPKPLSPDSRASSLSESSPPKAMKKFQAPARETCVECQKTVYPMERLLANQQVFHISCFRCSYCNNKLSLGTYASLHGRIYCKPHFNQLFKSKGNYDEGFGHRPHKDLWASKNENEEILERPAQLANARETPHSPGVEDAPIAKVGVLAASMEAKASSQQEKEDKPAETKKLRIAWPPPTELGSSGSALEEGIKMSKPKWPPEDEISKPEVPEDVDLDLKKLRRSSSLKERSRPFTVAASFQSTSVKSPKTVSPPIRKGWSMSEQSEESVGGRVAERKQVENAKASKKNGNVGKTTWQNKESKGETGKRSKEGHSLEMENENLVENGADSDEDDNSFLKQQSPQEPKSLNWSSFVDNTFAEEFTTQNQKSQDVELWEGEVVKELSVEEQIKRNRYYDEDEDEE

SEQ ID NO: 32215 - protein, 760 aa, Homo sapiens
MESSPFNRRQWTSLSLRVTAKELSLVNKNKSSAIVEIFSKYQKAAEETNMEKKRSNTENLSQHFRKGTLTVLKKKWENPGLGAESHTDSLRNSSTEIRHRADHPPAEVTSHAASGAKADQEEQIHPRSRLRSPPEALVQGRYPHIKDGEDLKDHSTESKKMENCLGESRHEVEKSEISENTDASGKIEKYNVPLNRLKMMFEKGEPTQTKILRAQSRSASGRKISENSYSLDDLEIGPGQLSSSTFDSEKNESRRNLELPRLSETSIKDRMAKYQAAVSKQSSSTNYTNELKASGGEIKIHKMEQKENVPPGPEVCITHQEGEKISANENSLAVRSTPAEDDSPGDSQVKSEVQQPVHPKPLSPDSRASSLSESSPPKAMKKFQAPARETCVECQKTVYPMERLLANQQVFHISCFRCSYCNNKLSLGTYASLHGRIYCKPHFNQLFKSKGNYDEGFGHRPHKDLWASKNENEEILERPAQLANARETPHSPGVEDAPIAKVGVLAASMEAKASSQQEKEDKPAETKKLRIAWPPPTELGSSGSALEEGIKMSKPKWPPEDEISKPEVPEDVDLDLKKLRRSSSLKERSRPFTVAASFQSTSVKSPKTVSPPIRKGWSMSEQSEESVGGRVAERKQVENAKASKKNGNVGKTTWQNKESKGETGKRSKEGHSLEMENENLVENGADSDEDDNSFLKQQSPQEPKSLNWSSFVDNTFAEEFTTQNQKSQDVELWEGEVVKELSVEEQIKRNRYYDEDEDEE

SEQ ID NO: 32216 - protein, 600 aa, Homo sapiens
MENCLGESRHEVEKSEISENTDASGKIEKYNVPLNRLKMMFEKGEPTQTKILRAQSRSASGRKISENSYSLDDLEIGPGQLSSSTFDSEKNESRRNLELPRLSETSIKDRMAKYQAAVSKQSSSTNYTNELKASGGEIKIHKMEQKENVPPGPEVCITHQEGEKISANENSLAVRSTPAEDDSPGDSQVKSEVQQPVHPKPLSPDSRASSLSESSPPKAMKKFQAPARETCVECQKTVYPMERLLANQQVFHISCFRCSYCNNKLSLGTYASLHGRIYCKPHFNQLFKSKGNYDEGFGHRPHKDLWASKNENEEILERPAQLANARETPHSPGVEDAPIAKVGVLAASMEAKASSQQEKEDKPAETKKLRIAWPPPTELGSSGSALEEGIKMSKPKWPPEDEISKPEVPEDVDLDLKKLRRSSSLKERSRPFTVAASFQSTSVKSPKTVSPPIRKGWSMSEQSEESVGGRVAERKQVENAKASKKNGNVGKTTWQNKESKGETGKRSKEGHSLEMENENLVENGADSDEDDNSFLKQQSPQEPKSLNWSSFVDNTFAEEFTTQNQKSQDVELWEGEVVKELSVEEQIKRNRYYDEDEDEE

SEQ ID NO: 32217 - protein, 159 aa, Homo sapiens
MAGPGWTLLLLLLLLLLLGSMAGYGPQKKLNLSHKGIGEPCRRHEECQSNCCTINSLAPHTLCTPKTIFLQCLPWRKPNGYRCSHDSECQSSCCVRNNSPQELCTPQSVFLQCVPWRKPNGDFCSSHQECHSQCCIQLREYSPFRCIPRTGILAQCLPL

SEQ ID NO: 32218 - protein, 640 aa, Homo sapiens
MLNKMTLHPQQIMIGPRFNRALFDPLLVVLLALQLLVVAGLVRAQTCPSVCSCSNQFSKVICVRKNLREVPDGISTNTRLLNLHENQIQIIKVNSFKHLRHLEILQLSRNHIRTIEIGAFNGLANLNTLELFDNRLTTIPNGAFVYLSKLKELWLRNNPIESIPSYAFNRIPSLRRLDLGELKRLSYISEGAFEGLSNLRYLNLAMCNLREIPNLTPLIKLDELDLSGNHLSAIRPGSFQGLMHLQKLWMIQSQIQVIERNAFDNLQSLVEINLAHNNLTLLPHDLFTPLHHLERIHLHHNPWNCNCDILWLSWWIKDMAPSNTACCARCNTPPNLKGRYIGELDQNYFTCYAPVIVEPPADLNVTEGMAAELKCRASTSLTSVSWITPNGTVMTHGAYKVRIAVLSDGTLNFTNVTVQDTGMYTCMVSNSVGNTTASATLNVTAATTTPFSYFSTVTVETMEPSQDEARTTDNNVGPTPVVDWETTNVTTSLTPQSTRSTEKTFTIPVTDINSGIPGIDEVMKTTKIIIGCFVAITLMAAVMLVIFYKMRKQHHRQNHHAPTRTVEIINVDDEITGDTPMESHLPMPAIEHEHLNHYNSYKSPFNHTTTVNTINSIHSSVHEPLLIRMNSKDNVQETQI

SEQ ID NO: 32219 - protein, 139 aa, Homo sapiens
MLPLSLLKTAQNHPMLVELKNGETYNGHLVSCDNWMNINLREVICTSRDGDKFWRMPECYIRGSTIKYLRIPDEIIDMVKEEVVAKGRGRGGLQQQKQQKGRGMGGAGRGVFGGRGRGGIPGTGRGQPEKKPGRQAGKQ

SEQ ID NO: 32220 - protein, 287 aa, Homo sapiens
MSWDPNPVPRTLRCWRLRRASETALQSSRRAVEDQLKICGHRRDADVFELFLSKKELTEVIDLSRFKKLKYLWLHHNKLHGITFLTRNYCLTELYLNNNAIFEIEGLHYLPSLHILLLHHNELTNIDATVKELKGMLNLKILSLYQNPLCQYNLYRLYIIYHLPGVELLDRNQVTEKERRSMITIFNHKKAHIVQSIAFGGKVDASWDPKSPFKQKPAQRVPSDFAFANNVDKTVLDDPEDAVFVRSMKRSVMTLTSMNWDTVPTREERYLEEEGTETAQMLTVTLR

SEQ ID NO: 32221 - protein, 80 aa, Homo sapiens
MSLRKQTPSDFLKQIIGRPVVVKLNSGVDYRGVLACLDGYMNIALEQTEEYVNGQLKNKYGDAFIRGNNVLYISTQKRRM

SEQ ID NO: 32222 - protein, 1394 aa, Homo sapiens
MAALLRSARWLLRAGAAPRLPLSLRLLPGGPGRLHAASYLPAARAGPVAGGLLSPARLYAIAAKEKDIQEESTFSSRKISNQFDWALMRLDLSVRRTGRIPKKLLQKVFNDTCRSGGLGGSHALLLLRSCGSLLPELKLEERTEFAHRIWDTLQKLGAVYDVSHYNALLKVYLQNEYKFSPTDFLAKMEEANIQPNRVTYQRLIASYCNVGDIEGASKILGFMKTKDLPVTEAVFSALVTGHARAGDMENAENILTVMRDAGIEPGPDTYLALLNAYAEKGDIDHVKQTLEKVEKSELHLMDRDLLQIIFSFSKAGYPQYVSEILEKVTCERRYIPDAMNLILLLVTEKLEDVALQILLACPVSKEDGPSVFGSFFLQHCVTMNTPVEKLTDYCKKLKEVQMHSFPLQFTLHCALLANKTDLAKALMKAVKEEGFPIRPHYFWPLLVGRRKEKNVQGIIEILKGMQELGVHPDQETYTDYVIPCFDSVNSARAILQENGCLSDSDMFSQAGLRSEAANGNLDFVLSFLKSNTLPISLQSIRSSLLLGFRRSMNINLWSEITELLYKDGRYCQEPRGPTEAVGYFLYNLIDSMSDSEVQAKEEHLRQYFHQLEKMNVKIPENIYRGIRNLLESYHVPELIKDAHLLVESKNLDFQKTVQLTSSELESTLETLKAENQPIRDVLKQLILVLCSEENMQKALELKAKYESDMVTGGYAALINLCCRHDKVEDALNLKEEFDRLDSSAVLDTGKYVGLVRVLAKHGKLQDAINILKEMKEKDVLIKDTTALSFFHMLNGAALRGEIETVKQLHEAIVTLGLAEPSTNISFPLVTVHLEKGDLSTALEVAIDCYEKYKVLPRIHDVLCKLVEKGETDLIQKAMDFVSQEQGEMVMLYDLFFAFLQTGNYKEAKKIIETPGIRARSARLQWFCDRCVANNQVETLEKLVELTQKLFECDRDQMYYNLLKLYKINGDWQRADAVWNKIQEENVIPREKTLRLLAEILREGNQEVPFDVPELWYEDEKHSLNSSSASTTEPDFQKDILIACRLNQKKGAYDIFLNAKEQNIVFNAETYSNLIKLLMSEDYFTQAMEVKAFAETHIKGFTLNDAANSRLIITQVRRDYLKEAVTTLKTVLDQQQTPSRLAVTRVIQALAMKGDVENIEVVQKMLNGLEDSIGLSKMVFINNIALAQIKNNNIDAAIENIENMLTSENKVIEPQYFGLAYLFRKVIEEQLEPAVEKISIMAERLANQFAIYKPVTDFFLQLVDAGKVDDARALLQRCGAIAEQTPILLLFLLRNSRKQGKASTVKSVLELIPELNEKEEAYNSLMKSYVSEKDVTSAKALYEHLTAKNTKLDDLFLKRYASLLKYAGEPVPFIEPPESFEFYAQQLRKLRENSS

SEQ ID NO: 32223 - protein, 1043 aa, Homo sapiens
MPLLEGSVGVEDLVLLEPLVEESLLKNLQLRYENKEIYTYIGNVVISVNPYQQLPIYGPEFIAKYQDYTFYELKPHIYALANVAYQSLRDRDRDQCILITGESGSGKTEASKLVMSYVAAVCGKGEQVNSVKEQLLQSNPVLEAFGNAKTIRNNNSSRFGKYMDIEFDFKGSPLGGVITNYLLEKSRLVKQLKGERNFHIFYQLLAGADEQLLKALKLERDTTGYAYLNHEVSRVDGMDDASSFRAVQSAMAVIGFSEEEIRQVLEVTSMVLKLGNVLVADEFQASGIPASGIRDGRGVREIGEMVGLNSEEVERALCSRTMETAKEKVVTALNVMQAQYARDALAKNIYSRLFDWIVNRINESIKVGIGEKKKVMGVLDIYGFEILEDNSFEQFVINYCNEKLQQVFIEMTLKEEQEEYKREGIPWTKVDYFDNGIICKLIEHNQRGILAMLDEECLRPGVVSDSTFLAKLNQLFSKHGHYESKVTQNAQRQYDHTMGLSCFRICHYAGKVTYNVTSFIDKNNDLLFRDLLQAMWKAQHPLLRSLFPEGNPKQASLKRPPTAGAQFKSSVAILMKNLYSKSPNYIRCIKPNEHQQRGQFSSDLVATQARYLGLLENVRVRRAGYAHRQGYGPFLERYRLLSRSTWPHWNGGDREGVEKVLGELSMSSGELAFGKTKIFIRSPKTLFYLEEQRRLRLQQLATLIQKIYRGWRCRTHYQLMRKSQILISSWFRGNMQKKCYGKIKASVLLIQAFVRGWKARKNYRKYFRSEAALTLADFIYKSMVQKFLLGLKNNLPSTNVLDKTWPAAPYKCLSTANQELQQLFYQWKCKRFRDQLSPKQVEILREKLCASELFKGKKASYPQSVPIPFCGDYIGLQGNPKLQKLKGGEEGPVLMAEAVKKVNRGNGKTSSRILLLTKGHVILTDTKKSQAKIVIGLDNVAGVSVTSLKDGLFSLHLSEMSSVGSKGDFLLVSEHVIELLTKMYRAVLDATQRQLTVTVTEKFSVRFKENSVAVKVVQGPAGGDNSKLRYKKKGSHCLEVTVQ

SEQ ID NO: 32224 - protein, 386 aa, Homo sapiens
MEELDALLEELERSTLQDSDEYSNPAPLPLDQHSRKETNLDETSEILSIQDNTSPLPAQLVYTTNIQELNVYSEAQEPKESPPPSKTSAAAQLDELMAHLTEMQAKVAVRADAGKKHLPDKQDHKASLDSMLGGLEQELQDLGIATVPKGHCASCQKPIAGKVIHALGQSWHPEHFVCTHCKEEIGSSPFFERSGLAYCPNDYHQLFSPRCAYCAAPILDKVLTAMNQTWHPEHFFCSHCGEVFGAEGFHEKDKKPYCRKDFLAMFSPKCGGCNRPVLENYLSAMDTVWHPECFVCGDCFTSFSTGSFFELDGRPFCELHYHHRRGTLCHGCGQPITGRCISAMGYKFHPEHFVCAFCLTQLSKGIFREQNDKTYCQPCFNKLFPL

SEQ ID NO: 32225 - protein, 391 aa, Homo sapiens
MSTLLISSSDALLEELERSTLQDSDEYSNPAPLPLDQHSRKETNLDETSEILSIQDNTSPLPAQLVYTTNIQELNVYSEAQEPKESPPPSKTSAAAQLDELMAHLTEMQAKVAVRADAGKKHLPDKQDHKASLDSMLGGLEQELQDLGIATVPKGHCASCQKPIAGKVIHALGQSWHPEHFVCTHCKEEIGSSPFFERSGLAYCPNDYHQLFSPRCAYCAAPILDKVLTAMNQTWHPEHFFCSHCGEVFGAEGFHEKDKKPYCRKDFLAMFSPKCGGCNRPVLENYLSAMDTVWHPECFVCGDCFTSFSTGSFFELDGRPFCELHYHHRRGTLCHGCGQPITGRCISAMGYKFHPEHFVCAFCLTQLSKGIFREQNDKTYCQPCFNKLFPL

SEQ ID NO: 32226 - protein, 574 aa, Homo sapiens
MALARGSRQLGALVWGACLCVLVHGQQAQPGQGSDPARWRQLIQWENNGQVYSLLNSGSEYVPAGPQRSESSSRVLLAGAPQAQQRRSHGSPRRRQAPSLPLPGRVGSDTVRGQARHPFGFGQVPDNWREVAVGDSTGMARARTSVSQQRHGGSASSVSASAFASTYRQQPSYPQQFPYPQAPFVSQYENYDPASRTYDQGFVYYRPAGGGVGAGAAAVASAGVIYPYQPRARYEEYGGGEELPEYPPQGFYPAPERPYVPPPPPPPDGLDRRYSHSLYSEGTPGFEQAYPDPGPEAAQAHGGDPRLGWYPPYANPPPEAYGPPRALEPPYLPVRSSDTPPPGGERNGAQQGRLSVGSVYRPNQNGRGLPDLVPDPNYVQASTYVQRAHLYSLRCAAEEKCLASTAYAPEATDYDVRVLLRFPQRVKNQGTADFLPNRPRHTWEWHSCHQHYHSMDEFSHYDLLDAATGKKVAEGHKASFCLEDSTCDFGNLKRYACTSHTQGLSPGCYDTYNADIDCQWIDITDVQPGNYILKVHVNPKYIVLESDFTNNVVRCNIHYTGRYVSATNCKIVQS

SEQ ID NO: 32227 - protein, 310 aa, Homo sapiens
MGNQVEKLTHLSYKEVPTADPTGVDRDDGPRIGVSYIFSNDDEDVEPQPPPQGPDGGGLPDGGDGPPPPQPQPYDPRLHEVECSVFYRDECIYQKSFAPGSAALSTYTPENLLNKCKPGDLVEFVSQAQYPHWAVYVGNFQVVHLHRLEVINSFLTDASQGRRGRVVNDLYRYKPLSSSAVVRNALAHVGAKERELSWRNSESFAAWCRYGKREFKIGGELRIGKQPYRLQIQLSAQRSHTLEFQSLEDLIMEKRRNDQIGRAAVLQELATHLHPAEPEEGDSNVARTTPPPGRPPAPSSEEEDGEAVAH

SEQ ID NO: 32228 - protein, 638 aa, Homo sapiens
MVVSADPLSSERAEMNILEINQELRSQLAESNQQFRDLKEKFLITQATAYSLANQLKKYKCEEYKDIIDSVLRDELQSMEKLAEKLRQAEELRQYKALVHSQAKELTQLREKLREGRDASRWLNKHLKTLLTPDDPDKSQGQDLREQLAEGHRLAEHLVHKLSPENDEDEDEDEDDKDEEVEKVQESPAPREVQKTEEKEVPQDSLEECAVTCSNSHNPSNSNQPHRSTKITFKEHEVDSALVVESEHPHDEEEEALNIPPENQNDHEEEEGKAPVPPRHHDKSNSYRHREVSFLALDEQKVCSAQDVARDYSNPKWDETSLGFLEKQSDLEEVKGQETVAPRLSRGPLRVDKHEIPQESLDGCCLTPSILPDLTPSYHPYWSTLYSFEDKQVSLALVDKIKKDQEEIEDQSPPCPRLSQELPEVKEQEVPEDSVNEVYLTPSVHHDVSDCHQPYSSTLSSLEDQLACSALDVASPTEAACPQGTWSGDLSHHQSEVQVSQAQLEPSTLVPSCLRLQLDQGFHCGNGLAQRGLSSTTCSFSANADSGNQWPFQELVLEPSLGMKNPPQLEDDALEGSASNTQGRQVTGRIRASLVLILKTIRRRLPFSKWRLAFRFAGPHAESAEIPNTAGRTQRMAG

SEQ ID NO: 32229 - protein, 638 aa, Homo sapiens
MVVSADPLSSERAEMNILEINQELRSQLAESNQQFRDLKEKFLITQATAYSLANQLKKYKCEEYKDIIDSVLRDELQSMEKLAEKLRQAEELRQYKALVHSQAKELTQLREKLREGRDASRWLNKHLKTLLTPDDPDKSQGQDLREQLAEGHRLAEHLVHKLSPENDEDEDEDEDDKDEEVEKVQESPAPREVQKTEEKEVPQDSLEECAVTCSNSHNPSNSNQPHRSTKITFKEHEVDSALVVESEHPHDEEEEALNIPPENQNDHEEEEGKAPVPPRHHDKSNSYRHREVSFLALDEQKVCSAQDVARDYSNPKWDETSLGFLEKQSDLEEVKGQETVAPRLSRGPLRVDKHEIPQESLDGCCLTPSILPDLTPSYHPYWSTLYSFEDKQVSLALVDKIKKDQEEIEDQSPPCPRLSQELPEVKEQEVPEDSVNEVYLTPSVHHDVSDCHQPYSSTLSSLEDQLACSALDVASPTEAACPQGTWSGDLSHHRSEVQISQAQLEPSTLVPSCLRLQLDQGFHCGNGLAQRGLSSTTCSFSANADSGNQWPFQELVLEPSLGMKNPPQLEDDALEGSASNTQGRQVTGRIRASLVLILKTIRRRLPFSKWRLAFRFAGPHAESAEIPNTAERMQRMIG

SEQ ID NO: 32230 - protein, 667 aa, Homo sapiens
MVVSADPLSSERAEMNILEINQELRSQLAESNQQFRDLKEKFLITQATAYSLANQLKKYKCEEYKDIIDSVLRDELQSMEKLAEKLRQAEELRQYKALVHSQAKELTQLREKLREGRDASRWLNKHLKTLLTPDDPDKSQGQDLREQLAEGHRLAEHLVHKLSPENDEDEDEDEDDKDEEVEKVQESPAPREVQKTEEKEVPQDSLEECAVTCSNSHNPSNSNQPHRSTKITFKEHEVDSALVVESEHPHDEEEEALNIPPENQNDHEEEEGKAPVPPRNRQSLEPGELTNLRDFLISPVVSHVANPGHHDKSNSYRHREVSFLALDEQKVCSAQDVARDYSNPKWDETSLGFLEKQSDLEEVKGQETVAPRLSRGPLRVDKHEIPQESLDGCCLTPSILPDLTPSYHPYWSTLYSFEDKQVSLALVDKIKKDQEEIEDQSPPCPRLSQELPEVKEQEVPEDSVNEVYLTPSVHHDVSDCHQPYSSTLSSLEDQLACSALDVASPTEAACPQGTWSGDLSHHRSEVQISQAQLEPSTLVPSCLRLQLDQGFHCGNGLAQRGLSSTTCSFSANADSGNQWPFQELVLEPSLGMKNPPQLEDDALEGSASNTQGRQVTGRIRASLVLILKTIRRRLPFSKWRLAFRFAGPHAESAEIPNTAERMQRMIG

SEQ ID NO: 32231 - protein, 372 aa, Homo sapiens [sequence omitted]

SEQ ID NO: 32232 - protein, 352 aa, Homo sapiens
MNTTSSAAPPSLGVEFISLLAIILLSVALAVGLPGNSFVVWSILKRMQKRSVTALMVLNLALADLAVLLTAPFFLHFLAQGTWSFGLAGCRLCHYVCGVSMYASVLLITAMSLDRSLAVARPFVSQKLRTKAMARRVLAGIWVLSFLLATPVLAYRTVVPWKTNMSLCFPRYPSEGHRAFHLIFEAVTGFLLPFLAVVASYSDIGRRLQARRFRRSRRTGRLVVLIILTFAAFWLPYHVVNLAEAGRALAGQAAGLGLVGKRLSLARNVLIALAFLSSSVNPVLYACAGGGLLRSAGVGFVAKLLEGTGSEASSTRRGGSLGQTARSGPAALEPGPSESLTASSPLKLNELN

SEQ ID NO: 32233 - protein, 1111 aa, Homo sapiens
MVVSAGPWSSEKAEMNILEINEKLRPQLAENKQQFGNLKERCFLTQLAGFLANRQKKYKYEECKDLIKFMLRNERQFKEEKLAEQLKQAEELRQYKVLVHSQERELTQLKEKLREGRDASRSLNEHLQALLTPDEPDKSQGQDLQEQLAEGCRLAQHLVQKLSPENDEDEDEDVQVEEDEKVLESSAPREVQKAEESKVAEDSLEECAITCSNSHGPCDSNQPHKNIKITFEEDEVNSTLVVDRESSHDECQDALNILPVPGPTSSATNVSMVVSAGPLSSEKAEMNILEINEKLRPQLAEKKQQFRNLKEKCFLTQLAGFLANQQNKYKYEECKDLIKFMLRNERQFKEEKLAEQLKQAEELRQYKVLVHAQERELTQLREKLREGRDASRSLNEHLQALLTPDEPDKSQGQDLQEQLAEGCRLAQHLVQKLSPENDNDDDEDVQIEVAEKVQKSSAPREMQKAEEKEVPEDSLEECAITYSNSHGPYDSNQPHRKTKITFEEDKVDSTLIGSSSHVEREDAVHIIPENESDDEEEEEKGPVSPRNLQESEEEEVPQESWDEGYSTPSIPPEMLASYKSYSSTFHSLEEQQVCMAVDIGRHRWDQVKKEDQEATGPRLSRELLDEKGPEVLQDSLDRCYSTPSGCLELTDSCQPYRSAFYVLEQQRVGLAVDMDEIEKYQEVEEDQDPSCPRLSRELLDEKEPEVLQDSLGRWYSTPSGYLELPDLGQPYSSAVYSLEEQYLGLALDLDRIKKDQEEEEDQGPPCPRLSRELLEVVEPEVLQDSLDRCYSTPSSCLEQPDSCQPYGSSFYALEEKHVGFSLDVGEIEKKGKGKKRRGRRSKKKRRRGRKEGEENQNPPCPRLSRELLDEKEPEVLQDSLDRCYSTPSGYLELPDLGQPYSSAVYSLEEQYLGLALDVDRIKKDQEEEEDQGPPCPRLSRELLEVVEPEVLQDSLDRCYSTPSSCLEQPDSCQPYGSSFYALEEKHVGFSLDVGEIEKKGKGKKRRGRRSKKERRRGRKEGEEDQNPPCPRLNGVLMEVEEPEVLQDSLDGCYSTPSMYFELPDSFQHYRSVFYSFEEQHISFALYVDNRFFTLTVTSLHLVFQMEVIFPQ

SEQ ID NO: 32234 - protein, 942 aa, Homo sapiens
MVVSAGPWSSEKAEMNILEINEKLRPQLAENKQQFGNLKERCFLTQLAGFLANRQKKYKYEECKDLIKFMLRNERQFKEEKLAEQLKQAEELRQYKVLVHSQERELTQLKEKLREGRDASRSLNEHLQALLTPDEPDKSQGQDLQEQLAEGCRLAQHLVQKLSPENDEDEDEDVQVEEDEKVLESSAPREVQKAEESKVAEDSLEECAITCSNSHGPCDSNQPHKNIKITFEEDEVNSTLVVDRESSHDECQDALNILPVPGPTSSATNVSMVVSAGPLSSEKAEMNILEINEKLRPQLAEKKQQFRNLKEKCFLTQLAGFLANQQNKYKYEECKDLIKFMLRNERQFKEEKLAEQLKQAEELRQYKVLVHAQERELTQLREKLREGRDASRSLNEHLQALLTPDEPDKSQGQDLQEQLAEGCRLAQHLVQKLSPENDNDDDEDVQIEVAEKVQKSSAPREMQKAEEKEVPEDSLEECAITYSNSHGPYDSNQPHRKTKITFEEDKVDSTLIGSSSHVEREDAVHIIPENESDDEEEEEKGPVSPRNLQESEEEEVPQESWDEGYSTPSIPPEMLASYKSYSSTFHSLEEQQVCMAVDIGRHRWDQVKKEDQEATGPRLSRELLDEKGPEVLQDSLDRCYSTPSGCLELTDSCQPYRSAFYVLEQQRVGLAVDMDEIEKYQEVEEDQDPSCPRLSRELLDEKEPEVLQDSLGRWYSTPSGYLELPDLGQPYSSAVYSLEEQYLGLALDLDRIKKDQEEEEDQGPPCPRLSRELLEVVEPEVLQDSLDRCYSTPSSCLEQPDSCQPYGSSFYALEEKHVGFSLDVGEIEKKGKGKKRRGRRSKKERRRGRKEGEEDQNPPCPRLNGVLMEVEEPEVLQDSLDGCYSTPSMYFELPDSFQHYRSVFYSFEEQHISFALYVDNRFFTLTVTSLHLVFQMEVIFPQ

SEQ ID NO: 32235 - protein, 460 aa, Homo sapiens [sequence omitted]

SEQ ID NO: 32236 - protein, 481 aa, Homo sapiens
MLLKCLHNNLCQKYSAHAFQFSPRNVLWLLVVCLRSDNKRPCLEFSQLSVKDSFRDLFIPRIETILMMYTRNNLNCAEPLFEQNNSLNVNFNTQKKTVWLIHGYRPVGSIPLWLQNFVRILLNEEDMNVIVVDWSRGATTFIYNRAVKNTRKVAVSLSVHIKNLLKHGASLDNFHFIGVSLGAHISGFVGKIFHGQLGRITGLDPAGPRFSRKPPYSRLDYTDAKFVDVIHSDSNGLGIQEPLGHIDFYPNGGNKQPGCPKSIFSGIQFIKCNHQRAVHLFMASLETNCNFISFPCRSYKDYKTSLCVDCDCFKEKSCPRLGYQAKLFKGVLKERMEGRPLRTTVFLDTSGTYPFCTYYFVLSIIVPDKTMMDGSFSFKLLNQLGMIEEPRLYEKNKPFYKLQEVKILAQFYNDFVNISSIGLTYFQSSNLQCSTCTYKIQSLMLKSLTYPERPPLCRYNIVLKDREEVFLNPNTCTPKNT

SEQ ID NO: 32237 - protein, 454 aa, Homo sapiens
MRVYIFLCLMCWVRSDNKRPCLEFSQLSVKDSFRDLFIPRIETILMMYTRNNLNCAEPLFEQNNSLNVNFNTQKKTVWLIHGYRPVGSIPLWLQNFVRILLNEEDMNVIVVDWSRGATTFIYNRAVKNTRKVAVSLSVHIKNLLKHGASLDNFHFIGVSLGAHISGFVGKIFHGQLGRITGLDPAGPRFSRKPPYSRLDYTDAKFVDVIHSDSNGLGIQEPLGHIDFYPNGGNKQPGCPKSIFSGIQFIKCNHQRAVHLFMASLETNCNFISFPCRSYKDYKTSLCVDCDCFKEKSCPRLGYQAKLFKGVLKERMEGRPLRTTVFLDTSAYYFVLSIIVPDKTMMDGSFSFKLLNQLGMIEEPRLYEKNKPFYKLQEVKILAQFYNDFVNISSIGLTYFQSSNLQCSTCTYKIQSLMLKSLTYPERPPLCRYNIVLKDREEVFLNPNTCTPKNT

SEQ ID NO: 32238 - protein, 425 aa, Homo sapiens
MRVYIFLCLMCWVRSDNKRPCLEFSQLSVKDSFRDLFIPRIETILMMYTRNNLNCAEPLFEQNNSLNVNFNTQKKTVWLIHGYRPVGSIPLWLQNFVRILLNEEDMNVIVVDWSRGATTFIYNRAVKNTRKVAVSLSVHIKNLLKHGASLDNFHFIGVSLGAHISGFVGKIFHGQLGRITGLDPAGPRFSRKPPYSRLDYTDAKFVDVIHSDSNGLGIQEPLGHIDFYPNGGNKQPGCPKSIFSDYKTSLCVDCDCFKEKSCPRLGYQAKLFKGVLKERMEGRPLRTTVFLDTSGTYPFCTYYFVLSIIVPDKTMMDGSFSFKLLNQLGMIEEPRLYEKNKPFYKLQEVKILAQFYNDFVNISSIGLTYFQSSNLQCSTCTYKIQSLMLKSLTYPERPPLCRYNIVLKDREEVFLNPNTCTPKNT

SEQ ID NO: 32239 - protein, 430 aa, Homo sapiens
MRVYIFLCLMCWVRSDNKRPCLEFSQLSVKDSFRDLFIPRIETILMMYTRNNLNCAEPLFEQNNSLNVNFNTQKKTVWLIHGYRPVGSIPLWLQNFVRILLNEEDMNVIVVDWSRGATTFIYNRAVKNTRKVAVSLSVHIKNLLKHGASLDNFHFIGVSLGAHISGFVGKIFHGQLGRITGLDPAGPRFSRKPPYSRLDYTDAKFVDVIHSDSNGIQFIKCNHQRAVHLFMASLETNCNFISFPCRSYKDYKTSLCVDCDCFKEKSCPRLGYQAKLFKGVLKERMEGRPLRTTVFLDTSGTYPFCTYYFVLSIIVPDKTMMDGSFSFKLLNQLGMIEEPRLYEKNKPFYKLQEVKILAQFYNDFVNISSIGLTYFQSSNLQCSTCTYKIQSLMLKSLTYPERPPLCRYNIVLKDREEVFLNPNTCTPKNT

SEQ ID NO: 32240 - protein, 375 aa, Homo sapiens
MRVYIFLCLMCWVRSDNKRPCLEFSQLSVKDSFRDLFIPRIETILMMYTRNNLNCAEPLFEQNNSLNVNFNTQKKTVWLIHGYRPVGSIPLWLQNFVRILLNEEDMNVIVVDWSRGATTFIYNRAVKNTRKVAVSLSVHIKNLLKHGASLDNFHFIGVSLGAHISGFVGKIFHGQLGRITGLDPAGPRFSRKPPYSRLDYTDAKFVDVIHSDSNGLGIQEPLGHIDFYPNGGNKQPGCPKSIFSGIQFIKCNHQRAVHLFMASLETNCNFISFPCRSYKDYKTSLCVDCDCFKEKSCPRLGYQAKLFKGVLKERMEGRPLRTTVFLDTSGTYPFCNHHFAGIILYLKNERKCFLIQTHVHQRTHKMPSSIKCTCL

SEQ ID NO: 32241 - protein, 368 aa, Homo sapiens
MRVYIFLCLMCWVRSDNKRPCLEFSQLSVKDSFRDLFIPRIETILMMYTRNNLNCAEPLFEQNNSLNVNFNTQKKTVWLIHGYRPVGSIPLWLQNFVRILLNEEDMNVIVVDWSRGATTFIYNRAVKNTRKVAVSLSVHIKNLLKHGASLDNFHFIGVSLGAHISGFVGKIFHGQLGRITGLDPAGPRFSRKPPYSRLDYTDAKFVDVIHSDSNGLGIQEPLGHIDFYPNGGNKQPGCPKSIFSGIQFIKCNHQRAVHLFMASLETNCNFISFPCRSYKDYKTSLCVDCDCFKEKSCPRLGYQAKLFKGVLKERMEGRPLRTTVFLDTSGTYPFCNKPVFRIYLFNTSPYPLLAGRLFHLSCLRVVKN

SEQ ID NO: 32242 - protein, 295 aa, Homo sapiens
MRVYIFLCLMCWVRSGLDPAGPRFSRKPPYSRLDYTDAKFVDVIHSDSNGLGIQEPLGHIDFYPNGGNKQPGCPKSIFSGIQFIKCNHQRAVHLFMASLETNCNFISFPCRSYKDYKTSLCVDCDCFKEKSCPRLGYQAKLFKGVLKERMEGRPLRTTVFLDTSGTYPFCTYYFVLSIIVPDKTMMDGSFSFKLLNQLGMIEEPRLYEKNKPFYKLQEVKILAQFYNDFVNISSIGLTYFQSSNLQCSTCTYKIQSLMLKSLTYPERPPLCRYNIVLKDREEVFLNPNTCTPKNT

SEQ ID NO: 32243 - protein, 524 aa, Homo sapiens
MSQGSPGDWAPLDPTPGPPASPNPFVHELHLSRLQRVKFCLLGALLAPIRVLLAFIVLFLLWPFAWLQVAGLSEEQLQEPITGWRKTVCHNGVLGLSRLLFFLLGFLRIRVRGQRASRLQAPVLVAAPHSTFFDPIVLLPCDLPKVVSRAENLSVPVIGALLRFNQAILVSRHDPASRRRVVEEVRRRATSGGKWPQVLFFPEGTCSNKKALLKFKPGAFIAGVPVQPVLIRYPNSLDTTSWAWRGPGVLKVLWLTASQPCSIVDVEFLPVYHPSPEESRDPTLYANNVQRVMAQALGIPATECEFVGSLPVIVVGRLKVALEPQLWELGKVLRKAGLSAGYVDAGAEPGRSRMISQEEFARQLQLSDPQTVAGAFGYFQQDTKGLVDFRDVALALAALDGGRSLEELTRLAFELFAEEQAEGPNRLLYKDGFSTILHLLLGSPHPAATALHAELCQAGSSQGLSLCQFQNFSLHDPLYGKLFSTYLRPPHTSRGTSQTPNASSPGNPTALANGTVQAPKQKGD

SEQ ID NO: 32244 - protein, 1303 aa, Homo sapiens
MPGPRGAAGGLAPEMRGAGAAGLLALLLLLLLLLLGLGGRVEGGPAGERGAGGGGALARERFKVVFAPVICKRTCLKGQCRDSCQQGSNMTLIGENGHSTDTLTGSGFRVVVCPLPCMNGGQCSSRNQCLCPPDFTGRFCQVPAGGAGGGTGGSGPGLSRTGALSTGALPPLAPEGDSVASKHAIYAVQVIADPPGPGEGPPAQHAAFLVPLGPGQISAEVQAPPPVVNVRVHHPPEASVQVHRIESSNAESAAPSQHLLPHPKPSHPRPPTQKPLGRCFQDTLPKQPCGSNPLPGLTKQEDCCGSIGTAWGQSKCHKCPQLQYTGVQKPGPVRGEVGADCPQGYKRLNSTHCQDINECAMPGVCRHGDCLNNPGSYRCVCPPGHSLGPSRTQCIADKPEEKSLCFRLVSPEHQCQHPLTTRLTRQLCCCSVGKAWGARCQRCPTDGTAAFKEICPAGKGYHILTSHQTLTIQGESDFSLFLHPDGPPKPQQLPESPSQAPPPEDTEEERGVTTDSPVSEERSVQQSHPTATTTPARPYPELISRPSPPTMRWFLPDLPPSRSAVEIAPTQVTETDECRLNQNICGHGECVPGPPDYSCHCNPGYRSHPQHRYCVDVNECEAEPCGPGRGICMNTGGSYNCHCNRGYRLHVGAGGRSCVDLNECAKPHLCGDGGFCINFPGHYKCNCYPGYRLKASRPPVCEDIDECRDPSSCPDGKCENKPGSFKCIACQPGYRSQGGGACRDVNECAEGSPCSPGWCENLPGSFRCTCAQGYAPAPDGRSCLDVDECEAGDVCDNGICSNTPGSFQCQCLSGYHLSRDRSHCEDIDECDFPAACIGGDCINTNGSYRCLCPQGHRLVGGRKCQDIDECSQDPSLCLPHGACKNLQGSYVCVCDEGFTPTQDQHGCEEVEQPHHKKECYLNFDDTVFCDSVLATNVTQQECCCSLGAGWGDHCEIYPCPVYSSAEFHSLCPDGKGYTQDNNIVNYGIPAHRDIDECMLFGSEICKEGKCVNTQPGYECYCKQGFYYDGNLLECVDVDECLDESNCRNGVCENTRGGYRCACTPPAEYSPAQRQCLSPEEMDVDECQDPAACRPGRCVNLPGSYRCECRPPWVPGPSGRDCQLPESPAERAPERRDVCWSQRGEDGMCAGPLAGPALTFDDCCCRQGRGWGAQCRPCPPRGAGSHCPTSQSESNSFWDTSPLLLGKPPRDEDSSEEDSDECRCVSGRCVPRPGGAVCECPGGFQLDASRARCVDIDECRELNQRGLLCKSERCVNTSGSFRCVCKAGFARSRPHGACVPQRRR

SEQ ID NO: 32245 - protein, 1256 aa, Homo sapiens
MPGPRGAAGGLAPEMRGAGAAGLLALLLLLLLLLLGLGGRVEGGPAGERGAGGGGALARERFKVVFAPVICKRTCLKGQCRDSCQQGSNMTLIGENGHSTDTLTGSGFRVVVCPLPCMNGGQCSSRNQCLCPPDFTGRFCQVPAGGAGGGTGGSGPGLSRTGALSTGALPPLAPEGDSVASKHAIYAVQVIADPPGPGEGPPAQHAAFLVPLGPGQISAEVQAPPPVVNVRVHHPPEASVQVHRIESSNAESAAPSQHLLPHPKPSHPRPPTQKPLGRCFQDTLPKQPCGSNPLPGLTKQEDCCGSIGTAWGQSKCHKCPQLQYTGVQKPGPVRGEVGADCPQGYKRLNSTHCQDINECAMPGVCRHGDCLNNPGSYRCVCPPGHSLGPSRTQCIADKPEEKSLCFRLVSPEHQCQHPLTTRLTRQLCCCSVGKAWGARCQRCPTDGTAAFKEICPAGKGYHILTSHQTLTIQGESDFSLFLHPDGPPKPQQLPESPSQAPPPEDTEEERGVTTDSPVSEERSVQQSHPTATTTPARPYPELISRPSPPTMRWFLPDLPPSRSAVEIAPTQVTETDECRLNQNICGHGECVPGPPDYSCHCNPGYRSHPQHRYCVDVNECEAEPCGPGRGICMNTGGSYNCHCNRGYRLHVGAGGRSCVDLNECAKPHLCGDGGFCINFPGHYKCNCYPGYRLKASRPPVCEDIDECRDPSSCPDGKCENKPGSFKCIACQPGYRSQGGGACRDVNECAEGSPCSPGWCENLPGSFRCTCAQGYAPAPDGRSCLDVDECEAGDVCDNGICSNTPGSFQCQCLSGYHLSRDRSHCEDIDECDFPAACIGGDCINTNGSYRCLCPQGHRLVGGRKCQDIDECSQDPSLCLPHGACKNLQGSYVCVCDEGFTPTQDQHGCEEVEQPHHKKECYLNFDDTVFCDSVLATNVTQQECCCSLGAGWGDHCEIYPCPVYSSAEFHSLCPDGKGYTQDNNIVNYGIPAHRDIDECMLFGSEICKEGKCVNTQPGYECYCKQGFYYDGNLLECVDVDECLDESNCRNGVCENTRGGYRCACTPPAEYSPAQRQCLSPEEMERAPERRDVCWSQRGEDGMCAGPLAGPALTFDDCCCRQGRGWGAQCRPCPPRGAGSHCPTSQSESNSFWDTSPLLLGKPPRDEDSSEEDSDECRCVSGRCVPRPGGAVCECPGGFQLDASRARCVDIDECRELNQRGLLCKSERCVNTSGSFRCVCKAGFARSRPHGACVPQRRR

SEQ ID NO: 32246 - protein, 247 aa, Homo sapiens
MLPSQEASKLYHEHYMRNSRAIGVLWAIFTICFAIINVVVFIQPYWVGDSVSTPKPGYFGLFHYCVGSGLAGRELTCRGSFTDFSTIPSSAFKAAAFFVLLSMVLILGCITCFSLFFFCNTATVYKICAWMQLLAALCLVLGCMIFPDGWDAETIRDMCGAKTGKYSLGDCSVRWAYILAIIGILNALILSFLAFVLGNRQTDLLQEELKPENKDFVGSTVSSVLRPGGDVSGWGVLPCPVAHSQGP

SEQ ID NO: 32247 - protein, 631 aa, Homo sapiens
MTPALTALLCLGLSLGPRTRVQAGPFPKPTLWAEPGSVISWGSPVTIWCQGSQEAQEYRLHKEGSPEPLDRNNPLEPKNKARFSIPSMTEHHAGRYRCHYYSSAGWSEPSDPLEMVMTGAYSKPTLSALPSPVVASGGNMTLRCGSQKGYHHFVLMKEGEHQLPRTLDSQQLHSRGFQALFPVGPVTPSHRWRFTCYYYYTNTPWVWSHPSDPLEILPSGVSRKPSLLTLQGPVLAPGQSLTLQCGSDVGYNRFVLYKEGERDFLQRPGQQPQAGLSQANFTLGPVSPSNGGQYRCYGAHNLSSEWSAPSDPLNILMAGQIYDTVSLSAQPGPTVASGENVTLLCQSWWQFDTFLLTKEGAAHPPLRLRSMYGAHKYQAEFPMSPVTSAHAGTYRCYGSYSSNPHLLSHPSEPLELVVSGHSGGSSLPPTGPPSTPGLGRYLEVLIGVSVAFVLLLFLLLFLLLRRQRHSKHRTSDQRKTDFQRPAGAAETEPKDRGLLRRSSPAADVQEENLYAAVKDTQSEDRVELDSQSPHDEDPQAVTYAPVKHSSPRREMASPPSSLSGEFLDTKDRQVEEDRQMDTEAAASEASQDVTYAQLHSLTLRRKATEPPPSQEGEPPAEPSIYATLAIH

SEQ ID NO: 32248 - protein, 648 aa, Homo sapiens
MTPALTALLCLGLSLGPRTRVQAGPFPKPTLWAEPGSVISWGSPVTIWCQGSQEAQEYRLHKEGSPEPLDRNNPLEPKNKARFSIPSMTEHHAGRYRCHYYSSAGWSEPSDPLEMVMTGAYSKPTLSALPSPVVASGGNMTLRCGSQKGYHHFVLMKEGEHQLPRTLDSQQLHSRGFQALFPVGPVTPSHRWRFTCYYYYTNTPWVWSHPSDPLEILPSGVSRKPSLLTLQGPVLAPGQSLTLQCGSDVGYNRFVLYKEGERDFLQRPGQQPQAGLSQANFTLGPVSPSNGGQYRCYGAHNLSSEWSAPSDPLNILMAGQIYDTVSLSAQPGPTVASGENVTLLCQSWWQFDTFLLTKEGAAHPPLRLRSMYGAHKYQAEFPMSPVTSAHAGTYRCYGSYSSNPHLLSHPSEPLELVVSGHSGGSSLPPTGPPSTPGGPEDQPLNPPGSGPQNGLGRYLEVLIGVSVAFVLLLFLLLFLLLRRQRHSKHRTSDQRKTDFQRPAGAAETEPKDRGLLRRSSPAADVQEENLYAAVKDTQSEDRVELDSQSPHDEDPQAVTYAPVKHSSPRREMASPPSSLSGEFLDTKDRQVEEDRQMDTEAAASEASQDVTYAQLHSLTLRRKATEPPPSQEGEPPAEPSIYATLAIH

SEQ ID NO: 32249 - protein, 632 aa, Homo sapiens
MTPALTALLCLGLSLGPRTRVQAGPFPKPTLWAEPGSVISWGSPVTIWCQGSQEAQEYRLHKEGSPEPLDRNNPLEPKNKARFSIPSMTEHHAGRYRCHYYSSAGWSEPSDPLEMVMTGAYSKPTLSALPSPVVASGGNMTLRCGSQKGYHHFVLMKEGEHQLPRTLDSQQLHSRGFQALFPVGPVTPSHRWRFTCYYYYTNTPWVWSHPSDPLEILPSGVSRKPSLLTLQGPVLAPGQSLTLQCGSDVGYNRFVLYKEGERDFLQRPGQQPQAGLSQANFTLGPVSPSNGGQYRCYGAHNLSSEWSAPSDPLNILMAGQIYDTVSLSAQPGPTVASGENVTLLCQSWWQFDTFLLTKEGAAHPPLRLRSMYGAHKYQAEFPMSPVTSAHAGTYRCYGSYSSNPHLLSHPSEPLELVVSGHSGGSSLPPTGPPSTPGLGRYLEVLIGVSVAFVLLLFLLLFLLLRRQRHSKHRTSDQRKTDFQRPAGAAETEPKDRGLLRRSSPAADVQEENLYAAVKDTQSEDRVELDSQQSPHDEDPQAVTYAPVKHSSPRREMASPPSSLSGEFLDTKDRQVEEDRQMDTEAAASEASQDVTYAQLHSLTLRRKATEPPPSQEGEPPAEPSIYATLAIH

SEQ ID NO: 32250 - protein, 4599 aa, Homo sapiens
MSEFLLALLTLSGLLPIARVLTVGADRDQQLCDPGEFLCHDHVTCVSQSWLCDGDPDCPDDSDESLDTCPEEVEIKCPLNHIACLGTNKCVHLSQLCNGVLDCPDGYDEGVHCQELLSNCQQLNCQYKCTMVRNSTRCYCEDGFEITEDGRSCKDQDECAVYGTCSQTCRNTHGSYTCSCVEGYLMQPDNRSCKAKIEPTDRPPILLIANFETIEVFYLNGSKMATLSSVNGNEIHTLDFIYNEDMICWIESRESSNQLKCIQITKAGGLTDEWTINILQSFHNVQQMAIDWLTRNLYFVDHVGDRIFVCNSNGSVCVTLIDLELHNPKAIAVDPIAGKLFFTDYGNVAKVERCDMDGMNRTRIIDSKTEQPAALALDLVNKLVYWVDLYLDYVGVVDYQGKNRHTVIQGRQVRHLYGITVFEDYLYATNSDNYNIVRINRFNGTDIHSLIKIENAWGIRIYQKRTQPTVRSHACEVDPYGMPGGCSHICLLSSSYKTRTCRCRTGFNLGSDGRSCKRPKNELFLFYGKGRPGIVRGMDLNTKIADEYMIPIENLVNPRALDFHAETNYIYFADTTSFLIGRQKIDGTERETILKDDLDNVEGIAVDWIGNNLYWTNDGHRKTINVARLEKASQSRKTLLEGEMSHPRGIVVDPVNGWMYWTDWEEDEIDDSVGRIEKAWMDGFNRQIFVTSKMLWPNGLTLDFHTNTLYWCDAYYDHIEKVFLNGTHRKIVYSGRELNHPFGLSHHGNYVFWTDYMNGSIFQLDLITSEVTLLRHERPPLFGLQIYDPRKQQGDNMCRVNNGGCSTLCLAIPGGRVCACADNQLLDENGTTCTFNPGEALPHICKAGEFRCKNRHCIQARWKCDGDDDCLDGSDEDSVNCFNHSCPDDQFKCQNNRCIPKRWLCDGANDCGSNEDESNQTCTARTCQVDQFSCGNGRCIPRAWLCDREDDCGDQTDEMASCEFPTCEPLTQFVCKSGRCISSKWHCDSDDDCGDGSDEVGCVHSCFDNQFRCSSGRCIPGHWACDGDNDCGDFSDEAQINCTKEEIHSPAGCNGNEFQCHPDGNCVPDLWRCDGEKDCEDGSDEKGCNGTIRLCDHKTKFSCWSTGRCINKAWVCDGDIDCEDQSDEDDCDSFLCGPPKHPCANDTSVCLQPEKLCNGKKDCPDGSDEGYLCDECSLNNGGCSNHCSVVPGRGIVCSCPEGLQLNKDNKTCEIVDYCSNHLKCSQVCEQHKHTVKCSCYEGWKLDVDGESCTSVDPFEAFIIFSIRHEIRRIDLHKRDYSLLVPGLRNTIALDFHFNQSLLYWTDVVEDRIYRGKLSESGGVSAIEVVVEHGLATPEGLTVDWIAGNIYWIDSNLDQIEVAKLDGSLRTTLIAGAMEHPRAIALDPRYGILFWTDWDANFPRIESASMSGAGRKTIYKDMKTGAWPNGLTVDHFEKRIVWTDARSDAIYSALYDGTNMIEIIRGHEYLSHPFAVSLYGSEVYWTDWRTNTLSKANKWTGQNVSVIQKTSAQPFDLQIYHPSRQPQAPNPCAANDGKGPCSHMCLINHNRSAACACPHLMKLSSDKKTCYEMKKFLLYARRSEIRGVDIDNPYFNFITAFTVPDIDDVTVIDFDASEERLYWTDIKTQTIKRAFINGTGLETVISRDIQSIRGLAVDWVSRNLYWISSEFDETQINVARLDGSLKTSIIHGIDKPQCLAAHPVRGKLYWTDGNTINMANMDGSNSKILFQNQKEPVGLSIDYVENKLYWISSGNGTINRCNLDGGNLEVIESMKEELTKATALTIMDKKLWWADQNLAQLGTCSKRDGRNPTILRNKTSGVVHMKVYDKEAQQGSNSCQLNNGGCSQLCLPTSETTRTCMCTVGYYLQKNRMSCQGIESFLMYSVHEGIRGIPLEPSDKMDALMPISGTSFAVGIDFHAENDTIYWTDMGFNKISRAKRDQTWKEDIITNGLGRVEGIAVDWIAGNIYWTDHGFNLIEVARLNGSFRYVIISQGLDQPRSIAVHPEKGLLFWTEWGQMPCIGKARLDGSEKVVLVSMGIAWPNGISIDYEENKLYWCDARTDKIERIDLETGGNREMVLSGSNVDMFSVAVFGAYIYWSDRAHANGSVRRGHKNDATETITMRTGLGVNLKEVKIFNRVREKGTNVCARDNGGCKQLCLYRGNSRRTCACAHGYLAEDGVTCLRHEGYLLYSGRTILKSIHLSDETNLNSPIRPYENPRYFKNVIALAFDYNQRRKGTNRIFYSDAHFGNIQLIKDNWEDRQVIVENVGSVEGLAYHRAWDTLYWTSSTTSSITRHTVDQTRPGAFDREAVITMSEDDHPHVLALDECQNLMFWTNWNEQHPSIMRSTLTGKNAQVVVSTDILTPNGLTIDYRAEKLYFSDGSLGKIERCEYDGSQRHVIVKSGPGTFLSLAVYDNYIFWSDWGRRAILRSNKYTGGDTKILRSDIPHQPMGIIAVANDTNSCELSPCALLNGGCHDLCLLTPNGRVNCSCRGDRILLEDNRCVTKNSSCNAYSEFECGNGECIDYQLTCDGIPHCKDKSDEKLLYCENRSCRRGFKPCYNRRCIPHGKLCDGENDCGDNSDELDCKVSTCATVEFRCADGTCIPRSARCNQNIDCADASDEKNCNNTDCTHFYKLGVKTTGFIRCNSTSLCVLPTWICDGSNDCGDYSDELKCPVQNKHKCEENYFSCPSGRCILNTWICDGQKDCEDGRDEFHCDSSCSWNQFACSAQKCISKHWICDGEDDCGDGLDESDSICGAITCAADMFSCQGSRACVPRHWLCDGERDCPDGSDELSTAGCAPNNTCDENAFMCHNKVCIPKQFVCDHDDDCGDGSDESPQCGYRQCGTEEFSCADGRCLLNTQWQCDGDFDCPDHSDEAPLNPKCKSAEQSCNSSFFMCKNGRCIPSGGLCDNKDDCGDGSDERNCHINECLSKKVSGCSQDCQDLPVSYKCKCWPGFQLKDDGKTCVDIDECSSGFPCSQQCINTYGTYKCLCTDGYEIQPDNPNGCKSLSDEEPFLILADHHEIRKISTDGSNYTLLKQGLNNVIAIDFDYREEFIYWIDSSRPNGSRINRMCLNGSDIKVVHNTAVPNALAVDWIGKNLYWSDTEKRIIEVSKLNGLYPTILVSKRLKFPRDLSLDPQAGYLYWIDCCEYPHIGRVGMDGTNQSVVIETKISRPMALTIDYVNRRLYWADENHIEFSNMDGSHRHKVPNQDIPGVIALTLFEDYIYWTDGKTKSLSRAHKTSGADRLSLIYSWHAITDIQVYHSYRQPDVSKHLCMINNGGCSHLCLLAPGKTHTCACPTNFYLAADNRTCLSNCTASQFRCKTDKCIPFWWKCDTVDDCGDGSDEPDDCPEFRCQPGRFQCGTGLCALPAFICDGENDCGDNSDELNCDTHVCLSGQFKCTKNQKCIPVNLRCNGQDDCGDEEDERDCPENSCSPDYFQCKTTKHCISKLWVCDEDPDCADASDEANCDKKTCGPHEFQCKNNNCIPDHWRCDSQNDCSDNSDEENCKPQTCTLKDFLCANGDCVSSRFWCDGDFDCADGSDERNCETSCSKDQFRCSNGQCIPAKWKCDGHEDCKYGEDEKSCEPASPTCSSREYICASDGCISASLKCNGEYDCADGSDEMDCVTECKEDQFRCKNKAHCIPIRWLCDGIHDCVDGSDEENCERGGNICRADEFLCNNSLCKLHFWVCDGEDDCGDNSDEAPDMCVKFLCPSTRPHRCRNNRICLQSEQMCNGIDECGDNSDEDHCGGKLTYKARPCKKDEFACSNKKCIPMDLQCDRLDDCGDGSDEQGCRIAPTEYTCEDNVNPCGDDAYCNQIKTSVFCRCKPGFQRNMKNRQCEDLNECLVFGTCSHQCINVEGSYKCVCDQNFQERNNTCIAEGSEDQVLYIANDTDILGFIYPFNYSGDHQQISHIEHNSRITGMDVYYQRDMIIWSTQFNPGGIFYKRIHGREKRQANSGLICPEFKRPRDIAVDWVAGNIYWTDHSRMHWFSYYTTHWTSLRYSINVGQLNGPNCTRLLTNMAGEPYAIAVNPKRGMMYWTVVGDHSHIEEAAMDGTLRRILVQKNLQRPTGLAVDYFSERIYWADFELSIIGSVLYDGSNSVVSVSSKQGLLHPHRIDIFEDYIYGAGPKNGVFRVQKFGHGSVEYLALNIDKTKGVLISHRYKQLDLPNPCLDLACEFLCLLNPSGATCVCPEGKYLINGTCNDDSLLDDSCKLTCENGGRCILNEKGDLRCHCWPSYSGERCEVNHCSNYCQNGGTCVPSVLGRPTCSCALGFTGPNCGKTVCEDFCQNGGTCIVTAGNQPYCHCQPEYTGDRCQYYVCHHYCVNSESCTIGDDGSVECVCPTRYEGPKCEVDKCVRCHGGHCIINKDSEDIFCNCTNGKIASSCQLCDGYCYNGGTCQLDPETNVPVCLCSTNWSGTQCERPAPKSSKSDHISTRSIAIIVPLVLLVTLITTLVIGLVLCKRKRRTKTIRRQPIINGGINVEIGNPSYNMYEVDHDHNDGGLLDPGFMIDPTKARYIGGGPSAFKLPHTAPPIYLNSDLKGPLTAGPTNYSNPVYAKLYMDGQNCRNSLGSVDERKELLPKKIEIGIRETVA

SEQ ID NO: 32251 - protein, 453 aa, Homo sapiens
METRGPGLAVRAESRRLVGIGPRAPPGRVGLQPSGRLDRRGGAGTMGYKDNDGEEEEREGGAAGPRGSRLPPITGGASELAKRKVKKKKRKKKTKGSGKGDDKHQSQSLKSQPLSSSFHDILSPCKERGPKPEHRQSKVEKKHLPSDSSTVSLPDFAEIENLANRINESLRWDGILADPEAEKERIRIYKLNRRKRYRCLALKGFHPDPEALKGFHPDPDALKGFHPDPEALKGFHPDPEALKGFHPDPEALKGFHPDPEALKGIHPDPEALKGIHPDPEALKGFHPDPEALKGFHPDPEALKGFHTDPEALKGFHIDPEALKGFHPDPKALKGFHPDPKALKGFHTDPEALKGFHPDPKALKGFHPDPEALKGFHPDPEALKGFHPDPEALKGFHTDPNAEEAPENLPYLSDKDGSSSHRQPTSKAECPNLCFEGNLTPKLLHSDLAPTLLE

SEQ ID NO: 32252 - protein, 423 aa, Homo sapiens
METRGPGLAVRAESRRLVGIGPRAPPGRVGLQPSGRLDRRGGAGTMGYKDNDGEEEEREGGAAGPRGSRLPPITGGASELAKRKVKKKKRKKKTKGSGKGDDKHQSQSLKSQPLSSSFHDILSPCKERGPKPEHRQSKVEKKHLPSDSSTVSLPDFAEIENLANRINESLRWDGILADPEAEKERIRIYKLNRRKRYRCLALKGFHPDPEALKGFHPDPDALKGFHPDPEALKGFHPDPEALKGFHPDPEALKGFHPDPEALKGIHPDPEALKGFHPDPEALKGFHPDPEALKGFHTDPEALKGFHIDPEALKGFHPDPKALKGFHPDPKALKGFHTDPEALKGFHPDPEALKGFHPDPEALKGFHTDPNAEEAPENLPYLSDKDGSSSHRQPTSKAECPNLCFEGNLTPKLLHSDLAPTLLE

SEQ ID NO: 32253 - protein, 433 aa, Homo sapiens
METRGPGLAVRAESRRLVGIGPRAPPGRVGLQPSGRLDRRGGAGTMGYKDNDGEEEEREGGAAGPRGSRLPPITGGASELAKRKVKKKKRKKKTKGSGKGDDKHQSQSLKSQPLSSSFHDILSPCKERGPKPEHRQSKVEKKHLPSDSSTVSLPDFAEIENLANRINESLRWDGILADPEAEKERIRIYKLNRRKRYRCLALKGFHPDPEALKGFHPDPEALKGFHPDPEALKGFHPDPEALKGIHPDPEALKGIHPDPEALKGFHPDPEALKGFHPDPEALKGFHTDPEALKGFHIDPEALKGFHPDPKALKGFHPDPKALKGFHTDPEALKGFHPDPKALKGFHPDPEALKGFHPDPEALKGFHPDPEALKGFHTDPNAEEAPENLPYLSDKDGSSSHRQPTSKAECPNLCFEGNLTPKLLHSDLAPTLLE

SEQ ID NO: 32254 - protein, 423 aa, Homo sapiens
METRGPGLAVRAESRRLVGIGPRAPPGRVGLQPSGRLDRRGGAGTMGYKDNDGEEEEREGGAAGPRGSRLPPITGGASELAKRKVKKKKRKKKTKGSGKGDDKHQSQSLKSQPLSSSFHDILSPCKERGPKPEHRQSKVEKKHLPSDSSTVSLPDFAEIENLANRINESLRWDGILADPEAEKERIRIYKLNRRKRYRCLALKGFHPDPEALKGFHPDPDALKGFHPDPEALKGFHPDPEALKGIHPDPEALKGFHPDPEALKGFHPDPEALKGFHTDPEALKGFHIDPEALKGFHPDPKALKGFHPDPKALKGFHTDPEALKGFHPDPKALKGFHPDPEALKGFHPDPEALKGFHPDPEALKGFHTDPNAEEAPENLPYLSDKDGSSSHRQPTSKAECPNLCFEGNLTPKLLHSDLAPTLLE

SEQ ID NO: 32255 - protein, 354 aa, Homo sapiens
MTAVNVALIRDTKWLTLEVCREFQRGTCSRADADCKFAHPPRVCHVENGRVVACFDSLKGRCTRENCKYLHPPPHLKTQLEINGRNNLIQQKTAAAMFAQQMQLMLQNAQMSSLGSFPMTPSIPANPPMAFNPYIPHPGMGLVPAELVPNTPVLIPGNPPLAMPGAVGPKLMRSDKLEVCREFQRGNCTRGENDCRYAHPTDASMIEASDNTVTICMDYIKGRCSREKCKYFHPPAHLQARLKAAHHQMNHSAASAMALQPGTLQLIPKRSALEKPNGATPVFNPTVFHCQQALTNLQLPQPAFIPAGPILCMAPASNIVPMMHGATPTTVSAATTPATSVPFAAPTTGNQLKF

SEQ ID NO: 32256 - protein, 334 aa, Homo sapiens
MTAVNVALIRDTKWLTLEVCREFQRGTCSRADADCKFAHPPRVCHVENGRVVACFDSLKGRCTRENCKYLHPPPHLKTQLEINGRNNLIQQKTAAAMFAQQMQLMLQNAQMSSLGSFPMTPSIPANPPMAFNPYIPHPGMGLVPAELVPNTPVLIPGNPPLAMPGAVGPKLMRSDKLEVCREFQRGNCTRGENDCRYAHPTDASMIEASDNTVTICMDYIKGRCSREKCKYFHPPAHLQARLKAAHHQMNHSAASAMALTNLQLPQPAFIPAGPILCMAPASNIVPMMHGATPTTVSAATTPATSVPFAAPTTGNQIPQLSIDELNSSMFVSQM

SEQ ID NO: 32257 - protein, 304 aa, Homo sapiens
MERASKNLKGRCTRENCKYLHPPPHLKTQLEINGRNNLIQQKTAAAMFAQQMQLMLQNAQMSSLGSFPMTPSIPANPPMAFNPYIPHPGMGLVPAELVPNTPVLIPGNPPLAMPGAVGPKLMRSDKLEVCREFQRGNCTRGENDCRYAHPTDASMIEASDNTVTICMDYIKGRCSREKCKYFHPPAHLQARLKAAHHQMNHSAASAMALQPGTLQLIPKRSALEKPNGATPVFNPTVFHCQQALTNLQLPQPAFIPAGPILCMAPASNIVPMMHGATPTTVSAATTPATSVPFAAPTTGNQLKF

SEQ ID NO: 32258 - protein, 292 aa, Homo sapiens
MERASKNLKGRCTRENCKYLHPPPHLKTQLEINGRNNLIQQKTAAAMFAQQMQLMLQNAQMSSLGSFPMTPSIPANPPMAFNPYIPHPGMGLVPAELVPNTPVLIPGNPPLAMPGAVGPKLMRSDKLEVCREFQRGNCTRGENDCRYAHPTDASMIEASDNTVTICMDYIKGRCSREKCKYFHPPAHLQARLKAAHHQMNHSAASAMALQPGTLQLIPKRSALEKPNGATPVFNPTVFHCQQALTNLQLPQPAFIPAVPMMHGATPTTVSAATTPATSVPFAAPTTGNQLKF

SEQ ID NO: 32259 - protein, 258 aa, Homo sapiens
MFAQQMQLMLQNAQMSSLGSFPMTPSIPANPPMAFNPYIPHPGMGLVPAELVPNTPVLIPGNPPLAMPGAVGPKLMRSDKLEVCREFQRGNCTRGENDCRYAHPTDASMIEASDNTVTICMDYIKGRCSREKCKYFHPPAHLQARLKAAHHQMNHSAASAMALQPGTLQLIPKRSALEKPNGATPVFNPTVFHCQQALTNLQLPQPAFIPAGPILCMAPASNIVPMMHGATPTTVSAATTPATSVPFAAPTTGNQLKF

SEQ ID NO: 32260 - protein, 875 aa, Homo sapiens
MDEEEDNLSLLTALLEENESALDCNSEENNFLTRENGEPDAFDELFDADGDGESYTEEADDGETGETRDEKENLATLFGDMEDLTDEEEVPASQSTENRVLPAPAPRREKTNEELQEELRNLQEQMKALQEQLKVTTIKQTASPARLQKSPVEKSPRPPLKERRVQRIQESTCFSAELDVPALPRTKRVARTPKASPPDPKSSSSRMTSAPSQPLQTISRNKPSGITRGQIVGTPGSSGETTQPICVEAFSGLRLRRPRVSSTEMNKKMTGRKLIRLSQIKEKMAREKLEEIDWVTFGVILKKVTPQSVNSGKTFSIWKLNDLRDLTQCVSLFLFGEVHKALWKTEQGTVVGILNANPMKPKDGSEEVCLSIDHPQKVLIMGEALDLGTCKAKKKNGEPCTQTVNLRDCEYCQYHVQAQYKKLSAKRADLQSTFSGGRIPKKFARRGTSLKERLCQDGFYYGGVSSASYAASIAAAVAPKKKIQTTLSNLVVKGTNLIIQETRQKLGIPQKSLSCSEEFKELMDLPTCGARNLKQHLAKATASGIMGSPKPAIKSISASALLKQQKQRMLEMRRRKSEEIQKRFLQSSSEVESPAVPSSSRQPPAQPPRTGSEFPRLEGAPATMTPKLGRGVLEGDDVLFYDESPPPRPKLSALAEAKKLAAITKLRAKGQVLTKTNPNSIKKKQKDPQDILEVKERVEKNTMFSSQAEDELEPARKKRREQLAYLESEEFQKILKAKSKHTGILKEAEAEMQERYFEPLVKKEQMEEKMRNIREVKCRVVTCKTCAYTHFKLLETCVSEQHEYHWHDGVKRFFKCPCGNRSISLDRLPNKHCSNCGLYKWERDGMLKEKTGPKIGGETLLPRGEEHAKFLNSLK

SEQ ID NO: 32261 - protein, 874 aa, Homo sapiens
MDEEEDNLSLLTALLEENESALDCNSEENNFLTRENGEPDAFDELFDADGDGESYTEEADDGETGETRDEKENLATLFGDMEDLTDEEEVPASQSTENRVLPAPAPRREKTNEELQEELRNLQEQMKALQEQLKVTTIKQTASPARLQKSPEKSPRPPLKERRVQRIQESTCFSAELDVPALPRTKRVARTPKASPPDPKSSSSRMTSAPSQPLQTISRNKPSGITRGQIVGTPGSSGETTQPICVEAFSGLRLRRPRVSSTEMNKKMTGRKLIRLSQIKEKMAREKLEEIDWVTFGVILKKVTPQSVNSGKTFSIWKLNDLRDLTQCVSLFLFGEVHKALWKTEQGTVVGILNANPMKPKDGSEEVCLSIDHPQKVLIMGEALDLGTCKAKKKNGEPCTQTVNLRDCEYCQYHVQAQYKKLSAKRADLQSTFSGGRIPKKFARRGTSLKERLCQDGFYYGGVSSASYAASIAAAVAPKKKIQTTLSNLVVKGTNLIIQETRQKLGIPQKSLSCSEEFKELMDLPTCGARNLKQHLAKATASGIMGSPKPAIKSISASALLKQQKQRMLEMRRRKSEEIQKRFLQSSSEVESPAVPSSSRQPPAQPPRTGSEFPRLEGAPATMTPKLGRGVLEGDDVLFYDESPPPRPKLSALAEAKKLAAITKLRAKGQVLTKTNPNSIKKKQKDPQDILEVKERVEKNTMFSSQAEDELEPARKKRREQLAYLESEEFQKILKAKSKHTGILKEAEAEMQERYFEPLVKKEQMEEKMRNIREVKCRVVTCKTCAYTHFKLLETCVSEQHEYHWHDGVKRFFKCPCGNRSISLDRLPNKHCSNCGLYKWERDGMLKEKTGPKIGGETLLPRGEEHAKFLNSLK

SEQ ID NO: 32262 - protein, 955 aa, Homo sapiens
MEVTCLLLLALIPFHCRGQGVYAPAQAQIVHAGQACVVKEDNISERVYTIREGDTLMLQCLVTGHPRPQVRWTKTAGSASDKFQETSVFNETLRIERIARTQGGRYYCKAENGVGVPAIKSIRVDVQYLDEPMLTVHQTVSDVRGNFYQEKTVFLRCTVNSNPPARFIWKRGSDTLSHSQDNGVDIYEPLYTQGETKVLKLKNLRPQDYASYTCQVSVRNVCGIPDKAITFRLTNTTAPPALKLSVNETLVVNPGENVTVQCLLTGGDPLPQLQWSHGPGPLPLGALAQGGTLSIPSVQARDSGYYNCTATNNVGNPAKKTVNLLVRSMKNATFQITPDVIKESENIQLGQDLKLSCHVDAVPQEKVTYQWFKNGKPARMSKRLLVTRNDPELPAVTSSLELIDLHFSDYGTYLCMASFPGAPVPDLSVEVNISSETVPPTISVPKGRAVVTVREGSPAELQCEVRGKPRPPVLWSRVDKEAALLPSGLPLEETPDGKLRLERVSRDMSGTYRCQTARYNGFNVRPREAQVQLNVQFPPEVEPSSQDVRQALGRPVLLRCSLLRGSPQRIASAVWRFKGQLLPPPPVVPAAAEAPDHAELRLDAVTRDSSGSYECSVSNDVGSAACLFQVSAKAYSPEFYFDTPNPTRSHKLSKNYSYVLQWTQREPDAVDPVLNYRLSIRQLNQHNAVVKAIPVRRVEKGQLLEYILTDLRVPHSYEVRLTPYTTFGAGDMASRIIHYTEPINSPNLSDNTCHFEDEKICGYTQDLTDNFDWTRQNALTQNPKRSPNTGPPTDISGTPEGYYMFIETSRPRELGDRARLVSPLYNASAKFYCVSFFYHMYGKHIGSLNLLVRSRNKGALDTHAWSLSGNKGNVWQQAHVPISPSGPFQIIFEGVRGPGYLGDIAIDDVTLKKGECPRKQTDPNKVVVMPGSGAPCQSSPQLWGPMAIFLLALQR

SEQ ID NO: 32263 - protein, 973 aa, Homo sapiens
MEVTCLLLLALIPFHCRGQGVYAPAQAQIVHAGQACVVKEDNISERVYTIREGDTLMLQCLVTGHPRPQVRWTKTAGSASDKFQETSVFNETLRIERIARTQGGRYYCKAENGVGVPAIKSIRVDVQYLDEPMLTVHQTVSDVRGNFYQEKTVFLRCTVNSNPPARFIWKRGSDTLSHSQDNGVDIYEPLYTQGETKVLKLKNLRPQDYASYTCQVSVRNVCGIPDKAITFRLTNTTAPPALKLSVNETLVVNPGENVTVQCLLTGGDPLPQLQWSHGPGPLPLGALAQGGTLSIPSVQARDSGYYNCTATNNVGNPAKKTVNLLVRSMKNATFQITPDVIKESENIQLGQDLKLSCHVDAVPQEKVTYQWFKNGKPARMSKRLLVTRNDPELPAVTSSLELIDLHFSDYGTYLCMASFPGAPVPDLSVEVNISSETVPPTISVPKGRAVVTVREGSPAELQCEVRGKPRPPVLWSRVDKEAALLPSGLPLEETPDGKLRLERVSRDMSGTYRCQTARYNGFNVRPREAQVQLNVQFPPEVEPSSQDVRQALGRPVLLRCSLLRGSPQRIASAVWRFKGQLLPPPPVVPAAAEAPDHAELRLDAVTRDSSGSYECSVSNDVGSAACLFQVSAKAYSPEFYFDTPNPTRSHKLSKNYSYVLQWTQREPDAVDPVLNYRLSIRQLNQHNAVVKAIPVRRVEKGQLLEYILTDLRVPHSYEVRLTPYTTFGAGDMASRIIHYTEPINSPNLSDNTCHFEDEKICGYTQDLTDNFDWTRQNALTQNPKRSPNTGPPTDISGTPEGYYMFIETSRPRELGDRARLVSPLYNASAKFYCVSFFYHMYGKHIGSLNLLVRSRNKGALDTHAWSLSGNKGNVWQQAHVPISPSGPFQIIFEGVRGPGYLGDIAIDDVTLKKGECPRKQTDPNKGARREGGGGAESGGSCAWRGFLSVEGGCLGLNRGSECLSDGNHVALTV

SEQ ID NO: 32264 - protein, 622 aa, Homo sapiens
MRGLLCWPVLLLLLQPWETQLQLTGPRCHTGPLDLVFVIDSSRSVRPFEFETMRQFLMGLLRGLNVGPNATRVGVIQYSSQVQSVFPLRAFSRREDMERAIRDLVPLAQGTMTGLAIQYAMNVAFSVAEGARPPEERVPRVAVIVTDGRPQDRVAEVAAQARARGIEIYAVGVQRADVGSLRAMASPPLDEHVFLVESFDLIQEFGLQFQSRLCGKDQCAEGGHGCQHQCVNAWAMFHCTCNPGYKLAADNKSCLAIDLCAEGTHGCEHHCVNSPGSYFCHCQVGFVLQQDQRSCRAIDYCSFGNHSCQHECVSTPGGPRCHCREGHDLQPDGRSCQVRDLCNGVDHGCEFQCVSEGLSYRCLCPEGRQLQADGKSCNRCREGHVDLVLLVDGSKSVRPQNFELVKRFVNQIVDFLDVSPEGTRVGLVQFSSRVRTEFPLGRYGTAAEVKQAVLAVEYMERGTMTGLALRHMVEHSFSEAQGARPRALNVPRVGLVFTDGRSQDDISVWAARAKEEGIVMYAVGVGKAVEAELREIASEPAELHVSYAPDFGTMTHLLENLRGSICPEEGISAGTELRSPCECESLVEFQGRTLGALESLTLNLAQLTARLEDLENQLANQK

SEQ ID NO: 32265 - protein, 581 aa, Homo sapiens
MRGLLCWPVLLLLLQPWETQLQLTGPRCHTGPLDLVFVIDSSRSVRPFEFETMRQFLMGLLRGLNVGPNATRVGVIQYSSQVQSVFPLRAFSRREDMERAIRDLVPLAQGTMTGLAIQYAMNVAFSVAEGARPPEERVPRVAVIVTDGRPQDRVAEVAAQARARGIEIYAVGVQRADVGSLRAMASPPLDEHVFLVESFDLIQEFGLQFQSRLCAIDLCAEGTHGCEHHCVNSPGSYFCHCQVGFVLQQDQRSCRAIDYCSFGNHSCQHECVSTPGGPRCHCREGHDLQPDGRSCQVRDLCNGVDHGCEFQCVSEGLSYRCLCPEGRQLQADGKSCNRCREGHVDLVLLVDGSKSVRPQNFELVKRFVNQIVDFLDVSPEGTRVGLVQFSSRVRTEFPLGRYGTAAEVKQAVLAVEYMERGTMTGLALRHMVEHSFSEAQGARPRALNVPRVGLVFTDGRSQDDISVWAARAKEEGIVMYAVGVGKAVEAELREIASEPAELHVSYAPDFGTMTHLLENLRGSICPEEGISAGTELRSPCECESLVEFQGRTLGALESLTLNLAQLTARLEDLENQLANQK

SEQ ID NO: 32266 - protein, 432 aa, Homo sapiens
MRGLLCWPVLLLLLQPWETQLQLTGKDQCAEGGHGCQHQCVNAWAMFHCTCNPGYKLAADNKSCLAIDLCAEGTHGCEHHCVNSPGSYFCHCQVGFVLQQDQRSCRAIDYCSFGNHSCQHECVSTPGGPRCHCREGHDLQPDGRSCQVRDLCNGVDHGCEFQCVSEGLSYRCLCPEGRQLQADGKSCNRCREGHVDLVLLVDGSKSVRPQNFELVKRFVNQIVDFLDVSPEGTRVGLVQFSSRVRTEFPLGRYGTAAEVKQAVLAVEYMERGTMTGLALRHMVEHSFSEAQGARPRALNVPRVGLVFTDGRSQDDISVWAARAKEEGIVMYAVGVGKAVEAELREIASEPAELHVSYAPDFGTMTHLLENLRGSICPEEGISAGTELRSPCECESLVEFQGRTLGALESLTLNLAQLTARLEDLENQLANQK

SEQ ID NO: 32267 - protein, 540 aa, Homo sapiens
MRGLLCWPVLLLLLQPWETQLQLTGPRCHTGPLDLVFVIDSSRSVRPFEFETMRQFLMGLLRGLNVGPNATRVGVIQYSSQVQSVFPLRAFSRREDMERAIRDLVPLAQGTMTGLAIQYAMNVAFSVAEGARPPEERVPRVAVIVTDGRPQDRVAEVAAQARARGIEIYAVGVQRADVGSLRAMASPPLDEHVFLVESFDLIQEFGLQFQSRLCAIDYCSFGNHSCQHECVSTPGGPRCHCREGHDLQPDGRSCQVRDLCNGVDHGCEFQCVSEGLSYRCLCPEGRQLQADGKSCNRCREGHVDLVLLVDGSKSVRPQNFELVKRFVNQIVDFLDVSPEGTRVGLVQFSSRVRTEFPLGRYGTAAEVKQAVLAVEYMERGTMTGLALRHMVEHSFSEAQGARPRALNVPRVGLVFTDGRSQDDISVWAARAKEEGIVMYAVGVGKAVEAELREIASEPAELHVSYAPDFGTMTHLLENLRGSICPEEGISAGTELRSPCECESLVEFQGRTLGALESLTLNLAQLTARLEDLENQLANQK

SEQ ID NO: 32268 - protein, 304 aa, Homo sapiens
MGNHAGKRELNAEKASTNSETNRGESEKKRNLGELSRTTSEDNEVFGEADANQNNGTSSQDTAVTDSKRTADPKNAWQDAHPADPGSRPHLIRLFSRDAPGREDNTFKDRPSESDELQTIQEDSAATSESLDVMASQKRPSQRHGSKYLATASTMDHARHGFLPRHRDTGILDSIGRFFGGDRGAPKRGSGKDSHHPARTAHYGSLPQKSHGRTQDENPVVHFFKNIVTPRTPPPSQGKGRGLSLSRFSWGAEGQRPGFGYGGRASDYKSAHKGFKGVDAQGTLSKIFKLGGRDSRSGSPMARR

SEQ ID NO: 32269 - protein, 197 aa, Homo sapiens
MGNHAGKRELNAEKASTNSETNRGESEKKRNLGELSRTTSEDNEVFGEADANQNNGTSSQDTAVTDSKRTADPKNAWQDAHPADPGSRPHLIRLFSRDAPGREDNTFKDRPSESDELQTIQEDSAATSESLDVMASQKRPSQRHGSKYLATASTMDHARHGFLPRHRDTGILDSIGRFFGGDRGAPKRGSGKVSSEE

SEQ ID NO: 32270 - protein, 197 aa, Homo sapiens
MASQKRPSQRHGSKYLATASTMDHARHGFLPRHRDTGILDSIGRFFGGDRGAPKRGSGKVPWLKPGRSPLPSHARSQPGLCNMYKDSHHPARTAHYGSLPQKSHGRTQDENPVVHFFKNIVTPRTPPPSQGKGRGLSLSRFSWGAEGQRPGFGYGGRASDYKSAHKGFKGVDAQGTLSKIFKLGGRDSRSGSPMARR

SEQ ID NO: 32271 - protein, 186 aa, Homo sapiens
MASQKRPSQRHGSKYLATASTMDHARHGFLPRHRDTGILDSIGRFFGGDRGAPKRGSGKVPWLKPGRSPLPSHARSQPGLCNMYKDSHHPARTAHYGSLPQKSHGRTQDENPVVHFFKNIVTPRTPPPSQGKGAEGQRPGFGYGGRASDYKSAHKGFKGVDAQGTLSKIFKLGGRDSRSGSPMARR

SEQ ID NO: 32272 - protein, 171 aa, Homo sapiens
MASQKRPSQRHGSKYLATASTMDHARHGFLPRHRDTGILDSIGRFFGGDRGAPKRGSGKDSHHPARTAHYGSLPQKSHGRTQDENPVVHFFKNIVTPRTPPPSQGKGRGLSLSRFSWGAEGQRPGFGYGGRASDYKSAHKGFKGVDAQGTLSKIFKLGGRDSRSGSPMARR

SEQ ID NO: 32273 - protein, 160 aa, Homo sapiens
MASQKRPSQRHGSKYLATASTMDHARHGFLPRHRDTGILDSIGRFFGGDRGAPKRGSGKDSHHPARTAHYGSLPQKSHGRTQDENPVVHFFKNIVTPRTPPPSQGKGAEGQRPGFGYGGRASDYKSAHKGFKGVDAQGTLSKIFKLGGRDSRSGSPMARR

SEQ ID NO: 32274 - protein, 519 aa, Homo sapiens
MIPVSLVVVVVGGWTVVYLTDLVLKSSVYFKHSYEDWLENNGLSISPFHIRWQTAVFNRAFYSWGRRKARMLYQWFNFGMVFGVIAMFSSFFLLGKTLMQTLAQMMADSPSSYSSSSSSSSSSSSSSSSSSSSSSSLHNEQVLQVVVPGINLPVNQLTYFFTAVLISGVVHEIGHGIAAIREQVRFNGFGIFLFIIYPGAFVDLFTTHLQLISPVQQLRIFCAGIWHNFVLALLGILALVLLPVILLPFYYTGVGVLITEVAEDSPAIGPRGLFVGDLVTHLQDCPVTNVQDWNECLDTIAYEPQIGYCISASTLQQLSFPVRAYKRLDGSTECCNNHSLTDVCFSYRNNFNKRLHTCLPARKAVEATQVCRTNKDCKKSSSSSFCIIPSLETHTRLIKVKHPPQIDMLYVGHPLHLHYTVSITSFIPRFNFLSIDLPVVVETFVKYLISLSGALAIVNAVPCFALDGQWILNSFLDATLTSVIGDNDVKDLIGFFILLGGSVLLAANVTLGLWMVTAR

SEQ ID NO: 32275 - protein, 325 aa, Homo sapiens
MNSSFHLHFLDLNLNATEGNLSGPNVKNKSSPCEDMGIAVEVFLTLGVISLLENILVIGAIVKNKNLHSPMYFFVCSLAVADMLVSMSSAWETITIYLLNNKHLVIADAFVRHIDNVFDSMICISVVASMCSLLAIAVDRYVTIFYALRYHHIMTARRSGAIIAGIWAFCTGCGIVFILYSESTYVILCLISMFFAMLFLLVSLYIHMFLLARTHVKRIAALPGASSARQRTSMQGAVTVTMLLGVFTVCWAPFFLHLTLMLSCPQNLYCSRFMSHFNMYLILIMCNSVMDPLIYAFRSQEMRKTFKEIICCRGFRIACSFPRRD

SEQ ID NO: 32276 - protein, 1239 aa, Homo sapiens
MANDSPAKSLVDIDLSSLRDPAGIFELVEVVGNGTYGQVYKGRHVKTGQLAAIKVMDVTEDEEEEIKLEINMLKKYSHHRNIATYYGAFIKKSPPGHDDQLWLVMEFCGAGSITDLVKNTKGNTLKEDWIAYISREILRGLAHLHIHHVIHRDIKGQNVLLTENAEVKLVDFGVSAQLDRTVGRRNTFIGTPYWMAPEVIACDENPDATYDYRSDLWSCGITAIEMAEGAPPLCDMHPMRALFLIPRNPPPRLKSKKWSKKFFSFIEGCLVKNYMQRPSTEQLLKHPFIRDQPNERQVRIQLKDHIDRTRKKRGEKDETEYEYSGSEEEEEEVPEQEGEPSSIVNVPGESTLRRDFLRLQQENKERSEALRRQQLLQEQQLREQEEYKRQLLAERQKRIEQQKEQRRRLEEQQRREREARRQQEREQRRREQEEKRRLEELERRRKEEEERRRAEEEKRRVEREQEYIRRQLEEEQRHLEVLQQQLLQEQAMLLECRWREMEEHRQAERLQRQLQQEQAYLLSLQHDHRRPHPQHSQQPPPPQQERSKPSFHAPEPKAHYEPADRAREVEDRFRKTNHSSPEAQSKQTGRVLEPPVPSRSESFSNGNSESVHPALQRPAEPQVPVRTTSRSPVLSRRDSPLQGSGQQNSQAGQRNSTSIEPRLLWERVEKLVPRPGSGSSSGSSNSGSQPGSHPGSQSGSGERFRVRSSSKSEGSPSQRLENAVKKPEDKKEVFRPLKPADLTALAKELRAVEDVRPPHKVTDYSSSSEESGTTDEEDDDVEQEGADESTSGPEDTRAASSLNLSNGETESVKTMIVHDDVESEPAMTPSKEGTLIVRQTQSASSTLQKHKSSSSFTPFIDPRLLQISPSSGTTVTSVVGFSCDGMRPEAIRQDPTRKGSVVNVNPTNTRPQSDTPEIRKYKKRFNSEILCAALWGVNLLVGTESGLMLLDRSGQGKVYPLINRRRFQQMDVLEGLNVLVTISGKKDKLRVYYLSWLRNKILHNDPEVEKKQGWTTVGDLEGCVHYKVVKYERIKFLVIALKSSVEVYAWAPKPYHKFMAFKSFGELVHKPLLVDLTVEEGQRLKVIYGSCAGFHAVDVDSGSVYDIYLPTHIQCSIKPHAIIILPNTDGMELLVCYEDEGVYVNTYGRITKDVVLQWGEMPTSVAYIRSNQTMGWGEKAIEIRSVETGHLDGVFMHKRAQRLKFLCERNDKVFFASVRSGGSSQVYFMTLGRTSLLSW

SEQ ID NO: 32277 - protein, 1212 aa, Homo sapiens
MANDSPAKSLVDIDLSSLRDPAGIFELVEVVGNGTYGQVYKGRHVKTGQLAAIKVMDVTEDEEEEIKLEINMLKKYSHHRNIATYYGAFIKKSPPGHDDQLWLVMEFCGAGSITDLVKNTKGNTLKEDWIAYISREILRGLAHLHIHHVIHRDIKGQNVLLTENAEVKLVDFGVSAQLDRTVGRRNTFIGTPYWMAPEVIACDENPDATYDYRSDLWSCGITAIEMAEGAPPLCDMHPMRALFLIPRNPPPRLKSKKWSKKFFSFIEGCLVKNYMQRPSTEQLLKHPFIRDQPNERQVRIQLKDHIDRTRKKRGEKDETEYEYSGSEEEEEEVPEQEGEPSSIVNVPGESTLRRDFLRLQQENKERSEALRRQQLLQEQQLREQEEYKRQLLAERQKRIEQQKEQRRRLEEQQRREREARRQQEREQRRREQEEKRRLEELERRRKEEEERRRAEEEKRRVEREQEYIRRQLEEEQRHLEVLQQQLLQEQAMLLHDHRRPHPQHSQQPPPPQQERSKPSFHAPEPKAHYEPADRAREVEDRFRKTNHSSPEAQSKQTGRVLEPPVPSRSESFSNGNSESVHPALQRPAEPQVPVRTTSRSPVLSRRDSPLQGSGQQNSQAGQRNSTSSIEPRLLWERVEKLVPRPGSGSSSGSSNSGSQPGSHPGSQSGSGERFRVRSSSKSEGSPSQRLENAVKKPEDKKEVFRPLKPAGEVDLTALAKELRAVEDVRPPHKVTDYSSSSEESGTTDEEDDDVEQEGADESTSGPEDTRAASSLNLSNGETESVKTMIVHDDVESEPAMTPSKEGTLIVRQTQSASSTLQKHKSSSSFTPFIDPRLLQISPSSGTTVTSVVGFSCDGMRPEAIRQDPTRKGSVVNVNPTNTRPQSDTPEIRKYKKRFNSEILCAALWGVNLLVGTESGLMLLDRSGQGKVYPLINRRRFQQMDVLEGLNVLVTISGKKDKLRVYYLSWLRNKILHNDPEVEKKQGWTTVGDLEGCVHYKVVKYERIKFLVIALKSSVEVYAWAPKPYHKFMAFKSFGELVHKPLLVDLTVEEGQRLKVIYGSCAGFHAVDVDSGSVYDIYLPTHIQCSIKPHAIIILPNTDGMELLVCYEDEGVYVNTYGRITKDVVLQWGEMPTSVAYIRSNQTMGWGEKAIEIRSVETGHLDGVFMHKRAQRLKFLCERNDKVFFASVRSGGSSQVYFMTLGRTSLLSW

SEQ ID NO: 32278 - protein, 1320 aa, Homo sapiens
MANDSPAKSLVDIDLSSLRDPAGIFELVEVVGNGTYGQVYKGRHVKTGQLAAIKVMDVTEDEEEEIKLEINMLKKYSHHRNIATYYGAFIKKSPPGHDDQLWLVMEFCGAGSITDLVKNTKGNTLKEDWIAYISREILRGLAHLHIHHVIHRDIKGQNVLLTENAEVKLVDFGVSAQLDRTVGRRNTFIGTPYWMAPEVIACDENPDATYDYRSDLWSCGITAIEMAEGAPPLCDMHPMRALFLIPRNPPPRLKSKKWSKKFFSFIEGCLVKNYMQRPSTEQLLKHPFIRDQPNERQVRIQLKDHIDRTRKKRGEKDETEYEYSGSEEEEEEVPEQEGEPSSIVNVPGESTLRRDFLRLQQENKERSEALRRQQLLQEQQLREQEEYKRQLLAERQKRIEQQKEQRRRLEEQQRREREARRQQEREQRRREQEEKRRLEELERRRKEEEERRRAEEEKRRVEREQEYIRRQLEEEQRHLEVLQQQLLQEQAMLLECRWREMEEHRQAERLQRQLQQEQAYLLSLQHDHRRPHPQHSQQPPPPQQERSKPSFHAPEPKAHYEPADRAREVEDRFRKTNHSSPEAQSKQTGRVLEPPVPSRSESFSNGNSESVHPALQRPAEPQVQWSHLASLKNNVSPVSRSHSFSDPSPKFAHHHLRSQDPCPPSRSEVLSQSSDSKSEAPDPTQKAWSRSDSDEVPPRVPVRTTSRSPVLSRRDSPLQGSGQQNSQAGQRNSTSSIEPRLLWERVEKLVPRPGSGSSSGSSNSGSQPGSHPGSQSGSGERFRVRSSSKSEGSPSQRLENAVKKPEDKKEVFRPLKPAGEVDLTALAKELRAVEDVRPPHKVTDYSSSSEESGTTDEEDDDVEQEGADESTSGPEDTRAASSLNLSNGETESVKTMIVHDDVESEPAMTPSKEGTLIVRQTQSASSTLQKHKSSSSFTPFIDPRLLQISPSSGTTVTSVVGFSCDGMRPEAIRQDPTRKGSVVNVNPTNTRPQSDTPEIRKYKKRFNSEILCAALWGVNLLVGTESGLMLLDRSGQGKVYPLINRRRFQQMDVLEGLNVLVTISGKKDKLRVYYLSWLRNKILHNDPEVEKKQGWTTVGDLEGCVHYKVVKYERIKFLVIALKSSVEVYAWAPKPYHKFMAFKSFGELVHKPLLVDLTVEEGQRLKVIYGSCAGFHAVDVDSGSVYDIYLPTHIQCSIKPHAIIILPNTDGMELLVCYEDEGVYVNTYGRITKDVVLQWGEMPTSVAYIRSNQTMGWGEKAIEIRSVETGHLDGVFMHKRAQRLKFLCERNDKVFFASVRSGGSSQVYFMTLGRTSLLSW

SEQ ID NO: 32279 - protein, 1165 aa, Homo sapiens
MANDSPAKSLVDIDLSSLRDPAGIFELVEVVGNGTYGQVYKGRHVKTGQLAAIKVMDVTEDEEEEIKLEINMLKKYSHHRNIATYYGAFIKKSPPGHDDQLWLVMEFCGAGSITDLVKNTKGNTLKEDWIAYISREILRGLAHLHIHHVIHRDIKGQNVLLTENAEVKLVDFGVSAQLDRTVGRRNTFIGTPYWMAPEVIACDENPDATYDYRSDLWSCGITAIEMAEGAPPLCDMHPMRALFLIPRNPPPRLKSKKWSKKFFSFIEGCLVKNYMQRPSTEQLLKHPFIRDQPNERQVRIQLKDHIDRTRKKRGEKDETEYEYSGSEEEEEEVPEQEGEPSSIVNVPGESTLRRDFLRLQQENKERSEALRRQQLLQEQQLREQEEYKRQLLAERQKRIEQQKEQRRRLEEQQRREREARRQQEREQRRREQEEKRRLEELERRRKEEEERRRAEEEKRRVEREQEYIRRQLEEEQRHLEVLQQQLLQEQAMLLHDHRRPHPQHSQQPPPPQQERSKPSFHAPEPKAHYEPADRAREVPVRTTSRSPVLSRRDSPLQGSGQQNSQAGQRNSTSIEPRLLWERVEKLVPRPGSGSSSGSSNSGSQPGSHPGSQSGSGERFRVRSSSKSEGSPSQRLENAVKKPEDKKEVFRPLKPAGEVDLTALAKELRAVEDVRPPHKVTDYSSSSEESGTTDEEDDDVEQEGADESTSGPEDTRAASSLNLSNGETESVKTMIVHDDVESEPAMTPSKEGTLIVRQTQSASSTLQKHKSSSSFTPFIDPRLLQISPSSGTTVTSVVGFSCDGMRPEAIRQDPTRKGSVVNVNPTNTRPQSDTPEIRKYKKRFNSEILCAALWGVNLLVGTESGLMLLDRSGQGKVYPLINRRRFQQMDVLEGLNVLVTISGKKDKLRVYYLSWLRNKILHNDPEVEKKQGWTTVGDLEGCVHYKVVKYERIKFLVIALKSSVEVYAWAPKPYHKFMAFKSFGELVHKPLLVDLTVEEGQRLKVIYGSCAGFHAVDVDSGSVYDIYLPTHVRKNPHSMIQCSIKPHAIIILPNTDGMELLVCYEDEGVYVNTYGRITKDVVLQWGEMPTSVAYIRSNQTMGWGEKAIEIRSVETGHLDGVFMHKRAQRLKFLCERNDKVFFASVRSGGSSQVYFMTLGRTSLLSW

SEQ ID NO: 32280 - protein, 1242 aa, Homo sapiens
MANDSPAKSLVDIDLSSLRDPAGIFELVEVVGNGTYGQVYKGRHVKTGQLAAIKVMDVTEDEEEEIKLEINMLKKYSHHRNIATYYGAFIKKSPPGHDDQLWLVMEFCGAGSITDLVKNTKGNTLKEDWIAYISREILRGLAHLHIHHVIHRDIKGQNVLLTENAEVKLVDFGVSAQLDRTVGRRNTFIGTPYWMAPEVIACDENPDATYDYRSDLWSCGITAIEMAEGAPPLCDMHPMRALFLIPRNPPPRLKSKKWSKKFFSFIEGCLVKNYMQRPSTEQLLKHPFIRDQPNERQVRIQLKDHIDRTRKKRGEKDETEYEYSGSEEEEEEVPEQEGEPSSIVNVPGESTLRRDFLRLQQENKERSEALRRQQLLQEQQLREQEEYKRQLLAERQKRIEQQKEQRRRLEEQQRREREARRQQEREQRRREQEEKRRLEELERRRKEEEERRRAEEEKRRVEREQEYIRRQLEEEQRHLEVLQQQLLQEQAMLLHDHRRPHPQHSQQPPPPQQERSKPSFHAPEPKAHYEPADRAREVQWSHLASLKNNVSPVSRSHSFSDPSPKFAHHHLRSQDPCPPSRSEVLSQSSDSKSEAPDPTQKAWSRSDSDEVPPRVPVRTTSRSPVLSRRDSPLQGSGQQNSQAGQRNSTSIEPRLLWERVEKLVPRPGSGSSSGSSNSGSQPGSHPGSQSGSGERFRVRSSSKSEGSPSQRLENAVKKPEDKKEVFRPLKPAGEVDLTALAKELRAVEDVRPPHKVTDYSSSSEESGTTDEEDDDVEQEGADESTSGPEDTRAASSLNLSNGETESVKTMIVHDDVESEPAMTPSKEGTLIVRQTQSASSTLQKHKSSSSFTPFIDPRLLQISPSSGTTVTSVVGFSCDGMRPEAIRQDPTRKGSVVNVNPTNTRPQSDTPEIRKYKKRFNSEILCAALWGVNLLVGTESGLMLLDRSGQGKVYPLINRRRFQQMDVLEGLNVLVTISGKKDKLRVYYLSWLRNKILHNDPEVEKKQGWTTVGDLEGCVHYKVVKYERIKFLVIALKSSVEVYAWAPKPYHKFMAFKSFGELVHKPLLVDLTVEEGQRLKVIYGSCAGFHAVDVDSGSVYDIYLPTHVRKNPHSMIQCSIKPHAIIILPNTDGMELLVCYEDEGVYVNTYGRITKDVVLQWGEMPTSVAYIRSNQTMGWGEKAIEIRSVETGHLDGVFMHKRAQRLKFLCERNDKVFFASVRSGGSSQVYFMTLGRTSLLSW

SEQ ID NO: 32281 - protein, 1273 aa, Homo sapiens
MANDSPAKSLVDIDLSSLRDPAGIFELVEVVGNGTYGQVYKGRHVKTGQLAAIKVMDVTEDEEEEIKLEINMLKKYSHHRNIATYYGAFIKKSPPGHDDQLWLVMEFCGAGSITDLVKNTKGNTLKEDWIAYISREILRGLAHLHIHHVIHRDIKGQNVLLTENAEVKLVDFGVSAQLDRTVGRRNTFIGTPYWMAPEVIACDENPDATYDYRSDLWSCGITAIEMAEGAPPLCDMHPMRALFLIPRNPPPRLKSKKWSKKFFSFIEGCLVKNYMQRPSTEQLLKHPFIRDQPNERQVRIQLKDHIDRTRKKRGEKDETEYEYSGSEEEEEEVPEQEGEPSSIVNVPGESTLRRDFLRLQQENKERSEALRRQQLLQEQQLREQEEYKRQLLAERQKRIEQQKEQRRRLEEQQRREREARRQQEREQRRREQEEKRRLEELERRRKEEEERRRAEEEKRRVEREQEYIRRQLEEEQRHLEVLQQQLLQEQAMLLHDHRRPHPQHSQQPPPPQQERSKPSFHAPEPKAHYEPADRAREVEDRFRKTNHSSPEAQSKQTGRVLEPPVPSRSESFSNGNSESVHPALQRPAEPQVPVRTTSRSPVLSRRDSPLQGSGQQNSQAGQRNSTSSIEPRLLWERVEKLVPRPGSGSSSGSSNSGSQPGSHPGSQSGSGERFRVRSSSKSEGSPSQRLENAVKKPEDKKEVFRPLKPADLTALAKELRAVEDVRPPHKVTDYSSSSEESGTTDEEDDDVEQEGADESTSGPEDTRAASSLNLSNGETESVKTMIVHDDVESEPAMTPSKEGTLIVRQSTVDQKRASHHESNGFAGRIHLLPDLLQQSHSSSTSSTSSSPSSSQPTPTMSPQTPQDKLTANETQSASSTLQKHKSSSSFTPFIDPRLLQISPSSGTTVTSVVGFSCDGMRPEAIRQDPTRKGSVVNVNPTNTRPQSDTPEIRKYKKRFNSEILCAALWGVNLLVGTESGLMLLDRSGQGKVYPLINRRRFQQMDVLEGLNVLVTISGKKDKLRVYYLSWLRNKILHNDPEVEKKQGWTTVGDLEGCVHYKVVKYERIKFLVIALKSSVEVYAWAPKPYHKFMAFKSFGELVHKPLLVDLTVEEGQRLKVIYGSCAGFHAVDVDSGSVYDIYLPTHIQCSIKPHAIIILPNTDGMELLVCYEDEGVYVNTYGRITKDVVLQWGEMPTSVAYIRSNQTMGWGEKAIEIRSVETGHLDGVFMHKRAQRLKFLCERNDKVFFASVRSGGSSQVYFMTLGRTSLLSW

SEQ ID NO: 32282 - protein, 213 aa, Homo sapiens
MAVLSAPGLRGFRILGLRSSVGPAVQARGVHQSVATDGPSSTQPALPKARAVAPKPSSRGEYVVAKLDDLVNWARRSSLWPMTFGLACCAVEMMHMAAPRYDMDRFGVVFRASPRQSDVMIVAGTLTNKMAPALRKVYDQMPEPRYVVSMGSCANGGGYYHYSYSVVRGCDRIVPVDIYIPGCPPTAEALLYGILQLQRKIKRERRLQIWYRR

SEQ ID NO: 32283 - protein, 206 aa, Homo sapiens
MAVLSAPGLRGFRILGLRSSVGPAVQARGVHQSVATDGPSSTQPALPKARAVAPKPSSRGEYVVAKLDDLVNWARRSSLWPMTFGLACCAVEMMHMAAPRYDMDRFGVVFRASPRQSDVMIVAGTLTNKMAPALRKVYDQMPEPRYVVSMGSCANGGGYYHYSYSVVRGCDRIVPVDIYIPGRAGTAPPTRELETGPAPHGARRPL

SEQ ID NO: 32284 - protein, 337 aa, Homo sapiens
MAAPEPLRPRLCRLVRGEQGYGFHLHGEKGRRGQFIRRVEPGSPAEAAALRAGDRLVEVNGVNVEGETHHQVVQRIKAVEGQTRLLVVDQETDEELRRRQLTCTEEMAQRGLPPAHDPWEPKPDWAHTGSHSSEAGKKDVSGPLRELRPRLCHLRKGPQGYGFNLHSDKSRPGQYIRSVDPGSPAARSGLRAQDRLIEVNGQNVEGLRHAEVVASIKAREDEARLLVVDPETDEHFKRLRVTPTEEHVEGPLPSPVTNGTSPAQLNGGSACSSRSDLPGSDKDTEDGSAWKQDPFQESGLHLSPTAAEAKEKARAMRVNKRAPQMDWNRKREIFSNF

SEQ ID NO: 32285 - protein, 326 aa, Homo sapiens
MAAPEPLRPRLCRLVRGEQGYGFHLHGEKGRRGQFIRRVEPGSPAEAAALRAGDRLVEVNGVNVEGETHHQVVQRIKAVEGQTRLLVVDQETDEELRRRQLTCTEEMAQRGLPPAHDPWEPKPDWAHTGSHSSEAGKKDVSGPLRELRPRLCHLRKGPQGYGFNLHSDKSRPGQYIRSVDPGSPAARSGLRAQDRLIEVNGQNVEGLRHAEVVASIKAREDEARLLVVDPETDEHFKRLRVTPTEEHVEGPLPSPVTNGTSPAQLNGGSACSSRSDLPGSDKDTEESGLHLSPTAAEAKEKARAMRVNKRAPQMDWNRKREIFSNF

SEQ ID NO: 32286 - protein, 226 aa, Homo sapiens
MARSGSATPPARAPGAPPRSPPQRLVQDVSGPLRELRPRLCHLRKGPQGYGFNLHSDKSRPGQYIRSVDPGSPAARSGLRAQDRLIEVNGQNVEGLRHAEVVASIKAREDEARLLVVDPETDEHFKRLRVTPTEEHVEGPLPSPVTNGTSPAQLNGGSACSSRSDLPGSDKDTEDGSAWKQDPFQESGLHLSPTAAEAKEKARAMRVNKRAPQMDWNRKREIFSNF

SEQ ID NO: 32287 - protein, 719 aa, Homo sapiens
MAALEEEFTLSSVVLSAGPEGLLGVEQSDKTDQFLVTDSGRTVILYKVSDQKPLGSWSVKQGQIITCPAVCNFQTGEYVVVHDNKVLRIWNNEDVNLDKVFKATLSAEVYRILSVQGTEPLVLFKEGAVRGLEALLADPQQKIETVISDEEVIKWTKFFVVFRHPVLIFITEKHGNYFAYVQMFNSRILTKYTLLLGQDENSVIKSFTASVDRKFISLMSLSSDGCIYETLIPIRPADPEKNQSLVKSLLLKAVVSGNARNGVALTALDQDHVAVLGSPLAASKECLSVWNIKFQTLQTSKELPQGTSGQLWYYGEHLFMLHGKSLTVIPYKCEVSSLAGALGKLKHSQDPGTHVVSHFVNWETPQGCGLGFQNSEQSRRILRRRKIEVSLQPEVPPSKQLLSTIMKDSEKHIEVEVRKFLALKQTPDFHTVIGDTVTGLLERCKAEPSFYPRNCLMQLIQTHVLSYSLCPDLMEIALKKKDVQLLQLCLQQFPDIPESVTCACLKIFLSIGDDSLQETDVNMESVFDYSINSVHDEKMEEQTEILQNGFNPEEDKCNNCDQELNKKPQDETKESTSCPVVQKRAALLNAILHSAYSETFLLPHLKDIPAQHITLFLKYLYFLYLKCSENATMTLPGIHPPTLNQIMDWICLLLDANFTVVVMMPEAKRLLINLYKLVKSQISVYSELNKIEVSFRELQKLNQEKNNRGLYSIEVLELF

SEQ ID NO: 32288 - protein, 169 aa, Homo sapiens
MAALEEEFTLSSVVLSAGPEGLLGVEQSDKTDQFLVTDSGRTVILYKVSDQKPLGSWSVKQGQIITCPAVCNFQTGEYVVVHDNKVLRIWNNEDVNLDKVFKATLSAEVYRILSVQGTEPLVLFKEGAVRGLEALLADPQQKIETVISDEEVINMEITLLTCKCLTHVS

SEQ ID NO: 32289 - protein, 210 aa, Homo sapiens
MRCLTTPMLLRALAQAARAGPPGGRSLHSSAVAATYKYVNMQDPEMDMKSVTDRAARTLLWTELFRGLGMTLSYLFREPATINYPFEKGPLSPRFRGEHALRRYPSGEERCIACKLCEAICPAQAITIEAEPRADGSRRTTRYDIDMTKCIYCGFCQEACPVDAIVEGPNFEFSTETHEELLYNKEKLLNNGDKWEAEIAANIQADYLYR

SEQ ID NO: 32290 - protein, 816 aa, Homo sapiens
MSRPQGLLWLPLLFTPVCVMLNSNVLLWLTALAIKFTLIDSQAQYPVVNTNYGKIRGLRTPLPNEILGPVEQYLGVPYASPPTGERRFQPPEPPSSWTGIRNTTQFAAVCPQHLDERSLLHDMLPIWFTANLDTLMTYVQDQNEDCLYLNIYVPTEDDIHDQNSKKPVMVYIHGGSYMEGTGNMIDGSILASYGNVIVITINYRLGILGFLSTGDQAAKGNYGLLDQIQALRWIEENVGAFGGDPKRVTIFGSGAGASCVSLLTLSHYSEGLFQKAIIQSGTALSSWAVNYQPAKYTRILADKVGCNMLDTTDMVECLRNKNYKELIQQTITPATYHIAFGPVIDGDVIPDDPQILMEQGEFLNYDIMLGVNQGEGLKFVDGIVDNEDGVTPNDFDFSVSNFVDNLYGYPEGKDTLRETIKFMYTDWADKENPETRRKTLVALFTDHQWVAPAVATADLHAQYGSPTYFYAFYHHCQSEMKPSWADSAHGDEVPYVFGIPMIGPTELFSCNFSKNDVMLSAVVMTYWTNFAKTGDPNQPVPQDTKFIHTKPNRFEEVAWSKYNPKDQLYLHIGLKPRVRDHYRATKVAFWLELVPHLHNLNEIFQYVSTTTKVPPPDMTSFPYGTRRSPAKIWPTTKRPAITPANNPKHSKDPHKTGPEDTTVLIETKRDYSTELSVTIAVGASLLFLNILAFAALYYKKDKRRHETHRRPSPQRNTTNDIAHIQNEEIMSLQMKQLEHDHECESLQAHDTLRLTCPPDYTLTLRRSPDDIPLMTPNTITMIPNTLTGMQPLHTFNTFSGGQNSTNLPHGHSTTRV

SEQ ID NO: 32291 - protein, 836 aa, Homo sapiens
MSRPQGLLWLPLLFTPVCVMLNSNVLLWLTALAIKFTLIDSQAQYPVVNTNYGKIRGLRTPLPNEILGPVEQYLGVPYASPPTGERRFQPPEPPSSWTGIRNTTQFAAVCPQHLDERSLLHDMLPIWFTANLDTLMTYVQDQNEDCLYLNIYVPTEDGANTKKNADDITSNDRGEDEDIHDQNSKKPVMVYIHGGSYMEGTGNMIDGSILASYGNVIVITINYRLGILGFLSTGDQAAKGNYGLLDQIQALRWIEENVGAFGGDPKRVTIFGSGAGASCVSLLTLSHYSEGLFQKAIIQSGTALSSWAVNYQPAKYTRILADKVGCNMLDTTDMVECLRNKNYKELIQQTITPATYHIAFGPVIDGDVIPDDPQILMEQGEFLNYDIMLGVNQGEGLKFVDGIVDNEDGVTPNDFDFSVSNFVDNLYGYPEGKDTLRETIKFMYTDWADKENPETRRKTLVALFTDHQWVAPAVATADLHAQYGSPTYFYAFYHHCQSEMKPSWADSAHGDEVPYVFGIPMIGPTELFSCNFSKNDVMLSAVVMTYWTNFAKTGDPNQPVPQDTKFIHTKPNRFEEVAWSKYNPKDQLYLHIGLKPRVRDHYRATKVAFWLELVPHLHNLNEIFQYVSTTTKVPPPDMTSFPYGTRRSPAKIWPTTKRPAITPANNPKHSKDPHKTGPEDTTVLIETKRDYSTELSVTIAVGASLLFLNILAFAALYYKKDKRRHETHRRPSPQRNTTNDIAHIQNEEIMSLQMKQLEHDHECESLQAHDTLRLTCPPDYTLTLRRSPDDIPLMTPNTITMIPNTLTGMQPLHTFNTFSGGQNSTNLPHGHSTTRV

SEQ ID NO: 32292 - protein, 816 aa, Homo sapiens
MLRPQGLLWLPLLFTSVCVMLNSNVLLWITALAIKFTLIDSQAQYPVVNTNYGKIQGLRTPLPSEILGPVEQYLGVPYASPPTGERRFQPPESPSSWTGIRNATQFSAVCPQHLDERFLLHDMLPIWFTTSLDTLMTYVQDQNEDCLYLNIYVPMEDDIHEQNSKKPVMVYIHGGSYMEGTGNMIDGSILASYGNVIVITINYRLGILGFLSTGDQAAKGNYGLLDQIQALRWIEENVGAFGGDPKRVTIFGSGAGASCVSLLTLSHYSEGLFQKAIIQSGTALSSWAVNYQPAKYTRILADKVGCNMLDTTDMVECLKNKNYKELIQQTITPATYHIAFGPVIDGDVIPDDPQILMEQGEFLNYDIMLGVNQGEGLKFVDGIVDNEDGVTPNDFDFSVSNFVDNLYGYPEGKDTLRETIKFMYTDWADKENPETRRKTLVALFTDHQWVAPAVATADLHAQYGSPTYFYAFYHHCQSEMKPSWADSAHGDEVPYVFGIPMIGPTELFSCNFSKNDVMLSAVVMTYWTNFAKTGDPNQPVPQDTKFIHTKPNRFEEVAWSKYNPKDQLYLHIGLKPRVRDHYRATKVAFWLELVPHLHNLNEIFQYVSTTTKVPPPDMTSFPYGTRRSPAKIWPTTKRPAITPANNPKHSKDPHKTGPEDTTVLIETKRDYSTELSVTIAVGASLLFLNILAFAALYYKKDKRRHETHRHPSPQRNTTNDITHIQNEEIMSLQMKQLEHDHECESLQAHDTLRLTCPPDYTLTLRRSPDDIPFMTPNTITMIPNTLMGMQPLHTFKTFSGGQNSTNLPHGHSTTRV

SEQ ID NO: 32293 - protein, 648 aa, Homo sapiens
MVYIHGGSYMEGTGNMIDGSILASYGNVIVITINYRLGILGFLSTGDQAAKGNYGLLDQIQALRWIEENVGAFGGDPKRVTIFGSGAGASCVSLLTLSHYSEGLFQKAIIQSGTALSSWAVNYQPAKYTRILADKVGCNMLDTTDMVECLKNKNYKELIQQTITPATYHIAFGPVIDGDVIPDDPQILMEQGEFLNYDIMLGVNQGEGLKFVDGIVDNEDGVTPNDFDFSVSNFVDNLYGYPEGKDTLRETIKFMYTDWADKENPETRRKTLVALFTDHQWVAPAVATADLHAQYGSPTYFYAFYHHCQSEMKPSWADSAHGDEVPYVFGIPMIGPTELFSCNFSKNDVMLSAVVMTYWTNFAKTGDPNQPVPQDTKFIHTKPNRFEEVAWSKYNPKDQLYLHIGLKPRVRDHYRATKVAFWLELVPHLHNLNEIFQYVSTTTKVPPPDMTSFPYGTRRSPAKIWPTTKRPAITPANNPKHSKDPHKTGPEDTTVLIETKRDYSTELSVTIAVGASLLFLNILAFAALYYKKDKRRHETHRHPSPQRNTTNDITHIQNEEIMSLQMKQLEHDHECESLQAHDTLRLTCPPDYTLTLRRSPDDIPFMTPNTITMIPNTLMGMQPLHTFKTFSGGQNSTNLPHGHSTTRV

SEQ ID NO: 32294 - protein, 134 aa, Homo sapiens
MLPIWFTTSLDTLMTYVQDQNEDCLYLNIYVPMEDGTNIKRNADDITSNDHGEDKDIHEQNSKKPVMVYIHGGSYMEGTGNMIDGSILASYGNVIVITINYRLGILGMQEARLCGSSKMFNYFKSPFTNLINFF

SEQ ID NO: 32295 - protein, 256 aa, Homo sapiens
MLRPQGLLWLPLLFTSVCVMLNSNVLLWITALAIKFTLIDSQAQYPVVNTNYGKIQGLRTPLPSEILGPVEQYLGVPYASPPTGERRFQPPESPSSWTGIRNATQFSAVCPQHLDERFLLHDMLPIWFTTSLDTLMTYVQDQNEDCLYLNIYVPMEDGTNIKRNADDITSNDHGEDKDIHEQNSKKPVMVYIHGGSYMEGTGNMIDGSILASYGNVIVITINYRLGILGMQEARLCGSSKMFNYFKSPFTNLINFF

SEQ ID NO: 32296 - protein, 213 aa, Homo sapiens
MGRNKKKKRDGDDRRPRLVLSFDEEKRREYLTGFHKRKVERKKAAIEEIKQRLKEEQRKLREERHQEYLKMLAEREEALEEADELDRLVTAKTESVQYDHPNHTVTVTTISDLDLSGARLLGLTPPEGGAGDRSEEEASSTEKPTKALPRKSRDPLLSQRISSLTASLHAHSRKKVKRKHPRRAQDSKKPPRAPRTSKAQRRRLTGKARHSGE

SEQ ID NO: 32297 - protein, 571 aa, Homo sapiens
MVTPSPPGNHSLSLEAPRLHTASDLLGNHSLGLPLITALVGSRDRRGRVFSPVPVPLPTNPTTQHPTRQKLPSTLSGHRVCQAHGEPVLGLCPLLPLFCCPPHPPDPWSLERPRFCLLSKEEGKSFGFHLQQELGRAGHVVCRVDPGTSAQRQGLQEGDRILAVNNDVVEHEDYAVVVRRIRASSPRVLLTVLARHAHDVARAQLGEDAHLCPTLGPGVRPRLCHIVKDEGGFGFSVTHGNQGPFWLVLSTGGAAERAGVPPGARLLEVNGVSVEKFTHNQLTRKLWQSGQQVTLLVAGPEVEEQCRQLGLPLAAPLAEGWALPTKPRCLHLEKGPQGFGFLLREEKGLDGRPGQFLWEVDPGLPAKKAGMQAGDRLVAVAGESVEGLGHEETVSRIQGQGSCVSLTVVDPEADRFFSMVRLSPLLFLENTEAPASPRGSSSASLVETEDPSLEDTSVPSVPLGSRQCFLYPGPGGSYGFRLSCVASGPRLFISQVTPGGSAARAGLQVGDVILEVNGYPVGGQNDLERLQQLPEAEPPLCLKLAARSLRGLEAWIPPGAAEDWALASDLL

SEQ ID NO: 32298 - protein, 505 aa, Homo sapiens
MEKAADLQDTASLTLKFKFNPKLGIDNPVLSLAEDHDPYDPWSLERPRFCLLSKEEGKSFGFHLQQELGRAGHVVCRVDPGTSAQRQGLQEGDRILAVNNDVVEHEDYAVVVRRIRASSPRVLLTVLARHAHDVARAQLGEDAHLCPTLGPGVRPRLCHIVKDEGGFGFSVTHGNQGPFWLVLSTGGAAERAGVPPGARLLEVNGVSVEKFTHNQLTRKLWQSGQQVTLLVAGPEVEEQCRQLGLPLAAPLAEGWALPTKPRCLHLEKGPQGFGFLLREEKGLDGRPGQFLWEVDPGLPAKKAGMQAGDRLVAVAGESVEGLGHEETVSRIQGQGSCVSLTVVDPEADRFFSMVRLSPLLFLENTEAPASPRGSSSASLVETEDPSLEDTSVPSVPLGSRQCFLYPGPGGSYGFRLSCVASGPRLFISQVTPGGSAARAGLQVGDVILEVNGYPVGGQNDLERLQQLPEAEPPLCLKLAARSLRGLEAWIPPGAAEDWALASDLL

SEQ ID NO: 32299 - protein, 491 aa, Homo sapiens
MEKAADLQDTASLTLKFKFNPKLGIDNPVLSLAEDHDPYDPWSLERPRFCLLSKEEGKSFGFHLQQELGRAGHVVCRVDPGTSAQRQGLQEGDRILAVNNDVVEHEDYAVVVRRIRASSPRVLLTVLARHAHDVARAQLGEDAHLCPTLGPGVRPRLCHIVKDEGGFGFSVTHGNQGPFWLVLSTGGAAERAGVPPGARLLEVNGLWQSGQQVTLLVAGPEVEEQCRQLGLPLAAPLAEGWALPTKPRCLHLEKGPQGFGFLLREEKGLDGRPGQFLWEVDPGLPAKKAGMQAGDRLVAVAGESVEGLGHEETVSRIQGQGSCVSLTVVDPEADRFFSMVRLSPLLFLENTEAPASPRGSSSASLVETEDPSLEDTSVPSVPLGSRQCFLYPGPGGSYGFRLSCVASGPRLFISQVTPGGSAARAGLQVGDVILEVNGYPVGGQNDLERLQQLPEAEPPLCLKLAARSLRGLEAWIPPGAAEDWALASDLL

SEQ ID NO: 32300 - protein, 386 aa, Homo sapiens
MVTPSPPGNHSLSLEAPRLHTASDLLGNHSLGLPLITALVGSRDRRGRVFSPVPVPLPTNPTTQHPTRQKLPSTLSGHRVCQAHGEPVLGLCPLLPLFCCPPHPPDPWSLERPRFCLLSKEEGKSFGFHLQQELGRAGHVVCRVDPGTSAQRQGLQEGDRILAVNNDVVEHEDYAVVVRRIRASSPRVLLTVLARHAHDVARAQLGEDAHLCPTLGPGVRPRLCHIVKDEGGFGFSVTHGNQGPFWLVLSTGGAAERAGVPPGARLLEVNGVSVEKFTHNQLTRKLWQSGQQVTLLVAGPEVEEQCRQLGLPLAAPLAEGWALPTKPRCLHLEKGPQGFGFLLREEKGLDGRPGEWEPWGRWGKVGLGVGTQAYIHLSVHRRGVPV

SEQ ID NO: 32301 - protein, 220 aa, Homo sapiens
MEKAADLQDTASLTLKFKFNPKLGIDNPVLSLAEDHDPYDPWSLERPRFCLLSKEEGKSFGFHLQQELGRAGHVVCRVDPGTSAQRQGLQEGDRILAVNNDVVEHEDYAVVVRRIRASSPRVLLTVLARHAHDVARAQLGEDAHLCPTLGPGVRPRLCHIVKDEGGFGFSVTHGNQGPFWLVLSTGGAAERAGVPPGARLLEVNGVSVEKFTHNQLTRKL

SEQ ID NO: 32302 - protein, 436 aa, Homo sapiens
MSDSTWMSADPHLASSLSPSQDERMRSPQNLHSQEDDDSSSESGSGNGSSTLNPSTSSSTQGDPAFPEMNGNGAVAPMDFTTAAEDQPINLCDKLPPATALGTASYPSDGCGADGLRSRVKYGVKTTPESPPYSSGSYDSIKTEVSGCPEDLTVGRAPTADDDDDDHDDHEDNDKMNDSEGMDPERLKAFNMFVRLFVDENLDRMVPISKQPKEKIQAIIESCSRQFPEFQERARKRIRTYLKSCRRMKKNGMEMTRPTPPHLTSAMAENILAAACESETRKAAKRMRLEIYQSSQDEPIALDKQHSRDSAAITHSTYSLPASSYSQDPVYANGGLNYSYRGYGALSSNLQPPASLQTGNHSNGPTDLSMKGGASTTSTTPTPTPSSTSTSRPVPTAQLSPTEISAVRQLIAGYRESAAFLLRSADELENLILQQN

SEQ ID NO: 32303 - protein, 398 aa, Homo sapiens
MSDSTWMSADPHLASSLSPSQDERMRSPQNLHSQEDDDSSSESGSGNGSSTLNPSTSSSTQGDPAFPEMNGNGAVAPMDFTTAAEDQPINLCDKLPPATALGTASYPSDGCGADGLRSRVKYGVKTTPESPPYSSGSYDSIKTEVSGCPEDLTVGRAPTADDDDDDHDDHEDNDKMNDSEGMDPERLKAFNMFVRLFVDENLDRMVPISKQPKEKIQAIIESCSRQFPEFQERARKRIRTYLKSCRRMKKNGMEMTRPTPPHLTSAMAENILAAACESETRKAAKRMRLEIYQSSQDEPIALDKQHSRDSAAITHSTYSLPASSYSQDPVYANGGLNYSYRGYGALSSNLQPPASLQTGNHSNGPTDLSMKGGASTTSTTPSALSGEPPTRRWGCSSV

SEQ ID NO: 32304 - protein, 527 aa, Homo sapiens
MSLCGARANAKMMAAYNGGTSAAAAGHHHHHHHHLPHLPPPHLHHHHHPQHHLHPGSAAAVHPVQQHTSSAAAAAAAAAAAAAMLNPGQQQPYFPSPAPGQAPGPAAAAPAQVQAAAAATVKAHHHQHSHHPQQQLDIEPDRPIGYGAFGVVWSVTDPRDGKRVALKKMPNVFQNLVSCKRVFRELKMLCFFKHDNVLSALDILQPPHIDYFEEIYVVTELMQSDLHKIIVSPQPLSSDHVKVFLYQILRGLKYLHSAGILHRDIKPGNLLVNSNCVLKICDFGLARVEELDESRHMTQEVVTQYYRAPEILMGSRHYSNAIDIWSVGCIFAELLGRRILFQAQSPIQQLDLITDLLGTPSLEAMRTACEGAKAHILRGPHKQPSLPVLYTLSSQATHEAVHLLCRMLVFDPSKRISAKDALAHPYLDEGRLRYHTCMCKCCFSTSTGRVYTSDFEPVTNPKFDDTFEKNLSSVRQVKEIIHQFILEQQKGNRVPLCINPQSAAFKSFISSTVAQPSEMPPSPLVWE

SEQ ID NO: 32305 - protein, 1651 aa, Homo sapiens
MPFAKRIVEPQWLCRQRRPAPGPAVDASGGSAEPPPPLQPPGRRDLDEVEAPGPEEPARAVPAPSGLPPPPPPLPAPADQTQPPHGEASVAGEESTAGIPEAAPAAGEASSAAAAAAVLLMLDLCAVSNAALARVLRQLSDVARHACSLFQELESDIQLTHRRVWALQGKLGGVQRVLSTLDPKQEAVPVSNLDIESKLSVYYRAPWHQQRNIFLPATRPPCVEELHRHARQSLQALRREHRSRSDRREQRAAAPLSIAAPPLPAYPPAHSQRRREFKDRHFLTFNSTRSPSPTECCHMTPWSRKSHPPEDEDTDVMLGQRPKNPIHNIPSTLDKQTNWSKALPLPTPEEKMKQDAQVISSCIIPINVTGVGFDREASIRCSLVHSQSVLQRRRKLRRRKTISGIPRRVQQEIDSDESPVARERNVIVHTNPDPSNTVNRISGTRDSECQTEDILIAAPSRRRIRAQRGQSIAASLSHSAGNISALADKGDTMFTPAVSSRTRSRSLPREGNRGGDAEPKVGAKPSAYEEGESFVGDHERTPNDFSEAPSSPSAQDHQPTLGLACSQHLHSPQHKLSERGRSRLSRMAADSGSCDISSNSDTFGSPIHCISTAGVLLSSHMDQKDDHQSSSGNWSGSSSTCPSQTSETIPPAASPPLTGSSHCDSELSLNTAPHANEDASVFVTEQYNDHLDKVRGHRANSFTSTVADLLDDPNNSNTSDSEWNYLHHHHDASCRQDFSPERPKADSLGCPSFTSMATYDSFLEKSPSDKADTSSHFSVDTEGYYTSMHFDCGLKGNKSYVCHYAALGPENGQGVGASPGLPDCAWQDYLDHKRQGRPSISFRKPKAKPTPPKRSSSLRKSDGNADISEKKEPKISSGQHLPHSSREMKLPLDFANTPSRMENANLPTKQEPSWINQSEQGIKEPQLDASDIPPFKDEVAESTHYADLWLLNDLKTNDPYRSLSNSSTATGTTVIECIKSPESSESQTSQSESRATTPSLPSVDNEFKLASPEKLAGLASPSSGYSSQSETPTSSFPTAFFSGPLSPGGSKRKPKVPERKSSLQQPSLKDGTISLSKDLELPIIPPTHLDLSALHNVLNKPFHHRHPLHVFTHNKQNTVGETLRSNPPPSLAITPTILKSVNLRSINKSEEVKQKEENNTDLPYLEESTLTTAALSPSKIRPHTANKSVSRQYSTEDTILSFLDSSAVEMGPDKLHLEKNSTFDVKNRCDPETITSAGSSLLDSNVTKDQVRTETEPIPENTPTKNCAFPTEGFQRVSAARPNDLDGKIIQYGPGPDETLEQVQKAPSAGLEEVAQPESVDVITSQSDSPTRATDVSNQFKHQFVMSRHHDKVPGTISYESEITSVNSFPEKCSKQENIASGISAKSASDNSKAEETQGNVDEASLKESSPSDDSIISPLSEDSQAEAEGVFVSPNKPRTTEDLFAVIHRSKRKVLGRKDSGDMSVRSKSRAPLSSSSSSASSITSPSSNVTTPNSQRSPGLIYRNAKKSNTSNEEFKLLLLKKGSRSDSSYRMSATEILKSPILPKPPGELTAESPQSTDDAHQGSQGAEALSPLSPCSPRVNAEGFSSKSFATSASARVGRSRAPPAASSSRYSVRCRLYNTPMQAISEGETENSDGSPHDDRSSQSST

SEQ ID NO: 32306 - protein, 1630 aa, Homo sapiens
MPFAKRIVEPQWLCRQRRPAPGPAVDASGGSAEPPPPLQPPGRRDLDEVEAPGPEEPARAVPAPSGLPPPPPPLPAPADQTQPPHGEASVAGEESTAGIPEAAPAAGEASSAAAAAAVLLMLDLCAVSNAALARVLRQLSDVARHACSLFQELESDIQLTHRRVWALQGKLGGVQRVLSTLDPKQEAVPVSNLDIESKLSVYYRAPWHQQRNIFLPATRPPCVEELHRHARQSLQALRREHRSRSDRREQRAAAPLSIAAPPLPAYPPAHSQRRREFKDRHFLTSHPPEDEDTDVMLGQRPKNPIHNIPSTLDKQTNWSKALPLPTPEEKMKQDAQVISSCIIPINVTGVGFDREASIRCSLVHSQSVLQRRRKLRRRKTISGIPRRVQQEIDSDESPVARERNVIVHTNPDPSNTVNRISGTRDSECQTEDILIAAPSRRRIRAQRGQSIAASLSHSAGNISALADKGDTMFTPAVSSRTRSRSLPREGNRGGDAEPKVGAKPSAYEEGESFVGDHERTPNDFSEAPSSPSAQDHQPTLGLACSQHLHSPQHKLSERGRSRLSRMAADSGSCDISSNSDTFGSPIHCISTAGVLLSSHMDQKDDHQSSSGNWSGSSSTCPSQTSETIPPAASPPLTGSSHCDSELSLNTAPHANEDASVFVTEQYNDHLDKVRGHRANSFTSTVADLLDDPNNSNTSDSEWNYLHHHHDASCRQDFSPERPKADSLGCPSFTSMATYDSFLEKSPSDKADTSSHFSVDTEGYYTSMHFDCGLKGNKSYVCHYAALGPENGQGVGASPGLPDCAWQDYLDHKRQGRPSISFRKPKAKPTPPKRSSSLRKSDGNADISEKKEPKISSGQHLPHSSREMKLPLDFANTPSRMENANLPTKQEPSWINQSEQGIKEPQLDASDIPPFKDEVAESTHYADLWLLNDLKTNDPYRSLSNSSTATGTTVIECIKSPESSESQTSQSESRATTPSLPSVDNEFKLASPEKLAGLASPSSGYSSQSETPTSSFPTAFFSGPLSPGGSKRKPKVPERKSSLQQPSLKDGTISLSKDLELPIIPPTHLDLSALHNVLNKPFHHRHPLHVFTHNKQNTVGETLRSNPPPSLAITPTILKSVNLRSINKSEEVKQKEENNTDLPYLEESTLTTAALSPSKIRPHTANKSVSRQYSTEDTILSFLDSSAVEMGPDKLHLEKNSTFDVKNRCDPETITSAGSSLLDSNVTKDQVRTETEPIPENTPTKNCAFPTEGFQRVSAARPNDLDGKIIQYGPGPDETLEQVQKAPSAGLEEVAQPESVDVITSQSDSPTRATDVSNQFKHQFVMSRHHDKVPGTISYESEITSVNSFPEKCSKQENIASGISAKSASDNSKAEETQGNVDEASLKESSPSDDSIISPLSEDSQAEAEGVFVSPNKPRTTEDLFAVIHRSKRKVLGRKDSGDMSVRSKSRAPLSSSSSSASSITSPSSNVTTPNSQRSPGLIYRNAKKSNTSNEEFKLLLLKKGSRSDSSYRMSATEILKSPILPKPPGELTAESPQSTDDAHQGSQGAEALSPLSPCSPRVNAEGFSSKSFATSASARVGRSRAPPAASSSRYSVRCRLYNTPMQAISEGETENSDGSPHDDRSSQSST

SEQ ID NO: 32307 - protein, 1474 aa, Homo sapiens
MALACCMPKNAAVSNLDIESKLSVYYRAPWHQQRNIFLPATRPPCVEELHRHARQSLQALRREHRSRSDRREQRAAAPLSIAAPPLPAYPPAHSQRRREFKDRHFLTFNSTRSPSPTECCHMTPWSRKSHPPEDEDTDVMLGQRPKNPIHNIPSTLDKQTNWSKALPLPTPEEKMKQDAQVISSCIIPINVTGVGFDREASIRCSLVHSQSVLQRRRKLRRRKTISGIPRRVQQEIDSDESPVARERNVIVHTNPDPSNTVNRISGTRDSECQTEDILIAAPSRRRIRAQRGQSIAASLSHSAGNISALADKGDTMFTPAVSSRTRSRSLPREGNRGGDAEPKVGAKPSAYEEGESFVGDHERTPNDFSEAPSSPSAQDHQPTLGLACSQHLHSPQHKLSERGRSRLSRMAADSGSCDISSNSDTFGSPIHCISTAGVLLSSHMDQKDDHQSSSGNWSGSSSTCPSQTSETIPPAASPPLTGSSHCDSELSLNTAPHANEDASVFVTEQYNDHLDKVRGHRANSFTSTVADLLDDPNNSNTSDSEWNYLHHHHDASCRQDFSPERPKADSLGCPSFTSMATYDSFLEKSPSDKADTSSHFSVDTEGYYTSMHFDCGLKGNKSYVCHYAALGPENGQGVGASPGLPDCAWQDYLDHKRQGRPSISFRKPKAKPTPPKRSSSLRKSDGNADISEKKEPKISSGQHLPHSSREMKLPLDFANTPSRMENANLPTKQEPSWINQSEQGIKEPQLDASDIPPFKDEVAESTHYADLWLLNDLKTNDPYRSLSNSSTATGTTVIECIKSPESSESQTSQSESRATTPSLPSVDNEFKLASPEKLAGLASPSSGYSSQSETPTSSFPTAFFSGPLSPGGSKRKPKVPERKSSLQQPSLKDGTISLSKDLELPIIPPTHLDLSALHNVLNKPFHHRHPLHVFTHNKQNTVGETLRSNPPPSLAITPTILKSVNLRSINKSEEVKQKEENNTDLPYLEESTLTTAALSPSKIRPHTANKSVSRQYSTEDTILSFLDSSAVEMGPDKLHLEKNSTFDVKNRCDPETITSAGSSLLDSNVTKDQVRTETEPIPENTPTKNCAFPTEGFQRVSAARPNDLDGKIIQYGPGPDETLEQVQKAPSAGLEEVAQPESVDVITSQSDSPTRATDVSNQFKHQFVMSRHHDKVPGTISYESEITSVNSFPEKCSKQENIASGISAKSASDNSKAEETQGNVDEASLKESSPSDDSIISPLSEDSQAEAEGVFVSPNKPRTTEDLFAVIHRSKRKVLGRKDSGDMSVRSKSRAPLSSSSSSASSITSPSSNVTTPNSQRSPGLIYRNAKKSNTSNEEFKLLLLKKGSRSDSSYRMSATEILKSPILPKPPGELTAESPQSTDDAHQGSQGAEALSPLSPCSPRVNAEGFSSKSFATSASARVGRSRAPPAASSSRYSVRCRLYNTPMQAISEGETENSDGSPHDDRSSQSST

SEQ ID NO: 32308 - protein, 1473 aa, Homo sapiens
MDNALFLCLAAVSNLDIESKLSVYYRAPWHQQRNIFLPATRPPCVEELHRHARQSLQALRREHRSRSDRREQRAAAPLSIAAPPLPAYPPAHSQRRREFKDRHFLTFNSTRSPSPTECCHMTPWSRKSHPPEDEDTDVMLGQRPKNPIHNIPSTLDKQTNWSKALPLPTPEEKMKQDAQVISSCIIPINVTGVGFDREASIRCSLVHSQSVLQRRRKLRRRKTISGIPRRVQQEIDSDESPVARERNVIVHTNPDPSNTVNRISGTRDSECQTEDILIAAPSRRRIRAQRGQSIAASLSHSAGNISALADKGDTMFTPAVSSRTRSRSLPREGNRGGDAEPKVGAKPSAYEEGESFVGDHERTPNDFSEAPSSPSAQDHQPTLGLACSQHLHSPQHKLSERGRSRLSRMAADSGSCDISSNSDTFGSPIHCISTAGVLLSSHMDQKDDHQSSSGNWSGSSSTCPSQTSETIPPAASPPLTGSSHCDSELSLNTAPHANEDASVFVTEQYNDHLDKVRGHRANSFTSTVADLLDDPNNSNTSDSEWNYLHHHHDASCRQDFSPERPKADSLGCPSFTSMATYDSFLEKSPSDKADTSSHFSVDTEGYYTSMHFDCGLKGNKSYVCHYAALGPENGQGVGASPGLPDCAWQDYLDHKRQGRPSISFRKPKAKPTPPKRSSSLRKSDGNADISEKKEPKISSGQHLPHSSREMKLPLDFANTPSRMENANLPTKQEPSWINQSEQGIKEPQLDASDIPPFKDEVAESTHYADLWLLNDLKTNDPYRSLSNSSTATGTTVIECIKSPESSESQTSQSESRATTPSLPSVDNEFKLASPEKLAGLASPSSGYSSQSETPTSSFPTAFFSGPLSPGGSKRKPKVPERKSSLQQPSLKDGTISLSKDLELPIIPPTHLDLSALHNVLNKPFHHRHPLHVFTHNKQNTVGETLRSNPPPSLAITPTILKSVNLRSINKSEEVKQKEENNTDLPYLEESTLTTAALSPSKIRPHTANKSVSRQYSTEDTILSFLDSSAVEMGPDKLHLEKNSTFDVKNRCDPETITSAGSSLLDSNVTKDQVRTETEPIPENTPTKNCAFPTEGFQRVSAARPNDLDGKIIQYGPGPDETLEQVQKAPSAGLEEVAQPESVDVITSQSDSPTRATDVSNQFKHQFVMSRHHDKVPGTISYESEITSVNSFPEKCSKQENIASGISAKSASDNSKAEETQGNVDEASLKESSPSDDSIISPLSEDSQAEAEGVFVSPNKPRTTEDLFAVIHRSKRKVLGRKDSGDMSVRSKSRAPLSSSSSSASSITSPSSNVTTPNSQRSPGLIYRNAKKSNTSNEEFKLLLLKKGSRSDSSYRMSATEILKSPILPKPPGELTAESPQSTDDAHQGSQGAEALSPLSPCSPRVNAEGFSSKSFATSASARVGRSRAPPAASSSRYSVRCRLYNTPMQAISEGETENSDGSPHDDRSSQSST

SEQ ID NO: 32309 - protein, 1120 aa, Homo sapiens
MAEAPPVSGTFKFNTDAAEFIPQEKKNSGLNCGTQRRLDSNRIGRRNYSSPPPCHLSRQVPYDEISAVHQHSYHPSGSKPKSQQTSFQSSPCNKSPKSHGLQNQPWQKLRNEKHHIRVKKAQSLAEQTSDTAGLESSTRSESGTDLREHSPSESEKEVVGADPRGAKPKKATQFVYSYGRGPKVKGKLKCEWSNRTTPKPEDAGPESTKPVGVFHPDSSEASSRKGVLDGYGARRNEQRRYPQKRPPWEVEGARPRPGRNPPKQEGHRHTNAGHRNNMGPIPKDDLNERPAKSTCDSENLAVINKSSRRVDQEKCTVRRQDPQVVSPFSRGKQNHVLKNVETHTGSLIEQLTTEKYECMVCCELVRVTAPVWSCQSCYHVFHLNCIKKWARSPASQADGQSGWRCPACQNVSAHVPNTYTCFCGKVKNPEWSRNEIPHSCGEVCRKKQPGQDCPHSCNLLCHPGPCPPCPAFMTKTCECGRTRHTVRCGQAVSVHCSNPCENILNCGQHQCAELCHGGQCQPCQIILNQVCYCGSTSRDVLCGTDVGKSDGFGDFSCLKICGKDLKCGNHTCSQVCHPQPCQQCPRLPQLVRCCPCGQTPLSQLLELGSSSRKTCMDPVPSCGKVCGKPLPCGSLDFIHTCEKLCHEGDCGPCSRTSVISCRCSFRTKELPCTSLKSEDATFMCDKRCNKKRLCGRHKCNEICCVDKEHKCPLICGRKLRCGLHRCEEPCHRGNCQTCWQASFDELTCHCGASVIYPPVPCGTRPPECTQTCARVHECDHPVYHSCHSEEKCPPCTFLTQKWCMGKHEFRSNIPCHLVDISCGLPCSATLPCGMHKCQRLCHKGECLVDEPCKQPCTTPRADCGHPCMAPCHTSSPCPVTACKAKVELQCECGRRKEMVICSEASSTYQRIAAISMASKITDMQLGGSVEISKLITKKEVHQARLECDEECSALERKKRLAEAFHISEDSDPFNIRSSGSKFSDSLKEDARKDLKFVSDVEKEMETLVEAVNKGKNSKKSHSFPPMNRDHRRIIHDLAQVYGLESVSYDSEPKRNVVVTAIRGKSVCPPTTLTGVLEREMQARPPPPIPHHRHQSDKNPGSSNLQKITKEPIIDYFDVQD

SEQ ID NO: 32310 - protein, 1024 aa, Homo sapiens
MAEAPPVSGTFKFNTDAAEFIPQEKKNSGLNCGTQRRLDSNRIGRRNYSSPPPCHLSRQVPYDEISAVHQHSYHPSGSKPKSQQTSFQSSPCNKSPKSHGLQNQPWQKLRNEKHHIRVKKAQSLAEQTSDTAGLESSTRSESGTDLREHSPSESEKEVVGADPRGAKPKKATQFVYSYGRGPKVKGKLKCEWSNRTTPKPEDAGPESTKPVGVFHPDSSEASSRKGVLDGYGARRNEQRRYPQKRPPWEVEGARPRPGRNPPKQEGHRHTNAGHRNNMGPIPKDDLNERPAKSTCDSENLAVINKSSRRVDQEKCTVRRQDPQVVSPFSRGKQNHVLKNVETHTGSLIEQLTTEKYECMVCCELVRVTAPVWSCQSCYHVFHLNCIKKWARSPASQADGQSGWRCPACQNVSAHVPNTYTCFCGKVKNPEWSRNEIPHSCGEVCRKKQPGQDCPHSCNLLCHPGPCPPCPAFMTKTCECGRTRHTVRCGQAVSVHCSNPCENILNCGQHQCAELCHGGQCQPCQIILNQVCYCGSTSRDVLCGTDVGKSDGFGDFSCLKICGKDLKCGNHTCSQVCHPQPCQQCPRLPQLVRCCPCGQTPLSQLLELGSSSRKTCMDPVPSCGKVCGKPLPCGSLDFIHTCEKLCHEGDCGPCSRTSVISCRCSFRTKELPCTSLKSEDATFMCDKRCNKKRLCGRHKCNEICCVDKEHKCPLICGRKLRCGLHRCEEPCHRGNCQTCWQASFDELTCHCGASVIYPPVPCGTRPPECTQTCARVHECDHPVYHSCHSEEKCPPCTFLTQKWCMGKHEFRSNIPCHLVDISCGLPCSATLPCGMHKCQRLCHKGECLVDEPCKQPCTTPRADCGHPCMAPCHTSSPCPVTACKAKVELQCECGRRKEMVICSEASSTYQRIAAISMASKITDMQLGGSVEISKLITKKEVHQARLECDEECSALERKKRLAEAFHISEDSDPFNIRSSGSKFSDSLKEDARKDLKFVSDVEKEMETLVEAVNKVEVETSHWTFL

SEQ ID NO: 32311 - protein, 833 aa, Homo sapiens
MAEAPPVSGTFKFNTDAAEFIPQEKKNSGLNCGTQRRLDSNRIGRRNYSSPPPCHLSRQVPYDEISAVHQHSYHPSGSKPKSQQTSFQSSPCNKSPKSHGLQNQPWQKLRNEKHHIRVKKAQSLAEQTSDTAGLESSTRSESGTDLREHSPSESEKEVVGADPRGAKPKKATQFVYSYGRGPKVKGKLKCEWSNRTTPKPEDAGPESTKPVGVFHPDSSEASSRKGVLDGYGARRNEQRRYPQKRPPWEVEGARPRPGRNPPKQEGHRHTNAGHRNNMGPIPKDDLNERPAKSTCDSENLAVINKSSRRVDQEKCTVRRQDPQVVSPFSRGKQNHVLKNVETHTGSLIEQLTTEKYECMVCCELVRVTAPVWSCQSCYHVFHLNCIKKWARSPASQADGQSGWRCPACQNVSAHVPNTYTCFCGKVKNPEWSRNEIPHSCGEVCRKKQPGQDCPHSCNLLCHPGPCPPCPAFMTKTCECGRTRHTVRCGQAVSVHCSNPCENILNCGQHQCAELCHGGQCQPCQIILNQVCYCGSTSRDVLCGTDVGKSDGFGDFSCLKICGKDLKCGNHTCSQVCHPQPCQQCPRLPQLVRCCPCGQTPLSQLLELGSSSRKTCMDPVPSCGKVCGKPLPCGSLDFIHTCEKLCHEGDCGPCSRTSVISCRCSFRTKELPCTSLKSEDATFMCDKRCNKKRLCGRHKCNEICCVDKEHKCPLICGRKLRCGLHRCEEPCHRGNCQTCWQASFDELTCHCGASVIYPPVPCGTRPPECTQTCARVHECDHPVYHSCHSEEKCPPCTFLTQKWCMGKHEQSHYWASTQKKRSHYMKKIPAHACL

SEQ ID NO: 32312 - protein, 133 aa, Homo sapiens
MRKHVLAASFSMLSLLVIMGDTDSKTDSSFIMDSDPRRCMRHHYVDSISHPLYKCSSKMVLLARCEGHCSQASRSEPLVSFSTVLKQPFRSSCHCCRPQTSKLKALRLRCSGGMRLTATYRYILSCHCEECNS

SEQ ID NO: 32313 - protein, 1167 aa, Homo sapiens
MKVNRETKRLYVGGLSQDISEADLQNQFSRFGEVSDVEIITRKDDQGNPQKVFAYINISVAEADLKKCMSVLNKTKWKGGTLQIQLAKESFLHRLAQEREAAKAKKEESTTGNANLLEKTGGVDFHMKAVPGTEVPGHKNWVVSKFGRVLPVLHLKNQHKRKIIKYDPSKYCHNLKKIGEDFSNTIPISSLTWELEGGNDPMSKKRRGEFSDFHGPPKKIIKVQKDESSTGSLAMSTRPRRVIERPPLTQQQAAQKRTCDSITPSKSSPVPVSDTQKLKNLPFKTSGLETAKKRNSISDDDTDSEDELRMMIAKEENLQRTTQPSINESESDPFEVVRDDFKSGVHKLHSLIGLGIKNRVSCHDSDDDIMRNDREYDSGDTDEIIAMKKNVAKVKNSTEFSQMEKSTKKTSFKNRENCELSDHCIKLQKRKSNVESALSHGLKSLNRKSPSHSSSSEDADSASELADSEGGEEYNAMMKNCLRVNLTLADLEQLAGSDLKVPNEDTKSDGPETTTQCKFDRGSKSPKTPTGLRRGRQCIRPAEIVASLLEGEENTCGKQKPKENNLKPKFQAFKGVGCLYEKESMKKSLKDSVASNNKDQNSMKHEDPSIISMEDGSPYVNGSLGEVTPCQHAKKANGPNYIQPQKRQTTFESQDRKAVSPSSSEKRSKNPISRPLEGKKSLSLSAKTHNIGFDKDSCHSTTKTEASQEERSDSSGLTSLKKSPKVSSKDTREIKTDFSLSISNSSDVSAKDKHAEDNEKRLAALEARQKAKEVQKKLVHNALANLDGHPEDKPTHIIFGSDSECETEETSTQEQSHPGEEWVKESMGKTSGKLFDSSDDDESDSEDDSNRFKIKPQFEGRAGQKLMDLQSHFGTDDRFRMDSRFLETDSEEEQEEVNEKKTAEEEELAEEKKKALNVVQSVLQINLSNSTNRGSVAAKKFKDIIHYDPTKQDHATYERKRDDKPKESKAKRKKKREEAEKLPEVSKEMYYNIAMDLKEIFQTTKYTSEKEEGTPWNEDCGKEKPEEIQDPAALTSDAEQPSGFTFSFFDSDTKDIKEETYRVETVKPGKIVWQEDPRLQDSSSEEEDVTEETDHRNSSPGEASLLEKETTRFFFFSKNDERLQGSDLFWRGVGSNMSRNSWEARTTNLRMDCRKKHKDAKRKMKPK

SEQ ID NO: 32314 - protein, 1099 aa, Homo sapiens
MSVLNKTKWKGGTLQIQLAKESFLHRLAQEREAAKAKKEESTTGNANLLEKTGGVDFHMKAVPGTEVPGHKNWVVSKFGRVLPVLHLKNQHKRKIIKYDPSKYCHNLKKIGEDFSNTIPISSLTWELEGGNDPMSKKRRGEFSDFHGPPKKIIKVQKDESSTGSLAMSTRPRRVIERPPLTQQQAAQKRTCDSITPSKSSPVPVSDTQKLKNLPFKTSGLETAKKRNSISDDDTDSEDELRMMIAKEENLQRTTQPSINESESDPFEVVRDDFKSGVHKLHSLIGLGIKNRVSCHDSDDDIMRNDREYDSGDTDEIIAMKKNVAKVKNSTEFSQMEKSTKKTSFKNRENCELSDHCIKLQKRKSNVESALSHGLKSLNRKSPSHSSSSEDADSASELADSEGGEEYNAMMKNCLRVNLTLADLEQLAGSDLKVPNEDTKSDGPETTTQCKFDRGSKSPKTPTGLRRGRQCIRPAEIVASLLEGEENTCGKQKPKENNLKPKFQAFKGVGCLYEKESMKKSLKDSVASNNKDQNSMKHEDPSIISMEDGSPYVNGSLGEVTPCQHAKKANGPNYIQPQKRQTTFESQDRKAVSPSSSEKRSKNPISRPLEGKKSLSLSAKTHNIGFDKDSCHSTTKTEASQEERSDSSGLTSLKKSPKVSSKDTREIKTDFSLSISNSSDVSAKDKHAEDNEKRLAALEARQKAKEVQKKLVHNALANLDGHPEDKPTHIIFGSDSECETEETSTQEQSHPGEEWVKESMGKTSGKLFDSSDDDESDSEDDSNRFKIKPQFEGRAGQKLMDLQSHFGTDDRFRMDSRFLETDSEEEQEEVNEKKTAEEEELAEEKKKALNVVQSVLQINLSNSTNRGSVAAKKFKDIIHYDPTKQDHATYERKRDDKPKESKAKRKKKREEAEKLPEVSKEMYYNIAMDLKEIFQTTKYTSEKEEGTPWNEDCGKEKPEEIQDPAALTSDAEQPSGFTFSFFDSDTKDIKEETYRVETVKPGKIVWQEDPRLQDSSSEEEDVTEETDHRNSSPGEASLLEKETTRFFFFSKNDERLQGSDLFWRGVGSNMSRNSWEARTTNLRMDCRKKHKDAKRKMKPK

SEQ ID NO: 32315 - protein, 1129 aa, Homo sapiens
MKVNRETKRLYVGGLSQDISEADLQNQFSRFGEVSDVEIITRKDDQGNPQKVFAYINISVAEADLKKCMSVLNKTKWKGGTLQIQLAKESFLHRLAQEREAAKAKKEESTTGNANLLEKTGGVDFHMKAVPGTEVPGHKNWVVSKFGRVLPVLHLKNQHKRKIIKYDPSKYCHNLKKIGEDFSNTIPISSLTWELEGGNDPMSKKRRGEFSDFHGPPKKIIKVQKDESSTGSLAMSTRPRRVIERPPLTQQQAAQKRTCDSITPSKSSPVPVSDTQKLKNLPFKTSGLETAKKRNSISDDDTDSEDELRMMIAKEENLQRTTQPSINESESDPFEVVRDDFKSGVHKLHSLIGLGIKNRVSCHDSDDDIMRNDREYDSGDTDEIIAMKKNVAKVKNSTEFSQMEKSTKKTSFKNRENCELSDHCIKLQKRKSNVESALSHGLKSLNRKSPSHSSSSEDADSASELADSEGGEEYNAMMKNCLRVNLTLADLEQLAGSDLKVPNEDTKSDGPETTTQCKFDRGSKSPKTPTGLRRGRQCIRPAEIVASLLEGEENTCGKQKPKENNLKPKFQAFKGVGCLYEKESMKKSLKDSVASNNKDQNSMKHEDPSIISMEDGSPYVNGSLGEVTPCQHAKKANGPNYIQPQKRQTTFESQDRKAVSPSSSEKRSKNPISRPLEGKKSLSLSAKTHNIGFDKDSCHSTTKTEASQEERSDSSGLTSLKKSPKVSSKDTREIKTDFSLSISNSSDVSAKDKHAEDNEKRLAALEARQKAKEVQKKLVHNALANLESMGKTSGKLFDSSDDDESDSEDDSNRFKIKPQFEGRAGQKLMDLQSHFGTDDRFRMDSRFLETDSEEEQEEVNEKKTAEEEELAEEKKKALNVVQSVLQINLSNSTNRGSVAAKKFKDIIHYDPTKQDHATYERKRDDKPKESKAKRKKKREEAEKLPEVSKEMYYNIAMDLKEIFQTTKYTSEKEEGTPWNEDCGKEKPEEIQDPAALTSDAEQPSGFTFSFFDSDTKDIKEETYRVETVKPGKIVWQEDPRLQDSSSEEEDVTEETDHRNSSPGEASLLEKETTRFFFFSKNDERLQGSDLFWRGVGSNMSRNSWEARTTNLRMDCRKKHKDAKRKMKPK

SEQ ID NO: 32316 - protein, 376 aa, Homo sapiens
MNHSERFVFIAEWYDPNASLLRRYELLFYPGDGSVEMHDVKNHRTFLKRTKYDNLHLEDLFIGNKVNVFSRQLVLIDYGDQYTARQLGSRKEKTLALIKPDAISKAGEIIEIINKAGFTITKLKMMMLSRKEALDFHVDHQSRPFFNELIQFITTGPIIAMEILRDDAICEWKRLLGPANSGVARTDASESIRALFGTDGIRNAAHGPDSFASAAREMELFFPSSGGCGPANTAKFTNCTCCIVKPHAVSEGLLGKILMAIRDAGFEISAMQMFNMDRVNVEEFYEVYKGVVTEYHDMVTEMYSGPCVAMEIQQNNATKTFREFCGPADPEIARHLRPGTLRAIFGKTKIQNAVHCTDLPEDGLLEVQYFFKILDN

SEQ ID NO: 32317 - protein, 340 aa, Homo sapiens
MHDVKNHRTFLKRTKYDNLHLEDLFIGNKVNVFSRQLVLIDYGDQYTARQLGSRKEKTLALIKPDAISKAGEIIEIINKAGFTITKLKMMMLSRKEALDFHVDHQSRPFFNELIQFITTGPIIAMEILRDDAICEWKRLLGPANSGVARTDASESIRALFGTDGIRNAAHGPDSFASAAREMELFFPSSGGCGPANTAKFTNCTCCIVKPHAVSEGLLGKILMAIRDAGFEISAMQMFNMDRVNVEEFYEVYKGVVTEYHDMVTEMYSGPCVAMEIQQNNATKTFREFCGPADPEIARHLRPGTLRAIFGKTKIQNAVHCTDLPEDGLLEVQYFFKILDN

SEQ ID NO: 32318 - protein, 301 aa, Homo sapiens
MADQPKPISPLKNLLAGGFGGVCLVFVGHPLDTVKVRLQTQPPSLPGQPPMYSGTFDCFRKTLFREGITGLYRGMAAPIIGVTPMFAVCFFGFGLGKKLQQKHPEDVLSYPQLFAAGMLSGVFTTGIMTPGERIKCLLQIQASSGESKYTGTLDCAKKLYQEFGIRGIYKGTVLTLMRDVPASGMYFMTYEWLKNIFTPEGKRVSELSAPRILVAGGIAGIFNWAVAIPPDVLKSRFQTAPPGKYPNGFRDVLRELIRDEGVTSLYKGFNAVMIRAFPANAACFLGFEVAMKFLNWATPNL

SEQ ID NO: 32319 - protein, 1455 aa, Homo sapiens
MSKSLKKKSHWTSKVHESVIGRNPEGQLGFELKGGAENGQFPYLGEVKPGKVAYESGSKLVSEELLLEVNETPVAGLTIRDVLAVIKHCKDPLRLKCVKQGGIVDKDLRHYLNLRFQKGSVDHELQQIIRDNLYLRTVPCTTRPHKEGEVPGVDYIFITVEDFMELEKSGALLESGTYEDNYYGTPKPPAEPAPLLLNVTDQILPGATPSAEGKRKRNKSVSNMEKASIEPPEEEEEERPVVNGNGVVVTPESSEHEDKSAGASGEMPSQPYPAPVYSQPEELKEQMDDTKPTKPEDNEEPDPLPDNWEMAYTEKGEVYFIDHNTKTTSWLDPRLAKKAKPPEECKENELPYGWEKIDDPIYGTYYVDHINRRTQFENPVLEAKRKLQQHNMPHTELGTKPLQAPGFREKPLFTRDASQLKGTFLSTTLKKSNMGFGFTIIGGDEPDEFLQVKSVIPDGPAAQDGKMETGDVIVYINEVCVLGHTHADVVKLFQSVPIGQSVNLVLCRGYPLPFDPEDPANSMVPPLAIMERPPPVMVNGRHNYETYLEYISRTSQSVPDITDRPPHSLHSMPTDGQLDGTYPPPVHDDNVSMASSGATQAELMTLTIVKGAQGFGFTIADSPTGQRVKQILDIQGCPGLCEGDLIVEINQQNVQNLSHTEVVDILKDCPIGSETSLIIHRGGFFSPWKTPKPIMDRWENQGSPQTSLSAPAIPQNLPFPPALHRSSFPDSTEAFDPRKPDPYELYEKSRAIYESRQQVPPRTSFRMDSSGPDYKELDVHLRRMESGFGFRILGGDEPGQPILIGAVIAMGSADRDGRLHPGDELVYVDGIPVAGKTHRYVIDLMHHAARNGQVNLTVRRKVLCGGEPCPENGRSPGSVSTHHSSPRSDYATYTNSNHAAPSSNASPPEGFASHSLQTSDVVIHRKENEGFGFVIISSLNRPESGSTITVPHKIGRIIDGSPADRCAKLKVGDRILAVNGQSIINMPHADIVKLIKDAGLSVTLRIIPQEELNSPTSAPSSEKQSPMAQQSPLAQQSPLAQPSPATPNSPIAQPAPPQPLQLQGHENSYRSEVKARQDVKPDIRQPPFTDYRQPPLDYRQPPGGDYQQPPPLDYRQPPLLDYRQHSPDTRQYPLSDYRQPQDFDYFTVDMEKGAKGFGFSIRGGREYKMDLYVLRLAEDGPAIRNGRMRVGDQIIEINGESTRDMTHARAIELIKSGGRRVRLLLKRGTGQVPEYDEPAPWSSPAAAAPGLPEVGVSLDDGLAPFSPSHPAPPSDPSHQISPGPTWDIKREHDVRKPKELSACGQKKQRLGEQRERSASPQRAARPRLEEAPGGQGRPEAGRPASEARAPGLAAADAADAARAGGKEAPRAAAGSELCRREGPGAAPAFAGPGGGGSGALEAEGRAGARAGPRPGPRPPGGAPARKAAVAPGPWKVPGSDKLPSVLKPGASAASR

SEQ ID NO: 32320 - protein, 1441 aa, Homo sapiens
MSKSLKKKSHWTSKVHESVIGRNPEGQLGFELKGGAENGQFPYLGEVKPGKVAYESGSKLVSEELLLEVNETPVAGLTIRDVLAVIKHCKDPLRLKCVKQGGIVDKDLRHYLNLRFQKGSVDHELQQIIRDNLYLRTVPCTTRPHKEGEVPGVDYIFITVEDFMELEKSGALLESGTYEDNYYGTPKPPAEPAPLLLNVTDQILPGATPSAEGKRKRNKSVSNMEKASIEPPEEEEEERPVVNGNGVVVTPESSEHEDKSAGASGEMPSQPYPAPVYSQPEELKEQMDDTKPTKPEDNEEPDPLPDNWEMAYTEKGEVYFIDHNTKTTSWLDPRLAKKAKPPEECKENELPYGWEKIDDPIYGTYYVDHINRRTQFENPVLEAKRKLQQHNMPHTELGTKPLQAPGFREKPLFTRDASQLKGTFLSTTLKKSNMGFGFTIIGGDEPDEFLQVKSVIPDGPAAQDGKMETGDVIVYINEVCVLGHTHADVVKLFQSVPIGQSVNLVLCRGYPLPFDPEDPANSMVPPLAIMERPPPVMVNGRHNYETYLEYISRTSQSVPDITDRPPHSLHSMPTDGQLDGTYPPPVHDDNVSMASSGATQAELMTLTIVKGAQGFGFTIADSPTGQRVKQILDIQGCPGLCEGDLIVEINQQNVQNLSHTEVVDILKDCPIGSETSLIIHRGGFFSPWKTPKPIMDRWENQGSPQTSLSAPAIPQNLPFPPALHRSSFPDSTEAFDPRKPDPYELYEKSRAIYESRRPDYKELDVHLRRMESGFGFRILGGDEPGQPILIGAVIAMGSADRDGRLHPGDELVYVDGIPVAGKTHRYVIDLMHHAARNGQVNLTVRRKVLCGGEPCPENGRSPGSVSTHHSSPRSDYATYTNSNHAAPSSNASPPEGFASHSLQTSDVVIHRKENEGFGFVIISSLNRPESGSTITVPHKIGRIIDGSPADRCAKLKVGDRILAVNGQSIINMPHADIVKLIKDAGLSVTLRIIPQEELNSPTSAPSSEKQSPMAQQSPLAQQSPLAQPSPATPNSPIAQPAPPQPLQLQGHENSYRSEVKARQDVKPDIRQPPFTDYRQPPLDYRQPPGGDYQQPPPLDYRQPPLLDYRQHSPDTRQYPLSDYRQPQDFDYFTVDMEKGAKGFGFSIRGGREYKMDLYVLRLAEDGPAIRNGRMRVGDQIIEINGESTRDMTHARAIELIKSGGRRVRLLLKRGTGQVPEYDEPAPWSSPAAAAPGLPEVGVSLDDGLAPFSPSHPAPPSDPSHQISPGPTWDIKREHDVRKPKELSACGQKKQRLGEQRERSASPQRAARPRLEEAPGGQGRPEAGRPASEARAPGLAAADAADAARAGGKEAPRAAAGSELCRREGPGAAPAFAGPGGGGSGALEAEGRAGARAGPRPGPRPPGGAPARKAAVAPGPWKVPGSDKLPSVLKPGASAASR

SEQ ID NO: 32321 - protein, 477 aa, Homo sapiens
MFPVFPCTLLAPPFPVLGLDSRGVGGLMNSFPPPQGHAQNPLQVGAELQSRFFASQGCAQSPFQAAPAPPPTPQAPAAEPLQVDLLPVLAAAQESAAAAAAAAAAAAAVAAAPPAPAAASTVDTAALKQPPAPPPPPPPVSAPAAEAAPPASAATIAAAAATAVVAPTSTVAVAPVASALEKKTKSKGPYICALCAKEFKNGYNLRRHEAIHTGAKAGRVPSGAMKMPTMVPLSLLSVPQLSGAGGGGGEAGAGGGAAAVAAGGVVTTTASGKRIRKNHACEMCGKAFRDVYHLNRHKLSHSDEKPYQCPVCQQRFKRKDRMSYHVRSHDGAVHKPYNCSHCGKSFSRPDHLNSHVRQVHSTERPFKCEKCEAAFATKDRLRAHTVRHEEKVPCHVCGKMLSSAYISDHMKVHSQGPHHVCELCNKGTGEVCPMAAAAAAAAAAAAAAVAAPPTAVGSLSGAEGVPVSSQPLPSQPW

SEQ ID NO: 32322 - protein, 493 aa, Homo sapiens
MFPVFPCTLLAPPFPVLGLDSRGVGGLMNSFPPPQGHAQNPLQVGAELQSRFFASQGCAQSPFQAAPAPPPTPQAPAAEPLQVDLLPVLAAAQESAAAAAAAAAAAAAVAAAPPAPAAASTVDTAALKQPPAPPPPPPPVSAPAAEAAPPASAATIAAAAATAVVAPTSTVAVAPVASALEKKTKSKGPYICALCAKEFKNGYNLRRHEAIHTGAKAGRVPSGAMKMPTMVPLSLLSVPQLSGAGGGGGEAGAGGGAAAVAAGGVVTTTASGKRIRKNHACEMCGKAFRDVYHLNRHKLSHSDEKPYQCPVCQQRFKRKDRMSYHVRSHDGAVHKPYNCSHCGKSFSRPDHLNSHVRQVHSTERPFKCEKCEAAFATKDRLRAHTVRHEEKVPCHVCGKMLSSAYISDHMKVHSQGPHHVCELCNKGFTTAAYLRIHAVKDHGLQAPRADRILCKLCSVHCKTPAQLAGHMQTHLGGAAPPVPGDAPQPQPTC

SEQ ID NO: 32323 - protein, 454 aa, Homo sapiens
MDPSNWSSFIFQGHAQNPLQVGAELQSRFFASQGCAQSPFQAAPAPPPTPQAPAAEPLQVDLLPVLAAAQESAAAAAAAAAAAAAVAAAPPAPAAASTVDTAALKQPPAPPPPPPPVSAPAAEAAPPASAATIAAAAATAVVAPTSTVAVAPVASALEKKTKSKGPYICALCAKEFKNGYNLRRHEAIHTGAKAGRVPSGAMKMPTMVPLSLLSVPQLSGAGGGGGEAGAGGGAAAVAAGGVVTTTASGKRIRKNHACEMCGKAFRDVYHLNRHKLSHSDEKPYQCPVCQQRFKRKDRMSYHVRSHDGAVHKPYNCSHCGKSFSRPDHLNSHVRQVHSTERPFKCEKCEAAFATKDRLRAHTVRHEEKVPCHVCGKMLSSAYISDHMKVHSQGPHHVCELCNKGTGEVCPMAAAAAAAAAAAAAAVAAPPTAVGSLSGAEGVPVSSQPLPSQPW

SEQ ID NO: 32324 - protein, 172 aa, Homo sapiens
MFPVFPCTLLAPPFPVLGLDSRGVGGLMNSFPPPQGHAQNPLQVGAELQSRFFASQGCAQSPFQKCEAAFATKDRLRAHTVRHEEKVPCHVCGKMLSSAYISDHMKVHSQGPHHVCELCNKGTGEVCPMAAAAAAAAAAAAAAVAAPPTAVGSLSGAEGVPVSSQPLPSQPW

SEQ ID NO: 32325 - protein, 702 aa, Homo sapiens
MADSGLLLKRGSCRSTWLRVRKARPQLILSRRPRRRLGSLRWCGRRRLRWRLLQAQASGVDWREGARQVSRAAAARRPNTATPSPIPSPTPASEPESEPELESASSCHRPLLIPPVRPVGPGRALLLLPVEQGFTFSGICRVTCLYGQVQVFGFTISQGQPAQDIFSVYTHSCLSIHALHYSQPEKSKKELKREARNLLKSHLNLDDRRWSMQNFSPQCSIVLLEHLKTATVNFITSYPGSSYIFVQESPTPQIKPEYLALRSVGIRREKKRKGLQLTESTLSALEELVNVSCEEVDGCPVILVCGSQDVGKSTFNRYLINHLLNSLPCVDYLECDLGQTEFTPPGCISLLNITEPVLGPPFTHLRTPQKMVYYGKPSCKNNYENYIDIVKYVFSAYKRESPLIVNTMGWVSDQGLLLLIDLIRLLSPSHVVQFRSDHSKYMPDLTPQYVDDMDGLYTKSKTKMRNRRFRLAAFADALEFADEEKESPVEFTGHKLIGVYTDFAFRITPRNRESHNKILRDLSILSYLSQLQPPMPKPLSPLHSLTPYQVPFNAVALRITHSDVAPTHILYAVNASWVGLCKIQDDVRGYTNGPILLAQTPICDCLGFGICRGIDMEKRLYHILTPVPPEELRTVNCLLVGAIAIPHCVLKCQRGIEGTVPYVTTDYNFKLPGASEKIGAREPEEAHKEKPYRRPKFCRKMK

SEQ ID NO: 32326 - protein, 152 aa, Homo sapiens
MANCERTFIAIKPDGVQRGLVGEIIKRFEQKGFRLVGLKFMQASEDLLKEHYVDLKDRPFFAGLVKYMHSGPVVAMVWEGLNVVKTGRVMLGETNPADSKPGTIRGDFCIQVGRNIIHGSDSVESAEKEIGLWFHPEELVDYTSCAQNWIYE

SEQ ID NO: 32327 - protein, 177 aa, Homo sapiens
MVLLSTLGIVFQGEGPPISSCDTGTMANCERTFIAIKPDGVQRGLVGEIIKRFEQKGFRLVGLKFMQASEDLLKEHYVDLKDRPFFAGLVKYMHSGPVVAMVWEGLNVVKTGRVMLGETNPADSKPGTIRGDFCIQVGRNIIHGSDSVESAEKEIGLWFHPEELVDYTSCAQNWIYE

SEQ ID NO: 32328 - protein, 394 aa, Homo sapiens
MSREMQDVDLAEVKPLVEKGETITGLLQEFDVQEQDIETLHGSVHVTLCGTPKGNRPVILTYHDIGMNHKTCYNPLFNYEDMQEITQHFAVCHVDAPGQQDGAASFPAGYMYPSMDQLAEMLPGVLQQFGLKSIIGMGTGAGAYILTRFALNNPEMVEGLVLINVNPCAEGWMDWAASKISGWTQALPDMVVSHLFGKEEMQSNVEVVHTYRQHIVNDMNPGNLHLFINAYNSRRDLEIERPMPGTHTVTLQCPALLVVGDSSPAVDAVVECNSKLDPTKTTLLKMADCGGLPQISQPAKLAEAFKYFVQGMGYMPSASMTRLMRSRTASGSSVTSLDGTRSRSHTSEGTRSRSHTSEGTRSRSHTSEGAHLDITPNSGAAGNSAGPKSMEVSC

SEQ ID NO: 32329 - protein, 328 aa, Homo sapiens
MNHKTCYNPLFNYEDMQEITQHFAVCHVDAPGQQDGAASFPAGYMYPSMDQLAEMLPGVLQQFGLKSIIGMGTGAGAYILTRFALNNPEMVEGLVLINVNPCAEGWMDWAASKISGWTQALPDMVVSHLFGKEEMQSNVEVVHTYRQHIVNDMNPGNLHLFINAYNSRRDLEIERPMPGTHTVTLQCPALLVVGDSSPAVDAVVECNSKLDPTKTTLLKMADCGGLPQISQPAKLAEAFKYFVQGMGYMPSASMTRLMRSRTASGSSVTSLDGTRSRSHTSEGTRSRSHTSEGTRSRSHTSEGAHLDITPNSGAAGNSAGPKSMEVSC

SEQ ID NO: 32330 - protein, 313 aa, Homo sapiens
MQEITQHFAVCHVDAPGQQDGAASFPAGYMYPSMDQLAEMLPGVLQQFGLKSIIGMGTGAGAYILTRFALNNPEMVEGLVLINVNPCAEGWMDWAASKISGWTQALPDMVVSHLFGKEEMQSNVEVVHTYRQHIVNDMNPGNLHLFINAYNSRRDLEIERPMPGTHTVTLQCPALLVVGDSSPAVDAVVECNSKLDPTKTTLLKMADCGGLPQISQPAKLAEAFKYFVQGMGYMPSASMTRLMRSRTASGSSVTSLDGTRSRSHTSEGTRSRSHTSEGTRSRSHTSEGAHLDITPNSGAAGNSAGPKSMEVSC

SEQ ID NO: 32331 - protein, 699 aa, Homo sapiens
MADAGIRRVVPSDLYPLVLGFLRDNQLSEVANKFAKATGATQQDANASSLLDIYSFWLKSAKVPERKLQANGPVAKKAKKKASSSDSEDSSEEEEEVQGPPAKKAAVPAKRVGLPPGKAAAKASESSSSEESSDDDDEEDQKKQPVQKGVKPQAKAAKAPPKKAKSSDSDSDSSSEDEPPKNQKPKITPVTVKAQTKAPPKPARAAPKIANGKAASSSSSSSSSSSSDDSEEEKAAATPKKTVPKKQVVAKAPVKAATTPTRKSSSSEDSSSDEEEEQKKPMKNKPGPYSSVPPPSAPPPKKSLGTQPPKKAVEKQQPVESSEDSSDESDSSSEEEKKPPTKAVVSKATTKPPPAKKAAESSSDSSDSDSSEDDEAPSKPAGTTKNSSNKPAVTTKSPAVKPAAAPKQPVGGGQKLLTRKADSSSSEEESSSSEEEKTKKMVATTKPKATAKAALSLPAKQAPQGSRDSSSDSDSSSSEEEEEKTSKSAVKKKPQKVAGGAAPSKPASAKKGKAESSNSSSSDDSSEEEEEKLKGKGSPRPQAPKANGTSALTAQNGKAAKNSEEEEEEKKKAAVVVSKSGSLKKRKQNEAAKEAETPQAKKIKLQTPNTFPKRKKGEKRASSPFRRVREEEIEVDSRVADNSFDAKRGAAGDWGERANQVLKFTKGKSFRHEKTKKKRGSYRGGSISVQVNSIKFDSE

SEQ ID NO: 32332 - protein, 709 aa, Homo sapiens
MADAGIRRVVPSDLYPLVLGFLRDNQLSEVANKFAKATGATQQDANASSLLDIYSFWLKSAKVPERKLQANGPVAKKAKKKASSSDSEDSSEEEEEVQGPPAKKAAVPAKRVGLPPGKAAAKASESSSSEESSDDDDEEDQKKQPVQKGVKPQAKAAKAPPKKAKSSDSDSDSSSEDEPPKNQKPKITPVTVKAQTKAPPKPARAAPKIANGKAASSSSSSSSSSSSDDSEEEKAAATPKKVWTITSVRAETVPKKQVVAKAPVKAATTPTRKSSSSEDSSSDEEEEQKKPMKNKPGPYSSVPPPSAPPPKKSLGTQPPKKAVEKQQPVESSEDSSDESDSSSEEEKKPPTKAVVSKATTKPPPAKKAAESSSDSSDSDSSEDDEAPSKPAGTTKNSSNKPAVTTKSPAVKPAAAPKQPVGGGQKLLTRKADSSSSEEESSSSEEEKTKKMVATTKPKATAKAALSLPAKQAPQGSRDSSSDSDSSSSEEEEEKTSKSAVKKKPQKVAGGAAPSKPASAKKGKAESSNSSSSDDSSEEEEEKLKGKGSPRPQAPKANGTSALTAQNGKAAKNSEEEEEEKKKAAVVVSKSGSLKKRKQNEAAKEAETPQAKKIKLQTPNTFPKRKKGEKRASSPFRRVREEEIEVDSRVADNSFDAKRGAAGDWGERANQVLKFTKGKSFRHEKTKKKRGSYRGGSISVQVNSIKFDSE

SEQ ID NO: 32333 - protein, 700 aa, Homo sapiens
MADAGIRRVVPSDLYPLVLGFLRDNQLSEVANKFAKATGATQQDANASSLLDIYSFWLNRSAKVPERKLQANGPVAKKAKKKASSSDSEDSSEEEEEVQGPPAKKAAVPAKRVGLPPGKAAAKASESSSSEESSDDDDEEDQKKQPVQKGVKPQAKAAKAPPKKAKSSDSDSDSSSEDEPPKNQKPKITPVTVKAQTKAPPKPARAAPKIANGKAASSSSSSSSSSSSDDSEEEKAAATPKKTVPKKQVVAKAPVKAATTPTRKSSSSEDSSSDEEEEQKKPMKNKPGPYSSVPPPSAPPPKKSLGTQPPKKAVEKQQPVESSEDSSDESDSSSEEEKKPPTKAVVSKATTKPPPAKKAAESSSDSSDSDSSEDDEAPSKPAGTTKNSSNKPAVTTKSPAVKPAAAPKQPVGGGQKLLTRKADSSSSEEESSSSEEEKTKKMVATTKPKATAKAALSLPAKQAPQGSRDSSSDSDSSSSEEEEEKTSKSAVKKKPQKVAGGAAPSKPASAKKGKAESSNSSSSDDSSEEEEEKLKGKGSPRPQAPKANGTSALTAQNGKAAKNSEEEEEEKKKAAVVVSKSGSLKKRKQNEAAKEAETPQAKKIKLQTPNTFPKRKKGEKRASSPFRRVREEEIEVDSRVADNSFDAKRGAAGDWGERANQVLKFTKGKSFRHEKTKKKRGSYRGGSISVQVNSIKFDSE

SEQ ID NO: 32334 - protein, 347 aa, Homo sapiens
MEQYTANSNSSTEQIVVQAGQIQQQQQGGVTAVQLQTEAQVASASGQQVQTLQVVQGQPLMVQVSGGQLITSTGQPIMVQAVPGGQGQTIMQVPVSGTQGLQQIQLVPPGQIQIQGGQAVQVQGQQGQTQQIIIQQPQTAVTAGQTQTQQQIAVQGQQVAQTAEGQTIVYQPVNADGTILQQVTVPVSGMITIPAASLAGAQIVQTGANTNTTSSGQGTVTVTLPVAGNVVNSGGMVMMVPGAGSVPAIQRIPLPGAEMLEEEPLYVNAKQYHRILKRRQARAKLEAEGKIPKERRKYLHESRHRHAMARKRGEGGRFFSPKEKDSPHMQDPNQADEEAMTQIIRVS

SEQ ID NO: 32335 - protein, 318 aa, Homo sapiens
MEQYTANSNSSTEQIVVQAGQIQQQVQGQPLMVQVSGGQLITSTGQPIMVQAVPGGQGQTIMQVPVSGTQGLQQIQLVPPGQIQIQGGQAVQVQGQQGQTQQIIIQQPQTAVTAGQTQTQQQIAVQGQQVAQTAEGQTIVYQPVNADGTILQQVTVPVSGMITIPAASLAGAQIVQTGANTNTTSSGQGTVTVTLPVAGNVVNSGGMVMMVPGAGSVPAIQRIPLPGAEMLEEEPLYVNAKQYHRILKRRQARAKLEAEGKIPKERRKYLHESRHRHAMARKRGEGGRFFSPKEKDSPHMQDPNQADEEAMTQIIRVS

SEQ ID NO: 32336 - protein, 152 aa, Homo sapiens
MANLERTFIAIKPDGVQRGLVGEIIKRFEQKGFRLVAMKFLRASEEHLKQHYIDLKDRPFFPGLVKYMNSGPVVAMVWEGLNVVKTGRVMLGETNPADSKPGTIRGDFCIQVGRNIIHGSDSVKSAEKEISLWFKPEELVDYKSCAHDWVYE

SEQ ID NO: 32337 - protein, 267 aa, Homo sapiens
MANCERTFIAIKPDGVQRGLVGEIIKRFEQKGFRLVGLKFMQASEDLLKEHYVDLKDRPFFAGLVKYMHSGPVVAMVWEGLNVVKTGRVMLGETNPADSKPGTIRGDFCIQVGRTMANLERTFIAIKPDGVQRGLVGEIIKRFEQKGFRLVAMKFLRASEEHLKQHYIDLKDRPFFPGLVKYMNSGPVVAMVWEGLNVVKTGRVMLGETNPADSKPGTIRGDFCIQVGRNIIHGSDSVKSAEKEISLWFKPEELVDYKSCAHDWVYE

SEQ ID NO: 32338 - protein, 1249 aa, Homo sapiens
MSQLSKNLGDSSPPAEAPKPPVYSRPTVLMRAPPASSRAPPVPWDPPPIDLQASLAAWQAPQPAWEAPQGQLPAPVVPMTQPPALGGPIVPAPPLGGPMGKPPTPGVLMVHPPPPGAPMAQPPTPGVLMVHPSAPGAPMAHPPPPGTPMSHPPPPGTPMAHPPPPGTPMAHPPPPGTPMVHPPPPGTPMAHPPPPGTPMAHPPPPGTPMAHPPPPGTPMAHPPPPGTPMAQPPAPGVLMAQPLTPGVLMVQPAAPGAPMVQPPPAAMMTQPQPSGAPMAKPPGPGVLMIHPPGARAPMTQPPASGAPMAQPAAPPAQPMAPPAQPMASWAPQAQPLILQIQSQVIRAPPQVPQGPQAPPAQLATPPGWQATSPGWQATQQGWQATPLTWQTTQVTWQAPAVTWQVPPPMRQGPPPIRPGPPPIRPGPPPVRQAPPLIRQAPPVIRQAPPVIRQAPPVIRQAPAVIRQAPPVIRQAPPVIRQAPPVIRQAPPLIRQAPPPIRPAPQVLATQPPLWQALPPPPPLRQAPQARLPAPQVQAAPQVPTAPPATQVPAAPPAGPQVPQPVLPAPLSAPLSAPQAVHCPSIIWQAPKGQPPVPHEIPTSMEFQEVQQTQALAWQAQKAPTHIWQPLPAQEAQRQAPPLVQLEQPFQGAPPSQKAVQIQLPPQQAQASGPQAEVPTLPLQPSWQAPPAVLQAQPGPPVAAANFPLGSAKSLMTPSGECRASSIDRRGSSKERRTSSKERRAPSKDRMIFAATFCAPKAVSAARAHLPAAWKNLPATPETFAPSSSVFPATSQFQPASLNAFKGPSAASETPKSLPYALQDPFACVEALPAVPWVPQPNMNASKASQAVPTFLMATAAAPQATATTQEASKTSVEPPRRSGKATRKKKHLEAQEDSRGHTLAFHDWQGPRPWENLNLSDWEVQSPIQVSGDWEHPNTPRGLSGWEGPSTSRILSGWEGPSASWALSAWEGPSTSRALGLSESPGSSLPVVVSEVASVSPGSSATQDNSKVEAQPLSPLDERANALVQFLLVKDQAKVPVQRSEMVKVILREYKDECLDIINRANNKLECAFGYQLKEIDTKNHAYIIINKLGYHTGNLVASYLDRPKFGLLMVVLSLIFMKGNCVREDLIFNFLFKLGLDVRETNGLFGNTKKLITEVFVRQKYLEYRRIPYTEPAEYEFLWGPRAFLETSKMLVLRFLAKLHKKDPQSWPFHYLEALAECEWEDTDEDEPDTGDSAHGPTSRPPPR

SEQ ID NO: 32339 - protein, 436 aa, Homo sapiens
MTAVYMNGGGLVNPHYARWDRRDSVESGCQTESSKEGEEGQPRQLTPFEKLTQDMSQDEKVVREITLGKRIGFYRIRGEIGSGNFSQVKLGIHSLTKEKVAIKILDKTKLDQKTQRLLSREISSMEKLHHPNIIRLYEVVETLSKLHLVMEYAGGGELFGKISTEGKLSEPESKLIFSQIVSAVKHMHENQIIHRDLKAENVFYTSNTCVKVGDFGFSTVSKKGEMLNTFCGSPPYAAPELFRDEHYIGIYVDIWALGVLLYFMVTGTMPFRAETVAKLKKSILEGTYSVPPHVSEPCHRLIRGVLQQIPTERYGIDCIMNDEWMQGVPYPTPLEPFQLDPKHLSETSTLKEEENEVKSTLEHLGITEEHIRNNQGRDARSSITGVYRIILHRVQRKKALESVPVMMLPDPKERDLKKGSRVYRGIRHTSKFCSIL

SEQ ID NO: 32340 - protein, 2468 aa, Homo sapiens
MATVVVEATEPEPSGSIANPAASTSPSLSHRFLDSKFYLLVVVGEIVTEEHLRRAIGNIELGIRSWDTNLIECNLDQELKLFVSRHSARFSPEVPGQKILHHRSDVLETVVLINPSDEAVSTEVRLMITDAARHKLLVLTGQCFENTGELILQSGSFSFQNFIEIFTDQEIGELLSTTHPANKASLTLFCPEEGDWKNSNLDRHNLQDFINIKLNSASILPEMEGLSEFTEYLSESVEVPSPFDILEPPTSGGFLKLSKPCCYIFPGGRGDSALFAVNGFNMLINGGSERKSCFWKLIRHLDRVDSILLTHIGDDNLPGINSMLQRKIAELEEEQSQGSTTNSDWMKNLISPDLGVVFLNVPENLKNPEPNIKMKRSIEEACFTLQYLNKLSMKPEPLFRSVGNTIDPVILFQKMGVGKLEMYVLNPVKSSKEMQYFMQQWTGTNKDKAEFILPNGQEVDLPISYLTSVSSLIVWHPANPAEKIIRVLFPGNSTQYNILEGLEKLKHLDFLKQPLATQKDLTGQVPTPVVKQTKLKQRADSRESLKPAAKPLPSKSVRKESKEETPEVTKVNHVEKPPKVESKEKVMVKKDKPIKTETKPSVTEKEVPSKEEPSPVKAEVAEKQATDVKPKAAKEKTVKKETKVKPEDKKEEKEKPKKEVAKKEDKTPIKKEEKPKKEEVKKEVKKEIKKEEKKEPKKEVKKETPPKEVKKEVKKEEKKEVKKEEKEPKKEIKKLPKDAKKSSTPLSEAKKPAALKPKVPKKEESVKKDSVAAGKPKEKGKIKVIKKEGKAAEAVAAAVGTGATTAAVMAAAGIAAIGPAKELEAERSLMSSPEDLTKDFEELKAEEVDVTKDIKPQLELIEDEEKLKETEPVEAYVIQKEREVTKGPAESPDEGITTTEGEGECEQTPEELEPVEKQGVDDIEKFEDEGAGFEESSETGDYEEKAETEEAEEPEEDGEEHVCVSASKHSPTEDEESAKAEADAYIREKRESVASGDDRAEEDMDEAIEKGEAEQSEEEADEEDKAEDAREEEYEPEKMEAEDYVMAVVDKAAEAGGAEEQYGFLTTPTKQLGAQSPGREPASSIHDETLPGGSESEATASDEENREDQPEEFTATSGYTQSTIEISSEPTPMDEMSTPRDVMSDETNNEETESPSQEFVNITKYESSLYSQEYSKPADVTPLNGFSEGSKTDATDGKDYNASASTISPPSSMEEDKFSRSALRDAYCSEVKASTTLDIKDSISAVSSEKVSPSKSPSLSPSPPSPLEKTPLGERSVNFSLTPNEIKVSAEAEVAPVSPEVTQEVVEEHCASPEDKTLEVVSPSQSVTGSAGHTPYYQSPTDEKSSHLPTEVIEKPPAVPVSFEFSDAKDENERASVSPMDEPVPDSESPIEKVLSPLRSPPLIGSESAYESFLSADDKASGRGAESPFEEKSGKQGSPDQVSPVSEMTSTSLYQDKQEGKSTDFAPIKEDFGQEKKTDDVEAMSSQPALALDERKLGDVSPTQIDVSQFGSFKEDTKMSISEGTVSDKSATPVDEGVAEDTYSHMEGVASVSTASVATSSFPEPTTDDVSPSLHAEVGSPHSTEVDDSLSVSVVQTPTTFQETEMSPSKEECPRPMSISPPDFSPKTAKSRTPVQDHRSEQSSMSIEFGQESPEQSLAMDFSRQSPDHPTVGAGVLHITENGPTEVDYSPSDMQDSSLSHKIPPMEEPSYTQDNDLSELISVSQVEASPSTSSAHTPSQIASPLQEDTLSDVAPPRDMSLYASLTSEKVQSLEGEKLSPKSDISPLTPRESSPLYSPTFSDSTSAVKEKTATCHSSSSPPIDAASAEPYGFRASVLFDTMQHHLALNRDLSTPGLEKDSGGKTPGDFSYAYQKPEETTRSPDEEDYDYESYEKTTRTSDVGGYYYEKIERTTKSPSDSGYSYETIGKTTKTPEDGDYSYEIIEKTTRTPEEGGYSYDISEKTTSPPEVSGYSYEKTERSRRLLDDISNGYDDSEDGGHTLGDPSYSYETTEKITSFPESEGYSYETSTKTTRTPDTSTYCYETAEKITRTPQASTYSYETSDLCYTAEKKSPSEARQDVDLCLVSSCEYKHPKTELSPSFINPNPLEWFASEEPTEESEKPLTQSGGAPPPPGGKQQGRQCDETPPTSVSESAPSQTDSDVPPETEECPSITADANIDSEDESETIPTDKTVTYKHMDPPPAPVQDRSPSPRHPDVSMVDPEALAIEQNLGKALKKDLKEKTKTKKPGTKTKSSSPVKKSDGKSKPLAASPKPAGLKESSDKVSRVASPKKKESVEKAAKPTTTPEVKAARGEEKDKETKNAANASASKSAKTATAGPGTTKTTKSSAVPPGLPVYLDLCYIPNHSNSKNVDVEFFKRVRSSYYVVSGNDPAAEEPSRAVLDALLEGKAQWGSNMQVTLIPTHDSEVMREWYQETHEKQQDLNIMVLASSSTVVMQDESFPACKIEL

SEQ ID NO: 32341 - protein, 359 aa, Homo sapiens
MIAAQAKLVYQLNKYYTERCQARKAAIAKTIREVCKVVSDVLKEVEVQEPRFISSLSEIDARYEGLEVISPTEFEVVLYLNQMGVFNFVDDGSLPGCAVLKLSDGRKRSMSLWVEFITASGYLSARKIRSRFQTLVAQAVDKCSYRDVVKMIADTSEVKLRIRERYVVQITPAFKCTGIWPRSAAQWPMPHIPWPGPNRVAEVKAEGFNLLSKECYSLTGKQSSAESDAWVLQFGEAENRLLMGGCRNKCLSVLKTLRDRHLELPGQPLNNYHMKTLLLYECEKHPRETDWDESCLGDRLNGILLQLISCLQCRRCPHYFLPNLDLFQGKPHSALESAAKQTWRLAREILTNPKSLDKL

SEQ ID NO: 32342 - protein, 1009 aa, Homo sapiens
MGQLCWLPLLAPLLLLRPPGVQSAGPIRAFVVPHSHMDVGWVYTVQESMRAYAANVYTSVVEELARGQQRRFIAVEQEFFRLWWDGVASDQQKYQVRQLLEEGRLEFVIGGQVMHDEAVTHLDDQILQLTEGHGFLYETFGIRPQFSWHVDPFGASATTPTLFALAGFNAHLGSRIDYDLKAAMQEARGLQFVWRGSPSLSERQEIFTHIMDQYSYCTPSHIPFSNRSGFYWNGVAVFPKPPQDGVYPNMSEPVTPANINLYAEALVANVKQRAAWFRTPHVLWPWGCDKQFFNASVQFANMDPLLDHINSHAAELGVSVQYATLGDYFRALHALNVTWRVRDHHDFLPYSTEPFQAWTGFYTSRSSLKGLARRASALLYAGESMFTRYLWPAPRGHLDPTWALQQLQQLRWAVSEVQHHDAITGTESPKVRDMYATHLASGMLGMRKLMASIVLDELQPQAPMAASSDAGPAGHFASVYNPLAWTVTTIVTLTVGFPGVRVTDEAGHPVPSQIQNSTETPSAYDLLILTTIPGLSYRHYNIRPTAGAQEGTQEPAATVASTLQFGRRLRRRTSHAGRYLVPVANDCYIVLLDQDTNLMHSIWERQSNRTVRVTQEFLEYHVNGDVKQGPISDNYLFTPGKAAVPAWEAVEMEIVAGQLVTEIRQYFYRNMTAQNYTYAIRSRLTHVPQGHDGELLCHRIEQEYQAGPLELNREAVLRTSTNLNSQQVIYSDNNGYQMQRRPYVSYVNNSIARNYYPMVQSAFMEDGKSRLVLLSERAHGISSQGNGQVEVMLHRRLWNNFDWDLGYNLTLNDTSVVHPVLWLLLGSWSLTTALRQRSALALQHRPVVLFGDLAGTAPKLPGPQQQEAVTLPPNLHLQILSIPGWRYSSNHTEHSQNLRKGHRGEAQADLRRVLLRLYHLYEVGEDPVLSQPVTVNLEAVLQALGSVVAVEERSLTGTWDLSMLHRWSWRTGPGRHRGDTTSPSRPPGGPIITVHPKEIRTFFIHFQQQ

SEQ ID NO: 32343 - protein, 954 aa, Homo sapiens
MGQLCWLPLLAPLLLLRPPGVQSAGPIRAFVVPHSHMDVGWVYTVQESMRAYAANVYTSVVEELARGQQRRFIAVEQEFFRLWWDGVASDQQKYQVRQLLEEGRLEFVIGGQVMHDEAVTHLDDQILQLTEGHGFLYETFGIRPQFSWHVDPFGASATTPTLFALAGFNAHLGSRIDYDLKAAMQEARGLQFVWRGSPSLSERQEIFTHIMDQYSYCTPSHIPFSNRSGFYWNGVAVFPKPPQDGVYPNMSEPVTPANINLYAEALVANVKQRAAWFRTPHVLWPWGCDKQFFNASVQFANMDPLLDHINSHAAELGVSVQYATLGDYFRALHALNVTWRVRDHHDFLPYSTEPFQAWTGFYTSRSSLKGLARRASALLYAGESMFTRYLWPAPRGHLDPTWALQQLQQLRWAVSEVQHHDAITGTESPKVRDMYATHLASGMLGMRKLMASIVLDELQPQAPMAASSDAGPAGHFASVYNPLAWTVTTIVTLTVGFPGVRVTDEAGHPVPSQIQNSTETPSAYDLLILTTIPGLSYRHYNIRPTAGAQEGTQEPAATVASTLQFGRRLRRRTSHAGRYLVPVANDCYIVLLDQDTNLMHSIWERQSNRTVRVTQEFLEYHVNGDVKQGPISDNYLFTPGKAAVPAWEAVEMEIVAGQLVTEIRQYFYRNMTAQNYTYAIRSRLTHVPQGHDGELLCHRIEQEYQAGPLELNREAVLRTSTNLNSQQVIYSDNNGYQMQRRPYVSYVNNSIARNYYPMVQSAFMEDGKSRLVLLSERAHGISSQGNGQVEVMLHRRLWNNFDWDLGYNLTLNDTSVVHPVLWLLLGSWSLTTALRQRSALALQHRPVVLFGDLAGTAPKLPGPQQQEAVTLPPNLHLQILSIPGWRYSSNHTEHSQNLRKGHRGEAQADLRRVLLRLYHLYEVGEDPVLSQPVTVNLEVNFPTPIQTISQGSKP

SEQ ID NO: 32344 - protein, 371 aa, Homo sapiens
MAELQEVQITEEKPLLPGQTPEAAKEAELAARILLDQGQTHSVETPYGSVTFTVYGTPKPKRPAILTYHDVGLNYKSCFQPLFQFEDMQEIIQNFVRVHVDAPGMEEGAPVFPLGYQYPSLDQLADMIPCVLQYLNFSTIIGVGVGAGAYILARYALNHPDTVEGLVLINIDPNAKGWMDWAAHKLTGLTSSIPEMILGHLFSQEELSGNSELIQKYRNIITHAPNLDNIELYWNSYNNRRDLNFERGGDITLRCPVMLVVGDQAPHEDAVVECNSKLDPTQTSFLKMADSGGQPQLTQPGKLTEAFKYFLQGMGYMASSCMTRLSRSRTASLTSAASVDGNRSRSRTLSQSSESGTLSSGPPGHTMEVSC

SEQ ID NO: 32345 - protein, 357 aa, Homo sapiens
MAELQEVQITEEKPLLPGQTPEAAKTHSVETPYGSVTFTVYGTPKPKRPAILTYHDVGLNYKSCFQPLFQFEDMQEIIQNFVRVHVDAPGMEEGAPVFPLGYQYPSLDQLADMIPCVLQYLNFSTIIGVGVGAGAYILARYALNHPDTVEGLVLINIDPNAKGWMDWAAHKLTGLTSSIPEMILGHLFSQEELSGNSELIQKYRNIITHAPNLDNIELYWNSYNNRRDLNFERGGDITLRCPVMLVVGDQAPHEDAVVECNSKLDPTQTSFLKMADSGGQPQLTQPGKLTEAFKYFLQGMGYMASSCMTRLSRSRTASLTSAASVDGNRSRSRTLSQSSESGTLSSGPPGHTMEVSC

SEQ ID NO: 32346 - protein, 360 aa, Homo sapiens
MAELQEVQITEEKPLLPGQTPEAAKEAELAARILLDQGQTHSVETPYGSVTFTVYGTPKPKRPAILTYHDVGLNYKSCFQPLFQFEDMQEIIQNFVRVHVDAPGMEEGAPVFPLGYQYPSLDQLADMIPCVLQYLNFSTIIGVGVGAGAYILARYALNHPDTVEGLVLINIDPNAKGWMDWAAHKLTGLTSSIPEMILGHLFSQEELSGNSELIQKYRNIITHAPNLDNIELYWNSYNNRRDLNFERGGDITLRCPVMLVVECNSKLDPTQTSFLKMADSGGQPQLTQPGKLTEAFKYFLQGMGYMASSCMTRLSRSRTASLTSAASVDGNRSRSRTLSQSSESGTLSSGPPGHTMEVSC

SEQ ID NO: 32347 - protein, 328 aa, Homo sapiens
MAELQEVQITEEKPLLPGQTPEAAKTHSVETPYGSVTFTVYGTPKPKRPAILTYHDVGLNYKSCFQPLFQFEDMQEIIQNFVRVHVDAPGMEEGAPVFPLGYQYPSLDQLADMIPCVLQYLNFSTIIGVGVGAGAYILARYALTGLTSSIPEMILGHLFSQEELSGNSELIQKYRNIITHAPNLDNIELYWNSYNNRRDLNFERGGDITLRCPVMLVVGDQAPHEDAVVECNSKLDPTQTSFLKMADSGGQPQLTQPGKLTEAFKYFLQGMGYMASSCMTRLSRSRTASLTSAASVDGNRSRSRTLSQSSESGTLSSGPPGHTMEVSC

SEQ ID NO: 32348 - protein, 341 aa, Homo sapiens
MAELQEVQITEEKPLLPGQTPEAAKTHSVETPYGSVTFTVYGTPKPKRPAILTYHDVGLNYKSCFQPLFQFEDMQEIIQNFVRVHVDAPGMEEGAPVFPLGYQYPSLDQLADMIPCVLQYLNFSTIIGVGVGAGAYILARYALNHPDTVEGLVLINIDPNAKGWMDWAAHKLTGLTSSIPEMILGHLFSQEELSGNSELIQKYRNIITHAPNLDNIELYWNSYNNRRDLNFERGGDITLRCPVMLVVGDQAPHEDAVMADSGGQPQLTQPGKLTEAFKYFLQGMGYMASSCMTRLSRSRTASLTSAASVDGNRSRSRTLSQSSESGTLSSGPPGHTMEVSC

SEQ ID NO: 32349 - protein, 367 aa, Homo sapiens
MENGGSMQATMAELQEVQITEEKPLLPGQTPEAAKTHSVETPYGSVTFTVYGTPKPKRPAILTYHDVGLNYKSCFQPLFQFEDMQEIIQNFVRVHVDAPGMEEGAPVFPLGYQYPSLDQLADMIPCVLQYLNFSTIIGVGVGAGAYILARYALNHPDTVEGLVLINIDPNAKGWMDWAAHKLTGLTSSIPEMILGHLFSQEELSGNSELIQKYRNIITHAPNLDNIELYWNSYNNRRDLNFERGGDITLRCPVMLVVGDQAPHEDAVVECNSKLDPTQTSFLKMADSGGQPQLTQPGKLTEAFKYFLQGMGYMASSCMTRLSRSRTASLTSAASVDGNRSRSRTLSQSSESGTLSSGPPGHTMEVSC

SEQ ID NO: 32350 - protein, 199 aa, Homo sapiens
MAWPCISRLCCLARRWNQLDRSDVAVPLTLHGYSDLDSEEPGTGGAASRRGQPPAGARDSGRDVPLTQYQRDFGLWTTPAGPKDPPPGRGPGAGGRRGKSSAQSSAPPAPGARGVYVLPIGDADAAAAVTTSYRQEFQAWTGVKPSRSTKTKPARVITTHTSGWDSSPGAGFQVPEVRKKFTPNPSAIFQASAPRILNV

SEQ ID NO: 32351 - protein, 291 aa, Homo sapiens
MALAARLLPQFLHSRSLPCGAVRLRTPAVAEVRLPSATLCYFCRCRLGLGAALFPRSARALAASALPAQGSRWPVLSSPGLPAAFASFPACPQRSYSTEEKPQQHQKTKMIVLGFSNPINWVRTRIKAFLIWAYFDKEFSITEFSEGAKQAFAHVSKLLSQCKFDLLEELVAKEVLHALKEKVTSLPDNHKNALAANIDEIVFTSTGDISIYYDEKGRKFVNILMCFWYLTSANIPSETLRGASVFQVKLGNQNVETKQLLSASYEFQREFTQGVKPDWTIARIEHSKLLE

SEQ ID NO: 32352 - protein, 160 aa, Homo sapiens
MYTITKGPSKLVAQRRTGPTQQQVEGRLGELLKCRQPAPPTSQPPRAQPFAQPPGPWPLSSPGPRLVFNRVNGRRAPSTSPSFEGTQETYTVAHEENVRFVSEAWQQVQQQLDGGPAGEGGPRPVQYVERTPNPRLQNFVPIDLDEWWAQQFLARITSCS

SEQ ID NO: 32353 - protein, 75 aa, Homo sapiens
MYTITKGPSKLVAQRRTGPTQQQVEGRLGELLKCRQPAPPTSQPPRAQPFAQPPGPWPLSSLAAGATAAGWWPSR

SEQ ID NO: 32354 - protein, 1172 aa, Homo sapiens
MPDQDKKVKTTEKSTDKQQEITIRDYSDLKRLRCLLNVQSSKQQLPAINFDSAQNSMTKSEPAIRAGGHRARGQWHESTEAVELENFSINYKNERNFSKHPQRKLFQEIFTALVKNRLISREWVNRAPSIHFLRVLICLRLLMRDPCYQEILHSLGGIENLAQYMEIVANEYLGYGEEQHTVDKLVNMTYIFQKLAAVKDQREWVTTSGAHKTLVNLLGARDTNVLLGSLLALASLAESQECREKISELNIVENLLMILHEYDLLSKRLTAELLRLLCAEPQVKEQVKLYEGIPVLLSLLHSDHLKLLWSIVWILVQVCEDPETSVEIRIWGGIKQLLHILQGDRNFVSDHSSIGSLSSANAAGRIQQLHLSEDLSPREIQENTFSLQAACCAALTELVLNDTNAHQVVQENGVYTIAKLILPNKQKNAAKSNLLQCYAFRALRFLFSMERNRPLFKRLFPTDLFEIFIDIGHYVRDISAYEELVSKLNLLVEDELKQIAENIESINQNKAPLKYIGNYAILDHLGSGAFGCVYKVRKHSGQNLLAMKEVNLHNPAFGKDKKDRDSSVRNIVSELTIIKEQLYHPNIVRYYKTFLENDRLYIVMELIEGAPLGEHFSSLKEKHHHFTEERLWKIFIQLCLALRYLHKEKRIVHRDLTPNNIMLGDKDKVTVTDFGLAKQKQENSKLTSVVGTILYSCPEVLKSEPYGEKADVWAVGCILYQMATLSPPFYSTNMLSLATKIVEAVYEPVPEGIYSEKVTDTISRCLTPDAEARPDIVEVSSMISDVMMKYLDNLSTSQLSLEKKLERERRRTQRYFMEANRNTVTCHHELAVLSHETFEKASLSSSSSGAASLKSELSESADLPPEGFQASYGKDEDRACDEILSDDNFNLENAEKDTYSEVDDELDISDNSSSSSSSPLKESTFNILKRSFSASGGERQSQTRDFTGGTGSRPRPALLPLDLLLKVPPHMLRAHIKEIEAELVTGWQSHSLPAVILRNLKDHGPQMGTFLWQASAGIAVSQRKVRQISDPIQQILIQLHKIIYITQLPPALHHNLKRRVIERFKKSLFSQQSNPCNLKSEIKKLSQGSPEPIEPNFFTADYHLLHRSSGGNSLSPNDPTGLPTSIELEEGITYEQMQTVIEEVLEESGYYNFTSNRYHSYPWGTKNHPTKR

SEQ ID NO: 32355 - protein, 725 aa, Homo sapiens
MPDQDKKVKTTEKSTDKQQEITIRDYSDLKRLRCLLNVQSSKQQLPAINFDSAQNSMTKSEPAIRAGGHRARGQWHESTEAVELENFSINYKNERNFSKHPQRKLFQEIFTALVKNRLISREWVNRAPSIHFLRVLICLRLLMRDPCYQEILHSLGGIENLAQYMEIVANEYLGYGEEQHTVDKLVNMTYIFQKLAAVKDQREWVTTSGAHKTLVNLLGARDTNVLLGSLLALASLAESQECREKISELNIVENLLMILHEYDLLSKRLTAELLRLLCAEPQVKEQVKLYEGIPVLLSLLHSDHLKLLWSIVWILVQVCEDPETSVEIRIWGGIKQLLHILQGDRNFVSDHSSIGSLSSANAAGRIQQLHLSEDLSPREIQENTFSLQAACCAALTELVLNDTNAHQVVQENGVYTIAKLILPNKQKNAAKSNLLQCYAFRALRFLFSMERNRPLFKRLFPTDLFEIFIDIGHYVRDISAYEELVSKLNLLVEDELKQIAENIESINQNKAPLKYIGNYAILDHLGSGAFGCVYKVRKHSGQNLLAMKEVNLHNPAFGKDKKDRDSSVRNIVSELTIIKEQLYHPNIVRYYKTFLENDRLYIVMELIEGAPLGEHFSSLKEKHHHFTEERLWKIFIQLCLALRYLHKEKRIVHRDLTPNNIMLGDKDKVTVSCLKCAAPLPSLSCSCSGHIKRAGSSFAFCYHWELPDASQEANAIMVPVQPAEP

SEQ ID NO: 32356 - protein, 218 aa, Homo sapiens
MPDQDKKVKTTEKSTDKQQEITIRDYSDLKRLRCLLNVQSSKQQLPAINFDSAQNSMTKSEPAIRAGGHRARGQWHESTEAVELENFSINYKNERNFSKHPQRKLFQEIFTALVKNRLISREWVNRAPSIHFLRVLICLRLLMRDPCYQEILHSLGGIENLAQYMEIVANEYLGYGEEQHTVDKLVNMTCKCYCRDTAIFVDLLEKAVWCLQQETRIL

SEQ ID NO: 32357 - protein, 712 aa, Homo sapiens
MPDQDKKVKTTEKSTDKQQEITIRDYSDLKRLRCLLNVQSSKQQLPAINFDSAQNSMTKSEPAIRAGGHRARGQWHESTEAVELENFSINYKNERNFSKHPQRKLFQEIFTALVKNRLISREWVNRAPSIHFLRVLICLRLLMRDPCYQEILHSLGGIENLAQYMEIVANEYLGYGEEQHTVDKLVNMTYIFQKLAAVKDQREWVTTSGAHKTLVNLLGARDTNVLLGSLLALASLAESQECREKISELNIVENLLMILHEYDLLSKRLTAELLRLLCAEPQVKEQVKLYEGIPVLLSLLHSDHLKLLWSIVWILVQVCEDPETSVEIRIWGGIKQLLHILQGDRNFVSDHSSIGSLSSANAAGRIQQLHLSEDLSPREIQENTFSLQAACCAALTELVLNDTNAHQVVQENGVYTIAKLILPNKQKNAAKSNLLQCYAFRALRFLFSMERNRPLFKRLFPTDLFEIFIDIGHYVRDISAYEELVSKLNLLVEDELKQIAENIESINQNKAPLKYIGNYAILDHLGSGAFGCVYKVRKHSGQNLLAMKEVNLHNPAFGKDKKDRDSSVRNIVSELTIIKEQLYHPNIVRYYKTFLENDRLYIVMELIEGAPLGEHFSSLKEKHHHFTEERLWKIFIQLCLALRYLHKEKRIVHRDLTPNNIMLGDKDKVTVTDFGLAKQKQENSKLTSVVGTILYSCVQHLYLRSPAPALAT

SEQ ID NO: 32358 - protein, 484 aa, Homo sapiens
MVPVQPAEPPEVLKSEPYGEKADVWAVGCILYQMATLSPPFYSTNMLSLATKIVEAVYEPVPEGIYSEKVTDTISRCLTPDAEARPDIVEVSSMISDVMMKYLDNLSTSQLSLEKKLERERRRTQRYFMEANRNTVTCHHELAVLSHETFEKASLSSSSSGAASLKSELSESADLPPEGFQASYGKDEDRACDEILSDDNFNLENAEKDTYSEVDDELDISDNSSSSSSSPLKESTFNILKRSFSASGGERQSQTRDFTGGTGSRPRPALLPLDLLLKVPPHMLRAHIKEIEAELVTGWQSHSLPAVILRNLKDHGPQMGTFLWQASAGIAVSQRKVRQISDPIQQILIQLHKIIYITQLPPALHHNLKRRVIERFKKSLFSQQSNPCNLKSEIKKLSQGSPEPIEPNFFTADYHLLHRSSGGNSLSPNDPTGLPTSIELEEGITYEQMQTVIEEVLEESGYYNFTSNRYHSYPWGTKNHPTKR

SEQ ID NO: 32359 - protein, 474 aa, Homo sapiens
MVPVQPAEPPEVLKSEPYGEKADVWAVGCILYQMATLSPPFYSTNMLSLATKIVEAVYEPVPEGIYSEKVTDTISRCLTPDAEARPDIVEVSSMISDVMMKYLDNLSTSQLSLEKKLERERRRTQRYFMEANRNTVTCHHELAVLSHETFEKASLSSSSSGAASLKSELSESADLPPEGFQASYGKDEDRACDEILSDDNFNLENAEKDTYSEVDDELDISDNSSSSSSSPLKESTFNILKRSFSASGGERQSQTRDFTGGTGSRPRPALLPLDLLLKVPPHMLRAHIKEIEAELVTGWQSHSLPAVILRNLKDHASAGIAVSQRKVRQISDPIQQILIQLHKIIYITQLPPALHHNLKRRVIERFKKSLFSQQSNPCNLKSEIKKLSQGSPEPIEPNFFTADYHLLHRSSGGNSLSPNDPTGLPTSIELEEGITYEQMQTVIEEVLEESGYYNFTSNRYHSYPWGTKNHPTKR

SEQ ID NO: 32360 - protein, 427 aa, Homo sapiens
MVPVQPAEPPEVLKSEPYGEKADVWAVGCILYQMATLSPPFYSTNMLSLATKIVEAVYEPVPEGIYSEKVTDTISRCLTPDAEARPDIVEVSSMISDVMMKYLDNLSTSQLSLEKKLERERRRTQRYFMEANRNTVTCHHELAVLSHETFEKASLSSSSSGAASLKSELSESADLPPEGFQASYGKDEDRACDEILSDDNFNLENAEKDTYSEVDDELDISDNSSSSSSSPLKESTFNILKRSFSASGGERQSQTRDFTGGTGSRPRPASAGIAVSQRKVRQISDPIQQILIQLHKIIYITQLPPALHHNLKRRVIERFKKSLFSQQSNPCNLKSEIKKLSQGSPEPIEPNFFTADYHLLHRSSGGNSLSPNDPTGLPTSIELEEGITYEQMQTVIEEVLEESGYYNFTSNRYHSYPWGTKNHPTKR

SEQ ID NO: 32361 - protein, 213 aa, Homo sapiens
MSRVLVPCHVKGSVALQVGDVRTSQGRPGVLVIDVTFPSVAPFELQEITFKNYYTAFLSIRVRQYTSAHTPAKWVTCLRDYCLMPDPHSEEGAQEYVSLFKHQMLCDMARISELRLILRQPSPLWLSFTVEELQIYQQGPKSPSVTFPKWLSHPVPCEQPALLREGLPDPSRVSSEVQQMWALTEMIRASHTSARIGRFDVDGCYDLNLLSYT

SEQ ID NO: 32362 - protein, 171 aa, Homo sapiens
MSRVLVPCHVKGSVALQVGDVRTSQGRPGVLVIDVTFPSVAPFELQEITFKNYYTAFLSIRVRQYTSAHTPAKWVTCLRDYCLMPDPHSEEGAQEYVSLFKHQMLCDMARISELRLILRQPSPLWLSFTVEELQIYQQGPKSPSVTFPKWLSHPVPCEQPALLREVSPHPR

SEQ ID NO: 32363 - protein, 313 aa, Homo sapiens
MAGQPGHMPHGGSSNNLCHTLGPVHPPDPQRHPNTLSFRCSLADFQIEKKIGRGQFSEVYKATCLLDRKTVALKKVQIFEMMDAKARQDCVKEIGLLKQLNHPNIIKYLDSFIEDNELNIVLELADAGDLSQMIKYFKKQKRLIPERTVWKYFVQLCSAVEHMHSRRVMHRDIKPANVFITATGVVKLGDLGLGRFFSSETTAAHSLVGTPYYMSPERIHENGYNFKSDIWSLGCLLYEMAALQSPFYGDKMNLFSLCQKIEQCDYPPLPGEHYSEKLRELVSMCICPDPHQRPDIGYVHQVAKQMHIWMSST

SEQ ID NO: 32364 - protein, 347 aa, Homo sapiens
MPRREVCWEAAHFRQEEQSLPRPRVRALVRLACRMAGQPGHMPHGGSSNNLCHTLGPVHPPDPQRHPNTLSFRCSLADFQIEKKIGRGQFSEVYKATCLLDRKTVALKKVQIFEMMDAKARQDCVKEIGLLKQLNHPNIIKYLDSFIEDNELNIVLELADAGDLSQMIKYFKKQKRLIPERTVWKYFVQLCSAVEHMHSRRVMHRDIKPANVFITATGVVKLGDLGLGRFFSSETTAAHSLVGTPYYMSPERIHENGYNFKSDIWSLGCLLYEMAALQSPFYGDKMNLFSLCQKIEQCDYPPLPGEHYSEKLRELVSMCICPDPHQRPDIGYVHQVAKQMHIWMSST

SEQ ID NO: 32365 - protein, 331 aa, Homo sapiens
MGRRRPAPFRALVRLACRMAGQPGHMPHGGSSNNLCHTLGPVHPPDPQRHPNTLSFRCSLADFQIEKKIGRGQFSEVYKATCLLDRKTVALKKVQIFEMMDAKARQDCVKEIGLLKQLNHPNIIKYLDSFIEDNELNIVLELADAGDLSQMIKYFKKQKRLIPERTVWKYFVQLCSAVEHMHSRRVMHRDIKPANVFITATGVVKLGDLGLGRFFSSETTAAHSLVGTPYYMSPERIHENGYNFKSDIWSLGCLLYEMAALQSPFYGDKMNLFSLCQKIEQCDYPPLPGEHYSEKLRELVSMCICPDPHQRPDIGYVHQVAKQMHIWMSST

SEQ ID NO: 32366 - protein, 338 aa, Homo sapiens
MEATGWDSRCSPGTQVRALVRLACRMAGQPGHMPHGGSSNNLCHTLGPVHPPDPQRHPNTLSFRCSLADFQIEKKIGRGQFSEVYKATCLLDRKTVALKKVQIFEMMDAKARQDCVKEIGLLKQLNHPNIIKYLDSFIEDNELNIVLELADAGDLSQMIKYFKKQKRLIPERTVWKYFVQLCSAVEHMHSRRVMHRDIKPANVFITATGVVKLGDLGLGRFFSSETTAAHSLVGTPYYMSPERIHENGYNFKSDIWSLGCLLYEMAALQSPFYGDKMNLFSLCQKIEQCDYPPLPGEHYSEKLRELVSMCICPDPHQRPDIGYVHQVAKQMHIWMSST

SEQ ID NO: 32367 - protein, 491 aa, Homo sapiens
MKMAAPTANKAASLGCNNKPAFPELDFRSGARVEELNKLIQEFTKHDQREYDDQRALEIHTAKDFIFSMLGMVQKLDQKLPVANEYLLLSGGVREGVVDLDLDELNVYARGTDYDMDFTLLVPALKLHDRNQPVTLDMRHSALCHSWLSLRLFDEGTISKWKDCCTIVDHINGATNYFFSPTKVADWFYDSISIVLSEIQKKPQRGMPKVEKVEKNGTIISIILGVGSSRMLYDIVPVVSFKGWPAVAQSWLMENHFWDGKITEEEVISGFYLVPACSYKGKKDNEWRLSFARSEVQLKKCISSSLMQAYQACKAIIIKLLSRPKAISPYHLRSMMLWACDRLPANYLAQEDYAAHFLLGLIDDLQHCLVNKMCPNYFIPQCNMLEHLSEETVMLHARKLSSVRSDPAEHLRTAIEHVKAANRLTLELQRRGSTTSIPSPQSDGGDPNQPDDRLAKKLQQLVTENPGKSISVFINPDDVTRPHFRIDDKFF

SEQ ID NO: 32368 - protein, 1514 aa, Homo sapiens
MAVEGSTITSRIKNLLRSPSIKLRRSKAGNRREDLSSKVTLEKVLGITVSGGRGLACDPRSGLVAYPAGCVVVLFNPRKHKQHHILNSSRKTITALAFSPDGKYLVTGESGHMPAVRVWDVAEHSQVAELQEHKYGVACVAFSPSAKYIVSVGYQHDMIVNVWAWKKNIVVASNKVSSRVTAVSFSEDCSYFVTAGNRHIKFWYLDDSKTSKVNATVPLLGRSGLLGELRNNLFTDVACGRGKKADSTFCITSSGLLCEFSDRRLLDKWVELRNIDSFTTTVAHCISVSQDYIFCGCADGTVRLFNPSNLHFLSTLPRPHALGTDIASVTEASRLFSGVANARYPDTIALTFDPTNQWLSCVYNDHSIYVWDVRDPKKVGKVYSALYHSSCVWSVEVYPEVKDSNQACLPPSSFITCSSDNTIRLWNTESSGVHGSTLHRNILSSDLIKIIYVDGNTQALLDTELPGGDKADASLLDPRVGIRSVCVSPNGQHLASGDRMGTLRVHELQSLSEMLKVEAHDSEILCLEYSKPDTGLKLLASASRDRLIHVLDAGREYSLQQTLDEHSSSITAVKFAASDGQVRMISCGADKSIYFRTAQKSGDGVQFTRTHHVVRKTTLYDMDVEPSWKYTAIGCQDRNIRIFNISSGKQKKLFKGSQGEDGTLIKVQTDPSGIYIATSCSDKNLSIFDFSSGECVATMFGHSEIVTGMKFSNDCKHLISVSGDSCIFVWRLSSEMTISMRQRLAELRQRQRGGKQQGPSSPQRASGPNRHQAPSMLSPGPALSSDSDKEGEDEGTEEELPALPVLAKSTKKALASVPSPALPRSLSHWEMSRAQESVGFLDPAPAANPGPRRRGRWVQPGVELSVRSMLDLRQLETLAPSLQDPSQDSLAIIPSGPRKHGQEALETSLTSQNEKPPRPQASQPCSYPHIIRLLSQEEGVFAQDLEPAPIEDGIVYPEPSDNPTMDTSEFQVQAPARGTLGRVYPGSRSSEKHSPDSACSVDYSSSCLSSPEHPTEDSESTEPLSVDGISSDLEEPAEGDEEEEEEEGGMGPYGLQEGSPQTPDQEQFLKQHFETLASGAAPGAPVQVPERSESRSISSRFLLQVQTRPLREPSPSSSSLALMSRPAQVPQASGEQPRGNGANPPGAPPEVEPSSGNPSPQQAASVLLPRCRLNPDSSWAPKRVATASPFSGLQKAQSVHSLVPQERHEASLQAPSPGALLSREIEAQDGLGSLPPADGRPSRPHSYQNPTTSSMAKISRSISVGENLGLVAEPQAHAPIRVSPLSKLALPSRAHLVLDIPKPLPDRPTLAAFSPVTKGRAPGEAEKPGFPVGLGKAHSTTERWACLGEGTTPKPRTECQAHPGPSSPCAQQLPVSSLFQGPENLQPPPPEKTPNPMECTKPGAALSQDSEPAVSLEQCEQLVAELRGSVRQAVRLYHSVAGCKMPSAEQSRIAQLLRDTFSSVRQELEAVAGAVLSSPGSSPGAVGAEQTQALLEQYSELLLRAVERRMERKL

SEQ ID NO: 32369 - protein, 1231 aa, Homo sapiens
MAVEGSTITSRIKNLLRSPSIKLRRSKAGNRREDLSSKVTLEKVLGITVSGGRGLACDPRSGLVAYPAGCVVVLFNPRKHKQHHILNSSRKTITALAFSPDGKYLVTGESGHMPAVRVWDVAEHSQVAELQEHKYGVACVAFSPSAKYIVSVGYQHDMIVNVWAWKKNIVVASNKVSSRVTAVSFSEDCSYFVTAGNRHIKFWYLDDSKTSKVNATVPLLGRSGLLGELRNNLFTDVACGRGKKADSTFCITSSGLLCEFSDRRLLDKWVELRTTVAHCISVSQDYIFCGCADGTVRLFNPSNLHFLSTLPRPHALGTDIASVTEASRLFSGVANARYPDTIALTFDPTNQWLSCVYNDHSIYVWDVRDPKKVGKVYSALYHSSCVWSVEVYPEVKDSNQACLPPSSFITCSSDNTIRLWNTESSGVHGSTLHRNILSSDLIKIIYVDGNTQALLDTELPGGDKADASLLDPRVGIRSVCVSPNGQHLASGDRMGTLRVHELQSLSEMLKVEAHDSEILCLEYSKPDTGLKLLASASRDRLIHVLDAGREYSLQQTLDEHSSSITAVKFAASDGQVRMISCGADKSIYFRTAQKSGDGVQFTRTHHVVRKTTLYDMDVEPSWKYTAIGCQDRNIRIFNISSGKQKKLFKGSQGEDGTLIKVQTDPSGIYIATSCSDKNLSIFDFSSGECVATMFGHSEIVTGMKFSNDCKHLISVSGDSCIFVWRLSSEMTISMRQRLAELRQRQRGGKQQGPSSPQRASGPNRHQAPSMLSPGPALSSDSDKEGEDEGTEEELPALPVLAKSTKKALASVPSPALPRSLSHWEMSRAQESVGFLDPAPAANPGPRRRGRWVQPGVELSVRSMLDLRQLETLAPSLQDPSQDSLAIIPSGPRKHGQEALETSLTSQNEKPPRPQASQPCSYPHIIRLLSQEEGVFAQDLEPAPIEDGIVYPEPSDNPTMDTSEFQVQAPARGTLGRVYPGSRSSEKHSPDSACSVDYSSSCLSSPEHPTEDSESTEPLSVDGISSDLEEPAEGDEEEEEEEGGMGPYGLQEGSPQTPDQEQFLKQHFETLASGAAPGAPVQVPERSESRSISSRFLLQVQTRPLREPSPSSSSLALMSRPAQVPQASEPAVSLEQCEQLVAELRGSVRQAVRLYHSVAGCKMPSAEQSRIAQLLRDTFSSVRQELEAVAGAVLSSPGSSPGAVGAEQTQALLEQYSELLLRAVERRMERKL

SEQ ID NO: 32370 - protein, 1389 aa, Homo sapiens
MAVEGSTITSRIKNLLRSPSIKLRRSKAGNRREDLSSKVTLEKVLGITVSGGRGLACDPRSGLVAYPAGCVVVLFNPRKHKQHHILNSSRKTITALAFSPDGKYLVTGESGHMPAVRVWDVAEHSQVAELQEHKYGVACVAFSPSAKYIVSVGYQHDMIVNVWAWKKNIVVASNKVSSRVTAVSFSEDCSYFVTAGNRHIKFWYLDDSKTSKVNATVPLLGRSGLLGELRNNLFTDVACGRGKKADSTFCITSSGLLCEFSDRRLLDKWVELRVYPEVKDSNQACLPPSSFITCSSDNTIRLWNTESSGVHGSTLHRNILSSDLIKIIYVDGNTQALLDTELPGGDKADASLLDPRVGIRSVCVSPNGQHLASGDRMGTLRVHELQSLSEMLKVEAHDSEILCLEYSKPDTGLKLLASASRDRLIHVLDAGREYSLQQTLDEHSSSITAVKFAASDGQVRMISCGADKSIYFRTAQKSGDGVQFTRTHHVVRKTTLYDMDVEPSWKYTAIGCQDRNIRIFNISSGKQKKLFKGSQGEDGTLIKVQTDPSGIYIATSCSDKNLSIFDFSSGECVATMFGHSEIVTGMKFSNDCKHLISVSGDSCIFVWRLSSEMTISMRQRLAELRQRQRGGKQQGPSSPQRASGPNRHQAPSMLSPGPALSSDSDKEGEDEGTEEELPALPVLAKSTKKALASVPSPALPRSLSHWEMSRAQESVGFLDPAPAANPGPRRRGRWVQPGVELSVRSMLDLRQLETLAPSLQDPSQDSLAIIPSGPRKHGQEALETSLTSQNEKPPRPQASQPCSYPHIIRLLSQEEGVFAQDLEPAPIEDGIVYPEPSDNPTMDTSEFQVQAPARGTLGRVYPGSRSSEKHSPDSACSVDYSSSCLSSPEHPTEDSESTEPLSVDGISSDLEEPAEGDEEEEEEEGGMGPYGLQEGSPQTPDQEQFLKQHFETLASGAAPGAPVQVPERSESRSISSRFLLQVQTRPLREPSPSSSSLALMSRPAQVPQASGEQPRGNGANPPGAPPEVEPSSGNPSPQQAASVLLPRCRLNPDSSWAPKRVATASPFSGLQKAQSVHSLVPQERHEASLQAPSPGALLSREIEAQDGLGSLPPADGRPSRPHSYQNPTTSSMAKISRSISVGENLGLVAEPQAHAPIRVSPLSKLALPSRAHLVLDIPKPLPDRPTLAAFSPVTKGRAPGEAEKPGFPVGLGKAHSTTERWACLGEGTTPKPRTECQAHPGPSSPCAQQLPVSSLFQGPENLQPPPPEKTPNPMECTKPGAALSQDSAVSLEQCEQLVAELRGSVRQAVRLYHSVAGCKMPSAEQSRIAQLLRDTFSSVRQELEAVAGAVLSSPGSSPGAVGAEQTQALLEQYSELLLRAVERRMERKL

SEQ ID NO: 32371 - protein, 1015 aa, Homo sapiens
MGTLRVHELQSLSEMLKVEAHDSEILCLEYSKPDTGLKLLASASRDRLIHVLDAGREYSLQQTLDEHSSSITAVKFAASDGQVRMISCGADKSIYFRTAQKSGDGVQFTRTHHVVRKTTLYDMDVEPSWKYTAIGCQDRNIRIFNISSGKQKKLFKGSQGEDGTLIKVQTDPSGIYIATSCSDKNLSIFDFSSGECVATMFGHSEIVTGMKFSNDCKHLISVSGDSCIFVWRLSSEMTISMRQRLAELRQRQRGGKQQGPSSPQRASGPNRHQAPSMLSPGPALSSDSDKEGEDEGTEEELPALPVLAKSTKKALASVPSPALPRSLSHWEMSRAQESVGFLDPAPAANPGPRRRGRWVQPGVELSVRSMLDLRQLETLAPSLQDPSQDSLAIIPSGPRKHGQEALETSLTSQNEKPPRPQASQPCSYPHIIRLLSQEEGVFAQDLEPAPIEDGIVYPEPSDNPTMDTSEFQVQAPARGTLGRVYPGSRSSEKHSPDSACSVDYSSSCLSSPEHPTEDSESTEPLSVDGISSDLEEPAEGDEEEEEEEGGMGPYGLQEGSPQTPDQEQFLKQHFETLASGAAPGAPVQVPERSESRSISSRFLLQVQTRPLREPSPSSSSLALMSRPAQVPQASGEQPRGNGANPPGAPPEVEPSSGNPSPQQAASVLLPRCRLNPDSSWAPKRVATASPFSGLQKAQSVHSLVPQERHEASLQAPSPGALLSREIEAQDGLGSLPPADGRPSRPHSYQNPTTSSMAKISRSISVGENLGLVAEPQAHAPIRVSPLSKLALPSRAHLVLDIPKPLPDRPTLAAFSPVTKGRAPGEAEKPGFPVGLGKAHSTTERWACLGEGTTPKPRTECQAHPGPSSPCAQQLPVSSLFQGPENLQPPPPEKTPNPMECTKPGAALSQDSEPAVSLEQCEQLVAELRGSVRQAVRLYHSVAGCKMPSAEQSRIAQLLRDTFSSVRQELEAVAGAVLSSPGSSPGAVGAEQTQALLEQYSELLLRAVERRMERKL

SEQ ID NO: 32372 - protein, 215 aa, Homo sapiens
MAVEGSTITSRIKNLLRSPSIKLRRSKAGNRREDLSSKVTLEKVLGITVSGGRGLACDPRSGLVAYPAGCVVVLFNPRKHKQHHILNSSRKTITALAFSPDGKYLVTGESGHMPAVRVWDVAEHSQVAELQEHKYGVACVAFSPSAKYIVSVGYQHDMIVNVWAWKKNIVVASNKVSSRVTAVSFSEDCSYFVTAGNRHIKFWYLDDSKTSKVRC

SEQ ID NO: 32373 - protein, 1508 aa, Homo sapiens
MAVEGSTITSRIKNLLRSPSIKLRRSKAGNRREDLSSKVTLEKVLGITVSGGRGLACDPRSGLVAYPAGCVVVLFNPRKHKQHHILNSSRKTITALAFSPDGKYLVTGESGHMPAVRVWDVAEHSQVAELQEHKYGVACVAFSPSAKYIVSVGYQHDMIVNVWAWKKNIVVASNKVSSRVTAVSFSEDCSYFVTAGNRHIKFWYLDDSKTSKVNATVPLLGRSGLLGELRNNLFTDVACGRGKKADSTFCITSSGLLCEFSDRRLLDKWVELRTTVAHCISVSQDYIFCGCADGTVRLFNPSNLHFLSTLPRPHALGTDIASVTEASRLFSGVANARYPDTIALTFDPTNQWLSCVYNDHSIYVWDVRDPKKVGKVYSALYHSSCVWSVEVYPEVKDSNQACLPPSSFITCSSDNTIRLWNTESSGVHGSTLHRNILSSDLIKIIYVDGNTQALLDTELPGGDKADASLLDPRVGIRSVCVSPNGQHLASGDRMGTLRVHELQSLSEMLKVEAHDSEILCLEYSKPDTGLKLLASASRDRLIHVLDAGREYSLQQTLDEHSSSITAVKFAASDGQVRMISCGADKSIYFRTAQKSGDGVQFTRTHHVVRKTTLYDMDVEPSWKYTAIGCQDRNIRIFNISSGKQKKLFKGSQGEDGTLIKVQTDPSGIYIATSCSDKNLSIFDFSSGECVATMFGHSEIVTGMKFSNDCKHLISVSGDSCIFVWRLSSEMTISMRQRLAELRQRQRGGKQQGPSSPQRASGPNRHQAPSMLSPGPALSSDSDKEGEDEGTEEELPALPVLAKSTKKALASVPSPALPRSLSHWEMSRAQESVGFLDPAPAANPGPRRRGRWVQPGVELSVRSMLDLRQLETLAPSLQDPSQDSLAIIPSGPRKHGQEALETSLTSQNEKPPRPQASQPCSYPHIIRLLSQEEGVFAQDLEPAPIEDGIVYPEPSDNPTMDTSEFQVQAPARGTLGRVYPGSRSSEKHSPDSACSVDYSSSCLSSPEHPTEDSESTEPLSVDGISSDLEEPAEGDEEEEEEEGGMGPYGLQEGSPQTPDQEQFLKQHFETLASGAAPGAPVQVPERSESRSISSRFLLQVQTRPLREPSPSSSSLALMSRPAQVPQASGEQPRGNGANPPGAPPEVEPSSGNPSPQQAASVLLPRCRLNPDSSWAPKRVATASPFSGLQKAQSVHSLVPQERHEASLQAPSPGALLSREIEAQDGLGSLPPADGRPSRPHSYQNPTTSSMAKISRSISVGENLGLVAEPQAHAPIRVSPLSKLALPSRAHLVLDIPKPLPDRPTLAAFSPVTKGRAPGEAEKPGFPVGLGKAHSTTERWACLGEGTTPKPRTECQAHPGPSSPCAQQLPVSSLFQGPENLQPPPPEKTPNPMECTKPGAALSQDSEPAVSLEQCEQLVAELRGSVRQAVRLYHSVAGCKMPSAEQSRIAQLLRDTFSSVRQELEAVAGAVLSSPGSSPGAVGAEQTQALLEQYSELLLRAVERRMERKL

SEQ ID NO: 32374 - protein, 81 aa, Homo sapiens
MLRQIIGQAKKHPSLIPLFVFIGTGATGATLYLLRLALFNPDVCWDRNNPEPWNKLGPNDQYKFYSVNVDYSKLKKERPDF

SEQ ID NO: 32375 - protein, 140 aa, Homo sapiens
MLQAADFIERTETAGELSRGLIGVLSSQISWCLLNVNLSKLPTRLQRLSCSVLNSSPAMRGGARGRPQLTLERPLRPGCRLHSCSEAEKGGFVRRKEIILFPPCEDPARGWLSANPGREPSPGICWHLNLGLPSLHNCEE

SEQ ID NO: 32376 - protein, 351 aa, Homo sapiens
MAAAAGRSLLLLLSSRGGGGGGAGGCGALTAGCFPGLGVSRHRQQQHHRTVHQRIASWQNLGAVYCSTVVPSDDVTVVYQNGLPVISVRLPSRRERCQFTLKPISDSVGVFLRQLQEEDRGIDRVAIYSPDGVRVAASTGIDLLLLDDFKLVINDLTYHVRPPKRDLLSHENAATLNDVKTLVQQLYTTLCIEQHQLNKERELIERLEDLKEQLAPLEKVRIEISRKAEKRTTLVLWGGLAYMATQFGILARLTWWEYSWDIMEPVTYFITYGSAMAMYAYFVMTRQEYVYPEARDRQYLLFFHKGAKKSRFDLEKYNQLKDAIAQAEMDLKRLRDPLQVHLPLRQIGEKD

SEQ ID NO: 32377 - protein, 330 aa, Homo sapiens
MAAAAGRSLLLLLSSRGGGGGGAGGCGALTAGCFPGLGVSRHRQQQHHRTVHQRIASWQNLGAVYCSTVVPSDDVTVVYQNGLPVISVRLPSRRERCQFTLKPISDSVGVFLRQLQEEDRGIDRVAIYSPDGVRVAASTGIDLLLLDDFKLVINDLTYHVRPPKRVEMGFCHVGQNGFELLTSSYLPASASQSAEIIAVRIEISRKAEKRTTLVLWGGLAYMATQFGILARLTWWEYSWDIMEPVTYFITYGSAMAMYAYFVMTRQEYVYPEARDRQYLLFFHKGAKKSRFDLEKYNQLKDAIAQAEMDLKRLRDPLQVHLPLRQIGEKD

SEQ ID NO: 32378 - protein, 302 aa, Homo sapiens
MVHQRIASWQNLGAVYCSTVVPSDDVTVVYQNGLPVISVRLPSRRERCQFTLKPISDSVGVFLRQLQEEDRGIDRVAIYSPDGVRVAASTGIDLLLLDDFKLVINDLTYHVRPPKRDLLSHENAATLNDVKTLVQQLYTTLCIEQHQLNKERELIERLEDLKEQLAPLEKVRIEISRKAEKRTTLVLWGGLAYMATQFGILARLTWWEYSWDIMEPVTYFITYGSAMAMYAYFVMTRQEYVYPEARDRQYLLFFHKGAKKSRFDLEKYNQLKDAIAQAEMDLKRLRDPLQVHLPLRQIGEKD

SEQ ID NO: 32379 - protein, 148 aa, Homo sapiens
MTKALLIYLVSSFLALNQASLISRCDLAQVLQLEDLDGFEGYSLSDWLCLAFVESKFNISKINENADGSFDYGLFQINSHYWCNDYKSYSENLCHVDCQDLLNPNLLAGIHCAKRIVSGARGMNNWVEWRLHCSGRPLFYWLTGCRLR

SEQ ID NO: 32380 - protein, 2210 aa, Homo sapiens
MTAAANWVANGASLEDCHSNLFSLAELTGIKWRRYNFGGHGDCGPIISAPAQDDPILLSFIRCLQANLLCVWRRDVKPDCKELWIFWWGDEPNLVGVIHHELQVVEEGLWENGLSYECRTLLFKAIHNLLERCLMDKNFVRIGKWFVRPYEKDEKPVNKSEHLSCAFTFFLHGESNVCTSVEIAQHQPIYLINEEHIHMAQSSPAPFQVLVSPYGLNGTLTGQAYKMSDPATRKLIEEWQYFYPMVLKKKEESKEEDELGYDDDFPVAVEVIVGGVRMVYPSAFVLISQNDIPVPQSVASAGGHIAVGQQGLGSVKDPSNCGMPLTPPTSPEQAILGESGGMQSAASHLVSQDGGMITMHSPKRSGKIPPKLHNHMVHRVWKECILNRTQSKRSQMSTPTLEEEPASNPATWDFVDPTQRVSCSCSRHKLLKRCAVGPNRPPTVSQPGFSAGPSSSSSLPPPASSKHKTAERQEKGDKLQKRPLIPFHHRPSVAEELCMEQDTPGQKLGLAGIDSSLEVSSSRKYDKQMAVPSRNTSKQMNLNPMDSPHSPISPLPPTLSPQPRGQETESLDPPSVPVNPALYGNGLELQQLSTLDDRTVLVGQRLPLMAEVSETALYCGIRPSNPESSEKWWHSYRLPPSDDAEFRPPELQGERCDAKMEVNSESTALQRLLAQPNKRFKIWQDKQPQLQPLHFLDPLPLSQQPGDSLGEVNDPYTFEDGDIKYIFTANKKCKQGTEKDSLKKNKSEDGFGTKDVTTPGHSTPVPDGKNAMSIFSSATKTDVRQDNAAGRAGSSSLTQVTDLAPSLHDLDNIFDNSDDDELGAVSPALRSSKMPAVGTEDRPLGKDGRAAVPYPPTVADLQRMFPTPPSLEQHPAFSPVMNYKDGISSETVTALGMMESPMVSMVSTQLTEFKMEVEDGLGSPKPEEIKDFSYVHKVPSFQPFVGSSMFAPLKMLPSHCLLPLKIPDACLFRPSWAIPPKIEQLPMPPAATFIRDGYNNVPSVGSLADPDYLNTPQMNTPVTLNSAAPASNSGAGVLPSPATPRFSVPTPRTPRTPRTPRGGGTASGQGSVKYDSTDQGSPASTPSTTRPLNSVEPATMQPIPEAHSLYVTLILSDSVMNIFKDRNFDSCCICACNMNIKGADVGLYIPDSSNEDQYRCTCGFSAIMNRKLGYNSGLFLEDELDIFGKNSDIGQAAERRLMMCQSTFLPQVEGTKKPQEPPISLLLLLQNQHTQPFASLNFLDYISSNNRQTLPCVSWSYDRVQADNNDYWTECFNALEQGRQYVDNPTGGKVDEALVRSATVHSWPHSNVLDISMLSSQDVVRMLLSLQPFLQDAIQKKRTGRTWENIQHVQGPLTWQQFHKMAGRGTYGSEESPEPLPIPTLLVGYDKDFLTISPFSLPFWERLLLDPYGGHRDVAYIVVCPENEALLEGAKTFFRDLSAVYEMCRLGQHKPICKVLRDGIMRVGKTVAQKLTDELVSEWFNQPWSGEENDNHSRLKLYAQVCRHHLAPYLATLQLDSSLLIPPKYQTPPAAAQGQATPGNAGPLAPNGSAAPPAGSAFNPTSNSSSTNPAASSSASGSSVPPVSSSASAPGISQISTTSSSGFSGSVGGQNPSTGGISADRTQGNIGCGGDTDPGQSSSQPSQDGQESVTERERIGIPTEPDSADSHAHPPAVVIYMVDPFTYAAEEDSTSGNFWLLSLMRCYTEMLDNLPEHMRNSFILQIVPCQYMLQTMKDEQVFYIQYLKSMAFSVYCQCRRPLPTQIHIKSLTGFGPAASIEMTLKNPERPSPIQLYSPPFILAPIKDKQTELGETFGEASQKYNVLFVGYCLSHDQRWLLASCTDLHGELLETCVVNIALPNRSRRSKVSARKIGLQKLWEWCIGIVQMTSLPWRVVIGRLGRLGHGELKDWSILLGECSLQTISKKLKDVCRMCGISAADSPSILSACLVAMEPQGSFVVMPDAVTMGSVFGRSTALNMQSSQLNTPQDASCTHILVFPTSSTIQVAPANYPNEDGFSPNNDDMFVDLPFPDDMDNDIGILMTGNLHSSPNSSPVPSPGSPSGIGVGSHFQHSRSQGERLLSREAPEELKQQPLALGYFVSTAKAENLPQWFWSSCPQAQNQCPLFLKASLHHHISVAQTDELLPARNSQRVPHPLDSKTTSDVLRFVLEQYNALSWLTCNPATQDRTSCLPVHFVVLTQLYNAIMNIL

SEQ ID NO: 32381 - protein, 718 aa, Homo sapiens
MEDLGENTMVLSTLRSLNNFISQRVEGGSGLDISTSAPGSLQMQYQQSMQLEERAEQIRSKSHLIQVEREKMQMELSHKRARVELERAASTSARNYEREVDRNQELLTRIRQLQEREAGAEEKMQEQLERNRQCQQNLDAASKRLREKEDSLAQAGETINALKGRISELQWSVMDQEMRVKRLESEKQELQEQLDLQHKKCQEANQKIQELQASQEARADHEQQIKDLEQKLSLQEQDAAIVKNMKSELVRLPRLERELKQLREESAHLREMRETNGLLQEELEGLQRKLGRQEKMQETLVGLELENERLLAKLQSWERLDQTMGLSIRTPEDLSRFVVELQQRELALKDKNSAVTSSARGLEKARQQLQEELRQVSGQLLEERKKRETHEALARRLQKRVLLLTKERDGMRAILGSYDSELTPAEYSPQLTRRMREAEDMVQKVHSHSAEMEAQLSQALEELGGQKQRADMLEMELKMLKSQSSSAEQSFLFSREEADTLRLKVEELEGERSRLEEEKRMLEAQLERRALQGDYDQSRTKVLHMSLNPTSVARQRLREDHSQLQAECERLRGLLRAMERGGTVPADLEAAAASLPSSKEVAELKKQVESAELKNQRLKEVFQTKIQEFRKACYTLTGYQIDITTENQYRLTSLYAEHPGDCLIFKATSPSGSKMQLLETEFSHTVGELIEVHLRRQDSIPAFLSSLTLELFSRQTVA

SEQ ID NO: 32382 - protein, 626 aa, Homo sapiens
MLPARGCVRKRTVWPRLARVLIVTLLTLELSYAPLPCQLSGVPYNTGDPVGRWARPCIWPCPWHTTINALKGRISELQWSVMDQEMRVKRLESEKQELQEQLDLQHKKCQEANQKIQELQASQEARADHEQQIKDLEQKLSLQEQDAAIVKNMKSELVRLPRLERELKQLREESAHLREMRETNGLLQEELEGLQRKLGRQEKMQETLVGLELENERLLAKLQSWERLDQTMGLSIRTPEDLSRFVVELQQRELALKDKNSAVTSSARGLEKARQQLQEELRQVSGQLLEERKKRETHEALARRLQKRVLLLTKERDGMRAILGSYDSELTPAEYSPQLTRRMREAEDMVQKVHSHSAEMEAQLSQALEELGGQKQRADMLEMELKMLKSQSSSAEQSFLFSREEADTLRLKVEELEGERSRLEEEKRMLEAQLERRALQGDYDQSRTKVLHMSLNPTSVARQRLREDHSQLQAECERLRGLLRAMERGGTVPADLEAAAASLPSSKEVAELKKQVESAELKNQRLKEVFQTKIQEFRKACYTLTGYQIDITTENQYRLTSLYAEHPGDCLIFKATSPSGSKMQLLETEFSHTVGELIEVHLRRQDSIPAFLSSLTLELFSRQTVA

SEQ ID NO: 32383 - protein, 671 aa, Homo sapiens
MEDLGENTMVLSTLRSLNNFISQRVEGGSGLDISTSAPGSLQMQYQQSMQREVDRNQELLTRIRQLQEREAGAEEKMQEQLERNRQCQQNLDAASKRLREKEDSLAQAGETINALKGRISELQWSVMDQEMRVKRLESEKQELQEQLDLQHKKCQEANQKIQELQASQEARADHEQQIKDLEQKLSLQEQDAAIVKNMKSELVRLPRLERELKQLREESAHLREMRETNGLLQEELEGLQRKLGRQEKMQETLVGLELENERLLAKLQSWERLDQTMGLSIRTPEDLSRFVVELQQRELALKDKNSAVTSSARGLEKARQQLQEELRQVSGQLLEERKKRETHEALARRLQKRVLLLTKERDGMRAILGSYDSELTPAEYSPQLTRRMREAEDMVQKVHSHSAEMEAQLSQALEELGGQKQRADMLEMELKMLKSQSSSAEQSFLFSREEADTLRLKVEELEGERSRLEEEKRMLEAQLERRALQGDYDQSRTKVLHMSLNPTSVARQRLREDHSQLQAECERLRGLLRAMERGGTVPADLEAAAASLPSSKEVAELKKQVESAELKNQRLKEVFQTKIQEFRKACYTLTGYQIDITTENQYRLTSLYAEHPGDCLIFKATSPSGSKMQLLETEFSHTVGELIEVHLRRQDSIPAFLSSLTLELFSRQTVA

SEQ ID NO: 32384 - protein, 251 aa, Homo sapiens
MPSPRPRGSPPPAPSGSRVRPPRSGRSPAPRSPTGPNTPRAPGRFESPFSVEAILARPDPCAPAASQPSGSACVHPAFWTAASLCATGGLPWACPTSWLPAYLSVGFYPVPGPRVAPVCGLLGFGVTGLELAHCSGLWAFPDWAPTEDLQDTERQQKRVRTMFNLEQLEELEKVFAKQHNLVGKKRAQLAARLKLTENQVRVWFQNRRVKYQKQQKLRAAVTSAEAASLDEPSSSSIASIQSDDAESGVDG

SEQ ID NO: 32385 - protein, 264 aa, Homo sapiens
MLRCGGRGLLLGLAVAAAAVMAARLMGWWGPRAGFRLFIPEELSRYRGGPGDPGLYLALLGRVYDVSSGRRHYEPGSHYSGFAGRDASRAFVTGDCSEAGLVDDVSDLSAAEMLTLHNWLSFYEKNYVCVGRVTGRFYGEDGLPTPALTQVEAAITRGLEANKLQLQEKQTFPPCNAEWSSARGSRLWCSQKSGGVSRDWIGVPRKLYKPGAKEPRCVCVRTTGPPSGQMPDNPPHRNRGDLDHPNLAEYTGCPPLAITCSFPL

SEQ ID NO: 32386 - protein, 152 aa, Homo sapiens
MLTLHNWLSFYEKNYVCVGRVTGRFYGEDGLPTPALTQVEAAITRGLEANKLQLQEKQTFPPCNAEWSSARGSRLWCSQKSGGVSRDWIGVPRKLYKPGAKEPRCVCVRTTGPPSGQMPDNPPHRNRGDLDHPNLAEYTGCPPLAITCSFPL

SEQ ID NO: 32387 - protein, 377 aa, Homo sapiens
MAAAAQSRVVRVLSMSRSAITAIATSVCHGPPCRQLHHALMPHGKGGRSSVSGIVATVFGATGFLGRYVVNHLGRMGSQVIIPYRCDKYDIMHLRPMGDLGQLLFLEWDARDKDSIRRVVQHSNVVINLIGRDWETKNFDFEDVFVKIPQAIAQLSKEAGVEKFIHVSHLNANIKSSSRYLRNKAVGEKVVRDAFPEAIIVKPSDIFGREDRFLNSFASMHRFGPIPLGSLGWKTVKQPVYVVDVSKGIVNAVKDPDANGKSFAFVGPSRYLLFHLVKYIFAVAHRLFLPFPLPLFAYRWVARVFEISPFEPWITRDKVERMHITDMKLPHLPGLEDLGIQATPLELKAIEVLRRHRTYRWLSAEIEDVKPAKTVNI

SEQ ID NO: 32388 - protein, 380 aa, Homo sapiens
MLVIPPGLSEEEEALQKKFNKLKKKKKALLALKKQSSSSTTSQGGVKRSLSEQPVMDTATATEQAKQLVKSGAISAIKAETKNSGFKRSRTLEGKLKDPEKGPVPTFQPFQRSISADDDLQESSRRPQRKSLYESFVSSSDRLRELGPDGEEAEGPGAGDGPPRSFDWGYEERSGAHSSASPPRSRSRDRSHERNRDRDRDRERDRDRDRDRDRERDRDRDRDRDRDRERDRDRERDRDRDREGPFRRSDSFPERRAPRKGNTLYVYGEDMTPTLLRGAFSPFGNIIDLSMDPPRNCAFVTYEKMESADQAVAELNGTQVESVQLKVNIARKQPMLDAATGKSVWGSLAVQNSPKGCHRDKRTQIVYSDDVYKENLVDGF

SEQ ID NO: 32389 - protein, 387 aa, Homo sapiens
MVPKGATMLVIPPGLSEEEEALQKKFNKLKKKKKALLALKKQSSSSTTSQGGVKRSLSEQPVMDTATATEQAKQLVKSGAISAIKAETKNSGFKRSRTLEGKLKDPEKGPVPTFQPFQRSISADDDLQESSRRPQRKSLYESFVSSSDRLRELGPDGEEAEGPGAGDGPPRSFDWGYEERSGAHSSASPPRSRSRDRSHERNRDRDRDRERDRDRDRDRDRERDRDRDRDRDRDRERDRDRERDRDRDREGPFRRSDSFPERRAPRKGNTLYVYGEDMTPTLLRGAFSPFGNIIDLSMDPPRNCAFVTYEKMESADQAVAELNGTQVESVQLKVNIARKQPMLDAATGKSVWGSLAVQNSPKGCHRDKRTQIVYSDDVYKENLVDGF

SEQ ID NO: 32390 - protein, 350 aa, Homo sapiens
MLVIPPGLSEEEEALQKKFNKLKKKKKALLALKKQSSSSTTSQGGVKRSLSEQPVMDTATATEQAKQLVKSGAISAIKAETKNSGFKRSRTLEGKLKDPEKGPVPTFQPFQRSISADDDLQESSRRPQRKSLYESFDWGYEERSGAHSSASPPRSRSRDRSHERNRDRDRDRERDRDRDRDRDRERDRDRDRDRDRDRERDRDRERDRDRDREGPFRRSDSFPERRAPRKGNTLYVYGEDMTPTLLRGAFSPFGNIIDLSMDPPRNCAFVTYEKMESADQAVAELNGTQVESVQLKVNIARKQPMLDAATGKSVWGSLAVQNSPKGCHRDKRTQIVYSDDVYKENLVDGF

SEQ ID NO: 32391 - protein, 412 aa, Homo sapiens [sequence omitted]

SEQ ID NO: 32392 - protein, 496 aa, Homo sapiens
MGRGVRVLLLLSLLHCAGGSEGRKTWRRRGQQPPPPPRTEAAPAAGQPVESFPLDFTAVEGNMDSFMAQVKSLAQSLYPCSAQQLNEDLRLHLLLNTSVTCNDGSPAGYYLKESRGSRRWLLFLEGGWYCFNRENCDSRYDTMRRLMSSRDWPRTRTGTGILSSQPEENPYWWNANMVFIPYCSSDVWSGASSKSEKNEYAFMGALIIQEVVRELLGRGLSGAKVLLLAGSSAGGTGVLLNVDRVAEQLEKLGYPAIQVRGLADSGWFLDNKQYRHTDCVDTITCAPTEAIRRGIRYWNGVVPERCRRQFQEGEEWNCFFGYKVYPTLRCPVFVVQWLFDEAQLTVDNVHLTGQPVQEGLRLYIQNLGRELRHTLKDVPASFAPACLSHEIIIRSHWTDVQVKGTSLPRALHCWDRSLHDSHKASKTPLKGCPVHLVDSCPWPHCNPSCPTVRDQFTGQEMNVAQFLMHMGFDMQTVAQPQGLEPSELLGMLSNGS

SEQ ID NO: 32393 - protein, 816 aa, Homo sapiens
MESRVLLRTFCLIFGLGAVWGLGVDPSLQIDVLTELELGESTTGVRQVPGLHNGTKAFLFQDTPRSIKASTATAEQFFQKLRNKHEFTILVTLKQTHLNSGVILSIHHLDHRYLELESSGHRNEVRLHYRSGSHRPHTEVFPYILADDKWHKLSLAISASHLILHIDCNKIYERVVEKPSTDLPLGTTFWLGQRNNAHGYFKGIMQDVQLLVMPQGFIAQCPDLNRTCPTCNDFHGLVQKIMELQDILAKTSAKLSRAEQRMNRLDQCYCERTCTMKGTTYREFESWIDGCKNCTCLNGTIQCETLICPNPDCPLKSALAYVDGKCCKECKSICQFQGRTYFEGERNTVYSSSGVCVLYECKDQTMKLVESSGCPALDCPESHQITLSHSCCKVCKGYDFCSERHNCMENSICRNLNDRAVCSCRDGFRALREDNAYCEDIDECAEGRHYCRENTMCVNTPGSFMCICKTGYIRIDDYSCTEHDECITNQHNCDENALCFNTVGGHNCVCKPGYTGNGTTCKAFCKDGCRNGGACIAANVCACPQGFTGPSCETDIDECSDGFVQCDSRANCINLPGWYHCECRDGYHDNGMFSPSGESCEDIDECGTGRHSCANDTICFNLDGGYDCRCPHGKNCTGDCIHDGKVKHNGQIWVLENDRCSVCSCQNGFVMCRRMVCDCENPTVDLFCCPECDPRLSSQCLHQNGETLYNSGDTWVQNCQQCRCLQGEVDCWPLPCPDVECEFSILPENECCPRCVTDPCQADTIRNDITKTCLDEMNVVRFTGSSWIKHGTECTLCQCKNGHICCSVDPQCLQEL

SEQ ID NO: 32394 - protein, 839 aa, Homo sapiens
MSIRRLLILILKIGRRWTELIRTMESRVLLRTFCLIFGLGAVWGLGVDPSLQIDVLTELELGESTTGVRQVPGLHNGTKAFLFQDTPRSIKASTATAEQFFQKLRNKHEFTILVTLKQTHLNSGVILSIHHLDHRYLELESSGHRNEVRLHYRSGSHRPHTEVFPYILADDKWHKLSLAISASHLILHIDCNKIYERVVEKPSTDLPLGTTFWLGQRNNAHGYFKGIMQDVQLLVMPQGFIAQCPDLNRTCPTCNDFHGLVQKIMELQDILAKTSAKLSRAEQRMNRLDQCYCERTCTMKGTTYREFESWIDGCKNCTCLNGTIQCETLICPNPDCPLKSALAYVDGKCCKECKSICQFQGRTYFEGERNTVYSSSGVCVLYECKDQTMKLVESSGCPALDCPESHQITLSHSCCKVCKGYDFCSERHNCMENSICRNLNDRAVCSCRDGFRALREDNAYCEDIDECAEGRHYCRENTMCVNTPGSFMCICKTGYIRIDDYSCTEHDECITNQHNCDENALCFNTVGGHNCVCKPGYTGNGTTCKAFCKDGCRNGGACIAANVCACPQGFTGPSCETDIDECSDGFVQCDSRANCINLPGWYHCECRDGYHDNGMFSPSGESCEDIDECGTGRHSCANDTICFNLDGGYDCRCPHGKNCTGDCIHDGKVKHNGQIWVLENDRCSVCSCQNGFVMCRRMVCDCENPTVDLFCCPECDPRLSSQCLHQNGETLYNSGDTWVQNCQQCRCLQGEVDCWPLPCPDVECEFSILPENECCPRCVTDPCQADTIRNDITKTCLDEMNVVRFTGSSWIKHGTECTLCQCKNGHICCSVDPQCLQEL

SEQ ID NO: 32395 - protein, 866 aa, Homo sapiens
MGFPPLLKGQASATRSSLASCSWVVFFLSCLSRHAPEIEGGRRWTELIRTMESRVLLRTFCLIFGLGAVWGLGVDPSLQIDVLTELELGESTTGVRQVPGLHNGTKAFLFQDTPRSIKASTATAEQFFQKLRNKHEFTILVTLKQTHLNSGVILSIHHLDHRYLELESSGHRNEVRLHYRSGSHRPHTEVFPYILADDKWHKLSLAISASHLILHIDCNKIYERVVEKPSTDLPLGTTFWLGQRNNAHGYFKGIMQDVQLLVMPQGFIAQCPDLNRTCPTCNDFHGLVQKIMELQDILAKTSAKLSRAEQRMNRLDQCYCERTCTMKGTTYREFESWIDGCKNCTCLNGTIQCETLICPNPDCPLKSALAYVDGKCCKECKSICQFQGRTYFEGERNTVYSSSGVCVLYECKDQTMKLVESSGCPALDCPESHQITLSHSCCKVCKGYDFCSERHNCMENSICRNLNDRAVCSCRDGFRALREDNAYCEDIDECAEGRHYCRENTMCVNTPGSFMCICKTGYIRIDDYSCTEHDECITNQHNCDENALCFNTVGGHNCVCKPGYTGNGTTCKAFCKDGCRNGGACIAANVCACPQGFTGPSCETDIDECSDGFVQCDSRANCINLPGWYHCECRDGYHDNGMFSPSGESCEDIDECGTGRHSCANDTICFNLDGGYDCRCPHGKNCTGDCIHDGKVKHNGQIWVLENDRCSVCSCQNGFVMCRRMVCDCENPTVDLFCCPECDPRLSSQCLHQNGETLYNSGDTWVQNCQQCRCLQGEVDCWPLPCPDVECEFSILPENECCPRCVTDPCQADTIRNDITKTCLDEMNVVRFTGSSWIKHGTECTLCQCKNGHICCSVDPQCLQEL

SEQ ID NO: 32396 - protein, 815 aa, Homo sapiens
METGLGAPLFKAWLLISVWGLGVDPSLQIDVLTELELGESTTGVRQVPGLHNGTKAFLFQDTPRSIKASTATAEQFFQKLRNKHEFTILVTLKQTHLNSGVILSIHHLDHRYLELESSGHRNEVRLHYRSGSHRPHTEVFPYILADDKWHKLSLAISASHLILHIDCNKIYERVVEKPSTDLPLGTTFWLGQRNNAHGYFKGIMQDVQLLVMPQGFIAQCPDLNRTCPTCNDFHGLVQKIMELQDILAKTSAKLSRAEQRMNRLDQCYCERTCTMKGTTYREFESWIDGCKNCTCLNGTIQCETLICPNPDCPLKSALAYVDGKCCKECKSICQFQGRTYFEGERNTVYSSSGVCVLYECKDQTMKLVESSGCPALDCPESHQITLSHSCCKVCKGYDFCSERHNCMENSICRNLNDRAVCSCRDGFRALREDNAYCEDIDECAEGRHYCRENTMCVNTPGSFMCICKTGYIRIDDYSCTEHDECITNQHNCDENALCFNTVGGHNCVCKPGYTGNGTTCKAFCKDGCRNGGACIAANVCACPQGFTGPSCETDIDECSDGFVQCDSRANCINLPGWYHCECRDGYHDNGMFSPSGESCEDIDECGTGRHSCANDTICFNLDGGYDCRCPHGKNCTGDCIHDGKVKHNGQIWVLENDRCSVCSCQNGFVMCRRMVCDCENPTVDLFCCPECDPRLSSQCLHQNGETLYNSGDTWVQNCQQCRCLQGEVDCWPLPCPDVECEFSILPENECCPRCVTDPCQADTIRNDITKTCLDEMNVVRFTGSSWIKHGTECTLCQCKNGHICCSVDPQCLQEL

SEQ ID NO: 32397 - protein, 355 aa, Homo sapiens
MALRLLKLAATSASARVVAAGAQRVRGIHSSVQCKLRYGMWHFLLGDKASKRLTERSRVITVDGNICTGKGKLAKEIAEKLGFKHFPEAGIHYPDSTTGDGKPLATDYNGNCSLEKFYDDPRSNDGNSYRLQSWLYSSRLLQYSDALEHLLTTGQGVVLERSIFSDFVFLEAMYNQGFIRKQCVDHYNEVKSVTICDYLPPHLVIYIDVPVPEVQRRIQKKGDPHEMKITSAYLQDIENAYKKTFLPEMSEKCEVLQYSAREAQDSKKVVEDIEYLKFDKGPWLKQDNRTLYHLRLLVQDKFEVLNYTSIPIFLPEVTIGAHQTDRVLHQFRELPGRKYSPGYNTEVGDKWIWLK

SEQ ID NO: 32398 - protein, 429 aa, Homo sapiens
MALRLLKLAATSASARVVAAGAQRVRGIHSSVQCKLRYGMWHFLLGDKASKRLTERSRVITVDGNICTGKGKLAKEIAEKLGFKHFPEAGIHYPDSTTGDGKPLATDYNGNCSLEKFYDDPRSNDGNSYRLQSWLYSSRLLQYSDALEHLLTTGQGVVLERSIFSDFVFLEAMYNQGFIRKQCESALQTHFWTGVAGASGKLESGSSEEVLLINERGGRSKPGVDHYNEVKSVTICDYLPPHLVIYIDVPVPEPHEMKITSAYLQDIENAYKKTFLPEMSEKCEVLQYSAREAQDSKKVVEDIEYLKFDKGPWLKQDNRTLYHLRLLVQDKFEVLNYTSIPIFLPEVTIGAHQTDRVLHQFRERLDWTVCFGEESTEVKHQGHLLSVQPGTVALTVGSWLRSCLLGLHWKLLFLFPESPMHTTAFMFLC

SEQ ID NO: 32399 - protein, 691 aa, Homo sapiens
MALLLTLTSPDLEGTWDTRDKDGFKAQEGPPLAVPEFPVCGLYRIYGVCGSFSSFFIIRCSLCALETLKSPQHDPLEIPEQSLKLIPLVSGKRELTRGQKAGEKPLAAGPGEEELLRGSAPHAQDTQSEELPPSCTISGEKKPPAVSGEATGADAGRLCPPPRSRAPHKDRTLARSRPQTQGEDCSLPVGEVKIGKRSYSPAPGKQKKPNAMGLAPTSSPGAPNSARATHNPVPCGSGRGPCHLANLLSTLAQSNQNRDHKQGPPEVTCQIRKKTRTLYRSDQLEELEKIFQEDHYPDSDKRREIAQTVGVTPQRIMVKGAGSLVAGWSGGGPTIETLELQSERSAVAWVWFQNRRAKWRKMEKLNGKESKDNPAAPGPASSQCSSAAEILPAVPMEPKPDPFPQESPLDTFPEPPMLLTSDQTLAPTQPSEGAQRVVTPPLFSPPPVRRADLPFPLGPVHTPQLMPLLMDVAGSDSSHKDGPCGSWGTSITLPPPCSYLEELEPQDYQQSNQPGPFQFSQAPQPPLFQSPQPKLPYLPTFPFSMPSSLTLPPPEDSLFMFPCGPSGGTSQGYCPGASSGQILMQPPAGNIGTASWSDPCLPELPFPGPFCPQALGHPPGGDGYFPDLFPTPCPQALGRQPSSALSWMPEGARPGTGPLLSKAKEEPPAASLDQPSALEEARGDDKNSHVP

SEQ ID NO: 32400 - protein, 659 aa, Homo sapiens
MALLLTLTSPDLEGTWDTRDKDGFKAQEGPPLAVPEFPVCGLYRIYGVCGSFSSFFIIRCSLCALETLKSPQHDPLEIPEQSLKLIPLVSGKRELTRGQKAGEKPLAAGPGEEELLRGSAPHAQDTQSEELPPSCTISGEKKPPAVSGEATGADAGRLCPPPRSRAPHKDRTLARSRPQTQGEDCSLPVGEVKIGKRSYSPAPGKQKKPNAMGLAPTSSPGAPNSARATHNPVPCGSGRGPCHLANLLSTLAQSNQNRDHKQGPPEVTCQIRKKTRTLYRSDQLEELEKIFQEDHYPDSDKRREIAQTVGVTPQRIMVWFQNRRAKWRKMEKLNGKESKDNPAAPGPASSQCSSAAEILPAVPMEPKPDPFPQESPLDTFPEPPMLLTSDQTLAPTQPSEGAQRVVTPPLFSPPPVRRADLPFPLGPVHTPQLMPLLMDVAGSDSSHKDGPCGSWGTSITLPPPCSYLEELEPQDYQQSNQPGPFQFSQAPQPPLFQSPQPKLPYLPTFPFSMPSSLTLPPPEDSLFMFPCGPSGGTSQGYCPGASSGQILMQPPAGNIGTASWSDPCLPELPFPGPFCPQALGHPPGGDGYFPDLFPTPCPQALGRQPSSALSWMPEGARPGTGPLLSKAKEEPPAASLDQPSALEEARGDDKNSHVP

SEQ ID NO: 32401 - protein, 285 aa, Homo sapiens
MAAASEPVDSGALWGLERPEPPPTRFHRVHGANIRVDPSGTRATRVESFAHGVCFSREPLAPGQVFLVEIEEKELGWCGHLRLGLTALDPASLAPVPEFSLPDLVNLGHTWVFAITRHHNRVPREGRPEAEAAAPSRPPTLLVEPYLRIEQFRIPRDRLVGRSRPGLYSHLLDQLYELNVLPPTARRSRLGVLFCPRPDGTADMHIIINGEDMGPSARGLPAAQPLYAVVDVFASTKSVRLVQLEYGLPSLQTLCRLVIQRSMVHRLAIDGLHLPKELKDFCKYE

SEQ ID NO: 32402 - protein, 262 aa, Homo sapiens
MGAQLCFEANAKAPREALRFHAEAKGAQVRLDTRGCIAHRRTTFHDGIVFSQRPVRLGERVALRVLREESGWCGGLRVGFTRLDPACVSVPSLPPFLCPDLEEQSPTWAAVLPEGCALTGDLVRFWVDRRGCLFAKVNAGCRLLLREGVPVGAPLWAVMDVYGTTKAIELLDPTASRLPTPMPWDLSNKAVPEPKATPGEECAICFYHAANTRLVPCGHTYFCRYCAWRVFSDTAKCPVCRWQIEAVAPAQGPPALRVEEGS

SEQ ID NO: 32403 - protein, 507 aa, Homo sapiens
MMAAAPIQQNGTHTGVPIDLDPPDSRKRPLEAPPEAGSTKRTNTGEDGQYFLKVLIPSYAAGSIIGKGGQTIVQLQKETGATIKLSKSKDFYPGTTERVCLIQGTVEALNAVHGFIAEKIREMPQNVAKTEPVSILQPQTTVNPDRIKQTLPSSPTTTKSSPSDPMTTSRANQVKIIVPNSTAGLIIGKGGATVKAVMEQSGAWVQLSQKPDGINLQERVVTVSGEPEQNRKAVELIIQKIQEDPQSGSCLNISYANVTGPVANSNPTGSPYANTAEVLPTAAAAAGLLGHANLAGVAAFPAVLSGFTGNDLVAITSALNTLASYGYNLNTLGLGLSQAAATGALAAAAASANPAAAAANLLATYASEASASGSTAGGTAGTFALGSLAAATAATNGYFGAASPLAASAILGTEKSTDGSKDVVEIAVPENLVGAILGKGGKTLVEYQELTGARIQISKKGEFVPGTRNRKVTITGTPAATQAAQYLITQRITYEQGVRAANPQKVG

SEQ ID NO: 32404 - protein, 181 aa, Homo sapiens
MMAAAPIQQNGTHTGVPIDLDPPDSRKRPLEAPPEAGSTKRTNTGEDGQYFLKVLIPSYAAGSIIGKGGQTIVQLQKETGATIKLSKSKDFYPGTTERVCLIQGTVEALNAVHGFIAEKIREMPQNVAKTEPVSILQPQTTVNPDRIKQTLPSSPTTTKSSPSDPMTTSRANQKHNISWIS

SEQ ID NO: 32405 - protein, 483 aa, Homo sapiens
MMAAAPIQQNGTHTGVPIDLDPPDSRKRPLEAPPEAGSTKRTNTGEDGQYFLKVLIPSYAAGSIIGKGGQTIVQLQKETGATIKLSKSKDFYPGTTERVCLIQGTVEALNAVHGFIAEKIREMPQNVAKTEPVSILQPQTTVNPDRIKQVKIIVPNSTAGLIIGKGGATVKAVMEQSGAWVQLSQKPDGINLQERVVTVSGEPEQNRKAVELIIQKIQEDPQSGSCLNISYANVTGPVANSNPTGSPYANTAEVLPTAAAAAGLLGHANLAGVAAFPAVLSGFTGNDLVAITSALNTLASYGYNLNTLGLGLSQAAATGALAAAAASANPAAAAANLLATYASEASASGSTAGGTAGTFALGSLAAATAATNGYFGAASPLAASAILGTEKSTDGSKDVVEIAVPENLVGAILGKGGKTLVEYQELTGARIQISKKGEFVPGTRNRKVTITGTPAATQAAQYLITQRITYEQGVRAANPQKVG

SEQ ID NO: 32406 - protein, 141 aa, Homo sapiens
MAPKVFRQYWDIPDGTDCHRKAYSTTSIASVAGLTAAAYRVTLNPPGTFLEGVAKVGQYTFTAAAVGAVFGLTTCISAHVREKPDDPLNYFLGGCAGGLTLGARTHNYGIGAAACVYFGIAASLVKMGRLEGWEVFAKPKV

SEQ ID NO: 32407 - protein, 228 aa, Homo sapiens
MAPKVFRQYWDIPDGTDCHRKAYSTTSIASVAGLTAAAYRVTLNPPGTFLEGVAKVGQYTFTAAAVGAVFGLTTCISAHVREKPDDPLNYFLGGCAGGLTLGARKTGSHCVVQAGLKLLASSSPHTSASQSAGIIGMSHCVQRFWVPSSSACLEVLSGESTDVHACSSTRGACNSSGSRPLPELGARASGSLRKGGHTHPAPRGAGALTPVQALIESLLNTLGSNPRT

SEQ ID NO: 32408 - protein, 1562 aa, Homo sapiens
MAAGSGGSGGSGGGPGPGPGGGGGPSGSGSGPGSNGGLGSGGELHPRTGRLVSLSACGRTARRQQPGQEFNHGLVLSREPLRDGRVFTVRIDRKVNSWSGSIEIGVTALDPSVLDFPSSATGLKGGSWVVSGCSVLRDGRSVLEEYGQDLDQLGEGDRVGVERTVAGELRLWVNGRDCGVAATGLPPRVWAVVDLYGKCTQITVLPPEPGFSPPTPIPTPPLEPLAPTEDSALAEQGTSADEAFMVSPAQARPETFPNSLESHNDFANMELSEVVSNTILSAYNGGLLNVNLSSPPAGEGLGSSGAATSPILTSNDALLFHEKCGTLIKLSNNNKTAERRRPLDEFNNGVVMTNRPLRDNEMFEIRIDKLVDKWSGSIEIGVTTHNPNSLEYPATMTNLQSGTIMMSGCGILTNGKGTRREYCEFSLDELQEGDHIGLTRKSNSALHFFINGIDQGVATPLTPPVVYGVVDLYGMAVKVTIVHNNNHSDRLRRNNAILRALSPEGALRRAAPAAQAEPERLLFHPNCGQKAAITHEGRTALRPHATDDFNHGVVLSSRALRDGEVFQVRIDKMVDKWAGSIEIGVTTHNPAYLQLPSTMTNLRSGTWMMTGNGVMHNGTTILDEYGHNLDRLKAGDTVGVVRREDGTLHFFVNGMTQGPAAWNVPPGVYAVVDLYGQAAQATIVDDVEVAPVPEPLPEGNNQVSPSSPSSGAGGSDLRFHQLHGSNAVITNGGRTALRHNCRSEFNDAIVISNRALRDGELFEIVIQKMVDRWSGSIEAGVTAIRPEDLEFPNTMTDIDYDTWMLSGTAIMQDGNTMRNNYGCDLDALGTGARIGMMRTAKGDLHYFINGQDQGAACSGLPPGKEVYAVVDLYGQCVQVSITNATGPMDNSLATSNTATEKSFPLHSPVAGVAHRFHSTCGKNVTLEEDGTRAVRAAGYAHGLVFSTKELRAEEVFEVKVEELDEKWAGSLRLGLTTLAPGEMGPGAGGGGPGLPPSLPELRTKTTWMVSSCEVRRDGQLQRMNYGRNLERLGVGSRVGVRRGADDTMHILVDGEDMGPAATGIAKNVWAVLDLYGPVRGVSIVSSTRLEESEGTQPPSPSSDTGSEGEEDDEGEEHGLGGQNEVGIIPTTLEFLENHGKNILLSNGNRTATRVASYNQGIVVINQPLVPQLLVQVRIDFLNRQWTSSLVLGVITCAPERLNFPASACALKRAAWLLRGRGVFHNGLKICEKFGPNLDTCPEGTILGLRLDSSGGLHLHVNGVDQGVAVPDVPQPCHALVDLYGQCEQVTIVNPEPGAASGKSAGTQGDMEKADMVDGIKESVCWGPPPAASPLKSCEYHALCSRFQELLLLPEDYFMPPPKRSLCYCESCRKLRGDEAHRRRGEPPREYALPFGWCRFNLRVNPRLEAGTLTKKWHMAYHGSNVAAVRRVLDRGELGAGTASILSCRPLKGEPGVGFEEPGENCAPPREEQPPPVLLSPSLQYAGAETLASKVQFRDPKSQRTHQAQVAFQVCVRPGSYTPGPPSAALGEPPDPHFSPAELEWVTKEKGATLLCALLVRVE

SEQ ID NO: 32409 - protein, 1560 aa, Homo sapiens
MAAGSGGSGGSGGGPGPGPGGGGGPSGSGSGPGSNGGLGSGGELHPRTGRLVSLSACGRTARRQQPGQEFNHGLVLSREPLRDGRVFTVRIDRKVNSWSGSIEIGVTALDPSVLDFPSSATGLKGGSWVVSGCSVLRDGRSVLEEYGQDLDQLGEGDRVGVERTVAGELRLWVNGRDCGVAATGLPPRVWAVVDLYGKCTQITVLPPEPGFSPPTPIPTPPLEPLAPTEDSALAEQGTSADEAFMVSPAQARPETFPNSLESHNDFANMELSEVVSNTILSAYNGGLLNVNLSSPPAGEGLGSSGAATSPILTSNDALLFHEKCGTLIKLSNNNKTAERRRPLDEFNNGVVMTNRPLRDNEMFEIRIDKLVDKWSGSIEIGVTTHNPNSLEYPATMTNLQSGTIMMSGCGILTNGKGTRREYCEFSLDELQEGDHIGLTRKSNSALHFFINGIDQGVATPLTPPVVYGVVDLYGMAVKVTIVHNNNHSDRLRRNNAILRALSPEGALRRAAPAAQAEPERLLFHPNCGQKAAITHEGRTALRPHATDDFNHGVVLSSRALRDGEVFQVRIDKMVDKWAGSIEIGVTTHNPAYLQLPSTMTNLRSGTWMMTGNGVMHNGTTILDEYGHNLDRLKAGDTVGVVRREDGTLHFFVNGMTQGPAAWNVPPGVYAVVDLYGQAAQATIVDDVEVAPVPEPLPEGNNQVSPSSPSSGAGGSDLRFHQLHGSNAVITNGGRTALRHNCRSEFNDAIVISNRALRDGELFEIVIQKMVDRWSGSIEAGVTAIRPEDLEFPNTMTDIDYDTWMLSGTAIMQDGNTMRNNYGCDLDALGTGARIGMMRTAKGDLHYFINGQDQGAACSGLPPEVYAVVDLYGQCVQVSITNATGPMDNSLATSNTATEKSFPLHSPVAGVAHRFHSTCGKNVTLEEDGTRAVRAAGYAHGLVFSTKELRAEEVFEVKVEELDEKWAGSLRLGLTTLAPGEMGPGAGGGGPGLPPSLPELRTKTTWMVSSCEVRRDGQLQRMNYGRNLERLGVGSRVGVRRGADDTMHILVDGEDMGPAATGIAKNVWAVLDLYGPVRGVSIVSSTRLEESEGTQPPSPSSDTGSEGEEDDEGEEHGLGGQNEVGIIPTTLEFLENHGKNILLSNGNRTATRVASYNQGIVVINQPLVPQLLVQVRIDFLNRQWTSSLVLGVITCAPERLNFPASACALKRAAWLLRGRGVFHNGLKICEKFGPNLDTCPEGTILGLRLDSSGGLHLHVNGVDQGVAVPDVPQPCHALVDLYGQCEQVTIVNPEPGAASGKSAGTQGDMEKADMVDGIKESVCWGPPPAASPLKSCEYHALCSRFQELLLLPEDYFMPPPKRSLCYCESCRKLRGDEAHRRRGEPPREYALPFGWCRFNLRVNPRLEAGTLTKKWHMAYHGSNVAAVRRVLDRGELGAGTASILSCRPLKGEPGVGFEEPGENCAPPREEQPPPVLLSPSLQYAGAETLASKVQFRDPKSQRTHQAQVAFQVCVRPGSYTPGPPSAALGEPPDPHFSPAELEWVTKEKGATLLCALLVRVE

SEQ ID NO: 32410 - protein, 749 aa, Homo sapiens [sequence omitted]

SEQ ID NO: 32411 - protein, 492 aa, Homo sapiens
MEPEAPDSRKRPLETPPEVVCTKRSNTGEEGEYFLKVLIPSYAAGSIIGKGGQTIVQLQKETGATIKLSKSKDFYPGTTERVCLVQGTAEALNAVHSFIAEKVREIPQAMTKPEVVNILQPQTTMNPDRAKQAKLIVPNSTAGLIIGKGGATVKAVMEQSGAWVQLSQKPEGINLQERVVTVSGEPEQVHKAVSAIVQKVQEDPQSSSCLNISYANVAGPVANSNPTGSPYASPADVLPAAAAASAAAASGLLGPAGLAGVGAFPAALPAFSGTDLLAISTALNTLASYGYNTNSLGLGLNSAAASGVLAAVAAGANPAAAAAANLLASYAGEAGAGPAGGAAPPPPPPPGALGSFALAAAANGYLGAGAGGGAGGGGGPLVAAAAAAGAAGGFLTAEKLAAESAKELVEIAVPENLVGAILGKGGKTLVEYQELTGARIQISKKGEFLPGTRNRRVTITGSPAATQAAQYLISQRVTYEQGVRASNPQKVG

SEQ ID NO: 32412 - protein, 681 aa, Homo sapiens
MSNLKMKEAALIYLDRSGGLQKFIDDCKYYNDSKQSYAVYRFKILINPSDVVELDAELGNHILHQPLKAAEVFQSVCFIAVKTLSLIGQLQTETQINIVLKLTHLPPLPSYGLDLCEFPLDYTSQRFYMMQGIVIAMTTITKYTQGARFLCSDEACPLSKGFQYIRVHVPGATESATIRNDFLCNLCASSLQEDRKFRVLGDKQIVEIIATKALRAFQGYSNNQPFRFQSLTIFLRDESVNKMNIGNEYKIIGIPTCVKTSQTAVCIEANSITFCNSKVPSGISDNFRCLLSLTSSSCWKFTAILANIFASQITPPGTYNLLKLCLLMSLVQTTDRNKELEDCLDILIITSDTLLIDRLLNFSINLVPRGIRHLVSTEIFPTLSRNKYGTGAVSIQAGSALLAKGGICFIGDLASHKKDKLEQLQTVLESRSITVYIPGKKFGEDIDQQMTFPVQCSFWSFVDVDSSSRRNAQKINTLIGQMDCSLIPANLVEAFGLLINCNESSPCHPFLPTVQHTLNKAINPEGLFYAASRQFTTEDFEKLLAFAKNLNVEFSLEAERMTHGYYLASRRIRTGSVCGSKLSASALKYLVFLSEAHARLNLRNKVLKEDVLIAALLFETSLTLKYGATVFCVAPNAVFPFELYNEEYLEQRDLYLTQCQQQLEQFIATYGPGTTIFSSDE

SEQ ID NO: 32413 - protein, 590 aa, Homo sapiens
MSNLKMKEAALIYLDRSGGLQKFIDDCKYYNDSKQSYAVYRFKILINPSDVVELDAELGNHILHQPLKAAEVFQSVCFIAVKTLSLIGQLQTETQINIVLKLTHLPPLPSYGLDLCEFPLDYTSQRFYMMQGIVIAMTTITKYTQGARFLCSDEACPLSKGFQYIRVHVPGATESATIRNDFLCNLCASSLQEDRKFRVLGDKQIVEIIATKALRAFQGYSNNQPFRFQSLTIFLRDESVNKMNIGNEYKIIGIPTCVKTSQTAVCIEANSITFCNSKVPSGISDNFRCLLSLTSSSCWKFTAILANIFASQITPPGTYNLLKLCLLMSLVQTTDRNKELEDCLDILIITSDTLLIDRLLNFSINLVPRGIRHLVSTEIFPTLSRNKYGTGAVSIQAGSALLAKGGICFIGDLASHKKDKLEQLQTVLESRSITVYIPGKKFGEDIDQQMTFPVQCSFWSFVDVDSSSRRNAQKINTLIGQMDCSLIPANLVEAFGLLINCNESSPCHPFLPTVQHTLNKAINPEGLFYAASRQFTTEDFEKLLAFAKNLNVEFSLEAERMTHGYYLASRRIRTGSVCGSKLSASALKYL

SEQ ID NO: 32414 - protein, 439 aa, Homo sapiens
MNIGNEYKIIGIPTCVKTSQTAVCIEANSITFCNSKVPSGISDNFRCLLSLTSSSCWKFTAILANIFASQITPPGTYNLLKLCLLMSLVQTTDRNKELEDCLDILIITSDTLLIDRLLNFSINLVPRGIRHLVSTEIFPTLSRNKYGTGAVSIQAGSALLAKGGICFIGDLASHKKDKLEQLQTVLESRSITVYIPGKKFGEDIDQQMTFPVQCSFWSFVDVDSSSRRNAQKINTLIGQMDCSLIPANLVEAFGLLINCNESSPCHPFLPTVQHTLNKAINPEGLFYAASRQFTTEDFEKLLAFAKNLNVEFSLEAERMTHGYYLASRRIRTGSVCGSKLSASALKYLVFLSEAHARLNLRNKVLKEDVLIAALLFETSLTLKYGATVFCVAPNAVFPFELYNEEYLEQRDLYLTQCQQQLEQFIATYGPGTTIFSSDE

SEQ ID NO: 32415 - protein, 618 aa, Homo sapiens
MIASTTMVRSAKVCFIAVKTLSLIGQLQTETQINIVLKLTHLPPLPSYGLDLCEFPLDYTSQRFYMMQGIVIAMTTITKYTQGARFLCSDEACPLSKGFQYIRVHVPGATESATIRNDFLCNLCASSLQEDRKFRVLGDKQIVEIIATKALRAFQGYSNNQPFRFQSLTIFLRDESVNKMNIGNEYKIIGIPTCVKTSQTAVCIEANSITFCNSKVPSGISDNFRCLLSLTSSSCWKFTAILANIFASQITPPGTYNLLKLCLLMSLVQTTDRNKELEDCLDILIITSDTLLIDRLLNFSINLVPRGIRHLVSTEIFPTLSRNKYGTGAVSIQAGSALLAKGGICFIGDLASHKKDKLEQLQTVLESRSITVYIPGKKFGEDIDQQMTFPVQCSFWSFVDVDSSSRRNAQKINTLIGQMDCSLIPANLVEAFGLLINCNESSPCHPFLPTVQHTLNKAINPEGLFYAASRQFTTEDFEKLLAFAKNLNVEFSLEAERMTHGYYLASRRIRTGSVCGSKLSASALKYLVFLSEAHARLNLRNKVLKEDVLIAALLFETSLTLKYGATVFCVAPNAVFPFELYNEEYLEQRDLYLTQCQQQLEQFIATYGPGTTIFSSDE

SEQ ID NO: 32416 - protein, 268 aa, Homo sapiens
MAVNVYSTSVTSDNLSRHDMLAWINESLQLNLTKIEQLCSGAAYCQFMDMLFPGSIALKKVKFQAKLEHEYIQNFKILQAGFKRMGVDKIIPVDKLVKGKFQDNFEFVQWFKKFFDANYDGKDYDPVAARQGQETAVAPSLVAPALNKPKKPLTSSSAAPQRPISTQRTAAAPKAGPGVVRKNPGVGNGDDEAAELMQQVNVLKLTVEDLEKERDFYFGKLRNIELICQENEGENDPVLQRIVDILYATDEGFVIPDEGGPQEEQEEY

SEQ ID NO: 32417 - protein, 626 aa, Homo sapiens
MDEQEALNSIMNDLVALQMNRRHRMPGYETMKNKDTGHSNRQSDVRIKFEHNGERRIIAFSRPVKYEDVEHKVTTVFGQPLDLHYMNNELSILLKNQDDLDKAIDILDRSSSMKSLRILLLSQDRNHNSSSPHSGVSRQVRIKASQSAGDINTIYQPPEPRSRHLSVSSQNPGRSSPPPGYVPERQQHIARQGSYTSINSEGEFIPETSEQCMLDPLSSAENSLSGSCQSLDRSADSPSFRKSRMSRAQSFPDNRQEYSDRETQLYDKGVKGGTYPRRYHVSVHHKDYSDGRRTFPRIRRHQGNLFTLVPSSRSLSTNGENMGLAVQYLDPRGRLRSADSENALSVQERNVPTKSPSAPINWRRGKLLGQGAFGRVYLCYDVDTGRELASKQVQFDPDSPETSKEVSALECEIQLLKNLQHERIVQYYGCLRDRAEKTLTIFMEYMPGGSVKDQLKAYGALTESVTRKYTRQILEGMSYLHSNMIVHRDIKGANILRDSAGNVKLGDFGASKRLQTICMSGTGMRSVTGTPYWMSPEVISGEGYGRKADVWSLGCTVVEMLTEKPPWAEYEAMAAIFKIATQPTNPQLPSHISEHGRDFLRRIFVEARQRPSAEELLTHHFAQLMY

SEQ ID NO: 32418 - protein, 657 aa, Homo sapiens
MDEQEALNSIMNDLVALQMNRRHRMPGYETMKNKDTGHSNRQKKHNSSSSALLNSPTVTTSSCAGASEKKKFLSDVRIKFEHNGERRIIAFSRPVKYEDVEHKVTTVFGQPLDLHYMNNELSILLKNQDDLDKAIDILDRSSSMKSLRILLLSQDRNHNSSSPHSGVSRQVRIKASQSAGDINTIYQPPEPRSRHLSVSSQNPGRSSPPPGYVPERQQHIARQGSYTSINSEGEFIPETSEQCMLDPLSSAENSLSGSCQSLDRSADSPSFRKSRMSRAQSFPDNRQEYSDRETQLYDKGVKGGTYPRRYHVSVHHKDYSDGRRTFPRIRRHQGNLFTLVPSSRSLSTNGENMGLAVQYLDPRGRLRSADSENALSVQERNVPTKSPSAPINWRRGKLLGQGAFGRVYLCYDVDTGRELASKQVQFDPDSPETSKEVSALECEIQLLKNLQHERIVQYYGCLRDRAEKTLTIFMEYMPGGSVKDQLKAYGALTESVTRKYTRQILEGMSYLHSNMIVHRDIKGANILRDSAGNVKLGDFGASKRLQTICMSGTGMRSVTGTPYWMSPEVISGEGYGRKADVWSLGCTVVEMLTEKPPWAEYEAMAAIFKIATQPTNPQLPSHISEHGRDFLRRIFVEARQRPSAEELLTHHFAQLMY

SEQ ID NO: 32419 - protein, 118 aa, Homo sapiens
MAWSSLLLTLLAHCTGSWAQSVLTQPPSVSGAPGQRVTISCTGSSSNIGAGYVVHWYQQLPGTAPKLLIYGNSNRPSGVPDQFSGSKSGTSASLAITGLQSEDEADYYCKAWDNSLNA

SEQ ID NO: 32420 - protein, 327 aa, Homo sapiens
MPGPTQTLSPNGENNNDIIQDNNGTIIPFRKHTVRGERSYSWGMAVNVYSTSITQETMSRHDIIAWVNDIVSLNYTKVEQLCSGAAYCQFMDMLFPGCISLKKVKFQAKLEHEYIHNFKLLQASFKRMNVDKVIPVEKLVKGRFQDNLDFIQWFKKFYDANYDGKEYDPVEARQGQDAIPPPDPGEQIFNLPKKSHHANSPTAGAAKSSPAAKPGSTPSRPSSAKRASSSGSASKSDKDLETQVIQLNEQVHSLKLALEGVEKERDFYFGKLREIELLCQEHGQENDDLVQRLMDILYASEEHEGHTEEPEAEEQAHEQQPPQQEEY

SEQ ID NO: 32421 - protein, 259 aa, Homo sapiens
MPGPTQTLSPNGENNNDIIQDNNGTIIPFRKHTVRGERSYSWGMAVNVYSTSITQETMSRHDIIAWVNDIVSLNYTKVEQLCSGAAYCQFMDMLFPGCISLKKVKFQAKLEHEYIHNFKLLQASFKRMNVDKVIPVEKLVKGRFQDNLDFIQWFKKFYDANYDGKEYDPVEARQGQDAIPPPDPGEQIFNLPKKSHHANSPTAGAAKSSPAAKPGSTPSRPSSAKRASSSGSASKSDKDLETQVIQLNEQVMHQLWPRL

SEQ ID NO: 32422 - protein, 315 aa, Homo sapiens
MKQNRDQKCPVSQRNSSFQQPGRKPGCSSWGMAVNVYSTSITQETMSRHDIIAWVNDIVSLNYTKVEQLCSGAAYCQFMDMLFPGCISLKKVKFQAKLEHEYIHNFKLLQASFKRMNVDKVIPVEKLVKGRFQDNLDFIQWFKKFYDANYDGKEYDPVEARQGQDAIPPPDPGEQIFNLPKKSHHANSPTAGAAKSSPAAKPGSTPSRPSSAKRASSSGSASKSDKDLETQVIQLNEQVHSLKLALEGVEKERDFYFGKLREIELLCQEHGQENDDLVQRLMDILYASEEHEGHTEEPEAEEQAHEQQPPQQEEY

SEQ ID NO: 32423 - protein, 284 aa, Homo sapiens
MAVNVYSTSITQETMSRHDIIAWVNDIVSLNYTKVEQLCSGAAYCQFMDMLFPGCISLKKVKFQAKLEHEYIHNFKLLQASFKRMNVDKVIPVEKLVKGRFQDNLDFIQWFKKFYDANYDGKEYDPVEARQGQDAIPPPDPGEQIFNLPKKSHHANSPTAGAAKSSPAAKPGSTPSRPSSAKRASSSGSASKSDKDLETQVIQLNEQVHSLKLALEGVEKERDFYFGKLREIELLCQEHGQENDDLVQRLMDILYASEEHEGHTEEPEAEEQAHEQQPPQQEEY

SEQ ID NO: 32424 - protein, 274 aa, Homo sapiens
MARTTTTSSRIITGPSFLSGSTQCAGSVPTGAAYCQFMDMLFPGCISLKKVKFQAKLEHEYIHNFKLLQASFKRMNVDKVIPVEKLVKGRFQDNLDFIQWFKKFYDANYDGKEYDPVEARQGQDAIPPPDPGEQIFNLPKKSHHANSPTAGAAKSSPAAKPGSTPSRPSSAKRASSSGSASKSDKDLETQVIQLNEQVHSLKLALEGVEKERDFYFGKLREIELLCQEHGQENDDLVQRLMDILYASEEHEGHTEEPEAEEQAHEQQPPQQEEY

SEQ ID NO: 32425 - protein, 516 aa, Homo sapiens
MEREPGAAGVRRALGRRLEAVLASRSEANAVFDILAVLQSEDQEEIQEAVRTCSRLFGALLERGELFVGQLPSEEMVMTGSQGATRKYKVWMRHRYHSCCNRLGELLGHPSFQVKELALSALLKFVQLEGAHPLEKSKWEGNYLFPRELFKLVVGGLLSPEEDQSLLLSQFREYLDYDDTRYHTMQAAVDAVARVTGQHPEVPPAFWNNAFTLLSAVSLPRREPTVSSFYVKRAELWDTWKVAHLKEHRRVFQAMWLSFLKHKLPLSLYKKVLLIVHDAILPQLAQPTLMIDFLTRACDLGGALSLLALNGLFILIHKHNLEYPDFYRKLYGLLDPSVFHVKYRARFFHLADLFLSSSHLPAYLVAAFAKRLARLALTAPPEALLMVLPFICNLLRRHPACRVLVHRPHGPELDADPYDPGEEDPAQSRALESSLWELQALQRHYHPEVSKAASVINQALSMPEVSIAPLLELTAYEIFERDLKKKGPEPVPLEFIPAQGLLGRPGELCAQHFTLS

SEQ ID NO: 32426 - protein, 118 aa, Homo sapiens
MAWALLLLTLLTQGTGSWAQSALTQPPSVSGSPGQSVTISCTGTSSDVGSYNRVSWYQQPPGTAPKLMIYEVSNRPSGVPDRFSGSKSGNTASLTISGLQAEDEADYYCSLYTSSSTF

SEQ ID NO: 32427 - protein, 118 aa, Homo sapiens
MAWALLLLTLLTQGTGSWAQSALTQPPSASGSPGQSVTISCTGTSSDVGGYNYVSWYQQHPGKAPKLMIYEVSKRPSGVPDRFSGSKSGNTASLTVSGLQAEDEADYYCSSYAGSNNF

SEQ ID NO: 32428 - protein, 424 aa, Homo sapiens
MSDSKCDSQFYSVQVADSTFTVLKRYQQLKPIGSGAQGIVCAAFDTVLGINVAVKKLSRPFQNQTHAKRAYRELVLLKCVNHKNIISLLNVFTPQKTLEEFQDVYLVMELMDANLCQVIHMELDHERMSYLLYQMLCGIKHLHSAGIIHRDLKPSNIVVKSDCTLKILDFGLARTACTNFMMTPYVVTRYYRAPEVILGMGYKENVDIWSVGCIMGELVKGCVIFQGTDHIDQWNKVIEQLGTPSAEFMKKLQPTVRNYVENRPKYPGIKFEELFPDWIFPSESERDKIKTSQARDLLSKMLVIDPDKRISVDEALRHPYITVWYDPAEAEAPPPQIYDAQLEEREHAIEEWKELIYKEVMDWEERSKNGVVKDQPSDAAVSSNATPSQSSSINDISSMSTEQTLASDTDSSLDASTGPLEGCR

SEQ ID NO: 32429 - protein, 382 aa, Homo sapiens
MSDSKCDSQFYSVQVADSTFTVLKRYQQLKPIGSGAQGIVCAAFDTVLGINVAVKKLSRPFQNQTHAKRAYRELVLLKCVNHKNIISLLNVFTPQKTLEEFQDVYLVMELMDANLCQVIHMELDHERMSYLLYQMLCGIKHLHSAGIIHRDLKPSNIVVKSDCTLKILDFGLARTACTNFMMTPYVVTRYYRAPEVILGMGYKENVDIWSVGCIMGELVKGCVIFQGTDHIDQWNKVIEQLGTPSAEFMKKLQPTVRNYVENRPKYPGIKFEELFPDWIFPSESERDKIKTSQARDLLSKMLVIDPDKRISVDEALRHPYITVWYDPAEAEAPPPQIYDAQLEEREHAIEEWKELIYKEVMDWEERSKNGVVKDQPSAQMQQ

SEQ ID NO: 32430 - protein, 382 aa, Homo sapiens
MSDSKCDSQFYSVQVADSTFTVLKRYQQLKPIGSGAQGIVCAAFDTVLGINVAVKKLSRPFQNQTHAKRAYRELVLLKCVNHKNIISLLNVFTPQKTLEEFQDVYLVMELMDANLCQVIHMELDHERMSYLLYQMLCGIKHLHSAGIIHRDLKPSNIVVKSDCTLKILDFGLARTACTNFMMTPYVVTRYYRAPEVILGMGYKENVDIWSVGCIMAEMVLHKVLFPGRDYIDQWNKVIEQLGTPSAEFMKKLQPTVRNYVENRPKYPGIKFEELFPDWIFPSESERDKIKTSQARDLLSKMLVIDPDKRISVDEALRHPYITVWYDPAEAEAPPPQIYDAQLEEREHAIEEWKELIYKEVMDWEERSKNGVVKDQPSAQMQQ

SEQ ID NO: 32431 - protein, 424 aa, Homo sapiens
MSDSKCDSQFYSVQVADSTFTVLKRYQQLKPIGSGAQGIVCAAFDTVLGINVAVKKLSRPFQNQTHAKRAYRELVLLKCVNHKNIISLLNVFTPQKTLEEFQDVYLVMELMDANLCQVIHMELDHERMSYLLYQMLCGIKHLHSAGIIHRDLKPSNIVVKSDCTLKILDFGLARTACTNFMMTPYVVTRYYRAPEVILGMGYKENVDIWSVGCIMAEMVLHKVLFPGRDYIDQWNKVIEQLGTPSAEFMKKLQPTVRNYVENRPKYPGIKFEELFPDWIFPSESERDKIKTSQARDLLSKMLVIDPDKRISVDEALRHPYITVWYDPAEAEAPPPQIYDAQLEEREHAIEEWKELIYKEVMDWEERSKNGVVKDQPSDAAVSSNATPSQSSSINDISSMSTEQTLASDTDSSLDASTGPLEGCR

SEQ ID NO: 32432 - protein, 242 aa, Homo sapiens
MSDSKCDSQFYSVQVADSTFTVLKRYQQLKPIGSGAQGIVCAAFDTVLGINVAVKKLSRPFQNQTHAKRAYRELVLLKCVNHKNIISLLNVFTPQKTLEEFQDVYLVMELMDANLCQVIHMELDHERMSYLLYQMLCGIKHLHSAGIIHRDLKPSNIVVKSDCTLKILDFGLARTACTNFMMTPYVVTRYYRAPEVILGMGYKENVDIWSVGCIMGELVKGCVIFQGTDRILPRDLGPAMLS

SEQ ID NO: 32433 - protein, 364 aa, Homo sapiens
MSGPRAGFYRQELNKTVWEVPQRLQGLRPVGSGAYGSVCSAYDARLRQKVAVKKLSRPFQSLIHARRTYRELRLLKHLKHENVIGLLDVFTPATSIEDFSEVYLVTTLMGADLNNIVKCQALSDEHVQFLVYQLLRGLKYIHSAGIIHRDLKPSNVAVNEDCELRILDFGLARQADEEMTGYVATRWYRAPEIMLNWMHYNQTVDIWSVGCIMAELLQGKALFPGSDYIDQLKRIMEVVGTPSPEVLAKISSEHARTYIQSLPPMPQKDLSSIFRGANPLAIDLLGRMLVLDSDQRVSAAEALAHAYFSQYHDPEDEPEAEPYDESVEAKERTLEEWKELTYQEVLSFKPPEPPKPPGSLEIEQ

SEQ ID NO: 32434 - protein, 213 aa, Homo sapiens
MGADLNNIVKCQALSDEHVQFLVYQLLRGLKYIHSAGIIHRDLKPSNVAVNEDCELRILDFGLARQADEEMTGYVATRWYRAPEIMLNWMHYNQTGAGGRPWGDEGQGPRLALDWLCMPGLRGQARSPRMWDPHSKVALQRPLEHDGCWPPLAVQLWTSPCLGGLGMAEEGVCPSWGLDVTVGLLEEGRGVGTLMEVPSPSHSGYLVRGLHHG

SEQ ID NO: 32435 - protein, 530 aa, Homo sapiens
MLHLLALFLHCLPLASGDYDICKSWVTTDEGPTWEFYACQPKVMRLKDYVKVKVEPSGITCGDPPERFCSHENPYLCSNECDASNPDLAHPPRLMFDKEEEGLATYWQSITWSRYPSPLEANITLSWNKTVELTDDVVMTFEYGRPTVMVLEKSLDNGRTWQPYQFYAEDCMEAFGMSARRARDMSSSSAHRVLCTEEYSRWAGSKKEKHVRFEVRDRFAIFAGPDLRNMDNLYTRLESAKGLKEFFTLTDLRMRLLRPALGGTYVQRENLYKYFYAISNIEVIGRCKCNLHANLCSMREGSLQCECEHNTTGPDCGKCKKNFRTRSWRAGSYLPLPHGSPNACATAGSFGNCECYGHSNRCSYIDFLNVVTCVSCKHNTRGQHCQHCRLGYYRNGSAELDDENVCIECNCNQIGSVHDRCNETGFCECREGAAGPKCDDCLPTHYWRQGCYPNVCDDDQLLCQNGGTCLQNQRCACPRGYTGVRCEQPRCDPADDDGGLDCDRAPGAAPRPATLLGCLLLLGLAARLGR

SEQ ID NO: 32436 - protein, 422 aa, Homo sapiens
MLHLLALFLHCLPLASGDYDICKSWVTTDEGPTWEFYACQPKVMRLKDYVKVKVEPSGITCGDPPERFCSHENPYLCSNECDASNPDLAHPPRLMFDKEEEGLATYWQSITWSRYPSPLEANITLSWNKTVELTDDVVMTFEYGRPTVMVLEKSLDNGRTWQPYQFYAEDCMEAFGMSARRARDMSSSSAHRVLCTEEYSRWAGSKKEKHVRFEVRDRFAIFAGPDLRNMDNLYTRLESAKGLKEFFTLTDLRMRLLRPALGGTYVQRENLYKYFYAISNIEVIGRCKCNLHANLCSMREGSLQCECEHNTTGPDCGKCKKNFRTRSWRAGSYLPLPHGSPNACATAGSFGTLQTPPPGRSPSALRGSRRGLANVKEPAGSRPQISEMLLGCTVTLHQGSVGPHIPPKLSLPDPGGPWLGSQ

SEQ ID NO: 32437 - protein, 152 aa, Homo sapiens
MAVLSKEYGFVLLTGAASFIMVAHLAINVSKARKKYKVEYPIMYSTDPENGHIFNCIQRAHQNTLEVYPPFLFFLAVGGVYHPRIASGLGLAWIVGRVLYAYGYYTGEPSKRSRGALGSIALLGLVGTTVCSAFQHLGWVKSGLGSGPKCCH

SEQ ID NO: 32438 - protein, 651 aa, Homo sapiens
MPSSLGQPDGGGGGGGGGGGVGAAGEDPGPGPAPPPEGAQEAAPAPRPPPEPDDAAAALRLALDQLSALGLGGAGDTDEEGAAGDGAAAAGGADGGAAPEPVPPDGPEAGAPPTLAPAVAPGSLPLLDPNASPPPPPPPRPSPPDVFAGFAPHPAALGPPTLLADQMSVIGSRKKSVNMTECVPVPSSEHVAEIVGRQGCKIKALRAKTNTYIKTPVRGEEPVFIVTGRKEDVEMAKREILSAAEHFSIIRATRSKAGGLPGAAQGPPNLPGQTTIQVRVPYRVVGLVVGPKGATIKRIQQRTHTYIVTPGRDKEPVFAVTGMPENVDRAREEIEAHITLRTGAFTDAGPDSDFHANGTDVCLDLLGAAASLWAKTPNQGRRPPTATAGLRGDTALGAPSAPEAFYAGSRGGPSVPDPGPASPYSGSGNGGFAFGAEGPGAPVGTAAPDDCDFGFDFDFLALDLTVPAAATIWAPFERAAPLPAFSGCSTVNGAPGPPAAGARRSSGAGTPRHSPTLPEPGGLRLELPLSRRGAPDPVGALSWRPPQGPVSFPGGAAFSTATSLPSSPAAAACAPLDSGASENSRKPPSASSAPALARECVVCAEGEVMAALVPCGHNLFCMDCAVRICGKSEPECPACRTPATQAIHIFS

SEQ ID NO: 32439 - protein, 664 aa, Homo sapiens
MPSSLGQPDGGGGGGGGGGGVGAAGEDPGPGPAPPPEGAQEAAPAPRPPPEPDDAAAALRLALDQLSALGLGGAGDTDEEGAAGDGAAAAGGADGGAAPEPVPPDGPEAGAPPTLAPAVAPGSLPLLDPNASPPPPPPPRPSPPDVFAGFAPHPAALGPPTLLADQMSVIGSRKKSVNMTECVPVPSSEHVAEIVGRQGCKIKALRAKTNTYIKTPVRGEEPVFIVTGRKEDVEMAKREILSAAEHFSIIRATRSKAGGLPGAAQGPPNLPGQTTIQVRVPYRVVGLVVGPKGATIKRIQQRTHTYIVTPGRDKEPVFAVTGMPENVDRAREEIEAHITLRTGAFTDAGPDSDFHANGTDVCLDLLGAAASLWAKTPNQGRRPPTATAGLRGDTALGAPSAPEAFYAGSRGGPSVPDPGPASPYSGSGNGGFAFGAEGPGAPVGTAAPDDCDFGFDFDFLALDLTVPAAATIWAPFERAAPLPAFSGCSTVNGAPGPPAAGARRSSGAGTPRHSPTLPEPGGLRLELPLSRRGAPDPVGALSWRPPQGPVSFPGGAAFSTATSLPSSPAAAACAPLDSGASENSRKPPSASSAPALARECVVCAEGEVMAALVPCGHNLFCMDCAVRICGKSEPECPACRTPATQAIRVETPQPGGASALQRQY

SEQ ID NO: 32440 - protein, 666 aa, Homo sapiens
MPSSLGQPDGGGGGGGGGGGVGAAGEDPGPGPAPPPEGAQEAAPAPRPPPEPDDAAAALRLALDQLSALGLGGAGDTDEEGAAGDGAAAAGGADGGAAPEPVPPDGPEAGAPPTLAPAVAPGSLPLLDPNASPPPPPPPRPSPPDVFAGFAPHPAALGPPTLLADQMSVIGSRKKSVNMTECVPVPSSEHVAEIVGRQGCKIKALRAKTNTYIKTPVRGEEPVFIVTGRKEDVEMAKREILSAAEHFSIIRATRSKAGGLPGAAQGPPNLPGQTTIQVRVPYRVVGLVVGPKGATIKRIQQRTHTYIVTPGRDKEPVFAVTGMPENVDRAREEIEAHITLRTGAFTDAGPDSDFHANGTDVCLDLLGAAASLWAKTPNQGRRPPTATAGLRGDTALGAPSAPEAFYAGSRGGPSVPDPGPASPYSGSGNGGFAFGAEGPGAPVGTAAPDDCDFGFDFDFLALDLTVPAAATIWAPFERAAPLPAFSGCSTVNGAPGPPAAGARRSSGAGTPRHSPTLPEPGGLRLELPLSRRGAPDPVGALSWRPPQGPVSFPGGAAFSTATSLPSSPAAAACAPLDSGASENSRKPPSASSAPALARECVVCAEGEVMAALVPCGHNLFCMDCAVRICGKSEPECPACRTPATQAIRVETETPQPGGASALQRQY

SEQ ID NO: 32441 - protein, 362 aa, Homo sapiens
MKLHCCLFTLVASIIVPAAFVLEDVDFDQMVSLEANRSSYNASFPSSFELSASSHSDDDVIIAKEGTSVSIECLLTASHYEDVHWHNSKGQQLDGRSRGGKWLVSDNFLNITNVAFDDRGLYTCFVTSPIRASYSVTLRVIFTSGDMSVYYMIVCLIAFTITLILNVTRLCMMSSHLRKTEKAINEFFRTEGAEKLQKAFEIAKRIPIITSAKTLELAKVTQFKTMEFARYIEELARSVPLPPLILNCRAFVEEMFEAVRVDDPDDLGERIKERPALNAQGGIYVINPEMGRSNSPGGDSDDGSLNEQGQEIAVQVSVHLQSETKSIDTESQGSSHFSPPDDIGSAESNCNYKDGAYENCQL

SEQ ID NO: 32442 - protein, 216 aa, Homo sapiens
MSVYYMIVCLIAFTITLILNVTRLCMMSSHLRKTEKAINEFFRTEGAEKLQKAFEIAKRIPIITSAKTLELAKVTQFKTMEFARYIEELARSVPLPPLILNCRAFVEEMFEAVRVDDPDDLGERIKERPALNAQGGIYVINPEMGRSNSPGGDSDDGSLNEQGQEIAVQVSVHLQSETKSIDTESQGSSHFSPPDDIGSAESNCNYKDGAYENCQL

SEQ ID NO: 32443 - protein, 995 aa, Homo sapiens
MATRGGAGVAMAVWSLLSARAVTAFLLLFLPRFLQAQTFSFPFQQPEKCDNNQYFDISALSCVPCGANQRQDARGTSCVCLPGFQMISNNGGPAIICKKCPENMKGVTEDGWNCISCPSDLTAEGKCHCPIGHILVERDINGTLLSQATCELCDGNENSFMVVNALGDRCVRCEPTFVNTSRSCACSEPNILTGGLCFSSTGNFPLRRISAARYGEVGMSLTSEWFAKYLQSSAAACWVYANLTSCQALGNMCVMNMNSYDFATFDACGLFQFIFENTAGLSTVHSISFWRQNLPWLFYGDQLGLAPQVLSSTSLPTNFSFKGENQNTKLKFVAASYDIRGNFLKWQTLEGGVLQLCPDTETRLNAAYSFGTTYQQNCEIPISKILIDFPTPIFYDVYLEYTDENQHQYILAVPVLNLNLQHNKIFVNQDSNSGKWLLTRRIFLVDAVSGRENDLGTQPRVIRVATQISLSVHLVPNTINGNIYPPLITIAYSDIDIKDANSQSVKVSFSVTYEMDHGEAHVQTDIALGVLGGLAVLASLLKTAGWKRRIGSPMIDLQTVVKFLVYYAGDLANVFFIITVGTGLYWLIFFKAQKSVSVLLPMPIQEERFVTYVGCAFALKALQFLHKLISQITIDVFFIDWERPKGKVLKAVEGEGGVRSATVPVSIWRTYFVANEWNEIQTVRKINSLFQVLTVLFFLEVVGFKNLALMDSSSSLSRNPPSYIAPYSCILRYAVSAALWLAIGIIQVVFFAVFYERFIEDKIRQFVDLCSMSNISVFLLSHKCFGYYIHGRSVHGHADTNMEEMNMNLKREAENLCSQRGLVPNTDGQTFEIAISNQMRQHYDRIHETLIRKNGPARLLSSSASTFEQSIKAYHMMNKFLGSFIDHVHKEMDYFIKDKLLLERILGMEFMEPMEKSIFYNDEGYSFSSVLYYGNEATLLIFDLLFFCVVDLACQNFILASFLTYLQQEIFRYIRNTVGQKNLASKTLVDQRFLI

SEQ ID NO: 32444 - protein, 204 aa, Homo sapiens
MELKQSLSTHLEAEKPLRRYGAVEETAWKTERLGRNQLDIISMAETTMMPEEIELEMAKIQRLREVLVRRESELRFMMDDIQLCKDIMDLKQELQNLVAIPEKEKTKLQKQREDELIQKIHKLVQKRDFLVDDAEVERLREQEEDKEMADFLRIKLKPLDKVTKSPASSRAEKKAEPPPSKPTVAKTGLALIKDCCGATQCNIM

SEQ ID NO: 32445 - protein, 187 aa, Homo sapiens
MWGDLTETGCMGRRSAKKDQLDIISMAETTMMPEEIELEMAKIQRLREVLVRRESELRFMMDDIQLCKDIMDLKQELQNLVAIPEKEKTKLQKQREDELIQKIHKLVQKRDFLVDDAEVERLREQEEDKEMADFLRIKLKPLDKVTKSPASSRAEKKAEPPPSKPTVAKTGLALIKDCCGATQCNIM

SEQ ID NO: 32446 - protein, 372 aa, Homo sapiens
MTFQFNFTIEDHLENELTPIRDGALTLDSSKELSVSESQKGEERDRKCSAEQFDLPQDHLWEHKSMENAAPSQDTDSPLSAASSSRNLEPHGKQPSLRAAKEHAMPKDLKKMLENKVIETLPGFQHVKLSVVKTILLKENFPGENIVSKSFSSHSDLITGVYEGGLKIWECTFDLLAYFTKAKVKFAGKKVLDLGCGSGLLGITAFKGGSKEIHFQDYNSMVIDEVTLPNVVANSTLEDEENDVNEPDVKRCRKPKVTQLYKCRFFSGEWSEFCKLVLSSEKLFVKYDLILTSETIYNPDYYSNLHQTFLRLLSKNGRVLLASKAHYFGVGGGVHLFQKFVEERDVFKTRILKIIDEGLKRFIIEITFKFPG

SEQ ID NO: 32447 - protein, 560 aa, Homo sapiens
MRDLPLTSLALVLSALGALLGTEALRAEEPAVGTSGLIFREDLDWPPGSPQEPLCLVALGGDSNGSSSPLRVVGALSAYEQAFLGAVQRARWGPRDLATFGVCNTGDRQAALPSLRRLGAWLRDPGGQRLVVLHLEEVTWEPTPSLRFQEPPPGGAGPPELALLVLYPGPGPEVTVTRAGLPGAQSLCPSRDTRYLVLAVDRPAGAWRGSGLALTLQPRGEDSRLSTARLQALLFGDDHRCFTRMTPALLLLPRSEPAPLPAHGQLDTVPFPPPRPSAELEESPPSADPFLETLTRLVRALRVPPARASAPRLALDPDALAGFPQGLVNLSDPAALERLLDGEEPLLLLLRPTAATTGDPAPLHDPTSAPWATALARRVAAELQAAAAELRSLPGLPPATAPLLARLLALCPGGPGGLGDPLRALLLLKALQGLRVEWRGRDPRGPGRAQRSAGATAADGPCALRELSVDLRAERSVLIPETYQANNCQGVCGWPQSDRNPRYGNHVVLLLKMQVRGAALARPPCCVPTAYAGKLLISLSEERISAHHVPNMVATECGCR

SEQ ID NO: 32448 - protein, 131 aa, Homo sapiens
MAAAVAMETDDAGNRLRFQLELEFVQCLANPNYLNFLAQRGYFKDKAFVNYLKYLLYWKDPEYAKYLKYPQCLHMLELLQYEHFRKELVNAQCAKFIDEQQILHWQHYSRKRMRLQQALAEQQQQNNTSGK

SEQ ID NO: 32449 - protein, 244 aa, Homo sapiens
MENFTALFGAQADPPPPPTALGFGPGKPPPPPPPPAGGGPGTAPPPTAATAPPGADKSGAGCGPFYLMRELPGSTELTGSTNLITHYNLEQAYNKFCGKKVKEKLSNFLPDLPGMIDLPGSHDNSSLRSLIEKPPILSSSFNPITGTMLAGFRLHTGPLPEQCRLMHIQPPKKKNKHKHKQSRTQDPVPPETPSDSDHKKKKKKKEEDPDRKRKKKEKKKKKNRHSPDHPGMGSSQASSSSSLR

SEQ ID NO: 32450 - protein, 194 aa, Homo sapiens
MENFTALFGAQADPPPPPTALGFGPGKPPPPPPPPAGGGPGTAPPPTAATAPPGADKSGAGCGPFYLMRELPGSTELTGSTNLITHYNLEQAYNKFCGKKVKEKLSNFLPDLPGMIDLPGSHDNSSLRSLIEKPPILSSSFNPITGTMLAGFRLHTGPLPEQCRLMHIQPPKKKNKHKHKQSRTQDPVPPGKPS

SEQ ID NO: 32451 - protein, 419 aa, Homo sapiens
MAASSLEQKLSRLEAKLKQENREARRRIDLNLDISPQRPRPTLQLPLANDGGSRSPSSESSPQHPTPPARPRHMLGLPSTLFTPRSMESIEIDQKLQEIMKQTGYLTIGGQRYQAEINDLENLGEMGSGTCGQVWKMRFRKTGHVIAVKQMRRSGNKEENKRILMDLDVVLKSHDCPYIVQCFGTFITNTDVFIAMELMGTCAEKLKKRMQGPIPERILGKMTVAIVKALYYLKEKHGVIHRDVKPSNILLDERGQIKLCDFGISGRLVDSKAKTRSAGCAAYMAPERIDPPDPTKPDYDIRADVWSLGISLVELATGQFPYKNCKTDFEVLTKVLQEEPPLLPGHMGFSGDFQSFVKDCLTKDHRKRPKYNKLLEHSFIKRYETLEVDVASWFKDVMAKTESPRTSGVLSQPHLPFFR

SEQ ID NO: 32452 - protein, 462 aa, Homo sapiens
MAASSLEQKLSRLEAKLKQENREARRRIDLNLDISPQRPRPTLQLPLANDGGSRSPSSESSPQHPTPPARPRHMLGLPSTLFTPRSMESIEIDQKLQEIMKQTGYLTIGGQVPPSLWRGEGGGPARLDPSWERQWGAGGGGRAPGTLQPSLSSQRYQAEINDLENLGEMGSGTCGQVWKMRFRKTGHVIAVKQMRRSGNKEENKRILMDLDVVLKSHDCPYIVQCFGTFITNTDVFIAMELMGTCAEKLKKRMQGPIPERILGKMTVAIVKALYYLKEKHGVIHRDVKPSNILLDERGQIKLCDFGISGRLVDSKAKTRSAGCAAYMAPERIDPPDPTKPDYDIRADVWSLGISLVELATGQFPYKNCKTDFEVLTKVLQEEPPLLPGHMGFSGDFQSFVKDCLTKDHRKRPKYNKLLEHSFIKRYETLEVDVASWFKDVMAKTESPRTSGVLSQPHLPFFR

SEQ ID NO: 32453 - protein, 435 aa, Homo sapiens
MAASSLEQKLSRLEAKLKQENREARRRIDLNLDISPQRPRPIIVITLSPAPAPSQRAALQLPLANDGGSRSPSSESSPQHPTPPARPRHMLGLPSTLFTPRSMESIEIDQKLQEIMKQTGYLTIGGQRYQAEINDLENLGEMGSGTCGQVWKMRFRKTGHVIAVKQMRRSGNKEENKRILMDLDVVLKSHDCPYIVQCFGTFITNTDVFIAMELMGTCAEKLKKRMQGPIPERILGKMTVAIVKALYYLKEKHGVIHRDVKPSNILLDERGQIKLCDFGISGRLVDSKAKTRSAGCAAYMAPERIDPPDPTKPDYDIRADVWSLGISLVELATGQFPYKNCKTDFEVLTKVLQEEPPLLPGHMGFSGDFQSFVKDCLTKDHRKRPKYNKLLEHSFIKRYETLEVDVASWFKDVMAKTESPRTSGVLSQPHLPFFR

SEQ ID NO: 32454 - protein, 426 aa, Homo sapiens
MAASSLEQKLSRLEAKLKQENREARRRIDLNLDISPQRPRPTLQLPLANDGGSRSPSSESSPQHPTPPARPRHMLGLPSTLFTPRSMESIEIDQKLQEIMKQTGYLTIGGQRYQAEINDLENLGEMGSGTCGQVWKMRFRKTGHVIAVKQMRRSGNKEENKRILMDLDVVLKSHDCPYIVQCFGTFITNTDVFIAMELMGTCAEKLKKRMQGPIPERILGKMTVAIVKALYYLKEKHGVIHRDVKPSNILLDERGQIKLCDFGISGRLVDSKAKTRSAGCAAYMAPERIDPPDPTKPDYDIRADVWSLGISLPCPSPSQVELATGQFPYKNCKTDFEVLTKVLQEEPPLLPGHMGFSGDFQSFVKDCLTKDHRKRPKYNKLLEHSFIKRYETLEVDVASWFKDVMAKTESPRTSGVLSQPHLPFFR

SEQ ID NO: 32455 - protein, 1454 aa, Homo sapiens
MAPVQLENHQLVPPGGGGGGSGGPPSAPAPPPPGAAVAAAAAAAASPGYRLSTLIEFLLHRAYSELMVLTDLLPRKSDVERKIEIVQFASRTRQLFVRLLALVKWANNAGKVEKCAMISSFLDQQAILFVDTADRLASLARDALVHARLPSFAIPYAIDVLTTGSYPRLPTCIRDKIIPPDPITKIEKQATLHQLNQILRHRLVTTDLPPQLANLTVANGRVKFRVEGEFEATLTVMGDDPDVPWRLLKLEILVEDKETGDGRALVHSMQISFIHQLVQSRLFADEKPLQDMYNCLHSFCLSLQLEVLHSQTLMLIRERWGDLVQVERYHAGKCLSLSVWNQQVLGRKTGTASVHKVTIKIDENDVSKPLQIFHDPPLPASDSKLVERAMKIDHLSIEKLLIDSVHARAHQKLQELKAILRGFNANENSSIETALPALVVPILEPCGNSECLHIFVDLHSGMFQLMLYGLDQATLDDMEKSVNDDMKRIIPWIQQLKFWLGQQRCKQSIKHLPTISSETLQLSNYSTHPIGNLSKNKLFIKLTRLPQYYIVVEMLEVPNKPTQLSYKYYFMSVNAADREDSPAMALLLQQFKENIQDLVFRTKTGKQTRTNAKRKLSDDPCPVESKKTKRAGEMCAFNKVLAHFVAMCDTNMPFVGLRLELSNLEIPHQGVQVEGDGFSHAIRLLKIPPCKGITEETQKALDRSLLDCTFRLQGRNNRTWVAELVFANCPLNGTSTREQGPSRHVYLTYENLLSEPVGGRKVVEMFLNDWNSIARLYECVLEFARSLPDIPAHLNIFSEVRVYNYRKLILCYGTTKGSSISIQWNSIHQKFHISLGTVGPNSGCSNCHNTILHQLQEMFNKTPNVVQLLQVLFDTQAPLNAINKLPTVPMLGLTQRTNTAYQCFSILPQSSTHIRLAFRNMYCIDIYCRSRGVVAIRDGAYSLFDNSKLVEGFYPAPGLKTFLNMFVDSNQDARRRSVNEDDNPPSPIGGDMMDSLISQLQPPPQQQPFPKQPGTSGAYPLTSPPTSYHSTVNQSPSMMHTQSPGNLHAASSPSGALRAPSPASFVPTPPPSSHGISIGPGASFASPHGTLDPSSPYTMVSPSGRAGNWPGSPQVSGPSPAARMPGMSPANPSLHSPVPDASHSPRAGTSSQTMPTNMPPPRKLPQRSWAASIPTILTHSALNILLLPSPTPGLVPGLAGSYLCSPLERFLGSVIMRRHLQRIIQQETLQLINSNEPGVIMFKTDALKCRVALSPKTNQTLQLKVTPENAGQWKPDELQVLEKFFETRVAGPPFKANTLIAFTKLLGAPTHILRDCVHIMKLELFPDQATQLKWNVQFCLTIPPSAPPIAPPGTPAVVLKSKMLFFLQLTQKTSVPPQEPVSIIVPIIYDMASGTTQQADIPRQQNSSVAAPMMVSNILKRFAEMNPPRQGECTIFAAVRDLMANLTLPPGGRP

SEQ ID NO: 32456 - protein, 497 aa, Homo sapiens
MAAAGEGTPSSRGPRRDPPRRPPRNGYGVYVYPNSFFRYEGEWKAGRKHGHGKLLFKDGSYYEGAFVDGEITGEGRRHWAWSGDTFSGQFVLGEPQGYGVMEYKAGGCYEGEVSHGMREGHGFLVDRDGQVYQGSFHDNKRHGPGQMLFQNGDKYDGDWVRDRRQGHGVLRCADGSTYKGQWHSDVFSGLGSMAHCSGVTYYGLWINGHPAEQATRIVILGPEVMEVAQGSPFSVNVQLLQDHGEIAKSESGRVLQISAGVRYVQLSAYSEVNFFKVDRDNQETLIQTPFGFECIPYPVSSPAAGVPGPRAAKGGAEADVPLPRGDLELHLGALHGQEDTPGGLLARGHAPHCPGACQRVEQGCAEFTDVLLGPPPPGYHPFLFLDSLHKKAGGRSRGGLHPRGTPPTAQEPPGGSRPEGRATEEQAAAAHLGEYVLMIRDVTTPPFLGRRLPPAFKHLRVVAKRAGQPPHVLEEGPEASSSWQAAHSCTPEPPAPR

SEQ ID NO: 32457 - protein, 350 aa, Homo sapiens
MAAAGEGTPSSRGPRRDPPRRPPRNGYGVYVYPNSFFRYEGEWKAGRKHGHGKLLFKDGSYYEGAFVDGEITGEGRRHWAWSGDTFSGQFVLGEPQGYGVMEYKAGGCYEGEVSHGMREGHGFLVDRDGQVYQGSFHDNKRHGPGQMLFQNGDKYDGDWVRDRRQGHGVLRCADGSTYKGQWHSDVFSGLGSMAHCSGVTYYGLWINGHPAEQATRIVILGPEVMEVAQGSPFSVNVQLLQDHGEIAKSESGRVLQISAGVRYVQLSAYSEVNFFKVDRDNQETLIQTPFGFECIPYPVSSPAAGVPGPRAAKGGAEADVPLPRGDLELHLGALHGQEDTPGGLLGSSLF

SEQ ID NO: 32458 - protein, 1456 aa, Homo sapiens [sequence omitted]

SEQ ID NO: 32459 - protein, 498 aa, Homo sapiens
MRLPLLLVFASVIPGAVLLLDTRQFLIYNEDHKRCVDAVSPSAVQTAACNQDAESQKFRWVSESQIMSVAFKLCLGVPSKTDWVAITLYACDSKSEFQKWECKNDTLLGIKGEDLFFNYGNRQEKNIMLYKGSGLWSRWKIYGTTDNLCSRGYEAMYTLLGNANGATCAFPFKFENKWYADCTSAGRSDGWLWCGTTTDYDTDKLFGYCPLKFEGSESLWNKDPLTSVSYQINSKSALTWHQARKSCQQQNAELLSITEIHEQTYLTGLTSSLTSGLWIGLNSLSFNSGWQWSDRSPFRYLNWLPGSPSAEPGKSCVSLNPGKNAKWENLECVQKLGYICKKGNTTLNSFVIPSESDVPTHCPSQWWPYAGHCYKIHRDEKKIQRDALTTCRKEGGDLTSIHTIEELDFIISQLGYEPNDELWIGLNDIKIQMYFEWSDGTPVTFTKWLRGEPSHENNRQEDCVVMKGKAGVQWHNLGSMQPLPREFKRFSCLSLPSS

SEQ ID NO: 32460 - protein, 431 aa, Homo sapiens
MLALLAASVALAVAAGAQDSPAPGSRFVCTALPPEAVHAGCPLPAMPMQGGAQSPEEELRAAVLQLRETVVQQKETLGAQREAIRELTGKLARCEGLAGGKARGAGATGKDTMGDLPRDPGHVVEQLSRSLQTLKDRLESLEHQLRANVSNAGLPGDFREVLQQRLGELERQLLRKVAELEDEKSLLHNETSAHRQKTESTLNALLQRVTELERGNSAFKSPDAFKVSLPLRTNYLYGKIKKTLPELYAFTICLWLRSSASPGIGTPFSYAVPGQANEIVLIEWGNNPIELLINDKVAQLPLFVSDGKWHHICVTWTTRDGMWEAFQDGEKLGTGENLAPWHPIKPGGVLILGQEQDTVGGRFDATQAFVGELSQFNIWDRVLRAQEIVNIANCSTNMPGNIIPWVDNNVDVFGGASKWPVETCEERLLDL

SEQ ID NO: 32461 - protein, 500 aa, Homo sapiens
MKFLAVLLAAGMLAFLGAVICIIASVPLAASPARALPGGADNASVASGAAASPGPQRSLSALHGAGGSAGPPALPGAPAASAHPLPPGPLFSRFLCTPLAAACPSGAQQGDAAGAAPGEREELLLLQSTAEQLRQTALQQEARIRADQDTIRELTGKLGRCESGLPRGLQGAGPRRDTMADGPWDSPALILELEDAVRALRDRIDRLEQELPARVNLSAAPAPVSAVPTGLHSKMDQLEGQLLAQVLALEKERVALSHSSRRQRQEVEKELDVLQGRVAELEHGSSAYSPPDAFKISIPIRNNYMYARVRKALPELYAFTACMWLRSRSSGTGQGTPFSYSVPGQANEIVLLEAGHEPMELLINDKVAQLPLSLKDNGWHHICIAWTTRDGLWSAYQDGELQGSGENLAAWHPIKPHGILILGQEQDTLGGRFDATQAFVGDIAQFNLWDHALTPAQVLGIANCTAPLLGNVLPWEDKLVEAFGGATKAAFDVCKGRAKA

SEQ ID NO: 32462 - protein, 165 aa, Homo sapiens
MAWRPGERGAPASRPRLALLLLLLLLPLPSGAWYKHVASPRYHTVGRAAGLLMGLRRSPYLWRRALRAAAGPLARDTLSPEPAAREAPLLLPSWVQELWETRRRSSQAGIPVRAPRSPRAPEPALEPESLDFSGAGQRLRRDVSRPAVDPAANRLGLPCLAPGPF

SEQ ID NO: 32463 - protein, 384 aa, Homo sapiens
MNSTLFSQVENHSVHSNFSEKNAQLLAFENDDCHLPLAMIFTLALAYGAVIILGVSGNLALIIIILKQKEMRNVTNILIVNLSFSDLLVAIMCLPFTFVYTLMDHWVFGEAMCKLNPFVQCVSITVSIFSLVLIAVERHQLIINPRGWRPNNRHAYVGIAVIWVLAVASSLPFLIYQVMTDEPFQNVTLDAYKDKYVCFDQFPSDSHRLSYTTLLLVLQYFGPLCFIFICYFKIYIRLKRRNNMMDKMRDNKYRSSETKRINIMLLSIVVAFAVCWLPLTIFNTVFDWNHQIIATCNHNLLFLLCHLTAMISTCVNPIFYGFLNKNFQRDLQFFFNFCDFRSRDDDYETIAMSTMHTDVSKTSLKQASPVAFKKINNNDDNEKI

SEQ ID NO: 32464 - protein, 445 aa, Homo sapiens
MDLELDEYYNKTLATENNTAATRNSDFPVWDDYKSSVDDLQYFLIGLYTFVSLLGFMGNLLILMALMKKRNQKTTVNFLIGNLAFSDILVVLFCSPFTLTSVLLDQWMFGKVMCHIMPFLQCVSVLVSTLILISIAIVRYHMIKHPISNNLTANHGYFLIATVWTLGFAICSPLPVFHSLVELQETFGSALLSSRYLCVESWPSDSYRIAFTISLLLVQYILPLVCLTVSHTSVCRSISCGLSNKENRLEENEMINLTLHPSKKSGPQVKLSGSHKWSYSFIKKHRRRYSKKTACVLPAPERPSQENHSRILPENFGSVRSQLSSSSKFIPGVPTCFEIKPEENSDVHELRVKRSVTRIKKRSRSVFYRLTILILVFAVSWMPLHLFHVVTDFNDNLISNRHFKLVYCICHLLGMMSCCLNPILYGFLNNGIKADLVSLIHCLHM

SEQ ID NO: 32465 - protein, 335 aa, Homo sapiens
MKVEFAPLNIQLARRLQTVAVLQWVLKYLLLGPMSIGITVMLIIHNYLFLYIPYLMWLYFDWHTPERGGRRSSWIKNWTLWKHFKDYFPIHLIKTQDLDPSHNYIFGFHPHGIMAVGAFGNFSVNYSDFKDLFPGFTSYLHVLPLWFWCPVFREYVMSVGLVSVSKKSVSYMVSKEGGGNISVIVLGGAKESLDAHPGKFTLFIRQRKGFVKIALTHGASLVPVVSFGENELFKQTDNPEGSWIRTVQNKLQKIMGFALPLFHARGVFQYNFGLMTYRKAIHTVVGRPIPVRQTLNPTQEQIEELHQTYMEELRKLFEEHKGKYGIPEHETLVLK

SEQ ID NO: 32466 - protein, 539 aa, Homo sapiens
MALQSQASEEAKGPWQEADQEQQEPVGSPEPESEPEPEPEPEPVPVPPPEPQPEPQPLPDPAPLPELEFESERVHEPEPTPTVETRGTARGFQPPEGGFGWVVVFAATWCNGSIFGIHNSVGILYSMLLEEEKEKNRQVEFQAAWVGALAMGMIFFCSPIVSIFTDRLGCRITATAGAAVAFIGLHTSSFTSSLSLRYFTYGILFGCGCSFAFQPSLVILGHYFQRRLGLANGVVSAGSSIFSMSFPFLIRMLGDKIKLAQTFQVLSTFMFVLMLLSLTYRPLLPSSQDTPSKRGVRTLHQRFLAQLRKYFNMRVFRQRTYRIWAFGIAAAALGYFVPYVHLMKYVEEEFSEIKETWVLLVCIGATSGLGRLVSGHISDSIPGLKKIYLQVLSFLLLGLMSMMIPLCRDFGGLIVVCLFLGLCDGFFITIMAPIAFELVGPMQASQAIGYLLGMMALPMIAGPPIAGLLRNCFGDYHVAFYFAGVPPIIGAVILFFVPLMHQRMFKKEQRDSSKDKMLAPDPDPNGELLPGSPNPEEPI

SEQ ID NO: 32467 - protein, 160 aa, Homo sapiens
MAAERKTRLSKNLLRMKFMQRGLDSETKKQLEEEEKKIISEEHWYLDLPELKEKESFIIEEQSFLLCEDLLYGRMSFRGFNPEVEKLMLQMNAKHKAEEVEDETVELDVSDEEMARRYETLVGTIGKKFARKRDHANYEEDENGDITPIKAKKMFLKPQD

SEQ ID NO: 32468 - protein, 1323 aa, Homo sapiens
MALSPGANLVFHEDPKMTPSPPSCGAPGLGSGTIPQPHPDMAQVPMLNLLPSPGLALVPDLNDSLSPVSGEASGLVSENTPRPDDSRAIAPASLQITSSCSGEALDLDSKDVSRPDSQGRLCPASNPILSPSSTEAPRLSSGNHPQSNSEDAFKCLSSKIFKLGQRNSNPSRHELNPFIRHHSREGLVLGHCISRPSSKALLIPTSNSSLDLDSNPLLNMGSRNTSKLNLNVAPDSHGTLIPDTNETITLASHNISESVSKGAFSTTWSTSSKETMNVASSGHSRSDLSVTITQASYVTLIPGSSYGISLHSSTHEPNSTISPPSCMTLILGSNETLSLDSSLLFSDTSTLTLSSQQDDAKDNSIHTVPLEENLESWSEMASIKVGQFPLGFPISNPAGKDAVTLQGIPEGAFDEVTSCLVKVPEKTEGGNNMALVENVTTLQKSQDLLEAEGEKKTMIKKIMRQIQEEPLDSLSSSVRKQAMEILTQLSHTQPTLGMRERSELVNVCVHSVFSLPSVQAMQEKDEAKAETIQALYHQTLEALQTLLKALFIEDPTPAGLKSILEALGPWMNSGKAHERARAVNTNVSVLNHMLLTLPFFMPLGFPALGLLLGRLILHIGDPDEEIGCEALDGIIILYTILELQKRARDKEETNKKELYESNKHFLGPYNPVSPCQNILRVIEEFGDFLGPQQIKDLLLAALEGLKGSSEAPGKDSREMMQLASEVMLSSVLEWYRHRALEVIPEIMQGIYMQLSHIQEPRARQVALLPVSLLASSFMTEVVVALLMCPLPLNSNGAEMWRQLILCKPSCDVRDLLDLLLGSLKEKPVTKEGRASIVPLAAASGLCELLSVNSCMGRVRRIYPQLLLALLIQVHYHIGLNLPGCVAPPKDTKKGAQPSPFVPVRWVVKVVKTLLLRMGCSYETTFLEDQGGWELMEQVESHHRGVALLARAMVQYSCQELCRILYLLIPLLERGDEKHRITATAFFVELLQMEQVRRIPEEYSLGRMAEGLSHHDPIMKVLSIRGLVILARRSEKTAKVKALLPSMVKGLKNMDGMLVVEAVHNLKAVFKGRDQKLMDSAVYVEMLQILLPHFSDAREVVRSSCINLYGKVVQKLRAPRTQAMEEQLVSTLVPLLLTMQEGNSKVSQKCVKTLLRCSYFMAWELPKRAYSRKPWDNQQQTVAKICKCLVNTHRDSAFIFLSQSLEYAKNSRASLRKCSVMFIGSLVPCMESIMTEDRLNEVKAALDNLRHDPEASVCIYAAQVQDHILASCWQNSWLPHGNSWVCYSATTHRWSPSCENLPTSHQRRSWIMQALGSWKMSLKK

SEQ ID NO: 32469 - protein, 1030 aa, Homo sapiens
MALSPGANLVFHEDPKMTPSPPSCGAPGLGSGTIPQPHPDMAQVPMLNLLPSPGLALVPDLNDSLSPVSGEASGLVSENTPRPDDSRAIAPASLQITSSCSGEALDLDSKDVSRPDSQGRLCPASNPILSPSSTEAPRLSSGNHPQSNSEDAFKCLSSKIFKLGQRNSNPSRHELNPFIRHHSREGLVLGHCISRPSSKALLIPTSNSSLDLDSNPLLNMGSRNTSKLNLNVAPDSHGTLIPDTNETITLASHNISESVSKGAFSTTWSTSSKETMNVASSGHSRSDLSVTITQASYVTLIPGSSYGISLHSSTHEPNSTISPPSCMTLILGSNETLSLDSSLLFSDTSTLTLSSQQDDAKDNSIHTVPLEENLESWSEMASIKVGQFPLGFPISNPAGKDAVTLQGIPEGAFDEVTSCLVKVPEKTEGGNNMALVENVTTLQKSQDLLEAEGEKKTMIKKIMRQIQEEPLDSLSSSVRKQAMEILTQLSHTQPTLGMRERSELVNVCVHSVFSLPSVQAMQEKDEAKAETIQALYHQTLEALQTLLKALFIEDPTPAGLKSILEALGPWMNSGKAHERARAVNTNVSVLNHMLLTLPFFMPLGFPALGLLLGRLILHIGDPDEEIGCEALDGIIILYTILELQKRARDKEETNKKELYESNKHFLGPYNPVSPCQNILRVIEEFGDFLGPQQIKDLLLAALEGLKGSSEAPGKDSREMMQLASEVMLSSVLEWYRHRALEVIPEIMQGIYMQLSHIQEPRARQVALLPVSLLASSFMTEVVVALLMCPLPLNSNGAEMWRQLILCKPSCDVRDLLDLLLGSLKEKPVTKEGRASIVPLAAASGLCELLSVNSCMGRVRRIYPQLLLALLIQVHYHIGLNLPGCVAPPKDTKKGAQPSPFVPVRWVVKVVKTLLLRMGCSYETTFLEDQGGWELMEQVESHHRGVALLARAMVQYSCQELCRILYLLIPLLERGDEKHRITATAFFVEQPCEEGIVILMLRPQDLMGKATTSSHRGSELESDTLSFATWC

SEQ ID NO: 32470 - protein, 627 aa, Homo sapiens
MALSPGANLVFHEDPKMTPSPPSCGAPGLGSGTIPQPHPDMAQVPMLNLLPSPGLALVPDLNDSLSPVSGEASGLVSENTPRPDDSRAIAPASLQITSSCSGEALDLDSKDVSRPDSQGRLCPASNPILSPSSTEAPRLSSGNHPQSNSEDAFKCLSSKIFKLGQRNSNPSRHELNPFIRHHSREGLVLGHCISRPSSKALLIPTSNSSLDLDSNPLLNMGSRNTSKLNLNVAPDSHGTLIPDTNETITLASHNISESVSKGAFSTTWSTSSKETMNVASSGHSRSDLSVTITQASYVTLIPGSSYGISLHSSTHEPNSTISPPSCMTLILGSNETLSLDSSLLFSDTSTLTLSSQQDDAKDNSIHTVPLEENLESWSEMASIKVGQFPLGFPISNPAGKDAVTLQGIPEGAFDEVTSCLVKVPEKTEGGNNMALVENVTTLQKSQDLLEAEGEKKTMIKKIMRQIQEEPLDSLSSSVRKQAMEILTQLSHTQPTLGMRERSELVNVCVHSVFSLPSVQAMQEKDEAKAETIQALYHQTLEALQTLLKALFIEDPTPAGLKSILEALGPWMNSGKAHERARAVNTNVSVLNHMLLTLPFFIAIQTDALGVPGAGASAGETHPSHWGS

SEQ ID NO: 32471 - protein, 421 aa, Homo sapiens
MALSPGANLVFHEDPKMTPSPPSCGAPGLGSGTIPQPHPDMAQVPMLNLLPSPGLALVPDLNDSLSPVSGEASGLVSENTPRPDDSRAIAPASLQITSSCSGEALDLDSKDVSRPDSQGRLCPASNPILSPSSTEAPRLSSGNHPQSNSEDAFKCLSSKIFKLGQRNSNPSRHELNPFIRHHSREGLVLGHCISRPSSKALLIPTSNSSLDLDSNPLLNMGSRNTSKLNLNVAPDSHGTLIPDTNETITLASHNISESVSKGAFSTTWSTSSKETMNVASSGHSRSDLSVTITQASYVTLIPGSSYGISLHSSTHEPNSTISPPSCMTLILGSNETLSLDSSLLFSDTSTLTLSSQQDDAKDNSIHTVPLEENLESWSEMASIKVGQFPLGFPISNPAGKDAVTLQGIPEGVSGSSWTFPA

SEQ ID NO: 32472 - protein, 1322 aa, Homo sapiens
MALSPGANLVFHEDPKMTPSPPSCGAPGLGSGTIPQPHPDMAQVPMLNLLPSPGLALVPDLNDSLSPVSGEASGLVSENTPRPDDSRAIAPASLQITSSCSGEALDLDSKDVSRPDSQGRLCPASNPILSPSSTEAPRLSSGNHPQSNSEDAFKCLSSKIFKLGQRNSNPSRHELNPFIRHHSREGLVLGHCISRPSSKALLIPTSNSSLDLDSNPLLNMGSRNTSKLNLNVAPDSHGTLIPDTNETITLASHNISESVSKGAFSTTWSTSSKETMNVASSGHSRSDLSVTITQASYVTLIPGSSYGISLHSSTHEPNSTISPPSCMTLILGSNETLSLDSSLLFSDTSTLTLSSQQDDAKDNSIHTVPLEENLESWSEMASIKVGQFPLGFPISNPAGKDAVTLQGIPEGAFDEVTSCLVKVPEKTEGGNNMALVENVTTLQKSQDLLEAEGEKKTMIKKIMRQIQEEPLDSLSSSVRKQAMEILTQLSHTQPTLGMRERSELVNVCVHSVFSLPSVQAMQEKDEAKAETIQALYHQTLEALQTLLKALFIEDPTPAGLKSILEALGPWMNSGKAHERARAVNTNVSVLNHMLLTLPFFMPLGFPALGLLLGRLILHIGDPDEEIGCEALDGIIILYTILELQKRARDKEETNKKELYESNKHFLGPYNPVSPCQNILRVIEEFGDFLGPQQIKDLLLAALEGLKGSSEAPGKDSREMMQLASEVMLSSVLEWYRHRALEVIPEIMQGIYMQLSHIQEPRARQVALLPVSLLASSFMTEVVVALLMCPLPLNSNGAEMWRQLILCKPSCDVRDLLDLLLGSLKEKPVTKEGRASIVPLAAASGLCELLSVNSCMGRVRRIYPQLLLALLIQVHYHIGLNLPGCVAPPKDTKKGAQPSPFVPVRWVVKVVKTLLLRMGCSYETTFLEDQGGWELMEQVESHHRGVALLARAMVQYSCQELCRILYLLIPLLERGDEKHRITATAFFVELLQMEQVRRIPEEYSLGRMAEGLSHHDPIMKVLSIRGLVILARRSEKTAKVKALLPSMVKGLKNMDGMLVVEAVHNLKAVFKGRDQKLMDSAVYVEMLQILLPHFSDAREVVRSSCINLYGKVVQKLRAPRTQAMEEQLVSTLVPLLLTMQEGNSKVSQCVKTLLRCSYFMAWELPKRAYSRKPWDNQQQTVAKICKCLVNTHRDSAFIFLSQSLEYAKNSRASLRKCSVMFIGSLVPCMESIMTEDRLNEVKAALDNLRHDPEASVCIYAAQVQDHILASCWQNSWLPHGNSWVCYSATTHRWSPSCENLPTSHQRRSWIMQALGSWKMSLKK

SEQ ID NO: 32473 - protein, 1290 aa, Homo sapiens
MALSPGANLVFHEDPKMTPSPPSCGAPGLGSGTIPQPHPDMAQVPMLNLLPSPGLALVPDLNDSLSPVSGEASGLVSENTPRPDDSRAIAPASLQITSSCSGEALDLDSKDVSRPDSQGRLCPASNPILSPSSTEAPRLSSGNHPQSNSEDAFKCLSSKIFKLGQRNSNPSRHELNPFIRHHSREGLVLGHCISRPSSKALLIPTSNSSLDLDSNPLLNMGSRNTSKLNLNVAPDSHGTLIPDTNETITLASHNISESVSKGAFSTTWSTSSKETMNVASSGHSRSDLSVTITQASYVTLIPGSSYGISLHSSTHEPNSTISPPSCMTLILGSNETLSLDSSLLFSDTSTLTLSSQQDDAKDNSIHTVPLEENLESWSEMASIKVGQFPLGFPISNPAGKDAVTLQGIPEDGVSLLLPRLECNGAISAHCNLCLPGAFDEVTSCLVKVPEKTEGGNNMALVENVTTLQKSQDLLEAEGEKKTMIKKIMRQIQEEPLDSLSSSVRKQAMEILTQLSHTQPTLGMRERSELVNVCVHSVFSLPSVQAMQEKDEAKAETIQALYHQTLEALQTLLKALFIEDPTPAGLKSILEALGPWMNSGKAHERARAVNTNVSVLNHMLLTLPFFIAIQTMPLGFPALGLLLGRLILHIGDPDEEIGCEALDGIIILYTILELQKRARDKEETNKKELYESNKHFLGPYNPVSPCQNILRVIEEFGDFLGPQQIKDLLLAALEGLKGSSEAPGKDSREMMQLASEVMLSSVLEWYRHRALEVIPEIMQGIYMQLSHIQEPRARQVALLPVSLLASSFMTEVVVALLMCPLPLNSNGAEMWRQLILCKPSCDVRDLLDLLLGSLKEKPVTKEGRASIVPLAAASGLCELLSVNSCMGRVRRIYPQLLLALLIQVHYHIGLNLPGCVAPPKDTKKGAQPSPFVPVRWVVKVVKTLLLRMGCSYETTFLEDQGGWELMEQVESHHRGVALLARAMVQYSCQELCRILYLLIPLLERGDEKHRITATAFFVELLQMEQVRRIPEEYSLGRMAEGLSHHDPIMKVLSIRGLVILARRSEKTAKVKALLPSMVKGLKNMDGMLVVEAVHNLKAVFKGRDQKLMDSAVYVEMLQILLPHFSDAREVVRSSCINLYGKVVQKLRAPRTQAMEEQLVSTLVPLLLTMQEGNSKVSQKCVKTLLRCSYFMAWELPKRAYSRKPWDNQQQTVAKICKCLVNTHRDSAFIFLSQSLEYAKNSRASLRKCSVMFIATPRGQRFHLPCPPLYSQPLEQAGSAERAKNLKRSPYL

SEQ ID NO: 32474 - protein, 1088 aa, Homo sapiens
MIDSSKKQQQGFPEILTAGDFEPLKEKECLEGSNQKSLKEVLQLRLQQRRTREQLVDQGIMPPLKSPAAFHEQIKSLERARTENFLKHKIRSRPDRSELVRMHILEETFAEPSLQATQMKLKRARLADDLNEKIAQRPGPMELVEKNILPVDSSVKEAIIGVGKEDYPHTQGDFSFDEDSSDALSPDQPASQESQGSAASPSEPKVSESPSPVTTNTPAQFASVSPTVPEFLKTPPTADQPPPRPAAPVLPTNTVSSAKPGPALVKQSHPKNPNDKHRSKKCKDPKPRVKKLKYHQYIPPDQKGEKNEPQMDSNYARLLQQQQLFLQLQILSQQKQHYNYQTILPAPFKPLNDKNSNSGNSALNNATPNTPRQNTSTPVRKPGPLPSSLDDLKVSELKTELKLRGLPVSGTKPDLIERLKPYQEVNSSGLAAGGIVAVSSSAIVTSNPEVTVALPVTTLHNTVTSSVSTLKAELPPTGTSNATRVENVHSPLPISPSPSEQSSLSTDDTNMADTFTEIMTMMSPSQFLSSSPLRMTNNEDSLSPTSSTLSNLELDAAEKDRKLQEKEKQIEELKRKLEQEQKLVEVLKMQLEVEKRGQQQRPLEAQPSAPGHSVKSDQKHGSLGSSIKDEASLPDCSSSRQPIPVASHAVGQPVSTGGQTLVAKKAVVIKQEVPVGQAEQQSVVSQFYVSSQGQPPPAVVAQPQALLTTQTAQLLLPVSIQGSSVTSVQLPVGSLKLQTSPQAGMQTQPQIATAAQIPTAALASGLAPTVPQTQDTFPQHVLSQPQQVRKVFTNSASSNTVLPYQRHPAPAVQQPFINKASNSVLQSRNAPLPSLQNGPNTPNKPSSPPPPQQFVVQHSLFGSPVAKTKDPPRYEEAIKQTRSTQAPLPEISNAHSQQMDDLFDILIKSGEISLPIKEEPSPISKMRPVTASITTMPVNTVVSRPPPQVQMAPPVSLEPMGSLSASLENQLEAFLDGTLPSANEIPPLQSSSEDREPFSLIEDLQNDLLSHSGMLDHSHSPMETSETQFAAGTPCLSLDLSDSNLDNMEWLDITMPNSSSGLTPLSTTAPSMFSADFLDPQDLPLPWD

SEQ ID NO: 32475 - protein, 378 aa, Homo sapiens
MLQLRLQQRRTREQLVDQGIMPPLKSPAAFHEQIKSLERARTENFLKHKIRSRPDRSELVRMHILEETFAEPSLQATQMKLKRARLADDLNEKIAQRPGPMELVEKNILPVDSSVKEAIIGVGKEDYPHTQGDFSFDEDSSDALSPDQPASQESQGSAASPSEPKVSESPSPVTTNTPAQFASVSPTVPEFLKTPPTADQPPPRPAAPVLPTNTVSSAKPGPALVKQSHPKNPNDKHRSKKCKDPKPRVKKLKYHQYIPPDQKGEKNEPQMDSNYARLLQQQQLFLQLQILSQQKQHYNYQTILPAPFKAYHTVSEVHMVRVACIPFQFLSSKIGSEFLQVRNAFSQLFIQICLLLEHQNSTRCSEKSVSSIIPGINS

SEQ ID NO: 32476 - protein, 461 aa, Homo sapiens
MIDSSKKQQQGFPEILTAGDFEPLKEKECLEGSNQKSLKEVLQLRLQQRRTREQLVDQGIMPPLKSPAAFHEQIKSLERARTENFLKHKIRSRPDRSELVRMHILEETFAEPSLQATQMKLKRARLADDLNEKIAQRPGPMELVEKNILPVDSSVKEAIIGVGKEDYPHTQGDFSFDEDSSDALSPDQPASQESQGSAASPSEPKVSESPSPVTTNTPAQFASVSPTVPEFLKTPPTADQPPPRPAAPVLPTNTVSSAKPGPALVKQSHPKNPNDKHRSKKCKDPKPRVKKLKYHQYIPPDQKGEKNEPQMDSNYARLLQQQQLFLQLQILSQQKQHYNYQTILPAPFKYGGAHAILNAGFSVVFMRNYKLPKVECCHLFVLSNDFHFFVIRAYHTVSEVHMVRVACIPFQFLSSKIGSEFLQVRNAFSQLFIQICLLLEHQNSTRCSEKSVSSIIPGINS

SEQ ID NO: 32477 - protein, 1049 aa, Homo sapiens
MDHTGAIDTEDEVGPLAHLAPSPQSEAVAHEFQELSLQSSQNLPPLNERKNVLQLRLQQRRTREQLVDQGIMPPLKSPAAFHEQIKSLERARTENFLKHKIRSRPDRSELVRMHILEETFAEPSLQATQMKLKRARLADDLNEKIAQRPGPMELVEKNILPVDSSVKEAIIGVGKEDYPHTQGDFSFDEDSSDALSPDQPASQESQGSAASPSEPKVSESPSPVTTNTPAQFASVSPTVPEFLKTPPTADQPPPRPAAPVLPTNTVSSAKPGPALVKQSHPKNPNDKHRSKKCKDPKPRVKKLKYHQYIPPDQKGEKNEPQMDSNYARLLQQQQLFLQLQILSQQKQHYNYQTILPAPFKPLNDKNSNSGNSALNNATPNTPRQNTSTPVRKPGPLPSSLDDLKVSELKTELKLRGLPVSGTKPDLIERLKPYQEVNSSGLAAGGIVAVSSSAIVTSNPEVTVALPVTTLHNTVTSSVSTLKAELPPTGTSNATRVENVHSPLPISPSPSEQSSLSTDDTNMADTFTEIMTMMSPSQFLSSSPLRMTNNEDSLSPTSSTLSNLELDAAEKDRKLQEKEKQIEELKRKLEQEQKLVEVLKMQLEVEKRGQQQRPLEAQPSAPGHSVKSDQKHGSLGSSIKDEASLPDCSSSRQPIPVASHAVGQPVSTGGQTLVAKKAVVIKQEVPVGQAEQQSVVSQFYTSPQAGMQTQPQIATAAQIPTAALASGLAPTVPQTQDTFPQHVLSQPQQVRKVFTNSASSNTVLPYQRHPAPAVQQPFINKASNSVLQSRNAPLPSLQNGPNTPNKPSSPPPPQQFVVQHSLFGSPVAKTKDPPRYEEAIKQTRSTQAPLPEISNAHSQQMDDLFDILIKSGEISLPIKEEPSPISKMRPVTASITTMPVNTVVSRPPPQVQMAPPVSLEPMGSLSASLENQLEAFLDGTLPSANEIPPLQSSSEDREPFSLIEDLQNDLLSHSGMLDHSHSPMETSETQFAAGTPCLSLDLSDSNLDNMEWLDITMPNSSSGLTPLSTTAPSMFSADFLDPQDLPLPWD

SEQ ID NO: 32478 - protein, 1099 aa, Homo sapiens
MDHTGAIDTEDEVGPLAHLAPSPQSEAVAHEFQELSLQSSQNLPPLNERKNVLQLRLQQRRTREQLVDQGIMPPLKSPAAFHEQIKSLERARTENFLKHKIRSRPDRSELVRMHILEETFAEPSLQATQMKLKRARLADDLNEKIAQRPGPMELVEKNILPVDSSVKEAIIGVGKEDYPHTQGDFSFDEDSSDALSPDQPASQESQGSAASPSEPKVSESPSPVTTNTPAQFASVSPTVPEFLKTPPTADQPPPRPAAPVLPTNTVSSAKPGPALVKQSHPKNPNDKHRSKKCKDPKPRVKKLKYHQYIPPDQKGEKNEPQMDSNYARLLQQQQLFLQLQILSQQKQHYNYQTILPAPFKPLNDKNSNSGNSALNNATPNTPRQNTSTPVRKPGPLPSSLDDLKVSELKTELKLRGLPVSGTKPDLIERLKPYQEVNSSGLAAGGIVAVSSSAIVTSNPEVTVALPVTTLHNTVTSSVSTLKAELPPTGTSNATRVENVHSPLPISPSPSEQSSLSTDDTNMADTFTEIMTMMSPSQFLSSSPLRMTNNEDSLSPTSSTLSNLELDAAEKDRKLQEKEKQIEELKRKLEQEQKLVEVLKMQLEVEKRGQQQRPLEAQPSAPGHSVKSDQKHGSLGSSIKDEASLPDCSSSRQPIPVASHAVGQPVSTGGQTLVAKKAVVIKQEVPVGQAEQQSVVSQFYVSSQGQPPPAVVAQPQALLTTQTAQLLLPVSIQGSSVTSVQLPVGSLKLQTSPQAGMQTQPQIATAAQIPTAALASGLAPTVPQTQDTFPQHVLSQPQQVRKVFTNSASSNTVLPYQRHPAPAVQQPFINKASNSVLQSRNAPLPSLQNGPNTPNKPSSPPPPQQFVVQHSLFGSPVAKTKDPPRYEEAIKQTRSTQAPLPEISNAHSQQMDDLFDILIKSGEISLPIKEEPSPISKMRPVTASITTMPVNTVVSRPPPQVQMAPPVSLEPMGSLSASLENQLEAFLDGTLPSANEIPPLQSSSEDREPFSLIEDLQNDLLSHSGMLDHSHSPMETSETQFAAGTPCLSLDLSDSNLDNMEWLDITMPNSSSGLTPLSTTAPSMFSADFLDPQDLPLPWD

SEQ ID NO: 32479 - protein, 204 aa, Homo sapiens
MLVAAAAERNKDPILHVLRQYLDPAQRGVRVLEVASGSGQHAAHFARAFPLAEWQPSDVDQRCLDSIAATTQAQGLTNVKAPLHLDVTWGWEHWGGILPQSLDLLLCINMAHVSPLRCTEGLFRAAGHLLKPRALLITYGPYAINGKISPQSNVDFDLMLRCRNPEWGLRDTALLEDLGKASGLLLERMVDMPANNKCLIFRKN

SEQ ID NO: 32480 - protein, 147 aa, Homo sapiens
MLVAAAAERNKDPILHVLRQYLDPAQRGVRVLEVASGSGQHAAHFARAFPLAEWQPSDVDQRCLDRCGPRGGHFYRCGGPGPQEPTARSPGGKGCGSGSEGAGWEPGGAPGAGPSCAAPAAAEVGGPRGPPSQPLWSPLLNVPPSLP

SEQ ID NO: 32481 - protein, 107 aa, Homo sapiens
MLVAAAAERNKDPILHVLRQYLDPAQRGVRVLEVASGSGQHAAHFARAFPLAEWQPSDVDQRCLDRNPEWGLRDTALLEDLGKASGLLLERMVDMPANNKCLIFRKN

SEQ ID NO: 32482 - protein, 205 aa, Homo sapiens
MLVAAAAERNKDPILHVLRQYLDPAQRGVRVLEVASGSGQHAAHFARAFPLAEWQPSDVDQRCLDSIAATTQAQGLTNVKAPLHLDVTWGWEHWGGILPQSLDLLLCINMAHVSPLRCTEGLFRAAGHLLKPRALLITYGEPRMGASGHSPPGGPGKGQWPAPGEDGGHASQQQMPDLPEKLSPSFTPAHLHPCRRLCEARTLPP

SEQ ID NO: 32483 - protein, 127 aa, Homo sapiens
MLVAAAAERNKDPILHVLRQYLDPAQRGVRVLEVASGSGQHAAHFARAFPLAEWQPSDVDQRCLDRGSSEQQDTCSNPGPCSSPTGNPEWGLRDTALLEDLGKASGLLLERMVDMPANNKCLIFRKN

SEQ ID NO: 32484 - protein, 185 aa, Homo sapiens
MLVAAAAERNKDPILHVLRQYLDPAQRGVRVLEVASGSGQHAAHFARAFPLAEWQPSDVDQRCLDSIAATTQAQGLTNVKAPLHLDVTWGWEHWGGILPQSLDLLLCINMAHVSPLRCTEEPRMGASGHSPPGGPGKGQWPAPGEDGGHASQQQMPDLPEKLSPSFTPAHLHPCRRLCEARTLPP

SEQ ID NO: 32485 - protein, 580 aa, Homo sapiens
MSDTWSSIQAHKKQLDSLRERLQRRRKQDSGHLDLRNPEAALSPTFRSDSPVPTAPTSGGPKPSTASAVPELATDPELEKKLLHHLSDLALTLPTDAVSICLAISTPDAPATQDGVESLLQKFAAQELIEVKRGLLQDDAHPTLVTYADHSKLSAMMGAVAEKKGPGEVAGTVTGQKRRAEQDSTTVAAFASSLVSGLNSSASEPAKEPAKKSRKHAASDVDLEIESLLNQQSTKEQQSKKVSQEILELLNTTTAKEQSIVEKFRSRGRAQVQEFCDYGTKEECMKASDADRPCRKLHFRRIINKHTDESLGDCSFLNTCFHMDTCKYVHYEIDACMDSEAPGSKDHTPSQELALTQSVGGDSSADRLFPPQWICCDIRYLDVSILGKFAVVMADPPWDIHMELPYGTLTDDEMRRLNIPVLQDDGFLFLWVTGRAMELGRECLNLWGYERVDEIIWVKTNQLQRIIRTGRTGHWLNHGKEHCLVGVKGNPQGFNQGLDCDVIVAEVRSTSHKPDEIYGMIERLSPGTRKIELFGRPHNVQPNWITLGNQLDGIHLLDPDVVARFKQRYPDGIISKPKNL

SEQ ID NO: 32486 - protein, 221 aa, Homo sapiens
MKASDADRPCRKLHFRRIINKHTDESLGDCSFLNTCFHMDTCKYVHYEIDACMDSEAPGSKDHTPSQELALTQSVGGDSSADRLFPPQWICCDIRYLDVSILGKFAVVMADPPWDIHMELPYGTLTDDEMRRLNIPVLQDDGFLFLWVTGRAMELGRECLNLWGYERVDEIIWVKTNQLQRIIRTGRTGHWLNHGKEHCLVSSSGAQFNRWSTKKNHLISY

SEQ ID NO: 32487 - protein, 166 aa, Homo sapiens
MSEPQPRGAERDLYRDTWVRYLGYANEVGEAFRSLVPAAVVWLSYGVASSYVLADAIDKGKKAGEVPSPEAGRSARVTVAVVDTFVWQALASVAIPGFTINRVCAASLYVLGTATRWPLAVRKWTTTALGLLTIPIIIHPIDRSVDFLLDSSLRKLYPTVGKPSSS

SEQ ID NO: 32488 - protein, 135 aa, Homo sapiens
MSEPQPRGAERDLYRDTWVRYLGYANEVGEAFRSLVPAAVVWLSYGVASSYVLADAIDKGKKAGEVGGFPPGLQPAQALPNSGEAQLLLIILWYLACASASCFMSTSYSCQGMWTPGSLVSKDPGTWVGLSWTEA

SEQ ID NO: 32489 - protein, 1863 aa, Homo sapiens
MIEDKGPRVADYFVVAGLTDVSKPLEEEIHFNDACHKVAKPKEPITDVSVIIKSLGEEVPQDYICIDVTPTGLSADLNNGSLVGPQIYLCYRRGRDKPPLTDLGVLYDWKERLKQGCEIIQSTPYGRPANISGSTSSQRIYITYRRASENMTQNTLAVTDICIIIPSKGESPPHTFCKVDKNLNNSMWGSAVYLCYKKSVAKTNTVSYKAGLICRYPQEDYESFSLPESVPLFCLPMGATIECWPSNSKYPLPVFSTFVLTGASAEKVYGAAIQFYEPYSEENLTEKQRLLLGLTSADGKSDSSKTIHTNKCICLLSHWPFFDAFRKFLTFLYRYSISGPHVLPIEKHISHFMHKVPFPSPQRPRILVQLSPHDNLILSQPVSSPLPLSGGKFSTLLQNLGPENAVTLLVFAVTEHKILIHSLRPSVLTSVTEALVSMIFPFHWPCPYVPLCPLALADVLSAPCPFIVGIDSRYFDLYDPPPDVSCVDVDTNTISQIGDKKNVAWKILPKKPCKNLMNTLNNLHQQLAKLQQRPRDDGLMDLAINDYDFNSGKRLHMIDLEIQEAFLFFMASILKGYRSYLRPITQAPSETATDAASLFALQAFLRSRDRSHQKFYNMMTKTQMFIRFIEECSFVSDKDASLAFFDDCVDKVDMDKSGEVRLIELDESFKSEHTVFVTPPEIPHLPNGEEPPLQYSYNGFPVLRNNLFERPEGFLQAKKNKLPSKSSSPNSPLPMFRRTKQEIKSAHKIAKRYSSIPQMWSRCLLRHCYGLWFICLPAYVKVCHSKVRALKTAYDVLKKMQSKKMDPPDEVCYRILMQLCGQYDQPVLAVRVLFEMQKAGIDPNAITYGYYNKAVLESTWPSRSRSGYFLWTKVRNVVLGVTQFKRALKKHAHLSQTTLSGGQSDLGYNSLSKDEVRRGDTSTEDIQEEKDKKGSDCSSLSESESTKGSADCLPKLSYQNSSSIVRLTGTSNNSAGKISGESMESTPELLLISSLEDTNETRNIQSRCFRKRHKSDNETNLQQQVVWGNRNRNLSGGVLMGFMLNRINQEATPGDIVEKLGADAKILSNVISKSTRPNTLDIGKPPLRSKRDSLEKESSDDDTPFDGSNYLADKVDSPVIFDLEDLDSETDVSKAGCVATQNPKRIQRMNSSFSVKPFEKTDVATGFDPLSLLVAETEQQQKEEEEEDEDDSKSISTPSARRDLAEEIVMYMNNMSSPLTSRTPSIDLQRACDDKLNKKSPPLVKACRRSSLPPNSPKPVRLTKSKSYTKSEEKPRDRLWSSPAFSPTCPFREESQDTLTHSSPSFNLDTLLVPKLDVLRNSMFTAGKGVAEKASKWYSRFTMYTTSSKDQSSDRTSLSSVGAQDSESTSLTDEDVCHELEGPISSQETSATSGTKRIDLSRISLESSASLEGSLSKFALPGKSEVTSSFNASNTNIFQNYAMEVLISSCSRCRTCDCLVHDEEIMAGWTADDSNLNTTCPFCGNIFLPFLNIEIRDLRRPGRYFLKSSPSTENMHFPSSISSQTRQSCISTSASGLDTSALSVQGNFDLNSKSKLQENFCTRSIQIPANRSKTAMSKCPIFPMARSISTSGPLDKEDTGRQKLISTGSLPATLQGATDSLGLEWHLPSPDPVTVPYLSPLVVWKELESLLENEGDHAITVADFVDHHPIVFWNLVWYFRRLDLPSNLPGLILSSEHCNKYSKIPRHCMSEDSKYVLIQMLWDNMKLHQDPGQPLYILWNAHTQKYPMVHLLQKSDNSFNQELLKSMVKSIKMNDVYGPMSQILETLNKCPHFKRQRSLYREILFLSLVALGRENIDIDAFDKEYKMAYDRLTPSQVKSTHNCDRPPSTGVMECRKTFGEPYL

SEQ ID NO: 32490 - protein, 1906 aa, Homo sapiens
MIEDKGPRVADYFVVAGLTDVSKPLEEEIHFNDACHKVAKPKEPITDVSVIIKSLGEEVPQDYICIDVTPTGLSADLNNGSLVGPQIYLCYRRGRDKPPLTDLGVLYDWKERLKQGCEIIQSTPYGRPANISGSTSSQRIYITYRRASENMTQNTLAVTDICIIIPSKGESPPHTFCKVDKNLNNSMWGSAVYLCYKKSVAKTNTVSYKAGLICRYPQEDYESFSLPESVPLFCLPMGATIECWPSNSKYPLPVFSTFVLTGASAEKVYGAAIQFYEPYSEENLTEKQRLLLGLTSADGKSDSSKTIHTNKCICLLSHWPFFDAFRKFLTFLYRYSISGPHVLPIEKHISHFMHKVPFPSPQRPRILVQLSPHDNLILSQPVSSPLPLSGGKFSTLLQNLGPENAVTLLVFAVTEHKILIHSLRPSVLTSVTEALVSMIFPFHWPCPYVPLCPLALADVLSAPCPFIVGIDSRYFDLYDPPPDVSCVDVDTNTISQIGDKKNVAWKILPKKPCKNLMNTLNNLHQQLAKLQQRPRDDGLMDLAINDYDFNSGKRLHMIDLEIQEAFLFFMASILKGYRSYLRPITQAPSETATDAASLFALQAFLRSRDRSHQKFYNMMTKTQMFIRFIEECSFVSDKDASLAFFDDCVDKVDMDKSGEVRLIELDESFKSEHTVFVTPPEIPHLPNGEEPPLQYSYNGFPVLRNNLFERPEGFLQAKKNKLPSKSSSPNSPLPMFRRTKQEIKSAHKIAKRYSSIPQMWSRCLLRHCYGLWFICLPAYVKVCHSKVRALKTAYDVLKKMQSKKMDPPDEVCYRILMQLCGQYDQPVLAVRVLFEMQKAGIDPNAITYGYYNKAVLESTWPSRSRSGYFLWTKVRNVVLGVTQFKRALKKHAHLSQTTLSDGSDLDAVSHGSMDSGHGTHTVEQAPFNTGLIKVYATDDRSSTGGQSDLGYNSLSKDEVRRGDTSTEDIQEEKDKKGSDCSSLSESESTKGSADCLPKLSYQNSSSIVRLTGTSNNSAGKISGESMESTPELLLISSLEDTNETRNIQSRCFRKRHKSDNETNLQQQVVWGNRNRNLSGGVLMGFMLNRINQEATPGDIVEKLGADAKILSNVISKSTRPNTLDIGKPPLRSKRDSLEKESSDDDTPFDGSNYLADKVDSPVIFDLEDLDSETDVSKAGCVATQNPKRIQRMNSSFSVKPFEKTDVATGFDPLSLLVAETEQQQKEEEEEDEDDSKSISTPSARRDLAEEIVMYMNNMSSPLTSRTPSIDLQRACDDKLNKKSPPLVKACRRSSLPPNSPKPVRLTKSKSYTKSEEKPRDRLWSSPAFSPTCPFREESQDTLTHSSPSFNLDTLLVPKLDVLRNSMFTAGKGVAEKASKWYSRFTMYTTSSKDQSSDRTSLSSVGAQDSESTSLTDEDVCHELEGPISSQETSATSGTKRIDLSRISLESSASLEGSLSKFALPGKSEVTSSFNASNTNIFQNYAMEVLISSCSRCRTCDCLVHDEEIMAGWTADDSNLNTTCPFCGNIFLPFLNIEIRDLRRPGRYFLKSSPSTENMHFPSSISSQTRQSCISTSASGLDTSALSVQGNFDLNSKSKLQENFCTRSIQIPANRSKTAMSKCPIFPMARSISTSGPLDKEDTGRQKLISTGSLPATLQGATDSLGLEWHLPSPDPVTVPYLSPLVVWKELESLLENEGDHAITVADFVDHHPIVFWNLVWYFRRLDLPSNLPGLILSSEHCNKYSKIPRHCMSEDSKYVLIQMLWDNMKLHQDPGQPLYILWNAHTQKYPMVHLLQKSDNSFNQELLKSMVKSIKMNDVYGPMSQILETLNKCPHFKRQRSLYREILFLSLVALGRENIDIDAFDKEYKMAYDRLTPSQVKSTHNCDRPPSTGVMECRKTFGEPYL

SEQ ID NO: 32491 - protein, 896 aa, Homo sapiens
MAARAVLDEFTAPAEKAELLEQSRGRIEGLFGVSLAVLGALGAEEPLPARIWLQLCGAQEAVHSAKEYIKGICEPELEERECYPKDMHCIFVGAESLFLKSLIQDTCADLCILDIGLLGIRGSAEAVVMARSHIQQFVKLFENKENLPSSQKESEVKREFKQFVEAHADNYTMDLLILPTSLKKELLTLTQGEENLFETGDDEVIEMRDSQQTEFTQNAATGLNISRDETVLQEEARNKAGTPVSELTKQMDTVLSSSPDVLFDPINGLTPDEEALSNERICQKRRFSDSEERHTKKQFSLENVQEGEILHDAKTLAGNVIADLSDSSADSENLSPDIKETTEEMEYNILVNFFKTMGYSQEIVEKVIKVYGPSTEPLLLLEEIEKENKRFQEDREFSAGTVYPETNKTKNKGVYSSTNELTTDSTPKKTQAHTQQNMVEKFSQLPFKVEAKPCTSNCRINTFRTVPIEQKHEVWGSNQNYICNTDPETDGLSPSVASPSPKEVNFVSRGASSHQPRVPLFPENGLHQQPEPLLPNNMKSACEKRLGCCSSPHSKPNCSTLSPPMPLPQLLPSVTDARSAGPSDHIDSSVTGVQRFRDTLKIPYKLELKNEPGRTDLKHIVIDGSNVAITHGLKKFFSCRGIAIAVEYFWKLGNRNITVFVPQWRTRRDPNVTEQHFLTQLQELGILSLTPARMVFGERIASHDDRFLLHLADKTGGIIVTNDNFREFVNESVSWREIITKRLLQYTFVGDIFMVPDDPLGRSGPRLEEFLQKEVCLRDMQPLLSALPNVGMFDPSFRVPGTQAASTSHQPPTRIQGAPSSHWLPQQPHFPLLPALPSLQQNLPMPAQRSSAETNELREALLKIFPDSEQRLKIDQILVAHPYMKDLNALSAMVLD

SEQ ID NO: 32492 - protein, 173 aa, Homo sapiens
MAAPSGGWNGVGASLWAALLLGAVALRPAEAVSEPTTVAFDVRPGGVVHSFSHNVGPGDKYTCMFTYASQGGTNEQWQMSLGTSEDHQHFTCTIWRPQGKSYLYFTQFKAEVRGAEIEYAMAYSKAAFERESDVPLKTEEFEVTKTAVAHRPGAFKAELSKLVIVAKASRTEL

SEQ ID NO: 32493 - protein, 227 aa, Homo sapiens
MAPYHIRKYQESDRKSVVGLLSGGMAEHAPATFRRLLKLPRTLILLLGGALALLLVSGSWILALVFSLSLLPALWFLAKKPWTRYVDIALRTDMSDITKSYLSECGSCFWVAESEEKVVGTVGALPVDDPTLREKRLQLFHLSVDNEHRGQGIAKALVRTVLQFARDQGYSEVVLDTSNIQLSAMGLYQSLGFKKTGQSFFHVWARLVDLHTVHFIYHLPSAQAGRL

SEQ ID NO: 32494 - protein, 151 aa, Homo sapiens
MCDFTEDQTAEFKEAFQLFDRTGDGKILYSQCGDVMRALGQNPTNAEVLKVLGNPKSDEMNVKVLDFEHFLPMLQTVAKNKDQGTYEDYVEGLRVFDKEGNGTVMGAEIRHVLVTLGEKMTEEEVEMLVAGHEDSNGCINYEAFVRHILSG

SEQ ID NO: 32495 - protein, 151 aa, Homo sapiens
MCDFTEDQTAEFKEAFQLFDRTGDGKILYSQCGDVMRALGQNPTNAEVLKVLGNPKSDEMNVKVLDFEHFLPMLQTVAKNKDQGTYEDYVEGLRVFDKEGNGTVMGAEIRHVLVTLGEKMTEEEVEMLVAGHEDSNGCINYEELVRMVLNG

SEQ ID NO: 32496 - protein, 1855 aa, Homo sapiens
MAASELYTKFARVWIPDPEEVWKSAELLKDYKPGDKVLLLHLEEGKDLEYHLDPKTKELPHLRNPDILVGENDLTALSYLHEPAVLHNLRVRFIDSKLIYTYCGIVLVAINPYEQLPIYGEDIINAYSGQNMGDMDPHIFAVAEEAYKQMARDERNQSIIVSGESGAGKTVSAKYAMRYFATVSGSASEANVEEKVLASNPIMESIGNAKTTRNDNSSRFGKYIEIGFDKRYRIIGANMRTYLLEKSRVVFQAEEERNYHIFYQLCASAKLPEFKMLRLGNADNFNYTKQGGSPVIEGVDDAKEMAHTRQACTLLGISESHQMGIFRILAGILHLGNVGFTSRDADSCTIPPKHEPLCIFCELMGVDYEEMCHWLCHRKLATATETYIKPISKLQATNARDALAKHIYAKLFNWIVDNVNQALHSAVKQHSFIGVLDIYGFETFEINSFEQFCINYANEKLQQQFNMHVFKLEQEEYMKEQIPWTLIDFYDNQPCINLIESKLGILDLLDEECKMPKGTDDTWAQKLYNTHLNKCALFEKPRLSNKAFIIQHFADKVEYQCEGFLEKNKDTVFEEQIKVLKSSKFKMLPELFQDDEKAISPTSATSSGRTPLTRTPAKPTKGRPGQMAKEHKKTVGHQFRNSLHLLMETLNATTPHYVRCIKPNDFKFPFTFDEKRAVQQLRACGVLETIRISAAGFPSRWTYQEFFSRYRVLMKQKDVLSDRKQTCKNVLEKLILDKDKYQFGKTKIFFRAGQVAYLEKLRADKLRAACIRIQKTIRGWLLRKKYLRMRKAAITMQRYVRGYQARCYAKFLRRTKAATIIQKYWRMYVVRRRYKIRRAATIVLQSYLRGFLARNRYRKILREHKAVIIQKRVRGWLARTHYKRSMHAIIYLQCCFRRMMAKRELKKLKIEARSVERYKKLHIGMENKIMQLQRKVDEQNKDYKCLVEKLTNLEGIYNSETEKLRSDLERLQLSEEEAKVATGRVLSLQEEIAKLRKDLEQTRSEKKCIEEHADRYKQETEQLVSNLKEENTLLKQEKEALNHRIVQQAKEMTETMEKKLVEETKQLELDLNDERLRYQNLLNEFSRLEERYDDLKEEMTLMVHVPKPGHKRTDSTHSSNESEYIFSSEIAEMEDIPSRTEEPSEKKVPLDMSLFLKLQKRVTELEQEKQVMQDELDRKEEQVLRSKAKEEERPQIRGAELEYESLKRQELESENKKLKNELNELRKALSEKSAPEVTAPGAPAYRVLMEQLTSVSEELDVRKEEVLILRSQLVSQKEAIQPKDDKNTMTDSTILLEDVQKMKDKGEIAQAYIGLKETNRSSALDYHELNEDGELWLVYEGLKQANRLLESQLQSQKRSHENEAEALRGEIQSLKEENNRQQQLLAQNLQLPPEARIEASLQHEITRLTNENLDLMEQLEKQDKTVRKLKKQLKVFAKKIGELEVGQMENISPGQIIDEPIRPVNIPRKEKDFQGMLEYKKEDEQKLVKNLILELKPRGVAVNLIPGLPAYILFMCVRHADYLNDDQKVRSLLTSTINSIKKVLKKRGDDFETVSFWLSNTCRFLHCLKQYSGEEGFMKHNTSRQNEHCLTNFDLAEYRQVLSDLAIQIYQQLVRVLENILQPMIVSGMLEHETIQGVSGVKPTGLRKRTSSIADEGTYTLDSILRQLNSFHSVMCQHGMDPELIKQVVKQMFYIIGAITLNNLLLRKDMCSWSKGMQIRYNVSQLEEWLRDKNLMNSGAKETLEPLIQAAQLLQVKKKTDDDAEAICSMCNALTTAQIVKVLNLYTPVNEFEERVSVSFIRTIQMRLRDRKDSPQLLMDAKHIFPVTFPFNPSSLALETIQIPASLGLGFISRV

SEQ ID NO: 32497 - protein, 1828 aa, Homo sapiens
MAASELYTKFARVWIPDPEEVWKSAELLKDYKPGDKVLLLHLEEGKDLEYHLDPKTKELPHLRNPDILVGENDLTALSYLHEPAVLHNLRVRFIDSKLIYTYCGIVLVAINPYEQLPIYGEDIINAYSGQNMGDMDPHIFAVAEEAYKQMARDERNQSIIVSGESGAGKTVSAKYAMRYFATVSGSASEANVEEKVLASNPIMESIGNAKTTRNDNSSRFGKYIEIGFDKRYRIIGANMRTYLLEKSRVVFQAEEERNYHIFYQLCASAKLPEFKMLRLGNADNFNYTKQGGSPVIEGVDDAKEMAHTRQACTLLGISESHQMGIFRILAGILHLGNVGFTSRDADSCTIPPKHEPLCIFCELMGVDYEEMCHWLCHRKLATATETYIKPISKLQATNARDALAKHIYAKLFNWIVDNVNQALHSAVKQHSFIGVLDIYGFETFEINSFEQFCINYANEKLQQQFNMHVFKLEQEEYMKEQIPWTLIDFYDNQPCINLIESKLGILDLLDEECKMPKGTDDTWAQKLYNTHLNKCALFEKPRLSNKAFIIQHFADKVEYQCEGFLEKNKDTVFEEQIKVLKSSKFKMLPELFQDDEKAISPTSATSSGRTPLTRTPAKPTKGRPGQMAKEHKKTVGHQFRNSLHLLMETLNATTPHYVRCIKPNDFKFPFTFDEKRAVQQLRACGVLETIRISAAGFPSRWTYQEFFSRYRVLMKQKDVLSDRKQTCKNVLEKLILDKDKYQFGKTKIFFRAGQVAYLEKLRADKLRAACIRIQKTIRGWLLRKKYLRMRKAAITMQRYVRGYQARCYAKFLRRTKAATIIQKYWRMYVVRRRYKIRRAATIVLQSYLRGFLARNRYRKILREHKAVIIQKRVRGWLARTHYKRSMHAIIYLQCCFRRMMAKRELKKLKIEARSVERYKKLHIGMENKIMQLQRKVDEQNKDYKCLVEKLTNLEGIYNSETEKLRSDLERLQLSEEEAKVATGRVLSLQEEIAKLRKDLEQTRSEKKCIEEHADRYKQETEQLVSNLKEENTLLKQEKEALNHRIVQQAKEMTETMEKKLVEETKQLELDLNDERLRYQNLLNEFSRLEERYDDLKEEMTLMVHVPKPGHKRTDSTHSSNESEYIFSSEIAEMEDIPSRTEEPSEKKVPLDMSLFLKLQKRVTELEQEKQVMQDELDRKEEQVLRSKAKEEERPQIRGAELEYESLKRQELESENKKLKNELNELRKALSEKSAPEVTAPGAPAYRVLMEQLTSVSEELDVRKEEVLILRSQLVSQKEAIQPKDDKNTMTDSTILLEDVQKMKDKGEIAQAYIGLKETNRLLESQLQSQKRSHENEAEALRGEIQSLKEENNRQQQLLAQNLQLPPEARIEASLQHEITRLTNENLDLMEQLEKQDKTVRKLKKQLKVFAKKIGELEVGQMENISPGQIIDEPIRPVNIPRKEKDFQGMLEYKKEDEQKLVKNLILELKPRGVAVNLIPGLPAYILFMCVRHADYLNDDQKVRSLLTSTINSIKKVLKKRGDDFETVSFWLSNTCRFLHCLKQYSGEEGFMKHNTSRQNEHCLTNFDLAEYRQVLSDLAIQIYQQLVRVLENILQPMIVSGMLEHETIQGVSGVKPTGLRKRTSSIADEGTYTLDSILRQLNSFHSVMCQHGMDPELIKQVVKQMFYIIGAITLNNLLLRKDMCSWSKGMQIRYNVSQLEEWLRDKNLMNSGAKETLEPLIQAAQLLQVKKKTDDDAEAICSMCNALTTAQIVKVLNLYTPVNEFEERVSVSFIRTIQMRLRDRKDSPQLLMDAKHIFPVTFPFNPSSLALETIQIPASLGLGFISRV

SEQ ID NO: 32498 - protein, 1880 aa, Homo sapiens
MAASELYTKFARVWIPDPEEVWKSAELLKDYKPGDKVLLLHLEEGKDLEYHLDPKTKELPHLRNPDILVGENDLTALSYLHEPAVLHNLRVRFIDSKLIYTYCGIVLVAINPYEQLPIYGEDIINAYSGQNMGDMDPHIFAVAEEAYKQMARDERNQSIIVSGESGAGKTVSAKYAMRYFATVSGSASEANVEEKVLASNPIMESIGNAKTTRNDNSSRFGKYIEIGFDKRYRIIGANMRTYLLEKSRVVFQAEEERNYHIFYQLCASAKLPEFKMLRLGNADNFNYTKQGGSPVIEGVDDAKEMAHTRQACTLLGISESHQMGIFRILAGILHLGNVGFTSRDADSCTIPPKHEPLCIFCELMGVDYEEMCHWLCHRKLATATETYIKPISKLQATNARDALAKHIYAKLFNWIVDNVNQALHSAVKQHSFIGVLDIYGFETFEINSFEQFCINYANEKLQQQFNMHVFKLEQEEYMKEQIPWTLIDFYDNQPCINLIESKLGILDLLDEECKMPKGTDDTWAQKLYNTHLNKCALFEKPRLSNKAFIIQHFADKVEYQCEGFLEKNKDTVFEEQIKVLKSSKFKMLPELFQDDEKAISPTSATSSGRTPLTRTPAKPTKGRPGQMAKEHKKTVGHQFRNSLHLLMETLNATTPHYVRCIKPNDFKFPFTFDEKRAVQQLRACGVLETIRISAAGFPSRWTYQEFFSRYRVLMKQKDVLSDRKQTCKNVLEKLILDKDKYQFGKTKIFFRAGQVAYLEKLRADKLRAACIRIQKTIRGWLLRKKYLRMRKAAITMQRYVRGYQARCYAKFLRRTKAATIIQKYWRMYVVRRRYKIRRAATIVLQSYLRGFLARNRYRKILREHKAVIIQKRVRGWLARTHYKRSMHAIIYLQCCFRRMMAKRELKKLKIEARSVERYKKLHIGMENKIMQLQRKVDEQNKDYKCLVEKLTNLEGIYNSETEKLRSDLERLQLSEEEAKVATGRVLSLQEEIAKLRKDLEQTRSEKKCIEEHADRYKQETEQLVSNLKEENTLLKQEKEALNHRIVQQAKEMTETMEKKLVEETKQLELDLNDERLRYQNLLNEFSRLEERYDDLKEEMTLMVHVPKPGHKRTDSTHSSNESEYIFSSEIAEMEDIPSRTEEPSEKKVPLDMSLFLKLQKRVTELEQEKQVMQDELDRKEEQVLRSKAKEEERPQIRGAELEYESLKRQELESENKKLKNELNELRKALSEKSAPEVTAPGAPAYRVLMEQLTSVSEELDVRKEEVLILRSQLVSQKEAIQPKDDKNTMTDSTILLEDVQKMKDKGEIAQAYIGLKETNRSSALDYHELNEDGELWLVYEGLKQANRLLESQLQSQKRSHENEAEALRGEIQSLKEENNRQQQLLAQNLQLPPEARIEASLQHEITRLTNENLYFEELYADDPKKYQSYRISLYKRMIDLMEQLEKQDKTVRKLKKQLKVFAKKIGELEVGQMENISPGQIIDEPIRPVNIPRKEKDFQGMLEYKKEDEQKLVKNLILELKPRGVAVNLIPGLPAYILFMCVRHADYLNDDQKVRSLLTSTINSIKKVLKKRGDDFETVSFWLSNTCRFLHCLKQYSGEEGFMKHNTSRQNEHCLTNFDLAEYRQVLSDLAIQIYQQLVRVLENILQPMIVSGMLEHETIQGVSGVKPTGLRKRTSSIADEGTYTLDSILRQLNSFHSVMCQHGMDPELIKQVVKQMFYIIGAITLNNLLLRKDMCSWSKGMQIRYNVSQLEEWLRDKNLMNSGAKETLEPLIQAAQLLQVKKKTDDDAEAICSMCNALTTAQIVKVLNLYTPVNEFEERVSVSFIRTIQMRLRDRKDSPQLLMDAKHIFPVTFPFNPSSLALETIQIPASLGLGFISRV

SEQ ID NO: 32499 - protein, 640 aa, Homo sapiens
MARRPRHSIYSSDEDDEDFEMCDHDYDGLLPKSGKRHLGKTRWTREEDEKLKKLVEQNGTDDWKVIANYLPNRTDVQCQHRWQKVLNPELIKGPWTKEEDQRVIELVQKYGPKRWSVIAKHLKGRIGKQCRERWHNHLNPEVKKTSWTEEEDRIIYQAHKRLGNRWAEIAKLLPGRTDNAIKNHWNSTMRRKVEQEGYLQESSKASQPAVATSFQKNSHLMGFAQAPPTAQLPATGQPTVNNDYSYYHISEAQNVSSHVPYPVALHVNIVNVPQPAAAAIQRHYNDEDPEKEKRIKELELLLMSTENELKGQQVLPTQNHTCSYPGWHSTTIADHTRPHGDSAPVSCLGEHHSTPSLPADPGSLPEESASPARCMIVHQGTILDNVKNLLEFAETLQFIDSFLNTSSNHENSDLEMPSLTSTPLIGHKLTVTTPFHRDQTVKTQKENTVFRTPAIKRSILESSPRTPTPFKHALAAQEIKYGPLKMLPQTPSHLVEDLQDVIKQESDESGIVAEFQENGPPLLKKIKQEVESPTDKSGNFFCSHHWEGDSLNTQLFTQTSPVADAPNILTSSVLMAPASEDEDNVLKAFTVPKNRSLASPLQPCSSTWEPASCGKMEEQMTSSSQARKYVNAFSARTLVM

SEQ ID NO: 32500 - protein, 637 aa, Homo sapiens
MARRPRHSIYSSDEDDEDFEMCDHDYDGLLPKSGKRHLGKTRWTREEDEKLKKLVEQNGTDDWKVIANYLPNRTDVQCQHRWQKVLNPELIKGPWTKEEDQRVIELVQKYGPKRWSVIAKHLKGRIGKQCRERWHNHLNPEVKKTSWTEEEDRIIYQAHKRLGNRWAEIAKLLPGRTDNAIKNHWNSTMRRKVEQEGYLQESSKASQPAVATSFQKNSHLMGFAQAPPTAQLPATGQPTVNNDYSYYHISEAQNVSSHVPYPVALHVNIVNVPQPAAAAIQRHYNDEDPEKEKRIKELELLLMSTENELKGQQTQNHTCSYPGWHSTTIADHTRPHGDSAPVSCLGEHHSTPSLPADPGSLPEESASPARCMIVHQGTILDNVKNLLEFAETLQFIDSFLNTSSNHENSDLEMPSLTSTPLIGHKLTVTTPFHRDQTVKTQKENTVFRTPAIKRSILESSPRTPTPFKHALAAQEIKYGPLKMLPQTPSHLVEDLQDVIKQESDESGIVAEFQENGPPLLKKIKQEVESPTDKSGNFFCSHHWEGDSLNTQLFTQTSPVADAPNILTSSVLMAPASEDEDNVLKAFTVPKNRSLASPLQPCSSTWEPASCGKMEEQMTSSSQARKYVNAFSARTLVM

SEQ ID NO: 32501 - protein, 350 aa, Homo sapiens
MARRPRHSIYSSDEDDEDFEMCDHDYDGLLPKSGKRHLGKTRWTREEDEKLKKLVEQNGTDDWKVIANYLPNRTDVQCQHRWQKVLNPELIKGPWTKEEDQRVIELVQKYGPKRWSVIAKHLKGRIGKQCRERWHNHLNPEVKKTSWTEEEDRIIYQAHKRLGNRWAEIAKLLPGRTDNAIKNHWNSTMRRKVEQEGYLQESSKASQPAVATSFQKNSHLMGFAQAPPTAQLPATGQPTVNNDYSYYHISEAQNVSSHVPYPVALHVNIVNVPQPAAAAIQRHYNDEDPEKEKRIKELELLLMSTENELKGQQVLPLCGPLLNSDIFSDWAANWDGSLCFATYIVNQQRQ

SEQ ID NO: 32502 - protein, 761 aa, Homo sapiens
MARRPRHSIYSSDEDDEDFEMCDHDYDGLLPKSGKRHLGKTRWTREEDEKLKKLVEQNGTDDWKVIANYLPNRTDVQCQHRWQKVLNPELIKGPWTKEEDQRVIELVQKYGPKRWSVIAKHLKGRIGKQCRERWHNHLNPEVKKTSWTEEEDRIIYQAHKRLGNRWAEIAKLLPGRTDNAIKNHWNSTMRRKVEQEGYLQESSKASQPAVATSFQKNSHLMGFAQAPPTAQLPATGQPTVNNDYSYYHISEAQNVSSHVPYPVALHVNIVNVPQPAAAAIQRHYNDEDPEKEKRIKELELLLMSTENELKGQQVLPTQNHTCSYPGWHSTTIADHTRPHGDSAPVSCLGEHHSTPSLPADPGSLPEESASPARCMIVHQGTILDNVKNLLEFAETLQFIDSDSSSWCDLSSFEFFEEADFSPSQHHTGKALQLQQREGNGTKPAGEPSPRVNKRMLSESSLDPPKVLPPARHSTIPLVILRKKRGQASPLATGDCSSFIFADVSSSTPKRSPVKSLPFSPSQFLNTSSNHENSDLEMPSLTSTPLIGHKLTVTTPFHRDQTVKTQKENTVFRTPAIKRSILESSPRTPTPFKHALAAQEIKYGPLKMLPQTPSHLVEDLQDVIKQESDESGIVAEFQENGPPLLKKIKQEVESPTDKSGNFFCSHHWEGDSLNTQLFTQTSPVADAPNILTSSVLMAPASEDEDNVLKAFTVPKNRSLASPLQPCSSTWEPASCGKMEEQMTSSSQARKYVNAFSARTLVM

SEQ ID NO: 32503 - protein, 402 aa, Homo sapiens
MARRPRHSIYSSDEDDEDFEMCDHDYDGLLPKSGKRHLGKTRWTREEDEKLKKLVEQNGTDDWKVIANYLPNRTDVQCQHRWQKVLNPELIKGPWTKEEDQRVIELVQKYGPKRWSVIAKHLKGRIGKQCRERWHNHLNPEVKKTSWTEEEDRIIYQAHKRLGNRWAEIAKLLPGRTDNAIKNHWNSTMRRKVEQEGYLQESSKASQPAVATSFQKNSHLMGFAQAPPTAQLPATGQPTVNNDYSYYHISEAQNVSSHVPYPVALHVNIVNVPQPAAAAIQRHYNDEDPEKEKRIKELELLLMSTENELKGQQVLPTQNHTCSYPGWHSTTIADHTRPHGDSAPVSCLGEHHSTPSLPADPGSLPEESASPARCMIVHQGTILDNVKNLLEFAETLQFIDSM

SEQ ID NO: 32504 - protein, 666 aa, Homo sapiens
MARRPRHSIYSSDEDDEDFEMCDHDYDGLLPKSGKRHLGKTRWTREEDEKLKKLVEQNGTDDWKVIANYLPNRTDVQCQHRWQKVLNPELIKGPWTKEEDQRVIELVQKYGPKRWSVIAKHLKGRIGKQCRERWHNHLNPEVKKTSWTEEEDRIIYQAHKRLGNRWAEIAKLLPGRTDNAIKNHWNSTMRRKVEQEGYLQESSKASQPAVATSFQKNSHLMGFAQAPPTAQLPATGQPTVNNDYSYYHISEAQNVSSHVPYPVALHVNIVNVPQPAAAAIQRHYNDEDPEKEKRIKELELLLMSTENELKGQQVLPTQNHTCSYPGWHSTTIADHTRPHGDSAPVSCLGEHHSTPSLPADPGSLPEESASPARCMIVHQGTILDNVKNLLEFAETLQFIDSFLNTSSNHENSDLEMPSLTSTPLIGHKLTVTTPFHRDQTVKTQKENTVFRTPAIKRSILESSPRTPTPFKHALAAQEIKYGPLKMLPQTPSHLVEDLQDVIKQESDESGIVAEFQENGPPLLKKIKQEVESPTDKSGNFFCSHHWEGDSLNTQLFTQTSPVADAPTGVQWHDFGSLQPLPPGFKRFSCLSLPRSWDYRHPPPRPANFEFLVETGFLHVGQAGLELLTSGDLPASASQSARITGVSHRARPEYSYKLRFNGTSIRR

SEQ ID NO: 32505 - protein, 758 aa, Homo sapiens
MARRPRHSIYSSDEDDEDFEMCDHDYDGLLPKSGKRHLGKTRWTREEDEKLKKLVEQNGTDDWKVIANYLPNRTDVQCQHRWQKVLNPELIKGPWTKEEDQRVIELVQKYGPKRWSVIAKHLKGRIGKQCRERWHNHLNPEVKKTSWTEEEDRIIYQAHKRLGNRWAEIAKLLPGRTDNAIKNHWNSTMRRKVEQEGYLQESSKASQPAVATSFQKNSHLMGFAQAPPTAQLPATGQPTVNNDYSYYHISEAQNVSSHVPYPVALHVNIVNVPQPAAAAIQRHYNDEDPEKEKRIKELELLLMSTENELKGQQTQNHTCSYPGWHSTTIADHTRPHGDSAPVSCLGEHHSTPSLPADPGSLPEESASPARCMIVHQGTILDNVKNLLEFAETLQFIDSDSSSWCDLSSFEFFEEADFSPSQHHTGKALQLQQREGNGTKPAGEPSPRVNKRMLSESSLDPPKVLPPARHSTIPLVILRKKRGQASPLATGDCSSFIFADVSSSTPKRSPVKSLPFSPSQFLNTSSNHENSDLEMPSLTSTPLIGHKLTVTTPFHRDQTVKTQKENTVFRTPAIKRSILESSPRTPTPFKHALAAQEIKYGPLKMLPQTPSHLVEDLQDVIKQESDESGIVAEFQENGPPLLKKIKQEVESPTDKSGNFFCSHHWEGDSLNTQLFTQTSPVADAPNILTSSVLMAPASEDEDNVLKAFTVPKNRSLASPLQPCSSTWEPASCGKMEEQMTSSSQARKYVNAFSARTLVM

SEQ ID NO: 32506 - protein, 745 aa, Homo sapiens
MARRPRHSIYSSDEDDEDFEMCDHDYDGLLPKSGKRHLGKTRWTREEDEKLKKLVEQNGTDDWKVIANYLPNRTDVQCQHRWQKVLNPELIKGPWTKEEDQRVIELVQKYGPKRWSVIAKHLKGRIGKQCRERWHNHLNPEVKKTSWTEEEDRIIYQAHKRLGNRWAEIAKLLPGRTDNAIKNHWNSTMRRKVEQEGYLQESSKASQPAVATSFQKNSHLMGFAQAPPTAQLPATGQPTVNNDYSYYHISEAQNVSSHVPYPVALHVNIVNVPQPAAAAIQRHYNDEDPEKEKRIKELELLLMSTENELKGQQVLPTQNHTCSYPGWHSTTIADHTRPHGDSAPVSCLGEHHSTPSLPADPGSLPEESASPARCMIVHQGTILDNDSSSWCDLSSFEFFEEADFSPSQHHTGKALQLQQREGNGTKPAGEPSPRVNKRMLSESSLDPPKVLPPARHSTIPLVILRKKRGQASPLATGDCSSFIFADVSSSTPKRSPVKSLPFSPSQFLNTSSNHENSDLEMPSLTSTPLIGHKLTVTTPFHRDQTVKTQKENTVFRTPAIKRSILESSPRTPTPFKHALAAQEIKYGPLKMLPQTPSHLVEDLQDVIKQESDESGIVAEFQENGPPLLKKIKQEVESPTDKSGNFFCSHHWEGDSLNTQLFTQTSPVADAPNILTSSVLMAPASEDEDNVLKAFTVPKNRSLASPLQPCSSTWEPASCGKMEEQMTSSSQARKYVNAFSARTLVM

SEQ ID NO: 32507 - protein, 605 aa, Homo sapiens
MARRPRHSIYSSDEDDEDFEMCDHDYDGLLPKSGKRHLGKTRWTREEDEKLKKLVEQNGTDDWKVIANYLPNRTDVQCQHRWQKVLNPELIKGPWTKEEDQRVIELVQKYGPKRWSVIAKHLKGRIGKQCRERWHNHLNPEVKKTSWTEEEDRIIYQAHKRLGNRWAEIAKLLPGRTDNAIKNHWNSTMRRKVEQEGYLQESSKASQPAVATSFQKNSHLMGFAQAPPTAQLPATGQPTVNNDYSYYHISEAQNVSSHVPYPVALHVNIVNVPQPAAAAIQTQNHTCSYPGWHSTTIADHTRPHGDSAPVSCLGEHHSTPSLPADPGSLPEESASPARCMIVHQGTILDNVKNLLEFAETLQFIDSFLNTSSNHENSDLEMPSLTSTPLIGHKLTVTTPFHRDQTVKTQKENTVFRTPAIKRSILESSPRTPTPFKHALAAQEIKYGPLKMLPQTPSHLVEDLQDVIKQESDESGIVAEFQENGPPLLKKIKQEVESPTDKSGNFFCSHHWEGDSLNTQLFTQTSPVADAPNILTSSVLMAPASEDEDNVLKAFTVPKNRSLASPLQPCSSTWEPASCGKMEEQMTSSSQARKYVNAFSARTLVM

SEQ ID NO: 32508 - protein, 603 aa, Homo sapiens
MARRPRHSIYSSDEDDEDFEMCDHDYDGLLPKSGKRHLGKTRWTREEDEKLKKLVEQNGTDDWKVIANYLPNRTDVQCQHRWQKVLNPELIKGPWTKEEDQRVIELVQKYGPKRWSVIAKHLKGRIGKQCRERWHNHLNPEVKKTSWTEEEDRIIYQAHKRLGNRWAEIAKLLPGRTDNAIKNHWNSTMRRKVEQEGYLQESSKASQPAVATSFQKNSHLMGFAQAPPTAQLPATGQPTVNNDYSYYHISEAQNVSSHVPYPVALHVNIVNVPQPAAAAIQRHYNDEDPEKEKRIKELELLLMSTENELKGQQVLPTQNHTCSYPGWHSTTIADHTRPHGDSAPVSCLGEHHSTPSLPADPGSLPEESASPARCMIVHQGTILDNVKNLLEFAETLQFIDSFLNTSSNHENSDLEMPSLTSTPLIGHKLTVTTPFHRDQTVKTQKENTVFRTPAIKRSILESSPRTPTPFKHALAAQEIKYGPLKMLPQTPSHLVEDLQDVIKQESDESGIVAEFQENGPPLLKKIKQENILTSSVLMAPASEDEDNVLKAFTVPKNRSLASPLQPCSSTWEPASCGKMEEQMTSSSQARKYVNAFSARTLVM

SEQ ID NO: 32509 - protein, 555 aa, Homo sapiens
MARRPRHSIYSSDEDDEDFEMCDHDYDGLLPKSGKRHLGKTRWTREEDEKLKKLVEQNGTDDWKVIANYLPNRTDVQCQHRWQKVLNPELIKGPWTKEEDQRVIELVQKYGPKRWSVIAKHLKGRIGKQCRERWHNHLNPEVKKTSWTEEEDRIIYQAHKRLGNRWAEIAKLLPGRTDNAIKNHWNSTMRRKVEQEGYLQESSKASQPAVATSFQKNSHLMGFAQAPPTAQLPATGQPTVNNDYSYYHISEAQNVSSHVPYPVALHVNIVNVPQPAAAAIQRHYNDEDPEKEKRIKELELLLMSTENELKGQQVLPFLNTSSNHENSDLEMPSLTSTPLIGHKLTVTTPFHRDQTVKTQKENTVFRTPAIKRSILESSPRTPTPFKHALAAQEIKYGPLKMLPQTPSHLVEDLQDVIKQESDESGIVAEFQENGPPLLKKIKQEVESPTDKSGNFFCSHHWEGDSLNTQLFTQTSPVADAPNILTSSVLMAPASEDEDNVLKAFTVPKNRSLASPLQPCSSTWEPASCGKMEEQMTSSSQARKYVNAFSARTLVM

SEQ ID NO: 32510 - protein, 323 aa, Homo sapiens
MARRPRHSIYSSDEDDEDFEMCDHDYDGLLPKSGKRHLGKTRWTREEDEKLKKLVEQNGTDDWKVIANYLPNRTDVQCQHRWQKVLNPELIKGPWTKEEDQRVIELVQKYGPKRWSVIAKHLKGRIGKQCRERWHNHLNPEVKKTSWTEEEDRIIYQAHKRLGNRWAEIAKLLPGRTDNAIKNHWNSTMRRKVEQEGYLQESSKASQPAVATSFQKNSHLMGFAQAPPTAQLPATGQPTVNNDYSYYHISEAQNVSSHVPYPVALHVNIVNVPQPAAAAIQRHYNDEDPEKEKRIKELELLLMSTENELKGQQVLPVRLSSCA

SEQ ID NO: 32511 - protein, 245 aa, Homo sapiens
MNGRADFREPNAEVPRPIPHIGPDYIPTEEERRVFAECNDESFWFRSVPLAATSMLITQGLISKGILSSHPKYGSIPKLILACIMGYFAGKLSYVKTCQEKFKKLENSPLGEALRSGQARRSSPPGHYYQKSKYDSSVSGQSSFVTSPAADNIEMLPHYEPIPFSSSMNESAPTGITDHIVQGPDPNLEESPKRKNITYEELRNKNRESYEVSLTQKTDPSVRPMHERVPKKEVKVNKYGDTWDE

SEQ ID NO: 32512 - protein, 187 aa, Homo sapiens
MNGRADFREPNAEVPRPIPHIGPDYIPTEEERRVFAECNDESFWFRSVPLAATSMLITQGLISKGILSSHPKYGSIPKLILACIMGYFAGKLSYVKTCQEKFKKLENSPLGEALRSGQARRSSPPGHYYQKSKYDSSVSGQSSFVTSPAADNIEMLPHYEPIPFSSSMNESAPTGITDHIVQGRNFS

SEQ ID NO: 32513 - protein, 187 aa, Homo sapiens
MNGRADFREPNAEVPRPIPHIGPDYIPTEEERRVFAECNDESFWFRSVPLAATSMLITQGLISKGILSSHPKYGSIPKLILACIMGYFAGKLSYVKTCQEKFKKLENSPLGEALRSGQARRSSPPGHYYQKSKYDSSVSGQSSFVTSPAADNIEMLPHYEPIPFSSSMNESAPTGITDHIVQGPDPN

SEQ ID NO: 32514 - protein, 194 aa, Homo sapiens
MNGRADFREPNAEVPRPIPHIGPDYIPTEEERRVFAECNDESFWFRSVPLAATSMLITQGLISKGILSSHPKYGSIPKLILACIMGYFAGKLSYVKTCQEKFKKLENSPLGEALRSGQARRSSPPGHYYQKSKYDSSVSGQSSFVTSPAADNIEMLPHYEPIPFSSSMNESAPTGITDHIVQVKVNKYGDTWDE

SEQ ID NO: 32515 - protein, 313 aa, Homo sapiens
METANYTKVTEFVLTGLSQTPEVQLVLFVIFLSFYLFILPGNILIICTISLDPHLTSPMYFLLANLAFLDIWYSSITAPEMLIDFFVERKIISFDECIAQLFFLHFAGASEMFLLTVMAFDLYTAICRPLHYATIMNQRLCCILVALSWRGGFIHSIIQVALIVRLPFCGPNELDSYFCDITQVVRIACANTFPEELVMICSSGLISVVCLIALLMSYAFLLALLKKLSGSGENTNRAVSTCYSHITIVVLMFGPSIYIYARPFDSFSLDKVVSVFNTLIFPLHNPIIYTLRNKEVKAAMRKLVTKYILCKEK

SEQ ID NO: 32516 - protein, 314 aa, Homo sapiens
MLMNYSSATEFYLLGFPGSEELHHILFAIFFFFYLVTLMGNTVIIMIVCVDKRLQSPMYFFLGHLSALEILVTTIIVPVMLWGLLLPGMQTIYLSACVVQLFLYLAVGTTEFALLGAMAVDRYVAVCNPLRYNIIMNRHTCNFVVLVSWVFGFLFQIWPVYVMFQLTYCKSNVVNNFFCDRGQLLKLSCNNTLFTEFILFLMAVFVLFGSLIPTIVSNAYIISTILKIPSSSGRRKSFSTCASHFTCVVIGYGSCLFLYVKPKQTQAADYNWVVSLMVSVVTPFLNPFIFTLRNDKVIEALRDGVKRCCQLFRN

SEQ ID NO: 32517 - protein, 392 aa, Homo sapiens
MAVVAAAAGWLLRLRAAGAEGHWRRLPGAGLARGFLHPAATVEDAAQRRQVAHFTFQPDPEPREYGQTQKMNLFQSVTSALDNSLAKDPTAVIFGEDVAFGGVFRCTVGLRDKYGKDRVFNTPLCEQGIVGFGIGIAVTGATAIAEIQFADYIFPAFDQIVNEAAKYRYRSGDLFNCGSLTIRSPWGCVGHGALYHSQSPEAFFAHCPGIKVVIPRSPFQAKGLLLSCIEDKNPCIFFEPKILYRAAAEEVPIEPYNIPLSQAEVIQEGSDVTLVAWGTQVHVIREVASMAKEKLGVSCEVIDLRTIIPWDVDTICKSVIKTGRLLISHEAPLTGGFASEISSTVQEECFLNLEAPISRVCGYDTPFPHIFEPFYIPDKWKCYDALRKMINY

SEQ ID NO: 32518 - protein, 218 aa, Homo sapiens
MAVVAAAAGWLLRLRAAGAEGHWRRLPGAGLARGFLHPAATVEDAAQRRQVAHFTFQPDPEPREYGQTQKMNLFQSVTSALDNSLAKDPTAVIFGEDVAFGGVFRCTVGLRDKYGKDRVFNTPLCEQGIVGFGIGIAVTGATAIAEIQFADYIFPAFDQIVNEAAKYRYRSGDLFNCGSLTIRSPWGCVGHGALYHSQSPEAFFAHCPGIKIKVISLS

SEQ ID NO: 32519 - protein, 559 aa, Homo sapiens
MVEKILIHRILTLFPNAIARKLLLMLTFILIFWIIYLASKDHTKFSFNLENHIILNQGNIFKKYSHSETPLCPAVSPKETELRIKDIMEKLDQQIPPRPFTHVNTTTSATHSTATILNPQDTYCRGDQLDILLEVRDHLGHRKQYGGDFLRARMYSTALMAGASGKVTDFNNGTYLVSFTLFWEGQVSLSLLLIHPSEGVSALWRARNQGCDRIIFTGLFANRSSNVFTECGLTLNTNAELCQYMDDRDQEAFYCVRPQHMPCEALTHMTTRTRNISYLSKEEWRLFHRSNIGVEMMKNFTPIEVIPCNKSENIKKNCQIGMKTPFPSGYTLKKMWITAFCKQIKFNETKNINDCLERKLIYLMGDSTLHQWIYYLQKAVKTLKYFDHHGAGIFKTHVLLDVERHILIQWKKHGHPFVTKKLFSVKDENYIPREIDQVAGDKNTAIVITLGQHFRPFPINIFIRRAINIQKAIERLFLRSPETKVILKTENTREIEQNAEMFSDFHGYIQNLIIRDIFVDLNVGIIDAWDMTIAYCTNNAHPPDYVIQNQIGMFLNYIC

SEQ ID NO: 32520 - protein, 365 aa, Homo sapiens
MVEKILIHRILTLFPNAIARKLLLMLTFILIFWIIYLASKDHTKFSFNLENHIILNQGNIFKKYSHSETPLCPAVSPKETELRIKDIMEKLDQQIPPRPFTHVNTTTSATHSTATILNPQDTYCRGDQLDILLEVRDHLGHRKQYGGDFLRARMYSTALMAGASGKVTDFNNGTYLVSFTLFWEGQVSLSLLLIHPSEGVSALWRARNQGCDRIIFTGLFANRSSNVFTECGLTLNTNAELCQYMDDRDQEAFYCVRPQHMPCEALTHMTTRTRNISYLSKEEWRLFHRSNIGVEMMKNFTPIEVIPCPALFYFIFRDSLTLSPRLECSGMISAHCNLCLPGSSDSPDSASHVAGITSVQRHTWL

SEQ ID NO: 32521 - protein, 887 aa, Homo sapiens
MMSDEKNLGVSQKLVSPSRSTSSCSSKQGSRQDSWEVVEGLRGEMNYTQEPPVQKGFLLKKRKWPLKGWHKRFFYLDKGILKYAKSQTDIEREKLHGCIDVGLSVMSVKKSSKCIDLDTEEHIYHLKVKSEEVFDEWVSKLRHHRMYRQNEIAMFPHEVNHFFSGSTITDSSSGVFDSISSRKRSSISKQNLFQTGSNVSFSCGGETRVPLWLQSSEDMEKCSKDLAHCHAYLVEMSQLLQSMDVLHRTYSAPAINAIQGGSFESPKKEKRSHRRWRSRAIGKDAKGTLQVPKPFSGPVRLHSSNPNLSTLDFGEEKNYSDGSETSSEFSKMQEDLCHIAHKVYFTLRSAFNIMSAEREKLKQLMEQDASSSPSAQVIGLKNALSSALAQNTDLKERLRRIHAESLLLDSPAVAKSGDNLAEENSRDENRALVHQLSNESRLSITDSLSEFFDAQEVLLSPSSSENEISDDDSYVSDISDNLSLDNLSNDLDNERQTLGPVLDSGREAKSRRRTCLPAPCPSSSNISLWNILRNNIGKDLSKVAMPVELNEPLNTLQRLCEELEYSELLDKAAQIPSPLERMVYVAAFAISAYASSYYRAGSKPFNPVLGETYECIREDKGFQFFSEQVSHHPPISACHAESRNFVFWQDVRWKNKFWGKSMEIVPIGTTHVTLPVFGDHFEWNKVTSCIHNILSGQRWIEHYGEIVIKNLHDDSCYCKVNFIKAKYWSTNAHEIEGTVFDRSGKAVHRLFGKWHESIYCGGGSSSACVWRANPMPKGYEQYYSFTQFALELNEMDPSSKSLLPPTDTRFRPDQRFLEEGNLEEAEIQKQRIEQLQRERRRVLEENHVEHQPRFFRKSDDDSWVSNGTYLELRKDLGFSKLDHPVLW

SEQ ID NO: 32522 - protein, 856 aa, Homo sapiens
MMSDEKNLGVSQKLVSPSRSTSSCSSKQGSRQDSWEVVEGLRGEMNYTQEPPVQKGFLLKKRKWPLKGWHKRFFYLDKGILKYAKSQTDIEREKLHGCIDVGLSVMSVKKSSKCIDLDTEEHIYHLKVKSEEVFDEWVSKLRHHRMYRQNEIAMFPHEVNHFFSGSTITDSSSGVFDSISSRKRSSISKQNLFQTGSNVSFSCGGETRVPLWLQSSEDMEKCSKDLAHCHAYLVEMSQLLQSMDVLHRTYSAPAINAIQVPKPFSGPVRLHSSNPNLSTLDFGEEKNYSDGSETSSEFSKMQEDLCHIAHKVYFTLRSAFNIMSAEREKLKQLMEQDASSSPSAQVIGLKNALSSALAQNTDLKERLRRIHAESLLLDSPAVAKSGDNLAEENSRDENRALVHQLSNESRLSITDSLSEFFDAQEVLLSPSSSENEISDDDSYVSDISDNLSLDNLSNDLDNERQTLGPVLDSGREAKSRRRTCLPAPCPSSSNISLWNILRNNIGKDLSKVAMPVELNEPLNTLQRLCEELEYSELLDKAAQIPSPLERMVYVAAFAISAYASSYYRAGSKPFNPVLGETYECIREDKGFQFFSEQVSHHPPISACHAESRNFVFWQDVRWKNKFWGKSMEIVPIGTTHVTLPVFGDHFEWNKVTSCIHNILSGQRWIEHYGEIVIKNLHDDSCYCKVNFIKAKYWSTNAHEIEGTVFDRSGKAVHRLFGKWHESIYCGGGSSSACVWRANPMPKGYEQYYSFTQFALELNEMDPSSKSLLPPTDTRFRPDQRFLEEGNLEEAEIQKQRIEQLQRERRRVLEENHVEHQPRFFRKSDDDSWVSNGTYLELRKDLGFSKLDHPVLW

SEQ ID NO: 32523 - protein, 851 aa, Homo sapiens
MMSDEKNLGVSQKLVSPSRSTSSCSSKQGSRQDSWEVVEGLRGEMNYTQEPPVQKGFLLKKRKWPLKGWHKRFFYLDKGILKYAKSQTDIEREKLHGCIDVGLSVMSVKKSSKCIDLDTEEHIYHLKVKSEEVFDEWVSKLRHHRMYRQNEIAMFPHEVNHFFSGSTITDSSSGVFDSISSRKRSSISKQNLFQTGSNVSFSCGGETRVPLWLQSSEDMEKCSKDLAHCHAYLVEMSQLLQSMDVLHRTYSAPAINAIQGGSFESPKKEKRSHRRWRSRAIGKDAKGTLQVPKPFSGPVRLHSSNPNLSTLDFGEEKNYSDGSETSSEFSKMQEDLCHIAHKVYFTLRSAFNIMSAEREKLKQLMEQDASSSPSAQVIGLKNALSSENSRDENRALVHQLSNESRLSITDSLSEFFDAQEVLLSPSSSENEISDDDSYVSDISDNLSLDNLSNDLDNERQTLGPVLDSGREAKSRRRTCLPAPCPSSSNISLWNILRNNIGKDLSKVAMPVELNEPLNTLQRLCEELEYSELLDKAAQIPSPLERMVYVAAFAISAYASSYYRAGSKPFNPVLGETYECIREDKGFQFFSEQVSHHPPISACHAESRNFVFWQDVRWKNKFWGKSMEIVPIGTTHVTLPVFGDHFEWNKVTSCIHNILSGQRWIEHYGEIVIKNLHDDSCYCKVNFIKAKYWSTNAHEIEGTVFDRSGKAVHRLFGKWHESIYCGGGSSSACVWRANPMPKGYEQYYSFTQFALELNEMDPSSKSLLPPTDTRFRPDQRFLEEGNLEEAEIQKQRIEQLQRERRRVLEENHVEHQPRFFRKSDDDSWVSNGTYLELRKDLGFSKLDHPVLW

SEQ ID NO: 32524 - protein, 820 aa, Homo sapiens
MMSDEKNLGVSQKLVSPSRSTSSCSSKQGSRQDSWEVVEGLRGEMNYTQEPPVQKGFLLKKRKWPLKGWHKRFFYLDKGILKYAKSQTDIEREKLHGCIDVGLSVMSVKKSSKCIDLDTEEHIYHLKVKSEEVFDEWVSKLRHHRMYRQNEIAMFPHEVNHFFSGSTITDSSSGVFDSISSRKRSSISKQNLFQTGSNVSFSCGGETRVPLWLQSSEDMEKCSKDLAHCHAYLVEMSQLLQSMDVLHRTYSAPAINAIQVPKPFSGPVRLHSSNPNLSTLDFGEEKNYSDGSETSSEFSKMQEDLCHIAHKVYFTLRSAFNIMSAEREKLKQLMEQDASSSPSAQVIGLKNALSSENSRDENRALVHQLSNESRLSITDSLSEFFDAQEVLLSPSSSENEISDDDSYVSDISDNLSLDNLSNDLDNERQTLGPVLDSGREAKSRRRTCLPAPCPSSSNISLWNILRNNIGKDLSKVAMPVELNEPLNTLQRLCEELEYSELLDKAAQIPSPLERMVYVAAFAISAYASSYYRAGSKPFNPVLGETYECIREDKGFQFFSEQVSHHPPISACHAESRNFVFWQDVRWKNKFWGKSMEIVPIGTTHVTLPVFGDHFEWNKVTSCIHNILSGQRWIEHYGEIVIKNLHDDSCYCKVNFIKAKYWSTNAHEIEGTVFDRSGKAVHRLFGKWHESIYCGGGSSSACVWRANPMPKGYEQYYSFTQFALELNEMDPSSKSLLPPTDTRFRPDQRFLEEGNLEEAEIQKQRIEQLQRERRRVLEENHVEHQPRFFRKSDDDSWVSNGTYLELRKDLGFSKLDHPVLW

SEQ ID NO: 32525 - protein, 642 aa, Homo sapiens
MMSDEKNLGVSQKLVSPSRSTSSCSSKQGSRQDSWEVVEGLRGEMNYTQEPPVQKGFLLKKRKWPLKGWHKRFFYLDKGILKYAKSQTDIEREKLHGCIDVGLSVMSVKKSSKCIDLDTEEHIYHLKVKSEEVFDEWVSKLRHHRMYRQNEIAMFPHEVNHFFSGSTITDSSSGVFDSISSRKRSSISKQNLFQTGSNVSFSCGGETRVPLWLQSSEDMEKCSKDLAHCHAYLVEMSQLLQSMDVLHRTYSAPAINAIQGGSFESPKKEKRSHRRWRSRAIGKDAKGTLQVPKPFSGPVRLHSSNPNLSTLDFGEEKNYSDGSETSSEFSKMQEDLCHIAHKVYFTLRSAFNIMSAEREKLKQLMEQDASSSPSAQVIGLKNALSSALAQNTDLKERLRRIHAESLLLDSPAVAKSGDNLAEENSRDENRALVHQLSNESRLSITDSLSEFFDAQEVLLSPSSSENEISDDDSYVSDISDNLSLDNLSNDLDNERQTLGPVLDSGREAKSRRRTCLPAPCPSSSNISLWNILRNNIGKDLSKVAMPVELNEPLNTLQRLCEELEYSELLDKAAQIPSPLERMVRSQPSLATVQPRSPSHEAIHGAHQRDSPCSLRFHFDCSVNRFITQSCLASSAWLFPVTL

SEQ ID NO: 32526 - protein, 611 aa, Homo sapiens
MMSDEKNLGVSQKLVSPSRSTSSCSSKQGSRQDSWEVVEGLRGEMNYTQEPPVQKGFLLKKRKWPLKGWHKRFFYLDKGILKYAKSQTDIEREKLHGCIDVGLSVMSVKKSSKCIDLDTEEHIYHLKVKSEEVFDEWVSKLRHHRMYRQNEIAMFPHEVNHFFSGSTITDSSSGVFDSISSRKRSSISKQNLFQTGSNVSFSCGGETRVPLWLQSSEDMEKCSKDLAHCHAYLVEMSQLLQSMDVLHRTYSAPAINAIQVPKPFSGPVRLHSSNPNLSTLDFGEEKNYSDGSETSSEFSKMQEDLCHIAHKVYFTLRSAFNIMSAEREKLKQLMEQDASSSPSAQVIGLKNALSSALAQNTDLKERLRRIHAESLLLDSPAVAKSGDNLAEENSRDENRALVHQLSNESRLSITDSLSEFFDAQEVLLSPSSSENEISDDDSYVSDISDNLSLDNLSNDLDNERQTLGPVLDSGREAKSRRRTCLPAPCPSSSNISLWNILRNNIGKDLSKVAMPVELNEPLNTLQRLCEELEYSELLDKAAQIPSPLERMVRSQPSLATVQPRSPSHEAIHGAHQRDSPCSLRFHFDCSVNRFITQSCLASSAWLFPVTL

SEQ ID NO: 32527 - protein, 606 aa, Homo sapiens
MMSDEKNLGVSQKLVSPSRSTSSCSSKQGSRQDSWEVVEGLRGEMNYTQEPPVQKGFLLKKRKWPLKGWHKRFFYLDKGILKYAKSQTDIEREKLHGCIDVGLSVMSVKKSSKCIDLDTEEHIYHLKVKSEEVFDEWVSKLRHHRMYRQNEIAMFPHEVNHFFSGSTITDSSSGVFDSISSRKRSSISKQNLFQTGSNVSFSCGGETRVPLWLQSSEDMEKCSKDLAHCHAYLVEMSQLLQSMDVLHRTYSAPAINAIQGGSFESPKKEKRSHRRWRSRAIGKDAKGTLQVPKPFSGPVRLHSSNPNLSTLDFGEEKNYSDGSETSSEFSKMQEDLCHIAHKVYFTLRSAFNIMSAEREKLKQLMEQDASSSPSAQVIGLKNALSSENSRDENRALVHQLSNESRLSITDSLSEFFDAQEVLLSPSSSENEISDDDSYVSDISDNLSLDNLSNDLDNERQTLGPVLDSGREAKSRRRTCLPAPCPSSSNISLWNILRNNIGKDLSKVAMPVELNEPLNTLQRLCEELEYSELLDKAAQIPSPLERMVRSQPSLATVQPRSPSHEAIHGAHQRDSPCSLRFHFDCSVNRFITQSCLASSAWLFPVTL

SEQ ID NO: 32528 - protein, 575 aa, Homo sapiens
MMSDEKNLGVSQKLVSPSRSTSSCSSKQGSRQDSWEVVEGLRGEMNYTQEPPVQKGFLLKKRKWPLKGWHKRFFYLDKGILKYAKSQTDIEREKLHGCIDVGLSVMSVKKSSKCIDLDTEEHIYHLKVKSEEVFDEWVSKLRHHRMYRQNEIAMFPHEVNHFFSGSTITDSSSGVFDSISSRKRSSISKQNLFQTGSNVSFSCGGETRVPLWLQSSEDMEKCSKDLAHCHAYLVEMSQLLQSMDVLHRTYSAPAINAIQVPKPFSGPVRLHSSNPNLSTLDFGEEKNYSDGSETSSEFSKMQEDLCHIAHKVYFTLRSAFNIMSAEREKLKQLMEQDASSSPSAQVIGLKNALSSENSRDENRALVHQLSNESRLSITDSLSEFFDAQEVLLSPSSSENEISDDDSYVSDISDNLSLDNLSNDLDNERQTLGPVLDSGREAKSRRRTCLPAPCPSSSNISLWNILRNNIGKDLSKVAMPVELNEPLNTLQRLCEELEYSELLDKAAQIPSPLERMVRSQPSLATVQPRSPSHEAIHGAHQRDSPCSLRFHFDCSVNRFITQSCLASSAWLFPVTL

SEQ ID NO: 32529 - protein, 309 aa, Homo sapiens
MTQINCTQVTEFILVGLTDRQELKMPLFVLFLSIYLFTVVGNLGLILLIRTDEKLNTPMYFFLSNLAFVDFCYSSVITPKMLGNFLYKQNSISFNACAAQLGCFLAFMTAECLLLASMAYDRYVAICNPLMYMVVMSPGICIQLVAAPHSYSILVALFHTILTFRLSYCHSNIVNHFYCDDMPLLRLTCSDTRFKQLWIFACAGIMFISSLLIVFVSYMFIISAILRMHSAEGRQKAFSTCGSHMLAVTIFYGTLIFMYLQPSSSHALDTDKMASVFYTVIIPMLNPLIYSLQNKEVKEALKKIIINKN

SEQ ID NO: 32530 - protein, 310 aa, Homo sapiens
MDWENCSSLTDFFLLGITNNPEMKVTLFAVFLAVYIINFSANLGMIVLIRMDYQLHTPMYFFLSHLSFCDLCYSTATGPKMLVDLLAKNKSIPFYGCALQFLVFCIFADSECLLLSVMAFDRYKAIINPLLYTVNMSSRVCYLLLTGVYLVGIADALIHMTLAFRLCFCGSNEINHFFCDIPPLLLLSRSDTQVNELVLFTVFGFIELSTISGVFISYCYIILSVLEIHSAEGRFKALSTCTSHLSAVAIFQGTLLFMYFRPSSSYSLDQDKMTSLFYTLVVPMLNPLIYSLRNKDVKEALKKLKNKILF

SEQ ID NO: 32531 - protein, 123 aa, Homo sapiens
MKTILGFKGLFYLHSLIWTCAGDWSAIQVHCTQFWFFARIKPTIFYNLYVNPDEVFLGDGCHVTHVLPNVYYEFFYHPHDCGIVTQPLQEVLLLKTKIRYISRDSTVRSEMPLSCVVHKQKCQ

SEQ ID NO: 32532 - protein, 315 aa, Homo sapiens
MEIVSTGNETITEFVLLGFYDIPELHFLFFIVFTAVYVFIIIGNMLIIVAVVSSQRLHKPMYIFLANLSFLDILYTSAVMPKMLEGFLQEATISVAGCLLQFFIFGSLATAECLLLAVMAYDRYLAICYPLHYPLLMGPRRYMGLVVTTWLSGFVVDGLVVALVAQLRFCGPNHIDQFYCDFMLFVGLACSDPRVAQVTTLILSVFCLTIPFGLILTSYARIVVAVLRVPAGASRRRAFSTCSSHLAVVTTFYGTLMIFYVAPSAVHSQLLSKVFSLLYTVVTPLFNPVIYTMRNKEVHQALRKILCIKQTETLD

SEQ ID NO: 32533 - protein, 302 aa, Homo sapiens
MTNLNASQANHRNFILTGIPGTPDKNPWLAFPLGFLYTLTLLGNGTILAVIKVEPSLHEPTYYFLSILALTDVSLSMSTLPSMLSIYWFNAPQIVFDACIMQMFFIHVFGIVESGVLVSMAFDRFVAIRNPLHYVSILTHDVIRKTGIAVLTRAVCVVFPVPFLIKCLPFCHSNVLSHSYCLHQNMMRLACASTRINSLYGLIVVIFTLGLDVLLTLLSYVLTLKTVLGIVSRGERLKTLSTCLSHMSTVLLFYVPFMGAASMIHRFWEHLSPVVHMVMADIYLLLPPVLNPIVYSVKTKQI

SEQ ID NO: 32534 - protein, 309 aa, Homo sapiens
MANLTIVTEFILMGFSTNKNMCILHSILFLLIYLCALMGNVLIIMITTLDHHLHTPVYFFLKNLSFLDLCLISVTAPKSIANSLIHNNSISFLGCVSQVFLLLSSASAELLLLTVMSFDRYTAICHPLHYDVIMDRSTCVQRATVSWLYGGLIAVMHTAGTFSLSYCGSNMVHQFFCDIPQLLAISCSENLIREIALILINVVLDFCCFIVIIITYVHVFSTVKKIPSTEGQSKAYSICLPHLLVVLFLSTGFIAYLKPASESPSILDAVISVFYTMLPPTFNPIIYSLRNKAIKVALGMLIKGKLTKK

SEQ ID NO: 32535 - protein, 277 aa, Homo sapiens
MAADGERSPLLSEPIDGGAGGNGLVGPGGSGAGPGGGLTPSAPPYGAAFPPFPEGHPAVLPGEDPPPYSPLTSPDSGSAPMITCRVCQSLINVEGKMHQHVVKCGVCNEATPIKNAPPGKKYVRCPCNCLLICKVTSQRIACPRPYCKRIINLGPVHPGPLSPEPQPMGVRVICGHCKNTFLWTEFTDRTLARCPHCRKVSSIGRRYPRKRCICCFLLGLLLAVTATGLAFGTWKHARRYGGIYAAWAFVILLAVLCLGRALYWACMKVSHPVQNFS

SEQ ID NO: 32536 - protein, 284 aa, Homo sapiens
MAADGERSPLLSEPIDGGAGGNGLVGPGGSGAGPGGGLTPSAPPYGAGKHAPPQAFPPFPEGHPAVLPGEDPPPYSPLTSPDSGSAPMITCRVCQSLINVEGKMHQHVVKCGVCNEATPIKNAPPGKKYVRCPCNCLLICKVTSQRIACPRPYCKRIINLGPVHPGPLSPEPQPMGVRVICGHCKNTFLWTEFTDRTLARCPHCRKVSSIGRRYPRKRCICCFLLGLLLAVTATGLAFGTWKHARRYGGIYAAWAFVILLAVLCLGRALYWACMKVSHPVQNFS

SEQ ID NO: 32537 - protein, 149 aa, Homo sapiens
MAADGERSPLLSEPIDGGAGGNGLVGPGGSGAGPGGGLTPSAPPYGAGKHAPPQGKPGRVRGAPRGTLKAGEGAGPRAEAGPSRQVRDCCTCDWARLPSLRNRDHSLGTEGGSEQPDRSANYEKPSELGQRVEDQKDFPTTVEHQWGCK

SEQ ID NO: 32538 - protein, 196 aa, Homo sapiens
MFCEKAMELIRELHRAPEGQLPAFNEDGLRQVLEEMKALYEQNQSDVNEAKSGGRSDLIPTIKFRHCSLLRNRRCTVAYLYDRLLRIRALRWEYGSVLPNALRFHMAAEEMEWFNNYKRSLATYMRSLGGDEGLDITQDMKPPKSLYIEVRCLKDYGEFEVDDGTSVLLKKNSQHFLPRWKCEQLIRQGVLEHILS

SEQ ID NO: 32539 - protein, 337 aa, Homo sapiens
MNSTCIEEQHDLDHYLFPIVYIFVIIVSIPANIGSLCVSFLQAKKESELGIYLFSLSLSDLLYALTLPLWIDYTWNKDNWTFSPALCKGSAFLMYMNFYSSTAFLTCIAVDRYLAVVYPLKFFFLRTRRFALMVSLSIWILETIFNAVMLWEDETVVEYCDAEKSNFTLCYDKYPLEKWQINLNLFRTCTGYAIPLVTILICNRKVYQAVRHNKATENKEKKRIIKLLVSITVTFVLCFTPFHVMLLIRCILEHAVNFEDHSNSGKRTYTMYRITVALTSLNCVADPILYCFVTETGRYDMWNILKFCTGRCNTSQRQRKRILSVSTKDTMELEVLE

SEQ ID NO: 32540 - protein, 523 aa, Homo sapiens
MMLRGNLKQVRIEKNPARLRALESAVGESEPAAAAAMALALAGEPAPPAPAPPEDHPDEEMGFTIDIKSFLKPGEKTYTQRCRLFVGNLPTDITEEDFKRLFERYGEPSEVFINRDRGFGFIRLESRTLAEIAKAELDGTILKSRPLRIRFATHGAALTVKNLSPVVSNELLEQAFSQFGPVEKAVVVVDDRGRATGKGFVEFAAKPPARKALERCGDGAFLLTTTPRPVIVEPMEQFDDEDGLPEKLMQKTQQYHKEREQPPRFAQPGTFEFEYASRWKALDEMEKQQREQVDRNIREAKEKLEAEMEAARHEHQLMLMRQDLMRRQEELRRLEELRNQELQKRKQIQLRHEEEHRRREEEMIRHREQEELRRQQEGFKPNYMENREQEMRMGDMGPRGAINMGDAFSPAPAGNQGPPPMMGMNMNNRATIPGPPMGPGPAMGPEGAANMGTPMMPDNGAVHNDRFPQGPPSQMGSPMGSRTGSETPQAPMSGVGPVSGGPGGFGRGSQGGNFEGPNKRRRY

SEQ ID NO: 32541 - protein, 393 aa, Homo sapiens
MMLRGNLKQVRIEKNPARLRALESAVGESEPAAAAAMALALAGEPAPPAPAPPEDHPDEEMGFTIDIKSFLKPGEKTYTQRCRLFVGNLPTDITEEDFKRLFERYGEPSEVFINRDRGFGFIRLESRTLAEIAKAELDGTILKSRPLRIRFATHGAALTVKNLSPVVSNELLEQAFSQFGPVEKAVVVVDDRGRATGKGFVEFAAKPPARKALERCGDGAFLLTTTPRPVIVEPMEQFDDEDGLPEKLMQKTQQYHKEREQPPRFAQPGTFEFEYASRWKALDEMEKQQREQVDRNIREAKEKLEAEMEAARHEHQLMLMRQDLMRRQEELRRLEELRNQELQKRKQIQLRHEEEHRRREEEMIRHREQEELRRQQEGFKPNYMENGDKRKCG

SEQ ID NO: 32542 - protein, 883 aa, Homo sapiens
MQKIMHISVLLSPVLWGLIFGVSSNSIQIGGLFPRGADQEYSAFRVGMVQFSTSEFRLTPHIDNLEVANSFAVTNAFCSQFSRGVYAIFGFYDKKSVNTITSFCGTLHVSFITPSFPTDGTHPFVIQMRPDLKGALLSLIEYYQWDKFAYLYDSDRGLSTLQAVLDSAAEKKWQVTAINVGNINNDKKDEMYRSLFQDLELKKERRVILDCERDKVNDIVDQVITIGKHVKGYHYIIANLGFTDGDLLKIQFGGANVSGFQIVDYDDSLVSKFIERWSTLEEKEYPGAHTTTIKYTSALTYDAVQVMTEAFRNLRKQRIEISRRGNAGDCLANPAVPWGQGVEIERALKQVQVEGLSGNIKFDQNGKRINYTINIMELKTNGPRKIGYWSEVDKMVVTLTELPSGNDTSGLENKTVVVTTILESPYVMMKKNHEMLEGNERYEGYCVDLAAEIAKHCGFKYKLTIVGDGKYGARDADTKIWNGMVGELVYGKADIAIAPLTITLVREEVIDFSKPFMSLGISIMIKKPQKSKPGVFSFLDPLAYEIWMCIVFAYIGVSVVLFLVSRFSPYEWHTEEFEDGRETQSSESTNEFGIFNSLWFSLGAFMQQGCDISPRSLSGRIVGGVWWFFTLIIISSYTANLAAFLTVERMVSPIESAEDLSKQTEIAYGTLDSGSTKEFFRRSKIAVFDKMWTYMRSAEPSVFVRTTAEGVARVRKSKGKYAYLLESTMNEYIEQRKPCDTMKVGGNLDSKGYGIATPKGSSLRNAVNLAVLKLNEQGLLDKLKNKWWYDKGECGSGGGDSKEKTSALSLSNVAGVFYILVGGLGLAMLVALIEFCYKSRAEAKRMKVAKNAQNINPSSSQNSQNFATYKEGYNVYGIESVKI

SEQ ID NO: 32543 - protein, 883 aa, Homo sapiens
MQKIMHISVLLSPVLWGLIFGVSSNSIQIGGLFPRGADQEYSAFRVGMVQFSTSEFRLTPHIDNLEVANSFAVTNAFCSQFSRGVYAIFGFYDKKSVNTITSFCGTLHVSFITPSFPTDGTHPFVIQMRPDLKGALLSLIEYYQWDKFAYLYDSDRGLSTLQAVLDSAAEKKWQVTAINVGNINNDKKDEMYRSLFQDLELKKERRVILDCERDKVNDIVDQVITIGKHVKGYHYIIANLGFTDGDLLKIQFGGANVSGFQIVDYDDSLVSKFIERWSTLEEKEYPGAHTTTIKYTSALTYDAVQVMTEAFRNLRKQRIEISRRGNAGDCLANPAVPWGQGVEIERALKQVQVEGLSGNIKFDQNGKRINYTINIMELKTNGPRKIGYWSEVDKMVVTLTELPSGNDTSGLENKTVVVTTILESPYVMMKKNHEMLEGNERYEGYCVDLAAEIAKHCGFKYKLTIVGDGKYGARDADTKIWNGMVGELVYGKADIAIAPLTITLVREEVIDFSKPFMSLGISIMIKKPQKSKPGVFSFLDPLAYEIWMCIVFAYIGVSVVLFLVSRFSPYEWHTEEFEDGRETQSSESTNEFGIFNSLWFSLGAFMQQGCDISPRSLSGRIVGGVWWFFTLIIISSYTANLAAFLTVERMVSPIESAEDLSKQTEIAYGTLDSGSTKEFFRRSKIAVFDKMWTYMRSAEPSVFVRTTAEGVARVRKSKGKYAYLLESTMNEYIEQRKPCDTMKVGGNLDSKGYGIATPKGSSLRTPVNLAVLKLSEQGVLDKLKNKWWYDKGECGAKDSGSKEKTSALSLSNVAGVFYILVGGLGLAMLVALIEFCYKSRAEAKRMKVAKNAQNINPSSSQNSQNFATYKEGYNVYGIESVKI

SEQ ID NO: 32544 - protein, 901 aa, Homo sapiens
MQKIMHISVLLSPVLWGLIFGVSSNSIQIGGLFPRGADQEYSAFRVGMVQFSTSEFRLTPHIDNLEVANSFAVTNAFCSQFSRGVYAIFGFYDKKSVNTITSFCGTLHVSFITPSFPTDGTHPFVIQMRPDLKGALLSLIEYYQWDKFAYLYDSDRGLSTLQAVLDSAAEKKWQVTAINVGNINNDKKDEMYRSLFQDLELKKERRVILDCERDKVNDIVDQVITIGKHVKGYHYIIANLGFTDGDLLKIQFGGANVSGFQIVDYDDSLVSKFIERWSTLEEKEYPGAHTTTIKYTSALTYDAVQVMTEAFRNLRKQRIEISRRGNAGDCLANPAVPWGQGVEIERALKQVQVEGLSGNIKFDQNGKRINYTINIMELKTNGPRKIGYWSEVDKMVVTLTELPSGNDTSGLENKTVVVTTILESPYVMMKKNHEMLEGNERYEGYCVDLAAEIAKHCGFKYKLTIVGDGKYGARDADTKIWNGMVGELVYGKADIAIAPLTITLVREEVIDFSKPFMSLGISIMIKKPQKSKPGVFSFLDPLAYEIWMCIVFAYIGVSVVLFLVSRFSPYEWHTEEFEDGRETQSSESTNEFGIFNSLWFSLGAFMQQGCDISPRSLSGRIVGGVWWFFTLIIISSYTANLAAFLTVERMVSPIESAEDLSKQTEIAYGTLDSGSTKEFFRRSKIAVFDKMWTYMRSAEPSVFVRTTAEGVARVRKSKGKYAYLLESTMNEYIEQRKPCDTMKVGGNLDSKGYGIATPKGSSLRNAVNLAVLKLNEQGLLDKLKNKWWYDKGECGSGGGDSKEKTSALSLSNVAGVFYILVGGLGLAMLVALIEFCYKSRAEAKRMKMTLNDAMRNKARLSITGSTGENGRVMTPEFPKAVHAVPYVSPGMGMNVSVTDLS

SEQ ID NO: 32545 - protein, 836 aa, Homo sapiens
MVQFSTSEFRLTPHIDNLEVANSFAVTNAFCSQFSRGVYAIFGFYDKKSVNTITSFCGTLHVSFITPSFPTDGTHPFVIQMRPDLKGALLSLIEYYQWDKFAYLYDSDRGLSTLQAVLDSAAEKKWQVTAINVGNINNDKKDEMYRSLFQDLELKKERRVILDCERDKVNDIVDQVITIGKHVKGYHYIIANLGFTDGDLLKIQFGGANVSGFQIVDYDDSLVSKFIERWSTLEEKEYPGAHTTTIKYTSALTYDAVQVMTEAFRNLRKQRIEISRRGNAGDCLANPAVPWGQGVEIERALKQVQVEGLSGNIKFDQNGKRINYTINIMELKTNGPRKIGYWSEVDKMVVTLTELPSGNDTSGLENKTVVVTTILESPYVMMKKNHEMLEGNERYEGYCVDLAAEIAKHCGFKYKLTIVGDGKYGARDADTKIWNGMVGELVYGKADIAIAPLTITLVREEVIDFSKPFMSLGISIMIKKPQKSKPGVFSFLDPLAYEIWMCIVFAYIGVSVVLFLVSRFSPYEWHTEEFEDGRETQSSESTNEFGIFNSLWFSLGAFMQQGCDISPRSLSGRIVGGVWWFFTLIIISSYTANLAAFLTVERMVSPIESAEDLSKQTEIAYGTLDSGSTKEFFRRSKIAVFDKMWTYMRSAEPSVFVRTTAEGVARVRKSKGKYAYLLESTMNEYIEQRKPCDTMKVGGNLDSKGYGIATPKGSSLRTPVNLAVLKLSEQGVLDKLKNKWWYDKGECGAKDSGSKEKTSALSLSNVAGVFYILVGGLGLAMLVALIEFCYKSRAEAKRMKVAKNAQNINPSSSQNSQNFATYKEGYNVYGIESVKI

SEQ ID NO: 32546 - protein, 304 aa, Homo sapiens
MSRSFYVDSLIIKDTSRPAPSLPEPHPGPDFFIPLGMPPPLVMSVSGPGCPSRKSGAFCVCPLCVTSHLHSSRGSVGAGSGGAGAGVTGAGGSGVAGAAGALPLLKGQFSSAPGDAQFCPRVNHAHHHHHPPQHHHHHHQPQQPGSAAAAAAAAAAAAAAAALGHPQHHAPVCTATTYNVADPRRFHCLTMGGSDASQVPNGKRMRTAFTSTQLLELEREFSSNMYLSRLRRIEIATYLNLSEKQVKIWFQNRRVKHKKEGKGTQRNSHAGCKCVGSQVHYARSEDEDSLSPASANDDKEISPL

SEQ ID NO: 32547 - protein, 609 aa, Homo sapiens
MAGTLDLDKGCTVEELLRGCIEAFDDSGKVRDPQLVRMFLMMHPWYIPSSQLAAKLLHIYQQSRKDNSNSLQVKTCHLVRYWISAFPAEFDLNPELAEQIKELKALLDQEGNRRHSSLIDIDSVPTYKWKRQVTQRNPVGQKKRKMSLLFDHLEPMELAEHLTYLEYRSFCKILFQDYHSFVTHGCTVDNPVLERFISLFNSVSQWVQLMILSKPTAPQRALVITHFVHVAEKLLQLQNFNTLMAVVGGLSHSSISRLKETHSHVSPETIKLWEGLTELVTATGNYGNYRRRLAACVGFRFPILGVHLKDLVALQLALPDWLDPARTRLNGAKMKQLFSILEELAMVTSLRPPVQANPDLLSLLTVSLDQYQTEDELYQLSLQREPRSKSSPTSPTSCTPPPRPPVLEEWTSAAKPKLDQALVVEHIEKMVESVFRNFDVDGDGHISQEEFQIIRGNFPYLSAFGDLDQNQDGCISREEMVSYFLRSSSVLGGRMGFVHNFQESNSLRPVACRHCKALILGIYKQGLKCRACGVNCHKQCKDRLSVECRRRAQSVSLEGSAPSPSPMHSHHHRAFSFSLPRPGRRGSRPPEIREEEVQTVEDGVFDIHL

SEQ ID NO: 32548 - protein, 671 aa, Homo sapiens
MGTQRLCGRGTQGWPGSSEQHVQEATSSAGLHSGVDELGVRSEPGGRLPERSLGPAHPAPAAMAGTLDLDKGCTVEELLRGCIEAFDDSGKVRDPQLVRMFLMMHPWYIPSSQLAAKLLHIYQQSRKDNSNSLQVKTCHLVRYWISAFPAEFDLNPELAEQIKELKALLDQEGNRRHSSLIDIDSVPTYKWKRQVTQRNPVGQKKRKMSLLFDHLEPMELAEHLTYLEYRSFCKILFQDYHSFVTHGCTVDNPVLERFISLFNSVSQWVQLMILSKPTAPQRALVITHFVHVAEKLLQLQNFNTLMAVVGGLSHSSISRLKETHSHVSPETIKLWEGLTELVTATGNYGNYRRRLAACVGFRFPILGVHLKDLVALQLALPDWLDPARTRLNGAKMKQLFSILEELAMVTSLRPPVQANPDLLSLLTVSLDQYQTEDELYQLSLQREPRSKSSPTSPTSCTPPPRPPVLEEWTSAAKPKLDQALVVEHIEKMVESVFRNFDVDGDGHISQEEFQIIRGNFPYLSAFGDLDQNQDGCISREEMVSYFLRSSSVLGGRMGFVHNFQESNSLRPVACRHCKALILGIYKQGLKCRACGVNCHKQCKDRLSVECRRRAQSVSLEGSAPSPSPMHSHHHRAFSFSLPRPGRRGSRPPEIREEEVQTVEDGVFDIHL

SEQ ID NO: 32549 - protein, 144 aa, Homo sapiens
MAGTLDLDKGCTVEELLRGCIEAFDDSGKVRDPQLVRMFLMMHPWYIPSSQLAAKLLHIYQQSRKDNSNSLQVKTCHLVRYWISAFPAEFDLNPELAEQIKELKALLDQEGNRRHSSLIDIDSVCVGAEHRGLGGHSVSYTICA

SEQ ID NO: 32550 - protein, 610 aa, Homo sapiens
MAGTLDLDKGCTVEELLRGCIEAFDDSGKVRDPQLVRMFLMMHPWYIPSSQLAAKLLHIYQQSRKDNSNSLQVKTCHLVRYWISAFPAEFDLNPELAEQIKELKALLDQEGNRRHSSLIDIDSVPTYKWKRQVTQRNPVGQKKRKMSLLFDHLEPMELAEHLTYLEYRSFCKILFQDYHSFVTHGCTVDNPVLERFISLFNSVSQWVQLMILSKPTAPQRALVITHFVHVAEKLLQLQNFNTLMAVVGGLSHSSISRLKETHSHVSPETIKLWEGLTELVTATGNYGNYRRRLAACVGFRFPILGVHLKDLVALQLALPDWLDPARTRLNGAKMKQLFSILEELAMVTSLRPPVQANPDLLSLLTVSLDQYQTEDELYQLSLQREPRSKSSPTSPTSCTPPPRPPVLEEWTSAAKPKLDQALVVEHIEKMVESVFRNFDVDGDGHISQEEFQIIRGNFPYLSAFGDLDQNQDGCISREEMVSYFLRSSSVLGGRMGFVHNFQESNSLRPVACRHCKALILGIYKQGLKCRACGVNCHKQCKDRLSVECRRRAQSVSLEGSAPSPSPMHSHHHRAFSFSLPRPGRRGSRPPAEIREEEVQTVEDGVFDIHL

SEQ ID NO: 32551 - protein, 508 aa, Homo sapiens
MPSMLERISKNLVKEIGSKDLTPVKYLLSATKLRQFVILRKKKDSRSSFWEQSDYVPVEFSLNDILEPSSSVLETVVTGPFHFSDIMIQKHKADMGVNVGIEVSVSGEASVDHGCSLEFQIVTIPSPNLEDFQKRKLLDPEPSFLKECRRRGDNLYVVTEAVELINNTVLYDSSSVNILGKIALWITYGKGQGQGESLRVKKKALTLQKGMVMAYKRKQLVIKEKAILISDDDEQRTFQDEYEISEMVGYCAARSEGLLPSFHTISPTLFNASSNDMKLKPELFLTQQFLSGHLPKYEQVHILPVGRIEEPFWQNFKHLQEEVFQKIKTLAQLSKDVQDVMFYSILAMLRDRGALQDLMNMLELDSSGHLDGPGGAILKKLQQDSNHAWFNPKDPILYLLEAIMVLSDFQHDLLACSMEKRILLQQQELVRSILEPNFRYPWSIPFTLKPELLAPLQSEGLAITYGLLEECGLRMELDNPRSTWDVEAKMPLSALYGTLSLLQQLAEA

SEQ ID NO: 32552 - protein, 164 aa, Homo sapiens
MNPQREAAPKSYAIRDSRQMVWVLSGNSLIAAPLSRSIKPVTLHLIACRDTEFSDKEKGNMVYLGIKGKDLCLFCAEIQGKPTLQLKLQGSQDNIGKDTCWKLVGIHTCINLDVRESCFMGTLDQWGIGVGRKKWKSSFQHHHLRKKDKDFSSMRTNIGMPGRM

SEQ ID NO: 32553 - protein, 157 aa, Homo sapiens
MNPQREAAPKSYAIRDSRQMVWVLSGNSLIAAPLSRSIKPVTLHLIACRDTEFSDKEKGNMVYLGIKGKDLCLFCAEIQGKPTLQLKEKNIMDLYVEKKAQKPFLFFHNKEGSTSVFQSVSYPGWFIATSTTSGQPIFLTKERGITNNTNFYLDSVE

SEQ ID NO: 32554 - protein, 200 aa, Homo sapiens
MALWMRLLPLLALLALWGPDPAAAFVNQHLCGSHLVEALYLVCGERGFFYTPKTRREAEDLQASALSLSSSTSTWPEGLDATARAPPALVVTANIGQAGGSSSRQFRQRALGTSDSPVLFIHCPGAAGTAQGLEYRGRRVTTELVWEEVDSSPQPQGSESLPAQPPAQPAPQPEPQQAREPSPEVSCCGLWPRRPQRSQN

SEQ ID NO: 32555 - protein, 213 aa, Homo sapiens
MPRLLRLSLLWLGLLLVRFSRELSDISSARKLCGRYLVKEIEKLCGHANWSQFRFEEETPFSRLIAQASEKVEAYSPYQFESPQTASPARGRGTNPVSTSWEEAVNSWEMQSLPEYKDKKGYSPLGKTREFSSSHNINVYIHENAKFQKKRRNKIKTLSNLFWGHHPQRKRRGYSEKCCLTGCTKEELSIACLPYIDFKRLKEKRSSLVTKIY

SEQ ID NO: 32556 - protein, 277 aa, Homo sapiens
MPRLHDHFWSCSCAHSARRRGPPRASAAGLAAKVGEMINVSVSGPSLLAAHGAPDADPAPRGRSAAMSGPEPGSPYPNTWHHRLLQRSLVLFSVGVVLALVLNLLQIQRNVTLFPEEVIATIFSSAWWVPPCCGTAAAVVGLLYPCIDSHLGEPHKFKREWASVMRCIAVFVGINHASAKLDFANNVQLSLTLAALSLGLWWTFDRSRSGLGLGITIAFLATLITQFLVYNGVYQYTSPDFLYIRSWLPCIFFSGGVTVGNIGRQLAMGVPEKPHSD

SEQ ID NO: 32557 - protein, 164 aa, Homo sapiens
MPRLHDHFWSCSCAHSARRRGPPRASAAGLAAKVGEMINVSVSGPSLLAAHGAPDADPAPRGRSAAMSGPEPGSPYPNTWHHRLLQRSLVLFSVGVVLALVLNLLQIQRNVTLFPEEVIATIFSSAWWVPPCCGTAAGIHPQISSIFVLGSLVYFSQEASRWGT

SEQ ID NO: 32558 - protein, 123 aa, Homo sapiens
MAWTPLLLLLLSHCTGSLSQPVLTQPPSSSASPGESARLTCTLPSDINVGSYNIYWYQQKPGSPPRYLLYYYSDSDKGQGSGVPSRFSGSKDASANTGILLISGLQSEDEADYYCMIWPSNAS

SEQ ID NO: 32559 - protein, 142 aa, Homo sapiens
MISTARVPADKPVRIAFSLNDASDDTPPEDSIPLVFPELDQQLQPLPPCHDSEESMEVFKQHCQIAEEYHEVKKEITLLEQRKKELIAKLDQAEKEKVDAAELVREFEALTEENRTLRLAQSQCVEQLEKLRIQYQKRQGSS

SEQ ID NO: 32560 - protein, 242 aa, Homo sapiens
MVQLIAPLEVMWNEAADLKPLALSRRLECSGGIMAHYSPDLLGPEMESRYFAQVGLEHLASSSPPAFGFLKCLDYSISVLCSATSLAMLEDNPKVSKLATGDWMLTLKPKSITVPVEIPSSPLDDTPPEDSIPLVFPELDQQLQPLPPCHDSEESMEVFKQHCQIAEEYHEVKKEITLLEQRKKELIAKLDQAEKEKVDAAELVREFEALTEENRTLRLAQSQCVEQLEKLRIQYQKRQGSS

SEQ ID NO: 32561 - protein, 105 aa, Homo sapiens
MAWTPLLLLFLSHCTGSLSQAVLTQPTSLSASPGASARLTCTLRSGISVGSYRIYWYQQKPGSPPRYLLNYYSDSDKHQGSGVPSRFSGSKDASTNAGILFISGL

SEQ ID NO: 32562 - protein, 479 aa, Homo sapiens
MVSKDTGKCILTTSESEVEPAACLALEMKYALDPNRQIKKRNKALQVRFKDICEAQNEQRDTQLSSGQLGEKREAKPVSCRAAYRKYMTVPARRSIPNVTKSTGVQTSPDLKKCYQTFPLDRKKGNLKSLPAADPFKSQNNGFLTDAKEKNEAGPMEEARPCGAGRVHKTTALVFHSNQHMNTVDQPLGVNCTEPCKSPEPLSYGEAALQNSTRPPSEEPDYQLLGRAKQDRGRPNSEEPAPPALRRVFKTEVATVYAPALSARAPEPGLSDSAAASQWSLCPADDERRRATHLNGLQAPSETALACSPPMQCLSPECSEQPSQTHTPPGLGNQPSPTAVAAGEECQRIVPHTEVVDLKAQLQMMENLISSSQETIKVLLGVIQELEKGEAHREGLSYRTGQDTANCDTCRNSACIIYSVELDFKQQEDKLQPVLRKLHPIEETQVIPSPYSQETYSSTPKQKSKTESKKHGRWKLWFL

SEQ ID NO: 32563 - protein, 455 aa, Homo sapiens
MVSKDTGKCILTTSESEVEPAACLALEMKYALDPNRQIKKRNKALQVRFKDICEAQNEQRDTQLSSGQLGEKREAKPVSCRAAYRKYMTVPARRSIPNVTKSTGVQTSPDLKKCYQTFPLDRKKGNLKSLPAADPFKSQNNGFLTDAKEKNEAGPMEEARPCGAGRVHKTTALVFHSNQHMNTVDQPLGVNCTEPCKSPEPLSYGEAALQNSTRPPSEEPDYQLLGRAKQDRGRPNSEEPAPPALRRVFKTEVATVYAPALSARAPEPGLSDSAAASQWSLCPADDERRRATHLNGLQAPSETALACSPPMQCLSPECSEQPSQTHTPPGLGNQPSPTAVAAGEECQRIVPHTEVVDLKAQLQMMENLISSSQETIKVLLGVIQELEKGEAHREGVELDFKQQEDKLQPVLRKLHPIEETQVIPSPYSQETYSSTPKQKSKTESKKHGRWKLWFL

SEQ ID NO: 32564 - protein, 205 aa, Homo sapiens
MEEKQPQKTKEPSKEDEPQQKEMPTHLSLGAESKAEAKTPVLVETQTVDNANEKSEKPPENQKKLSDKDTVATKIQAWWRGTLVRRALLHAALSACIIQCWWRLILSKILKKRRQAALEAFSRKEWAAVTLQSQARMWRIRRRYCQVLNAVRIIQAYWRCRSCASRGFIKGQYRVTANQLHLQLEILLDSGPCIVTECIPFSIKE

SEQ ID NO: 32565 - protein, 81 aa, Homo sapiens
MEEKQPQKTKEPSKEDEPQQKEMPTHLSLGAESKAEAKTPVLVETQTVDNANEKSEKVCQWNMVIVSMDWKSLESEDLRNL

SEQ ID NO: 32566 - protein, 267 aa, Homo sapiens
MMSSKPTSHAEVNETIPNPYPPSSFMAPGFQQPLGSINLENQAQGAQRAQPYGITSPGIFASSQPGQGNIQMINPSVGTAVMNFKEEAKALGVIQIMVGLMHIGFGIVLCLISFSFREVLGFASTAVIGGYPFWGGLSFIISGSLSVSASKELSRCLVKGSLGMNIVSSILAFIGVILLLVDMCINGVAGQDYWAVLSGKGISATLMIFSLLEFFVACATAHFANQANTTTNMSVLVIPNMYESNPVTPASSSAPPRCNNYSANAPK

SEQ ID NO: 32567 - protein, 221 aa, Homo sapiens
MMSSKPTSHAEVNETIPNPYPPSSFMAPGFQQPLGSINLENQAQGAQRAQPYGITSPGIFASSQPGQGNIQMINPSVGTAVMNFKEEAKALGFIISGSLSVSASKELSRCLVKGSLGMNIVSSILAFIGVILLLVDMCINGVAGQDYWAVLSGKGISATLMIFSLLEFFVACATAHFANQANTTTNMSVLVIPNMYESNPVTPASSSAPPRCNNYSANAPK

SEQ ID NO: 32568 - protein, 790 aa, Homo sapiens
MEEKRRKYSISSDNSDTTDSHATSTSASRCSKLPSSTKSGWPRQNEKKPSEVFRTDLITAMKIPDSYQLSPDDYYILADPWRQEWEKGVQVPAGAEAIPEPVVRILPPLEGPPAQASPSSTMLGEGSQPDWPGGSRYDLDEIDAYWLELINSELKEMERPELDELTLERVLEELETLCHQNMARAIETQEGLGIEYDEDVVCDVCRSPEGEDGNEMVFCDKCNVCVHQACYGILKVPTGSWLCRTCALGVQPKCLLCPKRGGALKPTRSGTKWVHVSCALWIPEVSIGCPEKMEPITKISHIPASRWALSCSLCKECTGTCIQCSMPSCVTAFHVTCAFDHGLEMRTILADNDEVKFKSFCQEHSDGGPRNEPTSEPTEPSQAGEDLEKVTLRKQRLQQLEEDFYELVEPAEVAERLDLAEALVDFIYQYWKLKRKANANQPLLTPKTDEVDNLAQQEQDVLYRRLKLFTHLRQDLERVRNLCYMVTRRERTKHAICKLQEQIFHLQMKLIEQDLCRGLSTSFPIDGTFFNSWLAQSVQITAENMAMSEWPLNNGHREDPAPGLLSEELLQDEETLLSFMRDPSLRPGDPARKARGRTRLPAKKKPPPPPPQDGPGSRTTPDKAPKKTWGQDAGSGKGGQGPPTRKPPRRTSSHLPSSPAAGDCPILATPESPPPLAPETPDEAASVAADSDVQVPGPAASPKPLGRLRPPRESKVTRRLPGARPDAGMGPPSAVAERPKVSLHFDTETDGYFSDGEMSDSDVEAEDGGVQRGPREAGAEEVVRMGVLAS

SEQ ID NO: 32569 - protein, 789 aa, Homo sapiens
MEEKRRKYSISSDNSDTTDSHATSTSASRCSKLPSSTKSGWPRQNEKKPSEVFRTDLITAMKIPDSYQLSPDDYYILADPWRQEWEKGVQVPAGAEAIPEPVVRILPPLEGPPAQASPSSTMLGEGSQPDWPGGSRYDLDEIDAYWLELINSELKEMERPELDELTLERVLEELETLCHQNMARAIETQEGLGIEYDEDVVCDVCRSPEGEDGNEMVFCDKCNVCVHQACYGILKVPTGSWLCRTCALGVQPKCLLCPKRGGALKPTRSGTKWVHVSCALWIPEVSIGCPEKMEPITKISHIPASRWALSCSLCKECTGTCIQCSMPSCVTAFHVTCAFDHGLEMRTILADNDEVKFKSFCQEHSDGGPRNEPTSEPTEPSQAGEDLEKVTLRKQRLQQLEEDFYELVEPAEVAERLDLAEALVDFIYQYWKLKRKANANQPLLTPKTDEVDNLAQQEQDVLYRRLKLFTHLRQDLERVRNLCYMVTRRERTKHAICKLQEQIFHLQMKLIEQDLCRLSTSFPIDGTFFNSWLAQSVQITAENMAMSEWPLNNGHREDPAPGLLSEELLQDEETLLSFMRDPSLRPGDPARKARGRTRLPAKKKPPPPPPQDGPGSRTTPDKAPKKTWGQDAGSGKGGQGPPTRKPPRRTSSHLPSSPAAGDCPILATPESPPPLAPETPDEAASVAADSDVQVPGPAASPKPLGRLRPPRESKVTRRLPGARPDAGMGPPSAVAERPKVSLHFDTETDGYFSDGEMSDSDVEAEDGGVQRGPREAGAEEVVRMGVLAS

SEQ ID NO: 32570 - protein, 562 aa, Homo sapiens
MEEKRRKYSISSDNSDTTDSHATSTSASRCSKLPSSTKSGWPRQNEKKPSEVFRTDLITAMKIPDSYQLSPDDYYILADPWRQEWEKGVQVPAGAEAIPEPVVRILPPLEGPPAQASPSSTMLGEGSQPDWPGGSRYDLDEIDAYWLELINSELKEMERPELDELTLERVLEELETLCHQNMARAIETQEGLGIEYDEDVVCDVCRSPEGEDGNEMVFCDKCNVCVHQACYGILKVPTGSWLCRTCALGVQPKCLLCPKRGGALKPTRSGTKWVHVSCALWIPEVSIGCPEKMEPITKISHIPASRWALSCSLCKECTGTCIQCSMPSCVTAFHVTCAFDHGLEMRTILADNDEVKFKSFCQEHSDGGPRNEPTSEPTEPSQAGEDLEKVTLRKQRLQQLEEDFYELVEPAEVAERLDLAEALVDFIYQYWKLKRKANANQPLLTPKTDEVDNLAQQEQDVLYRRLKLFTHLRQDLERVRNLCYMVTRRERTKHAICKLQEQIFHLQMKLIEQDLCRERSGRRAKGKKSDSKRKGCEGSKGSTEKKEKVKAGPDSVLGQLGE

SEQ ID NO: 32571 - protein, 1259 aa, Homo sapiens
MDRPLSSSAEAEEELEWQVASRRRKAWAKCRSSWQASETEDLSTEATTQDEEEDEEEDLPGAQLPAAGGRGNVPNEKIAIWLKDCRTPLGASLDEQSSSTLKGVLVRNGGSFEDDLSLGAEANHLHESDAQIENCNNILAKERRLQFHQKGRSMNSTGSGKSSGTVSSVSELLELYEEDPEEILYNLGFGRDEPDIASKIPSRFFNSSSFAKGIDIKVFLSAQMQRMEVENPNYALTSRFRQIEVLTTVANAFSSLYSQVSGTPLQRIGSMSSVTSNKETDPPPPLTRSNTANRLMKTLSKLNLCVDKTEKGESSSPSPSAEKGKILNVSVIEESGNKNDQKSQKIMKKKESSSMLATVKEEVSGSSAAVTENADSDRISDEANSNFNQGTENEQSKETQSHESKLGEESGIVESKLDSDFNISSHSELENSSELKSVHISTPEKEPCAPLTIPSIRNIMTQQKDSFEMEEVQSTEGEAPHVPATYQLGLTKSKRDHLLRTASQHSDSSGFAEDSTDCLSLNHLQVQESLQAMGSSADSCDSETTVTSLGEDLATPTAQDQPYFNESEEESLVPLQKGLEKAAAVADKRKSGSQDFPQCNTIENTGTKQSTCSPGDHIIEITEVEEDLFPAETVELLREASAESDVGKSSESEFTQYTTHHILKSLASIEAKCSDMSSENTTGPPSSMDRVNTALQRAQMKVCSLSNQRMGRSLLKSKDLLKQRYLFAKAGYPLRRSQSLPTTLLSPVRVVSSVNVRLSPGKETRCSPPSFTYKYTPEEEQELEKRVMEHDGQSLVKSTIFISPSSVKKEEAPQSEAPRVEECHHGRTPTCSRLAPPPMSQSTCSLHSIHSEWQERPLCEHTRTLSTHSVPNISGATCSAFASPFGCPYSHRHATYPYRVCSVNPPSAIEMQLRRVLHDIRNSLQNLSQYPMMRGPDPAAAPYSTQKSSVLPLYENTFQELQVMRRSLNLFRTQMMDLELAMLRQQTMVYHHMTEEERFEVDQLQGLRNSVRMELQDLELQLEERLLGLEEQLRAVRMPSPFRSSALMGMCGSRSADNLSCPSPLNVMEPVTELMQEQSYLKSELGLGLGEMGFEIPPGESSESVFSQATSESSSVCSGPSHANRRTGVPSTASVGKSKTPLVARKKVFRASVALTPTAPSRTGSVQTPPDLESSEEVDAAEGAPEVVGPKSEVEEGHGKLPSMPAAEEMHKNVEQDELQQVIREIKESIVGEIRREIVSGLLAAVSSSKASNSKQDYH

SEQ ID NO: 32572 - protein, 1106 aa, Homo sapiens
MNSTGSGKSSGTVSSVSELLELYEEDPEEILYNLGFGRDEPDIASKIPSRFFNSSSFAKGIDIKVFLSAQMQRMEVENPNYALTSRFRQIEVLTTVANAFSSLYSQVSGTPLQRIGSMSSVTSNKETDPPPPLTRSNTANRLMKTLSKLNLCVDKTEKGESSSPSPSAEKGKILNVSVIEESGNKNDQKSQKIMKKKESSSMLATVKEEVSGSSAAVTENADSDRISDEANSNFNQGTENEQSKETQSHESKLGEESGIVESKLDSDFNISSHSELENSSELKSVHISTPEKEPCAPLTIPSIRNIMTQQKDSFEMEEVQSTEGEAPHVPATYQLGLTKSKRDHLLRTASQHSDSSGFAEDSTDCLSLNHLQVQESLQAMGSSADSCDSETTVTSLGEDLATPTAQDQPYFNESEEESLVPLQKGLEKAAAVADKRKSGSQDFPQCNTIENTGTKQSTCSPGDHIIEITEVEEDLFPAETVELLREASAESDVGKSSESEFTQYTTHHILKSLASIEAKCSDMSSENTTGPPSSMDRVNTALQRAQMKVCSLSNQRMGRSLLKSKDLLKQRYLFAKAGYPLRRSQSLPTTLLSPVRVVSSVNVRLSPGKETRCSPPSFTYKYTPEEEQELEKRVMEHDGQSLVKSTIFISPSSVKKEEAPQSEAPRVEECHHGRTPTCSRLAPPPMSQSTCSLHSIHSEWQERPLCEHTRTLSTHSVPNISGATCSAFASPFGCPYSHRHATYPYRVCSVNPPSAIEMQLRRVLHDIRNSLQNLSQYPMMRGPDPAAAPYSTQKSSVLPLYENTFQELQVMRRSLNLFRTQMMDLELAMLRQQTMVYHHMTEEERFEVDQLQGLRNSVRMELQDLELQLEERLLGLEEQLRAVRMPSPFRSSALMGMCGSRSADNLSCPSPLNVMEPVTELMQEQSYLKSELGLGLGEMGFEIPPGESSESVFSQATSESSSVCSGPSHANRRTGVPSTASVGKSKTPLVARKKVFRASVALTPTAPSRTGSVQTPPDLESSEEVDAAEGAPEVVGPKSEVEEGHGKLPSMPAAEEMHKNVEQDELQQVIREIKESIVGEIRREIVSGLLAAVSSSKASNSKQDYH

SEQ ID NO: 32573 - protein, 1256 aa, Homo sapiens
MDRPLSSSAEAEEELEWQVASRRRKAWAKCRSSWQASETEDLSTEATTQDEEEDEEEDLPGAQLPAAGGRGNVPNEKIAIWLKDCRTPLGASLDEQSSSTLKGVLVRNGGSFEDDLSLGAEANHLHESDAQIENCNNILAKERRLQFHQKGRSMNSTGSGKSSGTVSSVSELLELYEEDPEEILYNLGFGRDEPDIASKIPSRFFNSSSFAKGIDIKVFLSAQMQRMEVENPNYALTSRFRQIEVLTTVANAFSSLYSQVSGTPLQRIGSMSSVTSNKETDPPPPLTRSNTANRLMKTLSKLNLCVDKTEKGESSSPSPSAEKGKILNVSVIEESGNKNDQKSQKIMKKKESSSMLATVKEEVSGSSAAVTENADSDRISDEANSNFNQGTENEQSKETQSHESKLGEESGIVESKLDSDFNISSHSELENSSELKSVHISTPEKEPCAPLTIPSIRNIMTQQKDSFEMEEVQSTEGEAPHVPATYQLGLTKSKRDHLLRTASQHSDSSGFAEDSTDCLSLNHLQVQESLQAMGSSADSCDSETTVTSLGEDLATPTAQDQPYFNESEEESLVPLQKGLEKAAAVADKRKSGSQDFPQCNTIENTGTKQSTCSPGDHIIEITEVEEDLFPAETVELLREASAESDVGKSSESEFTQYTTHHILKSLASIEAKCSDMSSENTTGPPSSMDRVNTALQRAQMKVCSLSNQRMGRSLLKSKDLLKQRYLFAKAGYPLRRSQSLPTTLLSPVRVVSSVNVRLSPGKETRCSPPSFTYKYTPEEEQELEKRVMEHDGQSLVKSTIFISPSSVKKEEAPQSEAPRVEECHHGRTPTCSRLAPPPMSQSTCSLHSIHSEWQERPLCEHTRTLSTHSVPNISGATCSAFASPFGCPYSHRHATYPYRVCSVNPPSAIEMQLRRVLHDIRNSLQNLSQYPMMRGPDPAAAPYSTQKSSVLPLYENTFQELQVMRRSLNLFRTQMMDLELAMLRQQTMVYHHMTEEERFEVDQLQGLRNSVRMELQDLELQLEERLLGLEEQLRAVRMPSPFRSSALMGMCGSRSADNLSCPSPLNVMEPVTELMQEQSYLKSELGLGLGEMGFEIPPGESSESVFSQATSESSSVCSGPSHANRRTGVPSTASVGKSKTPLVARKKVFRASVALTPTAPSRTGSVQTPPDLESSEEVDAAEGAPEVVGPKSEVEEGHGKLPSMPAAEEMHKNVEQDELQQVIREVGMDPISCVILELSMICTGGGVICALEDTCC

SEQ ID NO: 32574 - protein, 288 aa, Homo sapiens
MKPSGEDQAALAAGPWEECFQAAVQLALRAGQIIRKALTEEKRVSTKTSAADLVTETDHLVEDLIISELRERFPSHRFIAEEAAASGAKCVLTHSPTWIIDPIDGTCNFVHRFPTVAVSIGFAVRQELEFGVIYHCTEERLYTGRRGRGAFCNGQRLRVSGETDLSKALVLTEIGPKRDPATLKLFLSNMERLLHAKAHGVRVIGSSTLALCHLASGAADAYYQFGLHCWDLAAATVIIREAGGIVIDTSGGPLDLMACRVVAASTREMAMLIAQALQTINYGRDDEK

SEQ ID NO: 32575 - protein, 261 aa, Homo sapiens
MKPSGQDRKALTEEKRVSTKTSAADLVTETDHLVEDLIISELRERFPSHRFIAEEAAASGAKCVLTHSPTWIIDPIDGTCNFVHRFPTVAVSIGFAVRQELEFGVIYHCTEERLYTGRRGRGAFCNGQRLRVSGETDLSKALVLTEIGPKRDPATLKLFLSNMERLLHAKAHGVRVIGSSTLALCHLASGAADAYYQFGLHCWDLAAATVIIREAGGIVIDTSGGPLDLMACRVVAASTREMAMLIAQALQTINYGRDDEK

SEQ ID NO: 32576 - protein, 490 aa, Homo sapiens
MTQGKKKKRAANRSIMLAKKIIIKDGGTPQGIGSPSVYHAVIVIFLEFFAWGLLTAPTLVVLHETFPKHTFLMNGLIQGVKGLLSFLSAPLIGALSDVWGRKSFLLLTVFFTCAPIPLMKISPWWYFAVISVSGVFAVTFSVVFAYVADITQEHERSMAYGLVSATFAASLVTSPAIGAYLGRVYGDSLVVVLATAIALLDICFILVAVPESLPEKMRPASWGAPISWEQADPFASLKKVGQDSIVLLICITVFLSYLPEAGQYSSFFLYLRQIMKFSPESVAAFIAVLGILSIIAQTIVLSLLMRSIGNKNTILLGLGFQILQLAWYGFGSEPWMMWAAGAVAAMSSITFPAVSALVSRTADADQQGVVQGMITGIRGLCNGLGPALYGFIFYIFHVELKELPITGTDLGTNTSPQHHFEQNSIIPGPPFLFGACSVLLALLVALFIPEHTNLSLRSSSWRKHCGSHSHPHNTQAPGEAKEPLLQDTNV

SEQ ID NO: 32577 - protein, 2758 aa, Homo sapiens
MSDKMSSFLHIGDICSLYAEGSTNGFISTLGLVDDRCVVQPETGDLNNPPKKFRDCLFKLCPMNRYSAQKQFWKAAKPGANSTTDAVLLNKLHHAADLEKKQNETENRKLLGTVIQYGNVIQLLHLKSNKYLTVNKRLPALLEKNAMRVTLDEAGNEGSWFYIQPFYKLRSIGDSVVIGDKVVLNPVNAGQPLHASSHQLVDNPGCNEVNSVNCNTSWKIVLFMKWSDNKDDILKGGDVVRLFHAEQEKFLTCDEHRKKQHVFLRTTGRQSATSATSSKALWEVEVVQHDPCRGGAGYWNSLFRFKHLATGHYLAAEVDPDFEEECLEFQPSVDPDQDASRSRLRNAQEKMVYSLVSVPEGNDISSIFELDPTTLRGGDSLVPRNSYVRLRHLCTNTWVHSTNIPIDKEEEKPVMLKIGTSPVKEDKEAFAIVPVSPAEVRDLDFANDASKVLGSIAGKLEKGTITQNERRSVTKLLEDLVYFVTGGTNSGQDVLEVVFSKPNRERQKLMREQNILKQIFKLLQAPFTDCGDGPMLRLEELGDQRHAPFRHICRLCYRVLRHSQQDYRKNQEYIAKQFGFMQKQIGYDVLAEDTITALLHNNRKLLEKHITAAEIDTFVSLVRKNREPRFLDYLSDLCVSMNKSIPVTQELICKAVLNPTNADILIETKLVLSRFEFEGVSSTGENALEAGEDEEEVWLFWRDSNKEIRSKSVRELAQDAKEGQKEDRDVLSYYRYQLNLFARMCLDRQYLAINEISGQLDVDLILRCMSDENLPYDLRASFCRLMLHMHVDRDPQEQVTPVKYARLWSEIPSEIAIDDYDSSGASKDEIKERFAQTMEFVEEYLRDVVCQRFPFSDKEKNKLTFEVVNLARNLIYFGFYNFSDLLRLTKILLAILDCVHVTTIFPISKMAKGEENKGNNDVEKLKSSNVMRSIHGVGELMTQVVLRGGGFLPMTPMAAAPEGNVKQAEPEKEDIMVMDTKLKIIEILQFILNVRLDYRISCLLCIFKREFDESNSQTSETSSGNSSQEGPSNVPGALDFEHIEEQAEGIFGGSEENTPLDLDDHGGRTFLRVLLHLTMHDYPPLVSGALQLLFRHFSQRQEVLQAFKQVQLLVTSQDVDNYKQIKQDLDQLRSIVEKSELWVYKGQGPDETMDGASGENEHKKTEEGNNKPQKHESTSSYNYRVVKEILIRLSKLCVQESASVRKSRKQQQRLLRNMGAHAVVLELLQIPYEKAEDTKMQEIMRLAHEFLQNFCAGNQQNQALLHKHINLFLNPGILEAVTMQHIFMNNFQLCSEINERVVQHFVHCIETHGRNVQYIKFLQTIVKAEGKFIKKCQDMVMAELVNSGEDVLVFYNDRASFQTLIQMMRSERDRMDENSPLMYHIHLVELLAVCTEGKNVYTEIKCNSLLPLDDIVRVVTHEDCIPEVKIAYINFLNHCYVDTEVEMKEIYTSNHMWKLFENFLVDICRACNNTSDRKHADSILEKYVTEIVMSIVTTFFSSPFSDQSTTLQTRQPVFVQLLQGVFRVYHCNWLMPSQKASVESCIRVLSDVAKSRAIAIPVDLDSQVNNLFLKSHSIVQKTAMNWRLSARNAARRDSVLAASRDYRNIIERLQDIVSALEDRLRPLVQAELSVLVDVLHRPELLFPENTDARRKCESGGFICKLIKHTKQLLEENEEKLCIKVLQTLREMMTKDRGYGEKLISIDELDNAELPPAPDSENATEELEPSPPLRQLEDHKRGEALRQVLVNRYYGNVRPSGRRESLTSFGNGPLSAGGPGKPGGGGGGSGSSSMSRGEMSLAEVQCHLDKEGASNLVIDLIMNASSDRVFHESILLAIALLEGGNTTIQHSFFCRLTEDKKSEKFFKVFYDRMKVAQQEIKATVTVNTSDLGNKKKDDEVDRDAPSRKKAKEPTTQITEEVRDQLLEASAATRKAFTTFRREADPDDHYQPGEGTQATADKAKDDLEMSAVITIMQPILRFLQLLCENHNRDLQNFLRCQNNKTNYNLVCETLQFLDCICGSTTGGLGLLGLYINEKNVALINQTLESLTEYCQGPCHENQNCIATHESNGIDIITALILNDINPLGKKRMDLVLELKNNASKLLLAIMESRHDSENAERILYNMRPKELVEVIKKAYMQGEVEFEDGENGEDGAASPRNVGHNIYILAHQLARHNKELQSMLKPGGQVDGDEALEFYAKHTAQIEIVRLDRTMEQIVFPVPSICEFLTKESKLRIYYTTERDEQGSKINDFFLRSEDLFNEMNWQKKLRAQPVLYWCARNMSFWSSISFNLAVLMNLLVAFFYPFKGVRGGTLEPHWSGLLWTAMLISLAIVIALPKPHGIRALIASTILRLIFSVGLQPTLFLLGAFNVCNKIIFLMSFVGNCGTFTRGYRAMVLDVEFLYHLLYLVICAMGLFVHEFFYSLLLFDLVYREETLLNVIKSVTRNGRSIILTAVLALILVYLFSIVGYLFFKDDFILEVDRLPNETAVPETGESLASEFLFSDVCRVESGENCSSPAPREELVPAEETEQDKEHTCETLLMCIVTVLSHGLRSGGGVGDVLRKPSKEEPLFAARVIYDLLFFFMVIIIVLNLIFGVIIDTFADLRSEKQKKEEILKTTCFICGLERDKFDNKTVTFEEHIKEEHNMWHYLCFIVLVKVKDSTEYTGPESYVAEMIKERNLDWFPRMRAMSLVSSDSEGEQNELRNLQEKLESTMKLVTNLSGQLSELKDQMTEQRKQKQRIGLLGHPPHMNVNPQQPA

SEQ ID NO: 32578 - protein, 2743 aa, Homo sapiens
MSDKMSSFLHIGDICSLYAEGSTNGFISTLGLVDDRCVVQPETGDLNNPPKKFRDCLFKLCPMNRYSAQKQFWKAAKPGANSTTDAVLLNKLHHAADLEKKQNETENRKLLGTVIQYGNVIQLLHLKSNKYLTVNKRLPALLEKNAMRVTLDEAGNEGSWFYIQPFYKLRSIGDSVVIGDKVVLNPVNAGQPLHASSHQLVDNPGCNEVNSVNCNTSWKIVLFMKWSDNKDDILKGGDVVRLFHAEQEKFLTCDEHRKKQHVFLRTTGRQSATSATSSKALWEVEVVQHDPCRGGAGYWNSLFRFKHLATGHYLAAEVDPDQDASRSRLRNAQEKMVYSLVSVPEGNDISSIFELDPTTLRGGDSLVPRNSYVRLRHLCTNTWVHSTNIPIDKEEEKPVMLKIGTSPVKEDKEAFAIVPVSPAEVRDLDFANDASKVLGSIAGKLEKGTITQNERRSVTKLLEDLVYFVTGGTNSGQDVLEVVFSKPNRERQKLMREQNILKQIFKLLQAPFTDCGDGPMLRLEELGDQRHAPFRHICRLCYRVLRHSQQDYRKNQEYIAKQFGFMQKQIGYDVLAEDTITALLHNNRKLLEKHITAAEIDTFVSLVRKNREPRFLDYLSDLCVSMNKSIPVTQELICKAVLNPTNADILIETKLVLSRFEFEGVSSTGENALEAGEDEEEVWLFWRDSNKEIRSKSVRELAQDAKEGQKEDRDVLSYYRYQLNLFARMCLDRQYLAINEISGQLDVDLILRCMSDENLPYDLRASFCRLMLHMHVDRDPQEQVTPVKYARLWSEIPSEIAIDDYDSSGASKDEIKERFAQTMEFVEEYLRDVVCQRFPFSDKEKNKLTFEVVNLARNLIYFGFYNFSDLLRLTKILLAILDCVHVTTIFPISKMAKGEENKGNNDVEKLKSSNVMRSIHGVGELMTQVVLRGGGFLPMTPMAAAPEGNVKQAEPEKEDIMVMDTKLKIIEILQFILNVRLDYRISCLLCIFKREFDESNSQTSETSSGNSSQEGPSNVPGALDFEHIEEQAEGIFGGSEENTPLDLDDHGGRTFLRVLLHLTMHDYPPLVSGALQLLFRHFSQRQEVLQAFKQVQLLVTSQDVDNYKQIKQDLDQLRSIVEKSELWVYKGQGPDETMDGASGENEHKKTEEGNNKPQKHESTSSYNYRVVKEILIRLSKLCVQESASVRKSRKQQQRLLRNMGAHAVVLELLQIPYEKAEDTKMQEIMRLAHEFLQNFCAGNQQNQALLHKHINLFLNPGILEAVTMQHIFMNNFQLCSEINERVVQHFVHCIETHGRNVQYIKFLQTIVKAEGKFIKKCQDMVMAELVNSGEDVLVFYNDRASFQTLIQMMRSERDRMDENSPLMYHIHLVELLAVCTEGKNVYTEIKCNSLLPLDDIVRVVTHEDCIPEVKIAYINFLNHCYVDTEVEMKEIYTSNHMWKLFENFLVDICRACNNTSDRKHADSILEKYVTEIVMSIVTTFFSSPFSDQSTTLQTRQPVFVQLLQGVFRVYHCNWLMPSQKASVESCIRVLSDVAKSRAIAIPVDLDSQVNNLFLKSHSIVQKTAMNWRLSARNAARRDSVLAASRDYRNIIERLQDIVSALEDRLRPLVQAELSVLVDVLHRPELLFPENTDARRKCESGGFICKLIKHTKQLLEENEEKLCIKVLQTLREMMTKDRGYGEKLISIDELDNAELPPAPDSENATEELEPSPPLRQLEDHKRGEALRQVLVNRYYGNVRPSGRRESLTSFGNGPLSAGGPGKPGGGGGGSGSSSMSRGEMSLAEVQCHLDKEGASNLVIDLIMNASSDRVFHESILLAIALLEGGNTTIQHSFFCRLTEDKKSEKFFKVFYDRMKVAQQEIKATVTVNTSDLGNKKKDDEVDRDAPSRKKAKEPTTQITEEVRDQLLEASAATRKAFTTFRREADPDDHYQPGEGTQATADKAKDDLEMSAVITIMQPILRFLQLLCENHNRDLQNFLRCQNNKTNYNLVCETLQFLDCICGSTTGGLGLLGLYINEKNVALINQTLESLTEYCQGPCHENQNCIATHESNGIDIITALILNDINPLGKKRMDLVLELKNNASKLLLAIMESRHDSENAERILYNMRPKELVEVIKKAYMQGEVEFEDGENGEDGAASPRNVGHNIYILAHQLARHNKELQSMLKPGGQVDGDEALEFYAKHTAQIEIVRLDRTMEQIVFPVPSICEFLTKESKLRIYYTTERDEQGSKINDFFLRSEDLFNEMNWQKKLRAQPVLYWCARNMSFWSSISFNLAVLMNLLVAFFYPFKGVRGGTLEPHWSGLLWTAMLISLAIVIALPKPHGIRALIASTILRLIFSVGLQPTLFLLGAFNVCNKIIFLMSFVGNCGTFTRGYRAMVLDVEFLYHLLYLVICAMGLFVHEFFYSLLLFDLVYREETLLNVIKSVTRNGRSIILTAVLALILVYLFSIVGYLFFKDDFILEVDRLPNETAVPETGESLASEFLFSDVCRVESGENCSSPAPREELVPAEETEQDKEHTCETLLMCIVTVLSHGLRSGGGVGDVLRKPSKEEPLFAARVIYDLLFFFMVIIIVLNLIFGVIIDTFADLRSEKQKKEEILKTTCFICGLERDKFDNKTVTFEEHIKEEHNMWHYLCFIVLVKVKDSTEYTGPESYVAEMIKERNLDWFPRMRAMSLVSSDSEGEQNELRNLQEKLESTMKLVTNLSGQLSELKDQMTEQRKQKQRIGLLGHPPHMNVNPQQPA

SEQ ID NO: 32579 - protein, 2710 aa, Homo sapiens
MSDKMSSFLHIGDICSLYAEGSTNGFISTLGLVDDRCVVQPETGDLNNPPKKFRDCLFKLCPMNRYSAQKQFWKAAKPGANSTTDAVLLNKLHHAADLEKKQNETENRKLLGTVIQYGNVIQLLHLKSNKYLTVNKRLPALLEKNAMRVTLDEAGNEGSWFYIQPFYKLRSIGDSVVIGDKVVLNPVNAGQPLHASSHQLVDNPGCNEVNSVNCNTSWKIVLFMKWSDNKDDILKGGDVVRLFHAEQEKFLTCDEHRKKQHVFLRTTGRQSATSATSSKALWEVEVVQHDPCRGGAGYWNSLFRFKHLATGHYLAAEVDPDFEEECLEFQPSVDPDQDASRSRLRNAQEKMVYSLVSVPEGNDISSIFELDPTTLRGGDSLVPRNSYVRLRHLCTNTWVHSTNIPIDKEEEKPVMLKIGTSPVKEDKEAFAIVPVSPAEVRDLDFANDASKVLGSIAGKLEKGTITQNERRSVTKLLEDLVYFVTGGTNSGQDVLEVVFSKPNRERQKLMREQNILKQIFKLLQAPFTDCGDGPMLRLEELGDQRHAPFRHICRLCYRVLRHSQQDYRKNQEYIAKQFGFMQKQIGYDVLAEDTITALLHNNRKLLEKHITAAEIDTFVSLVRKNREPRFLDYLSDLCVSMNKSIPVTQELICKAVLNPTNADILIETKLVLSRFEFEGVSSTGENALEAGEDEEEVWLFWRDSNKEIRSKSVRELAQDAKEGQKEDRDVLSYYRYQLNLFARMCLDRQYLAINEISGQLDVDLILRCMSDENLPYDLRASFCRLMLHMHVDRDPQEQVTPVKYARLWSEIPSEIAIDDYDSSGASKDEIKERFAQTMEFVEEYLRDVVCQRFPFSDKEKNKLTFEVVNLARNLIYFGFYNFSDLLRLTKILLAILDCVHVTTIFPISKMAKGEENKGSNVMRSIHGVGELMTQVVLRGGGFLPMTPMAAAPEGNVKQAEPEKEDIMVMDTKLKIIEILQFILNVRLDYRISCLLCIFKREFDESNSQTSETSSGNSSQEGPSNVPGALDFEHIEEQAEGIFGGSEENTPLDLDDHGGRTFLRVLLHLTMHDYPPLVSGALQLLFRHFSQRQEVLQAFKQVQLLVTSQDVDNYKQIKQDLDQLRSIVEKSELWVYKGQGPDETMDGASGENEHKKTEEGNNKPQKHESTSSYNYRVVKEILIRLSKLCVQESASVRKSRKQQQRLLRNMGAHAVVLELLQIPYEKAEDTKMQEIMRLAHEFLQNFCAGNQQNQALLHKHINLFLNPGILEAVTMQHIFMNNFQLCSEINERVVQHFVHCIETHGRNVQYIKFLQTIVKAEGKFIKKCQDMVMAELVNSGEDVLVFYNDRASFQTLIQMMRSERDRMDENSPLMYHIHLVELLAVCTEGKNVYTEIKCNSLLPLDDIVRVVTHEDCIPEVKIAYINFLNHCYVDTEVEMKEIYTSNHMWKLFENFLVDICRACNNTSDRKHADSILEKYVTEIVMSIVTTFFSSPFSDQSTTLQTRQPVFVQLLQGVFRVYHCNWLMPSQKASVESCIRVLSDVAKSRAIAIPVDLDSQVNNLFLKSHSIVQKTAMNWRLSARNAARRDSVLAASRDYRNIIERLQDIVSALEDRLRPLVQAELSVLVDVLHRPELLFPENTDARRKCESGGFICKLIKHTKQLLEENEEKLCIKVLQTLREMMTKDRGYGEKGEALRQVLVNRYYGNVRPSGRRESLTSFGNGPLSAGGPGKPGGGGGGSGSSSMSRGEMSLAEVQCHLDKEGASNLVIDLIMNASSDRVFHESILLAIALLEGGNTTIQHSFFCRLTEDKKSEKFFKVFYDRMKVAQQEIKATVTVNTSDLGNKKKDDEVDRDAPSRKKAKEPTTQITEEVRDQLLEASAATRKAFTTFRREADPDDHYQPGEGTQATADKAKDDLEMSAVITIMQPILRFLQLLCENHNRDLQNFLRCQNNKTNYNLVCETLQFLDCICGSTTGGLGLLGLYINEKNVALINQTLESLTEYCQGPCHENQNCIATHESNGIDIITALILNDINPLGKKRMDLVLELKNNASKLLLAIMESRHDSENAERILYNMRPKELVEVIKKAYMQGEVEFEDGENGEDGAASPRNVGHNIYILAHQLARHNKELQSMLKPGGQVDGDEALEFYAKHTAQIEIVRLDRTMEQIVFPVPSICEFLTKESKLRIYYTTERDEQGSKINDFFLRSEDLFNEMNWQKKLRAQPVLYWCARNMSFWSSISFNLAVLMNLLVAFFYPFKGVRGGTLEPHWSGLLWTAMLISLAIVIALPKPHGIRALIASTILRLIFSVGLQPTLFLLGAFNVCNKIIFLMSFVGNCGTFTRGYRAMVLDVEFLYHLLYLVICAMGLFVHEFFYSLLLFDLVYREETLLNVIKSVTRNGRSIILTAVLALILVYLFSIVGYLFFKDDFILEVDRLPNETAVPETGESLASEFLFSDVCRVESGENCSSPAPREELVPAEETEQDKEHTCETLLMCIVTVLSHGLRSGGGVGDVLRKPSKEEPLFAARVIYDLLFFFMVIIIVLNLIFGVIIDTFADLRSEKQKKEEILKTTCFICGLERDKFDNKTVTFEEHIKEEHNMWHYLCFIVLVKVKDSTEYTGPESYVAEMIKERNLDWFPRMRAMSLVSSDSEGEQNELRNLQEKLESTMKLVTNLSGQLSELKDQMTEQRKQKQRIGLLGHPPHMNVNPQQPA

SEQ ID NO: 32580 - protein, 2695 aa, Homo sapiens
MSDKMSSFLHIGDICSLYAEGSTNGFISTLGLVDDRCVVQPETGDLNNPPKKFRDCLFKLCPMNRYSAQKQFWKAAKPGANSTTDAVLLNKLHHAADLEKKQNETENRKLLGTVIQYGNVIQLLHLKSNKYLTVNKRLPALLEKNAMRVTLDEAGNEGSWFYIQPFYKLRSIGDSVVIGDKVVLNPVNAGQPLHASSHQLVDNPGCNEVNSVNCNTSWKIVLFMKWSDNKDDILKGGDVVRLFHAEQEKFLTCDEHRKKQHVFLRTTGRQSATSATSSKALWEVEVVQHDPCRGGAGYWNSLFRFKHLATGHYLAAEVDPDQDASRSRLRNAQEKMVYSLVSVPEGNDISSIFELDPTTLRGGDSLVPRNSYVRLRHLCTNTWVHSTNIPIDKEEEKPVMLKIGTSPVKEDKEAFAIVPVSPAEVRDLDFANDASKVLGSIAGKLEKGTITQNERRSVTKLLEDLVYFVTGGTNSGQDVLEVVFSKPNRERQKLMREQNILKQIFKLLQAPFTDCGDGPMLRLEELGDQRHAPFRHICRLCYRVLRHSQQDYRKNQEYIAKQFGFMQKQIGYDVLAEDTITALLHNNRKLLEKHITAAEIDTFVSLVRKNREPRFLDYLSDLCVSMNKSIPVTQELICKAVLNPTNADILIETKLVLSRFEFEGVSSTGENALEAGEDEEEVWLFWRDSNKEIRSKSVRELAQDAKEGQKEDRDVLSYYRYQLNLFARMCLDRQYLAINEISGQLDVDLILRCMSDENLPYDLRASFCRLMLHMHVDRDPQEQVTPVKYARLWSEIPSEIAIDDYDSSGASKDEIKERFAQTMEFVEEYLRDVVCQRFPFSDKEKNKLTFEVVNLARNLIYFGFYNFSDLLRLTKILLAILDCVHVTTIFPISKMAKGEENKGSNVMRSIHGVGELMTQVVLRGGGFLPMTPMAAAPEGNVKQAEPEKEDIMVMDTKLKIIEILQFILNVRLDYRISCLLCIFKREFDESNSQTSETSSGNSSQEGPSNVPGALDFEHIEEQAEGIFGGSEENTPLDLDDHGGRTFLRVLLHLTMHDYPPLVSGALQLLFRHFSQRQEVLQAFKQVQLLVTSQDVDNYKQIKQDLDQLRSIVEKSELWVYKGQGPDETMDGASGENEHKKTEEGNNKPQKHESTSSYNYRVVKEILIRLSKLCVQESASVRKSRKQQQRLLRNMGAHAVVLELLQIPYEKAEDTKMQEIMRLAHEFLQNFCAGNQQNQALLHKHINLFLNPGILEAVTMQHIFMNNFQLCSEINERVVQHFVHCIETHGRNVQYIKFLQTIVKAEGKFIKKCQDMVMAELVNSGEDVLVFYNDRASFQTLIQMMRSERDRMDENSPLMYHIHLVELLAVCTEGKNVYTEIKCNSLLPLDDIVRVVTHEDCIPEVKIAYINFLNHCYVDTEVEMKEIYTSNHMWKLFENFLVDICRACNNTSDRKHADSILEKYVTEIVMSIVTTFFSSPFSDQSTTLQTRQPVFVQLLQGVFRVYHCNWLMPSQKASVESCIRVLSDVAKSRAIAIPVDLDSQVNNLFLKSHSIVQKTAMNWRLSARNAARRDSVLAASRDYRNIIERLQDIVSALEDRLRPLVQAELSVLVDVLHRPELLFPENTDARRKCESGGFICKLIKHTKQLLEENEEKLCIKVLQTLREMMTKDRGYGEKGEALRQVLVNRYYGNVRPSGRRESLTSFGNGPLSAGGPGKPGGGGGGSGSSSMSRGEMSLAEVQCHLDKEGASNLVIDLIMNASSDRVFHESILLAIALLEGGNTTIQHSFFCRLTEDKKSEKFFKVFYDRMKVAQQEIKATVTVNTSDLGNKKKDDEVDRDAPSRKKAKEPTTQITEEVRDQLLEASAATRKAFTTFRREADPDDHYQPGEGTQATADKAKDDLEMSAVITIMQPILRFLQLLCENHNRDLQNFLRCQNNKTNYNLVCETLQFLDCICGSTTGGLGLLGLYINEKNVALINQTLESLTEYCQGPCHENQNCIATHESNGIDIITALILNDINPLGKKRMDLVLELKNNASKLLLAIMESRHDSENAERILYNMRPKELVEVIKKAYMQGEVEFEDGENGEDGAASPRNVGHNIYILAHQLARHNKELQSMLKPGGQVDGDEALEFYAKHTAQIEIVRLDRTMEQIVFPVPSICEFLTKESKLRIYYTTERDEQGSKINDFFLRSEDLFNEMNWQKKLRAQPVLYWCARNMSFWSSISFNLAVLMNLLVAFFYPFKGVRGGTLEPHWSGLLWTAMLISLAIVIALPKPHGIRALIASTILRLIFSVGLQPTLFLLGAFNVCNKIIFLMSFVGNCGTFTRGYRAMVLDVEFLYHLLYLVICAMGLFVHEFFYSLLLFDLVYREETLLNVIKSVTRNGRSIILTAVLALILVYLFSIVGYLFFKDDFILEVDRLPNETAVPETGESLASEFLFSDVCRVESGENCSSPAPREELVPAEETEQDKEHTCETLLMCIVTVLSHGLRSGGGVGDVLRKPSKEEPLFAARVIYDLLFFFMVIIIVLNLIFGVIIDTFADLRSEKQKKEEILKTTCFICGLERDKFDNKTVTFEEHIKEEHNMWHYLCFIVLVKVKDSTEYTGPESYVAEMIKERNLDWFPRMRAMSLVSSDSEGEQNELRNLQEKLESTMKLVTNLSGQLSELKDQMTEQRKQKQRIGLLGHPPHMNVNPQQPA

SEQ ID NO: 32581 - protein, 2734 aa, Homo sapiens
MSDKMSSFLHIGDICSLYAEGSTNGFISTLGLVDDRCVVQPETGDLNNPPKKFRDCLFKLCPMNRYSAQKQFWKAAKPGANSTTDAVLLNKLHHAADLEKKQNETENRKLLGTVIQYGNVIQLLHLKSNKYLTVNKRLPALLEKNAMRVTLDEAGNEGSWFYIQPFYKLRSIGDSVVIGDKVVLNPVNAGQPLHASSHQLVDNPGCNEVNSVNCNTSWKIVLFMKWSDNKDDILKGGDVVRLFHAEQEKFLTCDEHRKKQHVFLRTTGRQSATSATSSKALWEVEVVQHDPCRGGAGYWNSLFRFKHLATGHYLAAEVDPDQDASRSRLRNAQEKMVYSLVSVPEGNDISSIFELDPTTLRGGDSLVPRNSYVRLRHLCTNTWVHSTNIPIDKEEEKPVMLKIGTSPVKEDKEAFAIVPVSPAEVRDLDFANDASKVLGSIAGKLEKGTITQNERRSVTKLLEDLVYFVTGGTNSGQDVLEVVFSKPNRERQKLMREQNILKQIFKLLQAPFTDCGDGPMLRLEELGDQRHAPFRHICRLCYRVLRHSQQDYRKNQEYIAKQFGFMQKQIGYDVLAEDTITALLHNNRKLLEKHITAAEIDTFVSLVRKNREPRFLDYLSDLCVSMNKSIPVTQELICKAVLNPTNADILIETKLVLSRFEFEGVSSTGENALEAGEDEEEVWLFWRDSNKEIRSKSVRELAQDAKEGQKEDRDVLSYYRYQLNLFARMCLDRQYLAINEISGQLDVDLILRCMSDENLPYDLRASFCRLMLHMHVDRDPQEQVTPVKYARLWSEIPSEIAIDDYDSSGASKDEIKERFAQTMEFVEEYLRDVVCQRFPFSDKEKNKLTFEVVNLARNLIYFGFYNFSDLLRLTKILLAILDCVHVTTIFPISKMAKGEENKGSNVMRSIHGVGELMTQVVLRGGGFLPMTPMAAAPEGNVKQAEPEKEDIMVMDTKLKIIEILQFILNVRLDYRISCLLCIFKREFDESNSQTSETSSGNSSQEGPSNVPGALDFEHIEEQAEGIFGGSEENTPLDLDDHGGRTFLRVLLHLTMHDYPPLVSGALQLLFRHFSQRQEVLQAFKQVQLLVTSQDVDNYKQIKQDLDQLRSIVEKSELWVYKGQGPDETMDGASGENEHKKTEEGNNKPQKHESTSSYNYRVVKEILIRLSKLCVQESASVRKSRKQQQRLLRNMGAHAVVLELLQIPYEKAEDTKMQEIMRLAHEFLQNFCAGNQQNQALLHKHINLFLNPGILEAVTMQHIFMNNFQLCSEINERVVQHFVHCIETHGRNVQYIKFLQTIVKAEGKFIKKCQDMVMAELVNSGEDVLVFYNDRASFQTLIQMMRSERDRMDENSPLMYHIHLVELLAVCTEGKNVYTEIKCNSLLPLDDIVRVVTHEDCIPEVKIAYINFLNHCYVDTEVEMKEIYTSNHMWKLFENFLVDICRACNNTSDRKHADSILEKYVTEIVMSIVTTFFSSPFSDQSTTLQTRQPVFVQLLQGVFRVYHCNWLMPSQKASVESCIRVLSDVAKSRAIAIPVDLDSQVNNLFLKSHSIVQKTAMNWRLSARNAARRDSVLAASRDYRNIIERLQDIVSALEDRLRPLVQAELSVLVDVLHRPELLFPENTDARRKCESGGFICKLIKHTKQLLEENEEKLCIKVLQTLREMMTKDRGYGEKLISIDELDNAELPPAPDSENATEELEPSPPLRQLEDHKRGEALRQVLVNRYYGNVRPSGRRESLTSFGNGPLSAGGPGKPGGGGGGSGSSSMSRGEMSLAEVQCHLDKEGASNLVIDLIMNASSDRVFHESILLAIALLEGGNTTIQHSFFCRLTEDKKSEKFFKVFYDRMKVAQQEIKATVTVNTSDLGNKKKDDEVDRDAPSRKKAKEPTTQITEEVRDQLLEASAATRKAFTTFRREADPDDHYQPGEGTQATADKAKDDLEMSAVITIMQPILRFLQLLCENHNRDLQNFLRCQNNKTNYNLVCETLQFLDCICGSTTGGLGLLGLYINEKNVALINQTLESLTEYCQGPCHENQNCIATHESNGIDIITALILNDINPLGKKRMDLVLELKNNASKLLLAIMESRHDSENAERILYNMRPKELVEVIKKAYMQGEVEFEDGENGEDGAASPRNVGHNIYILAHQLARHNKELQSMLKPGGQVDGDEALEFYAKHTAQIEIVRLDRTMEQIVFPVPSICEFLTKESKLRIYYTTERDEQGSKINDFFLRSEDLFNEMNWQKKLRAQPVLYWCARNMSFWSSISFNLAVLMNLLVAFFYPFKGVRGGTLEPHWSGLLWTAMLISLAIVIALPKPHGIRALIASTILRLIFSVGLQPTLFLLGAFNVCNKIIFLMSFVGNCGTFTRGYRAMVLDVEFLYHLLYLVICAMGLFVHEFFYSLLLFDLVYREETLLNVIKSVTRNGRSIILTAVLALILVYLFSIVGYLFFKDDFILEVDRLPNETAVPETGESLASEFLFSDVCRVESGENCSSPAPREELVPAEETEQDKEHTCETLLMCIVTVLSHGLRSGGGVGDVLRKPSKEEPLFAARVIYDLLFFFMVIIIVLNLIFGVIIDTFADLRSEKQKKEEILKTTCFICGLERDKFDNKTVTFEEHIKEEHNMWHYLCFIVLVKVKDSTEYTGPESYVAEMIKERNLDWFPRMRAMSLVSSDSEGEQNELRNLQEKLESTMKLVTNLSGQLSELKDQMTEQRKQKQRIGLLGHPPHMNVNPQQPA

SEQ ID NO: 32582 - protein, 2742 aa, Homo sapiens
MSDKMSSFLHIGDICSLYAEGSTNGFISTLGLVDDRCVVQPETGDLNNPPKKFRDCLFKLCPMNRYSAQKQFWKAAKPGANSTTDAVLLNKLHHAADLEKKQNETENRKLLGTVIQYGNVIQLLHLKSNKYLTVNKRLPALLEKNAMRVTLDEAGNEGSWFYIQPFYKLRSIGDSVVIGDKVVLNPVNAGQPLHASSHQLVDNPGCNEVNSVNCNTSWKIVLFMKWSDNKDDILKGGDVVRLFHAEQEKFLTCDEHRKKQHVFLRTTGRQSATSATSSKALWEVEVVQHDPCRGGAGYWNSLFRFKHLATGHYLAAEVDPDFEEECLEFQPSVDPDQDASRSRLRNAQEKMVYSLVSVPEGNDISSIFELDPTTLRGGDSLVPRNSYVRLRHLCTNTWVHSTNIPIDKEEEKPVMLKIGTSPVKEDKEAFAIVPVSPAEVRDLDFANDASKVLGSIAGKLEKGTITQNERRSVTKLLEDLVYFVTGGTNSGQDVLEVVFSKPNRERQKLMREQNILKQIFKLLQAPFTDCGDGPMLRLEELGDQRHAPFRHICRLCYRVLRHSQQDYRKNQEYIAKQFGFMQKQIGYDVLAEDTITALLHNNRKLLEKHITAAEIDTFVSLVRKNREPRFLDYLSDLCVSMNKSIPVTQELICKAVLNPTNADILIETKLVLSRFEFEGVSSTGENALEAGEDEEEVWLFWRDSNKEIRSKSVRELAQDAKEGQKEDRDVLSYYRYQLNLFARMCLDRQYLAINEISGQLDVDLILRCMSDENLPYDLRASFCRLMLHMHVDRDPQEQVTPVKYARLWSEIPSEIAIDDYDSSGASKDEIKERFAQTMEFVEEYLRDVVCQRFPFSDKEKNKLTFEVVNLARNLIYFGFYNFSDLLRLTKILLAILDCVHVTTIFPISKMAKGEENKGNNDVEKLKSSNVMRSIHGVGELMTQVVLRGGGFLPMTPMAAAPEGNVKQAEPEKEDIMVMDTKLKIIEILQFILNVRLDYRISCLLCIFKREFDESNSQTSETSSGNSSQEGPSNVPGALDFEHIEEQAEGIFGGSEENTPLDLDDHGGRTFLRVLLHLTMHDYPPLVSGALQLLFRHFSQRQEVLQAFKQVQLLVTSQDVDNYKQIKQDLDQLRSIVEKSELWVYKGQGPDETMDGASGENEHKKTEEGNNKPQKHESTSSYNYRVVKEILIRLSKLCVQESASVRKSRKQQQRLLRNMGAHAVVLELLQIPYEKAEDTKMQEIMRLAHEFLQNFCAGNQQNQALLHKHINLFLNPGILEAVTMQHIFMNNFQLCSEINERVVQHFVHCIETHGRNVQYIKFLQTIVKAEGKFIKKCQDMVMAELVNSGEDVLVFYNDRASFQTLIQMMRSERDRMDENSPLMYHIHLVELLAVCTEGKNVYTEIKCNSLLPLDDIVRVVTHEDCIPEVKIAYINFLNHCYVDTEVEMKEIYTSNHMWKLFENFLVDICRACNNTSDRKHADSILEKYVTEIVMSIVTTFFSSPFSDQSTTLQTRQPVFVQLLQGVFRVYHCNWLMPSQKASVESCIRVLSDVAKSRAIAIPVDLDSQVNNLFLKSHSIVQKTAMNWRLSARNAARRDSVLAASRDYRNIIERLQDIVSALEDRLRPLVQAELSVLVDVLHRPELLFPENTDARRKCESGGFICKLIKHTKQLLEENEEKLCIKVLQTLREMMTKDRGYGEKLISIDELDNAELPPAPDSENATEGEALRQVLVNRYYGNVRPSGRRESLTSFGNGPLSAGGPGKPGGGGGGSGSSSMSRGEMSLAEVQCHLDKEGASNLVIDLIMNASSDRVFHESILLAIALLEGGNTTIQHSFFCRLTEDKKSEKFFKVFYDRMKVAQQEIKATVTVNTSDLGNKKKDDEVDRDAPSRKKAKEPTTQITEEVRDQLLEASAATRKAFTTFRREADPDDHYQPGEGTQATADKAKDDLEMSAVITIMQPILRFLQLLCENHNRDLQNFLRCQNNKTNYNLVCETLQFLDCICGSTTGGLGLLGLYINEKNVALINQTLESLTEYCQGPCHENQNCIATHESNGIDIITALILNDINPLGKKRMDLVLELKNNASKLLLAIMESRHDSENAERILYNMRPKELVEVIKKAYMQGEVEFEDGENGEDGAASPRNVGHNIYILAHQLARHNKELQSMLKPGGQVDGDEALEFYAKHTAQIEIVRLDRTMEQIVFPVPSICEFLTKESKLRIYYTTERDEQGSKINDFFLRSEDLFNEMNWQKKLRAQPVLYWCARNMSFWSSISFNLAVLMNLLVAFFYPFKGVRGGTLEPHWSGLLWTAMLISLAIVIALPKPHGIRALIASTILRLIFSVGLQPTLFLLGAFNVCNKIIFLMSFVGNCGTFTRGYRAMVLDVEFLYHLLYLVICAMGLFVHEFFYSLLLFDLVYREETLLNVIKSVTRNGRSIILTAVLALILVYLFSIVGYLFFKDDFILEVDRLPNETAVPETGESLASEFLFSDVCRVESGENCSSPAPREELVPAEETEQDKEHTCETLLMCIVTVLSHGLRSGGGVGDVLRKPSKEEPLFAARVIYDLLFFFMVIIIVLNLIFGVIIDTFADLRSEKQKKEEILKTTCFICGLERDKFDNKTVTFEEHIKEEHNMWHYLCFIVLVKVKDSTEYTGPESYVAEMIKERNLDWFPRMRAMSLVSSDSEGEQNELRNLQEKLESTMKLVTNLSGQLSELKDQMTEQRKQKQRIGLLGHPPHMNVNPQQPA

SEQ ID NO: 32583 - protein, 2727 aa, Homo sapiens
MSDKMSSFLHIGDICSLYAEGSTNGFISTLGLVDDRCVVQPETGDLNNPPKKFRDCLFKLCPMNRYSAQKQFWKAAKPGANSTTDAVLLNKLHHAADLEKKQNETENRKLLGTVIQYGNVIQLLHLKSNKYLTVNKRLPALLEKNAMRVTLDEAGNEGSWFYIQPFYKLRSIGDSVVIGDKVVLNPVNAGQPLHASSHQLVDNPGCNEVNSVNCNTSWKIVLFMKWSDNKDDILKGGDVVRLFHAEQEKFLTCDEHRKKQHVFLRTTGRQSATSATSSKALWEVEVVQHDPCRGGAGYWNSLFRFKHLATGHYLAAEVDPDQDASRSRLRNAQEKMVYSLVSVPEGNDISSIFELDPTTLRGGDSLVPRNSYVRLRHLCTNTWVHSTNIPIDKEEEKPVMLKIGTSPVKEDKEAFAIVPVSPAEVRDLDFANDASKVLGSIAGKLEKGTITQNERRSVTKLLEDLVYFVTGGTNSGQDVLEVVFSKPNRERQKLMREQNILKQIFKLLQAPFTDCGDGPMLRLEELGDQRHAPFRHICRLCYRVLRHSQQDYRKNQEYIAKQFGFMQKQIGYDVLAEDTITALLHNNRKLLEKHITAAEIDTFVSLVRKNREPRFLDYLSDLCVSMNKSIPVTQELICKAVLNPTNADILIETKLVLSRFEFEGVSSTGENALEAGEDEEEVWLFWRDSNKEIRSKSVRELAQDAKEGQKEDRDVLSYYRYQLNLFARMCLDRQYLAINEISGQLDVDLILRCMSDENLPYDLRASFCRLMLHMHVDRDPQEQVTPVKYARLWSEIPSEIAIDDYDSSGASKDEIKERFAQTMEFVEEYLRDVVCQRFPFSDKEKNKLTFEVVNLARNLIYFGFYNFSDLLRLTKILLAILDCVHVTTIFPISKMAKGEENKGNNDVEKLKSSNVMRSIHGVGELMTQVVLRGGGFLPMTPMAAAPEGNVKQAEPEKEDIMVMDTKLKIIEILQFILNVRLDYRISCLLCIFKREFDESNSQTSETSSGNSSQEGPSNVPGALDFEHIEEQAEGIFGGSEENTPLDLDDHGGRTFLRVLLHLTMHDYPPLVSGALQLLFRHFSQRQEVLQAFKQVQLLVTSQDVDNYKQIKQDLDQLRSIVEKSELWVYKGQGPDETMDGASGENEHKKTEEGNNKPQKHESTSSYNYRVVKEILIRLSKLCVQESASVRKSRKQQQRLLRNMGAHAVVLELLQIPYEKAEDTKMQEIMRLAHEFLQNFCAGNQQNQALLHKHINLFLNPGILEAVTMQHIFMNNFQLCSEINERVVQHFVHCIETHGRNVQYIKFLQTIVKAEGKFIKKCQDMVMAELVNSGEDVLVFYNDRASFQTLIQMMRSERDRMDENSPLMYHIHLVELLAVCTEGKNVYTEIKCNSLLPLDDIVRVVTHEDCIPEVKIAYINFLNHCYVDTEVEMKEIYTSNHMWKLFENFLVDICRACNNTSDRKHADSILEKYVTEIVMSIVTTFFSSPFSDQSTTLQTRQPVFVQLLQGVFRVYHCNWLMPSQKASVESCIRVLSDVAKSRAIAIPVDLDSQVNNLFLKSHSIVQKTAMNWRLSARNAARRDSVLAASRDYRNIIERLQDIVSALEDRLRPLVQAELSVLVDVLHRPELLFPENTDARRKCESGGFICKLIKHTKQLLEENEEKLCIKVLQTLREMMTKDRGYGEKLISIDELDNAELPPAPDSENATEGEALRQVLVNRYYGNVRPSGRRESLTSFGNGPLSAGGPGKPGGGGGGSGSSSMSRGEMSLAEVQCHLDKEGASNLVIDLIMNASSDRVFHESILLAIALLEGGNTTIQHSFFCRLTEDKKSEKFFKVFYDRMKVAQQEIKATVTVNTSDLGNKKKDDEVDRDAPSRKKAKEPTTQITEEVRDQLLEASAATRKAFTTFRREADPDDHYQPGEGTQATADKAKDDLEMSAVITIMQPILRFLQLLCENHNRDLQNFLRCQNNKTNYNLVCETLQFLDCICGSTTGGLGLLGLYINEKNVALINQTLESLTEYCQGPCHENQNCIATHESNGIDIITALILNDINPLGKKRMDLVLELKNNASKLLLAIMESRHDSENAERILYNMRPKELVEVIKKAYMQGEVEFEDGENGEDGAASPRNVGHNIYILAHQLARHNKELQSMLKPGGQVDGDEALEFYAKHTAQIEIVRLDRTMEQIVFPVPSICEFLTKESKLRIYYTTERDEQGSKINDFFLRSEDLFNEMNWQKKLRAQPVLYWCARNMSFWSSISFNLAVLMNLLVAFFYPFKGVRGGTLEPHWSGLLWTAMLISLAIVIALPKPHGIRALIASTILRLIFSVGLQPTLFLLGAFNVCNKIIFLMSFVGNCGTFTRGYRAMVLDVEFLYHLLYLVICAMGLFVHEFFYSLLLFDLVYREETLLNVIKSVTRNGRSIILTAVLALILVYLFSIVGYLFFKDDFILEVDRLPNETAVPETGESLASEFLFSDVCRVESGENCSSPAPREELVPAEETEQDKEHTCETLLMCIVTVLSHGLRSGGGVGDVLRKPSKEEPLFAARVIYDLLFFFMVIIIVLNLIFGVIIDTFADLRSEKQKKEEILKTTCFICGLERDKFDNKTVTFEEHIKEEHNMWHYLCFIVLVKVKDSTEYTGPESYVAEMIKERNLDWFPRMRAMSLVSSDSEGEQNELRNLQEKLESTMKLVTNLSGQLSELKDQMTEQRKQKQRIGLLGHPPHMNVNPQQPA

SEQ ID NO: 32584 - protein, 2718 aa, Homo sapiens
MSDKMSSFLHIGDICSLYAEGSTNGFISTLGLVDDRCVVQPETGDLNNPPKKFRDCLFKLCPMNRYSAQKQFWKAAKPGANSTTDAVLLNKLHHAADLEKKQNETENRKLLGTVIQYGNVIQLLHLKSNKYLTVNKRLPALLEKNAMRVTLDEAGNEGSWFYIQPFYKLRSIGDSVVIGDKVVLNPVNAGQPLHASSHQLVDNPGCNEVNSVNCNTSWKIVLFMKWSDNKDDILKGGDVVRLFHAEQEKFLTCDEHRKKQHVFLRTTGRQSATSATSSKALWEVEVVQHDPCRGGAGYWNSLFRFKHLATGHYLAAEVDPDQDASRSRLRNAQEKMVYSLVSVPEGNDISSIFELDPTTLRGGDSLVPRNSYVRLRHLCTNTWVHSTNIPIDKEEEKPVMLKIGTSPVKEDKEAFAIVPVSPAEVRDLDFANDASKVLGSIAGKLEKGTITQNERRSVTKLLEDLVYFVTGGTNSGQDVLEVVFSKPNRERQKLMREQNILKQIFKLLQAPFTDCGDGPMLRLEELGDQRHAPFRHICRLCYRVLRHSQQDYRKNQEYIAKQFGFMQKQIGYDVLAEDTITALLHNNRKLLEKHITAAEIDTFVSLVRKNREPRFLDYLSDLCVSMNKSIPVTQELICKAVLNPTNADILIETKLVLSRFEFEGVSSTGENALEAGEDEEEVWLFWRDSNKEIRSKSVRELAQDAKEGQKEDRDVLSYYRYQLNLFARMCLDRQYLAINEISGQLDVDLILRCMSDENLPYDLRASFCRLMLHMHVDRDPQEQVTPVKYARLWSEIPSEIAIDDYDSSGASKDEIKERFAQTMEFVEEYLRDVVCQRFPFSDKEKNKLTFEVVNLARNLIYFGFYNFSDLLRLTKILLAILDCVHVTTIFPISKMAKGEENKGSNVMRSIHGVGELMTQVVLRGGGFLPMTPMAAAPEGNVKQAEPEKEDIMVMDTKLKIIEILQFILNVRLDYRISCLLCIFKREFDESNSQTSETSSGNSSQEGPSNVPGALDFEHIEEQAEGIFGGSEENTPLDLDDHGGRTFLRVLLHLTMHDYPPLVSGALQLLFRHFSQRQEVLQAFKQVQLLVTSQDVDNYKQIKQDLDQLRSIVEKSELWVYKGQGPDETMDGASGENEHKKTEEGNNKPQKHESTSSYNYRVVKEILIRLSKLCVQESASVRKSRKQQQRLLRNMGAHAVVLELLQIPYEKAEDTKMQEIMRLAHEFLQNFCAGNQQNQALLHKHINLFLNPGILEAVTMQHIFMNNFQLCSEINERVVQHFVHCIETHGRNVQYIKFLQTIVKAEGKFIKKCQDMVMAELVNSGEDVLVFYNDRASFQTLIQMMRSERDRMDENSPLMYHIHLVELLAVCTEGKNVYTEIKCNSLLPLDDIVRVVTHEDCIPEVKIAYINFLNHCYVDTEVEMKEIYTSNHMWKLFENFLVDICRACNNTSDRKHADSILEKYVTEIVMSIVTTFFSSPFSDQSTTLQTRQPVFVQLLQGVFRVYHCNWLMPSQKASVESCIRVLSDVAKSRAIAIPVDLDSQVNNLFLKSHSIVQKTAMNWRLSARNAARRDSVLAASRDYRNIIERLQDIVSALEDRLRPLVQAELSVLVDVLHRPELLFPENTDARRKCESGGFICKLIKHTKQLLEENEEKLCIKVLQTLREMMTKDRGYGEKLISIDELDNAELPPAPDSENATEGEALRQVLVNRYYGNVRPSGRRESLTSFGNGPLSAGGPGKPGGGGGGSGSSSMSRGEMSLAEVQCHLDKEGASNLVIDLIMNASSDRVFHESILLAIALLEGGNTTIQHSFFCRLTEDKKSEKFFKVFYDRMKVAQQEIKATVTVNTSDLGNKKKDDEVDRDAPSRKKAKEPTTQITEEVRDQLLEASAATRKAFTTFRREADPDDHYQPGEGTQATADKAKDDLEMSAVITIMQPILRFLQLLCENHNRDLQNFLRCQNNKTNYNLVCETLQFLDCICGSTTGGLGLLGLYINEKNVALINQTLESLTEYCQGPCHENQNCIATHESNGIDIITALILNDINPLGKKRMDLVLELKNNASKLLLAIMESRHDSENAERILYNMRPKELVEVIKKAYMQGEVEFEDGENGEDGAASPRNVGHNIYILAHQLARHNKELQSMLKPGGQVDGDEALEFYAKHTAQIEIVRLDRTMEQIVFPVPSICEFLTKESKLRIYYTTERDEQGSKINDFFLRSEDLFNEMNWQKKLRAQPVLYWCARNMSFWSSISFNLAVLMNLLVAFFYPFKGVRGGTLEPHWSGLLWTAMLISLAIVIALPKPHGIRALIASTILRLIFSVGLQPTLFLLGAFNVCNKIIFLMSFVGNCGTFTRGYRAMVLDVEFLYHLLYLVICAMGLFVHEFFYSLLLFDLVYREETLLNVIKSVTRNGRSIILTAVLALILVYLFSIVGYLFFKDDFILEVDRLPNETAVPETGESLASEFLFSDVCRVESGENCSSPAPREELVPAEETEQDKEHTCETLLMCIVTVLSHGLRSGGGVGDVLRKPSKEEPLFAARVIYDLLFFFMVIIIVLNLIFGVIIDTFADLRSEKQKKEEILKTTCFICGLERDKFDNKTVTFEEHIKEEHNMWHYLCFIVLVKVKDSTEYTGPESYVAEMIKERNLDWFPRMRAMSLVSSDSEGEQNELRNLQEKLESTMKLVTNLSGQLSELKDQMTEQRKQKQRIGLLGHPPHMNVNPQQPA

SEQ ID NO: 32585 - protein, 416 aa, Homo sapiens
MATEPPSPLRVEAPGPPEMRTSPAIESTPEGTPQPAGGRLRFLNGCVPLSHQVAGHMYGKDKVGILQHPDGTVLKQLQPPPRGPRELEFYNMVYAADCFDGVLLELRKYLPKYYGIWSPPTAPNDLYLKLEDVTHKFNKPCIMDVKIGQKSYDPFASSEKIQQQVSKYPLMEEIGFLVLGMRVYHVHSDSYETENQHYGRSLTKETIKDGVSRFFHNGYCLRKDAVAASIQKIEKILQWFENQKQLNFYASSLLFVYEGSSQPTTTKLNDRTLAEKFLSKGQLSDTEVLEYNNNFHVLSSTANGKIESSVGKSLSKMYARHRKIYTKKHHSQTSLKVENLEQDNGWKSMSQEHLNGNVLSQLEKVFYHLPTGCQEIAEVEVRMIDFAHVFPSNTIDEGYVYGLKHLISVLRSILDN

SEQ ID NO: 32586 - protein, 320 aa, Homo sapiens
MAEGDAGSDQRQNEEIEAMAAIYGEEWCVIDDCAKIFCIRISDDIDDPKWTLCLQVMLPNEYPGTAPPIYQLNAPWLKGQERADLSNSLEEIYIQNIGESILYLWVEKIRDVLIQKSQMTEPGPDVKKKTEEEDVECEDDLILACQPESSLKALDFDISETRTEVEVEELPPIDHGIPITDRRSTFQAHLAPVVCPKQVKMVLSKLYENKKIASATHNIYAYRIYCEDKQTFLQDCEDDGETAAGGRLLHLMEILNVKNVMVVVSRWYGGILLGPDRFKHINNCARNILVEKNYTNSPEESSKALGKNKKVRKDKKRNEH

SEQ ID NO: 32587 - protein, 202 aa, Homo sapiens
MTEPGPDVKKKTEEEDVECEDDLILACQPESSLKALDFDISETRTEVEVEELPPIDHGIPITDRRSTFQAHLAPVVCPKQVKMVLSKLYENKKIASATHNIYAYRIYCEDKQTFLQDCEDDGETAAGGRLLHLMEILNVKNVMVVVSRWYGGILLGPDRFKHINNCARNILVEKNYTNSPEESSKALGKNKKVRKDKKRNEH

SEQ ID NO: 32588 - protein, 285 aa, Homo sapiens
MARNAEKAMTALARFRQAQLEEGKVKERRPFLASECTELPKAEKWRRQIIGEISKKVAQIQNAGLGEFRIRDLNDEINKLLREKGHWEVRIKELGGPDYGKVGPKMLDHEGKEVPGNRGYKYFGAAKDLPGVRELFEKEPLPPPRKTRAELMKAIDFEYYGYLDEDDGVIVPLEQEYEKKLRAELVEKWKAEREARLARGEKEEEEEEEEEINIYAVTEEESDEEGSQEKGGDDSQQKFIAHVPVPSQQEIEEALVRRKKMELLQKYASETLQAQSEEARRLLGY

SEQ ID NO: 32589 - protein, 331 aa, Homo sapiens
MARNAEKAMTALARFRQAQLEEGKVKERRPFLASECTELPKAEKWRRQIIGEISKKVAQIQNAGLGEFRIRDLNDEINKLLREKGHWEVRIKELGGPDYGKVGPKMLDHEGKEVPGNRGYKYFGAAKDLPGVRELFEKEPLPPPRKTRAELMKAIDFEYYGYLDEDDGVIVPLEQEYEKKLRAELVEKWKAEREARLARGEKEEEEEEEEEINIYAVTEEESDEEGSQEKGGDDSQQKFIAHVPVPSQQEIEEALVRRKKMELLQKYASETLQAQSEEARRLLGCRSGTRPARSGSAPSPRATTAVPMGPSLPTTSPRGAPSCRCLTGLRM

SEQ ID NO: 32590 - protein, 307 aa, Homo sapiens
MARNAEKAMTALARFRQAQLEEGKVKERRPFLASECTELPKAEKWRRQIIGEISKKVAQIQNAGLGEFRIRDLNDEINKLLREKGHWEVRIKELGGPDYGKVGPKMLDHEGKEVPGNRGYKYFGAAKDLPGVRELFEKERQVRWLMPVIPALWEAEAGGSQALPPPRKTRAELMKAIDFEYYGYLDEDDGVIVPLEQEYEKKLRAELVEKWKAEREARLARGEKEEEEEEEEEINIYAVTEEESDEEGSQEKGGDDSQQKFIAHVPVPSQQEIEEALVRRKKMELLQKYASETLQAQSEEARRLLGY

SEQ ID NO: 32591 - protein, 356 aa, Homo sapiens
MSKLWRRGSTSGAMEAPEPGEALELSLAGAHGHGVHKKKHKKHKKKHKKKHHQEEDAGPTQPSPAKPQLKLKIKLGGQVLGTKSVPTFTVIPEGPRSPSPLMVVDNEEEPMEGVPLEQYRAWLDEDSNLSPSPLRDLSGGLGGQEEEEEQRWLDALEKGELDDNGDLKKEINERLLTARQRALLQKARSQPSPMLPLPVAEGCPPPALTEEMLLKREERARKRRLQAARRAEEHKNQTIERLTKTAATSGRGGRGGARGERRGGRAAAPAPMVRYCSGAQGSTLSFPPGVPAPTAVSQRPSPSGPPPRCSVPGCPHPRRYACSRTGQALCSLQCYRINLQMRLGGPEGPGSPLLAT

SEQ ID NO: 32592 - protein, 1097 aa, Homo sapiens
MAAAAAEQQQFYLLLGNLLSPDNVVRKQAEETYENIPGQSKITFLLQAIRNTTAAEEARQMAAVLLRRLLSSAFDEVYPALPSDVQTAIKSELLMIIQMETQSSMRKKVCDIAAELARNLIDEDGNNQWPEGLKFLFDSVSSQNVGLREAALHIFWNFPGIFGNQQQHYLDVIKRMLVQCMQDQEHPSIRTLSARATAAFILANEHNVALFKHFADLLPGFLQAVNDSCYQNDDSVLKSLVEIADTVPKYLRPHLEATLQLSLKLCGDTSLNNMQRQLALEVIVTLSETAAAMLRKHTNIVAQTIPQMLAMMVDLEEDEDWANADELEDDDFDSNAVAGESALDRMACGLGGKLVLPMIKEHIMQMLQNPDWKYRHAGLMALSAIGEGCHQQMEGILNEIVNFVLLFLQDPHPRVRYAACNAVGQMATDFAPGFQKKFHEKVIAALLQTMEDQGNQRVQAHAAAALINFTEDCPKSLLIPYLDNLVKHLHSIMVLKLQELIQKGTKLVLEQVVTSIASVADTAEEKFVPYYDLFMPSLKHIVENAVQKELRLLRGKTIECISLIGLAVGKEKFMQDASDVMQLLLKTQTDFNDMEDDDPQISYMISAWARMCKILGKEFQQYLPVVMGPLMKTASIKPEVALLDTQDMENMSDDDGWEFVNLGDQQSFGIKTAGLEEKSTACQMLVCYAKELKEGFVEYTEQVVKLMVPLLKFYFHDGVRVAAAESMPLLLECARVRGPEYLTQMWHFMCDALIKAIGTEPDSDVLSEIMHSFAKCIEVMGDGCLNNEHFEELGGILKAKLEEHFKNQELRQVKRQDEDYDEQVEESLQDEDDNDVYILTKVSDILHSIFSSYKEKVLPWFEQLLPLIVNLICPHRPWPDRQWGLCIFDDVIEHCSPASFKYAEYFLRPMLQYVCDNSPEVRQAAAYGLGVMAQYGGDNYRPFCTEALPLLVRVIQSADSKTKENVNATENCISAVGKIMKFKPDCVNVEEVLPHWLSWLPLHEDKEEAVQTFNYLCDLIESNHPIVLGPNNTNLPKIFSIIAEGEMHEAIKHEDPCAKRLANVVRQVQTSGGLWTECIAQLSPEQQAAIQELLNSA

SEQ ID NO: 32593 - protein, 1037 aa, Homo sapiens
MAAVLLRRLLSSAFDEVYPALPSDVQTAIKSELLMIIQMETQSSMRKKVCDIAAELARNLIDEDGNNQWPEGLKFLFDSVSSQNVGLREAALHIFWNFPGIFGNQQQHYLDVIKRMLVQCMQDQEHPSIRTLSARATAAFILANEHNVALFKHFADLLPGFLQAVNDSCYQNDDSVLKSLVEIADTVPKYLRPHLEATLQLSLKLCGDTSLNNMQRQLALEVIVTLSETAAAMLRKHTNIVAQTIPQMLAMMVDLEEDEDWANADELEDDDFDSNAVAGESALDRMACGLGGKLVLPMIKEHIMQMLQNPDWKYRHAGLMALSAIGEGCHQQMEGILNEIVNFVLLFLQDPHPRVRYAACNAVGQMATDFAPGFQKKFHEKVIAALLQTMEDQGNQRVQAHAAAALINFTEDCPKSLLIPYLDNLVKHLHSIMVLKLQELIQKGTKLVLEQVVTSIASVADTAEEKFVPYYDLFMPSLKHIVENAVQKELRLLRGKTIECISLIGLAVGKEKFMQDASDVMQLLLKTQTDFNDMEDDDPQISYMISAWARMCKILGKEFQQYLPVVMGPLMKTASIKPEVALLDTQDMENMSDDDGWEFVNLGDQQSFGIKTAGLEEKSTACQMLVCYAKELKEGFVEYTEQVVKLMVPLLKFYFHDGVRVAAAESMPLLLECARVRGPEYLTQMWHFMCDALIKAIGTEPDSDVLSEIMHSFAKCIEVMGDGCLNNEHFEELGGILKAKLEEHFKNQELRQVKRQDEDYDEQVEESLQDEDDNDVYILTKVSDILHSIFSSYKEKVLPWFEQLLPLIVNLICPHRPWPDRQWGLCIFDDVIEHCSPASFKYAEYFLRPMLQYVCDNSPEVRQAAAYGLGVMAQYGGDNYRPFCTEALPLLVRVIQSADSKTKENVNATENCISAVGKIMKFKPDCVNVEEVLPHWLSWLPLHEDKEEAVQTFNYLCDLIESNHPIVLGPNNTNLPKIFSIIAEGEMHEAIKHEDPCAKRLANVVRQVQTSGGLWTECIAQLSPEQQAAIQELLNSA

SEQ ID NO: 32594 - protein, 1115 aa, Homo sapiens
MPEDQVGKLEATENTISAMAAAAAEQQQFYLLLGNLLSPDNVVRKQAEETYENIPGQSKITFLLQAIRNTTAAEEARQMAAVLLRRLLSSAFDEVYPALPSDVQTAIKSELLMIIQMETQSSMRKKVCDIAAELARNLIDEDGNNQWPEGLKFLFDSVSSQNVGLREAALHIFWNFPGIFGNQQQHYLDVIKRMLVQCMQDQEHPSIRTLSARATAAFILANEHNVALFKHFADLLPGFLQAVNDSCYQNDDSVLKSLVEIADTVPKYLRPHLEATLQLSLKLCGDTSLNNMQRQLALEVIVTLSETAAAMLRKHTNIVAQTIPQMLAMMVDLEEDEDWANADELEDDDFDSNAVAGESALDRMACGLGGKLVLPMIKEHIMQMLQNPDWKYRHAGLMALSAIGEGCHQQMEGILNEIVNFVLLFLQDPHPRVRYAACNAVGQMATDFAPGFQKKFHEKVIAALLQTMEDQGNQRVQAHAAAALINFTEDCPKSLLIPYLDNLVKHLHSIMVLKLQELIQKGTKLVLEQVVTSIASVADTAEEKFVPYYDLFMPSLKHIVENAVQKELRLLRGKTIECISLIGLAVGKEKFMQDASDVMQLLLKTQTDFNDMEDDDPQISYMISAWARMCKILGKEFQQYLPVVMGPLMKTASIKPEVALLDTQDMENMSDDDGWEFVNLGDQQSFGIKTAGLEEKSTACQMLVCYAKELKEGFVEYTEQVVKLMVPLLKFYFHDGVRVAAAESMPLLLECARVRGPEYLTQMWHFMCDALIKAIGTEPDSDVLSEIMHSFAKCIEVMGDGCLNNEHFEELGGILKAKLEEHFKNQELRQVKRQDEDYDEQVEESLQDEDDNDVYILTKVSDILHSIFSSYKEKVLPWFEQLLPLIVNLICPHRPWPDRQWGLCIFDDVIEHCSPASFKYAEYFLRPMLQYVCDNSPEVRQAAAYGLGVMAQYGGDNYRPFCTEALPLLVRVIQSADSKTKENVNATENCISAVGKIMKFKPDCVNVEEVLPHWLSWLPLHEDKEEAVQTFNYLCDLIESNHPIVLGPNNTNLPKIFSIIAEGEMHEAIKHEDPCAKRLANVVRQVQTSGGLWTECIAQLSPEQQAAIQELLNSA

SEQ ID NO: 32595 - protein, 154 aa, Homo sapiens
MSKRNQVSYVRPAEPAFLARFKERVGYREGPTVETKRIQPQPPDEDGDHSDKEDEQPQVVVLKKGDLSVEEVMKIKAEIKAAKADEEPTPADGRIIYRKPVKHPSDEKYSGLTASSKKKKPNEDEVNQDSVKKNSQKQIKNSSLLSFDNEDENE

SEQ ID NO: 32596 - protein, 518 aa, Homo sapiens
MPTVVVMDVSLSMTRPVSIEGSEEYQRKHLAAHGLTMLFEHMATNYKLEFTALVVFSSLWELMVPFTRDYNTLQEALSNMDDYDKTCLESALVGVCNIVQQEWGGAIPCQVVLVTDGCLGIGRGSLRHSLATQNQRSESNRFPLPFPFPSKLYIMCMANLEELQSTDSLECLERLIDLNNGEGQIFTIDGPLCLKNVQSMFGKLIDLAYTPFHAVLKCGHLTADVQVFPRPEPFVVDEEIDPIPKVINTDLEIVGFIDIADISSPPVLSRHLVLPIALNKEGDEVGTGITDDNEDENSANQIAGKIPNFCVLLHGSLKVEGMVAIVQLGPEWHGMLYSQADSKKKSNLMMSLFEPGPEPLPWLGKMAQLGPISDAKENPYGEDDNKSPFPLQPKNKRSYAQNVTVWIKPSGLQTDVQKILRNARKLPEKTQTFYKELNRLRKAALAFGFLDLLKGVADMLERECTLLPETAHPDAAFQLTHAAQQLKLASTGTSEYAAYDQNITPLHTDFSGSSTERI

SEQ ID NO: 32597 - protein, 86 aa, Homo sapiens
MPTVVVMDVSLSMTRPVSIEGSEEYQRKHLAAHGLTMLFEHMATNYKLEFTALVVFSSLWELMVPFTRDYNTLQVQNVVSYCMYRA

SEQ ID NO: 32598 - protein, 439 aa, Homo sapiens
MDDYDKTCLESALVGVCNIVQQEWGGAIPCQVVLVTDGCLGIGRGSLRHSLATQNQRSESNRFPLPFPFPSKLYIMCMANLEELQSTDSLECLERLIDLNNGEGQIFTIDGPLCLKNVQSMFGKLIDLAYTPFHAVLKCGHLTADVQVFPRPEPFVVDEEIDPIPKVINTDLEIVGFIDIADISSPPVLSRHLVLPIALNKEGDEVGTGITDDNEDENSANQIAGKIPNFCVLLHGSLKVEGMVAIVQLGPEWHGMLYSQADSKKKSNLMMSLFEPGPEPLPWLGKMAQLGPISDAKENPYGEDDNKSPFPLQPKNKRSYAQNVTVWIKPSGLQTDVQKILRNARKLPEKTQTFYKELNRLRKAALAFGFLDLLKGVADMLERECTLLPETAHPDAAFQLTHAAQQLKLASTGTSEYAAYDQNITPLHTDFSGSSTERI

SEQ ID NO: 32599 - protein, 461 aa, Homo sapiens
MPTESLCRRTVSGDGHGEALSNMDDYDKTCLESALVGVCNIVQQEWGGAIPCQVVLVTDGCLGIGRGSLRHSLATQNQRSESNRFPLPFPFPSKLYIMCMANLEELQSTDSLECLERLIDLNNGEGQIFTIDGPLCLKNVQSMFGKLIDLAYTPFHAVLKCGHLTADVQVFPRPEPFVVDEEIDPIPKVINTDLEIVGFIDIADISSPPVLSRHLVLPIALNKEGDEVGTGITDDNEDENSANQIAGKIPNFCVLLHGSLKVEGMVAIVQLGPEWHGMLYSQADSKKKSNLMMSLFEPGPEPLPWLGKMAQLGPISDAKENPYGEDDNKSPFPLQPKNKRSYAQNVTVWIKPSGLQTDVQKILRNARKLPEKTQTFYKELNRLRKAALAFGFLDLLKGVADMLERECTLLPETAHPDAAFQLTHAAQQLKLASTGTSEYAAYDQNITPLHTDFSGSSTERI

SEQ ID NO: 32600 - protein, 787 aa, Homo sapiens
MGDPGSEIIESVPPAGPEASESTTDENEDDIQFVSEGPSRPVLEYIDLVCGDDENPSAYYSDILFPKMPKRQGDFLHFLNVKKVKTDTENNEVSKNHCRLSKAKEPHFEYIEQPIIEEKPSLSSKKEIDNLVLPDCWNEKQAFMFTEQYKWLEIKEGKLGCKDCSAVRHLGSKAEKHVHVSKEWIAYLVTPNGSNKTTRQASLRKKIREHDVSKAHGKIQDLLKESTNDSICNLVHKQNNKNIDATVKVFNTVYSLVKHNRPLSDIEGARELQEKNGEVNCLNTRYSATRIAEHIAKEMKMKIFKNIIEENAKICIIIDEASTVSKKTTLVIYLQCTIQSAPAPVMLFVALKELVSTIAECIVNTLLTTLNDCGFTNEYLKANLIAFCSDGANTILGRKSGVATKLLENFPEIIIWNCLNHRLQLSLDDSISEIKQINHLKIFIDKIYSIYHQPNKNQTKLLGTVAKELETEIIKIGRVMGPRWAACSLQAATAVWHAYPILYMHFSHSYSGLAKRLANINFLQDLALMIDILEEFSVLSTALQSRSTNIKKAQKLIKRTIRALENLKIGTGKYESQIEDLIKSDKFKDIPFNKNNKFNALPRSILLDNIIQHMNLRLLSDRNHEDIFNYFDLLEPSTWPYEEITSPWIAGEKTLFHLCKILKYEVDLNDFREFVNNNIKSNNVSIPTTIYKAKKIVSTIAINSAEAERGFNLMNIICTRVRNSLTIDHVSDLMTINLLGKELADWDATPFVKSWSNCNHRLATDTRVRQKSTKVFHENQLAIWNLK

SEQ ID NO: 32601 - protein, 737 aa, Homo sapiens
MNFTYICKIIFQILFPKMPKRQGDFLHFLNVKKVKTDTENNEVSKNHCRLSKAKEPHFEYIEQPIIEEKPSLSSKKEIDNLVLPDCWNEKQAFMFTEQYKWLEIKEGKLGCKDCSAVRHLGSKAEKHVHVSKEWIAYLVTPNGSNKTTRQASLRKKIREHDVSKAHGKIQDLLKESTNDSICNLVHKQNNKNIDATVKVFNTVYSLVKHNRPLSDIEGARELQEKNGEVNCLNTRYSATRIAEHIAKEMKMKIFKNIIEENAKICIIIDEASTVSKKTTLVIYLQCTIQSAPAPVMLFVALKELVSTIAECIVNTLLTTLNDCGFTNEYLKANLIAFCSDGANTILGRKSGVATKLLENFPEIIIWNCLNHRLQLSLDDSISEIKQINHLKIFIDKIYSIYHQPNKNQTKLLGTVAKELETEIIKIGRVMGPRWAACSLQAATAVWHAYPILYMHFSHSYSGLAKRLANINFLQDLALMIDILEEFSVLSTALQSRSTNIKKAQKLIKRTIRALENLKIGTGKYESQIEDLIKSDKFKDIPFNKNNKFNALPRSILLDNIIQHMNLRLLSDRNHEDIFNYFDLLEPSTWPYEEITSPWIAGEKTLFHLCKILKYEVDLNDFREFVNNNIKSNNVSIPTTIYKAKKIVSTIAINSAEAERGFNLMNIICTRVRNSLTIDHVSDLMTINLLGKELADWDATPFVKSWSNCNHRLATDTRVRQKSTKVFHENQLAIWNLK

SEQ ID NO: 32602 - protein, 469 aa, Homo sapiens
MSIHFSSPVFTSRSAAFSGRGAQVRLSSARPGGLGSSSLYGLGASRPRVAVRSAYGGPVGAGIREVTINQSLLAPLRLDADPSLQRVRQEESEQIKTLNNKFASFIDKVRFLEQQNKLLETKWTLLQEQKSAKSSRLPDIFEAQIAGLRGQLEALQVDGGRLEAELRSMQDVVEDFKNKYEDEINHRTAAENEFVVLKKDVDAAYMSKVELEAKVDALNDEINFLRTLNETELTELQSQISDTSVVLSMDNSRSLDLDGIIAEVKAQYEEMAKCSRAEAEAWYQTKFETLQAQAGKHGDDLRNTRNEISEMNRAIQRLQAEIDNIKNQRAKLEAAIAEAEERGELALKDARAKQEELEAALQRGKQDMARQLREYQELMSVKLALDIEIATYRKLLEGEESRLAGDGVGAVNISVMNSTGGSSSGGGIGLTLGGTMGSNALSFSSSAGPGLLKAYSIRTASASRRSARD

SEQ ID NO: 32603 - protein, 788 aa, Homo sapiens
MRARPRPRPLWATVLALGALAGVGVGGPNICTTRGVSSCQQCLAVSPMCAWCSDEALPLGSPRCDLKENLLKDNCAPESIEFPVSEARVLEDRPLSDKGSGDSSQVTQVSPQRIALRLRPDDSKNFSIQVRQVEDYPVDIYYLMDLSYSMKDDLWSIQNLGTKLATQMRKLTSNLRIGFGAFVDKPVSPYMYISPPEALENPCYDMKTTCLPMFGYKHVLTLTDQVTRFNEEVKKQSVSRNRDAPEGGFDAIMQATVCDEKIGWRNDASHLLVFTTDAKTHIALDGRLAGIVQPNDGQCHVGSDNHYSASTTMDYPSLGLMTEKLSQKNINLIFAVTENVVNLYQNYSELIPGTTVGVLSMDSSNVLQLIVDAYGKIRSKVELEVRDLPEELSLSFNATCLNNEVIPGLKSCMGLKIGDTVSFSIEAKVRGCPQEKEKSFTIKPVGFKDSLIVQVTFDCDCACQAQAEPNSHRCNNGNGTFECGVCRCGPGWLGSQCECSEEDYRPSQQDECSPREGQPVCSQRGECLCGQCVCHSSDFGKITGKYCECDDFSCVRYKGEMCSGHGQCSCGDCLCDSDWTGYYCNCTTRTDTCMSSNGLLCSGRGKCECGSCVCIQPGSYGDTCEKCPTCPDACTFKKECVECKKFDRGALHDENTCNRYCRDEIESVKELKDTGKDAVNCTYKNEDDCVVRFQYYEDSSGKSILYVVEEPECPKGPDILVVLLSVMGAILLIGLAALLIWKLLITIHDRKEFAKFEEERARAKWDTANNPLYKEATSTFTNITYRGT

SEQ ID NO: 32604 - protein, 780 aa, Homo sapiens
MRARPRPRPLWATVLALGALAGVGVGGPNICTTRGVSSCQQCLAVSPMCAWCSDEALPLGSPRCDLKENLLKDNCAPESIEFPVSEARVLEDRPLSDKGSGDSSQVTQVSPQRIALRLRPDDSKNFSIQVRQVEDYPVDIYYLMDLSYSMKDDLWSIQNLGTKLATQMRKLTSNLRIGFGAFVDKPVSPYMYISPPEALENPCYDMKTTCLPMFGYKHVLTLTDQVTRFNEEVKKQSVSRNRDAPEGGFDAIMQATVCDEKIGWRNDASHLLVFTTDAKTHIALDGRLAGIVQPNDGQCHVGSDNHYSASTTMDYPSLGLMTEKLSQKNINLIFAVTENVVNLYQNYSELIPGTTVGVLSMDSSNVLQLIVDAYGKIRSKVELEVRDLPEELSLSFNATCLNNEVIPGLKSCMGLKIGDTVSFSIEAKVRGCPQEKEKSFTIKPVGFKDSLIVQVTFDCDCACQAQAEPNSHRCNNGNGTFECGVCRCGPGWLGSQCECSEEDYRPSQQDECSPREGQPVCSQRGECLCGQCVCHSSDFGKITGKYCECDDFSCVRYKGEMCSGHGQCSCGDCLCDSDWTGYYCNCTTRTDTCMSSNGLLCSGRGKCECGSCVCIQPGSYGDTCEKCPTCPDACTFKKECVECKKFDRGALHDENTCNRYCRDEIESVKELKDTGKDAVNCTYKNEDDCVVRFQYYEDSSGKSILYVVEEPECPKGPDILVVLLSVMGAILLIGLAALLIWKLLITIHDRKEFAKFEEERARAKWDTVRDGAGRFLKSLV

SEQ ID NO: 32605 - protein, 784 aa, Homo sapiens
MRARPRPRPLWATVLALGALAGVGVGGPNICTTRGVSSCQQCLAVSPMCAWCSDEALPLGSPRCDLKENLLKDNCAPESIEFPVSEARVLEDRPLSDKGSGDSSQVTQVSPQRIALRLRPDDSKNFSIQVRQVEDYPVDIYYLMDLSYSMKDDLWSIQNLGTKLATQMRKLTSNLRIGFGAFVDKPVSPYMYISPPEALENPCYDMKTTCLPMFGYKHVLTLTDQVTRFNEEVKKQSVSRNRDAPEGGFDAIMQATVCDEKIGWRNDASHLLVFTTDAKTHIALDGRLAGIVQPNDGQCHVGSDNHYSASTTMDYPSLGLMTEKLSQKNINLIFAVTENVVNLYQNYSELIPGTTVGVLSMDSSNVLQLIVDAYGKIRSKVELEVRDLPEELSLSFNATCLNNEVIPGLKSCMGLKIGDTVSFSIEAKVRGCPQEKEKSFTIKPVGFKDSLIVQVTFDCDCACQAQAEPNSHRCNNGNGTFECGVCRCGPGWLGSQCECSEEDYRPSQQDECSPREGQPVCSQRGECLCGQCVCHSSDFGKITGKYCECDDFSCVRYKGEMCSGHGQCSCGDCLCDSDWTGYYCNCTTRTDTCMSSNGLLCSGRGKCECGSCVCIQPGSYGDTCEKCPTCPDACTFKKECVECKKFDRGALHDENTCNRYCRDEIESVKELKDTGKDAVNCTYKNEDDCVVRFQYYEDSSGKSILYVVEEPECPKGPDILVVLLSVMGAILLIGLAALLIWKLLITIHDRKEFAKFEEERARAKWDTHYAQSLRKWNQPVSIDG

SEQ ID NO: 32606 - protein, 129 aa, Homo sapiens
MSASLVRATVRAVSKRKLQPTRAALTLTPSAVNKIKQLLKDKPEHVGVKVGVRTRGCNGLSYTLEYTKTKGDSDEEVIQDGVRVFIEKKAQLTLLGTEMDYVEDKLSSEFVFNNPNIKGTCGCGESFNI

SEQ ID NO: 32607 - protein, 176 aa, Homo sapiens
MVAAGGGARTEGAVRRSLWRQCARRVHGEKLRRPTFGPRHRGAGTAKMSASLVRATVRAVSKRKLQPTRAALTLTPSAVNKIKQLLKDKPEHVGVKVGVRTRGCNGLSYTLEYTKTKGDSDEEVIQDGVRVFIEKKAQLTLLGTEMDYVEDKLSSEFVFNNPNIKGTCGCGESFNI

SEQ ID NO: 32608 - protein, 551 aa, Homo sapiens
MSRQSSITFQSGSRRGFSTTSAITPAAGRSRFSSVSVARSAAGSGGLGRISSAGASFGSRSLYNLGGAKRVSINGCGSSCRSGFGGRASNRFGVNSGFGYGGGVGGGFSGPSFPVCPPGGIQEVTVNQSLLTPLHLQIDPTIQRVRAEEREQIKTLNNKFASFIDKVRFLEQQNKVLETKWALLQEQGSRTVRQNLEPLFDSYTSELRRQLESITTERGRLEAELRNMQDVVEDFKVRYEDEINKRTAAENEFVALKKDVDAAYMNKVELEAKVKSLPEEINFIHSVFDAELSQLQTQVGDTSVVLSMDNNRNLDLDSIIAEVKAQYEDIANRSRAEAESWYQTKYEELQVTAGRHGDDLRNTKQEISEMNRMIQRLRAEIDSVKKQCSSLQTAIADAEQRGELALKDARAKLVDLEEALQKAKQDMARLLREYQELMNIKLALDVEIATYRKLLEGEECRLSGEGVSPVNISVVTSTLSSGYGSGSSIGGGNLGLGGGSGYSFTTSGGHSLGAGLGGSGFSATSNRGLGGSGSSVKFVSTTSSSQKSYTH

SEQ ID NO: 32609 - protein, 1190 aa, Homo sapiens
MEGTEAAAAKPAGGSPQGPKTGSGTASPVEGTSAVEWSGPEPQLDNGHPPRPWPCPQENRTSSLMAPQPPRVWGVQLQGPSVLESKVRALKEKMTVAKQGVSPCSASQEWSSPKKPQCRRGKAGRAGTPSEGSFLPGAVVAPRTQNLPDGQLDGSINEEQPARDGGPRLPRPPAPGREYCNRGSPWPPEAEWTLPDHDRGPLLGPSSLQQSPIHGVTPGRPGGPGHCNKIIHIPSPRTGRSYPFPDGVVTEADLDSTSLTSEEVFVPRTALLGERWRAGDLEALGAGSSVLSLSDRVERNRLLLQEMLNVSGQSPRKVGTPAWTPSWDTAAPERPVGDVDWASGTSLQDSGQNRTVGPNPEPVLSPRHEEATHLLQRARMKARTRPLRASHDIVPTITQGSRDGHRSPARDPRTTPACRDSLQNGHTSDSSSGESSGGHRPRRGPSPSHVRFEDESAREAEFRHLERLQQRQRQVLSTVLQAADQGPLRSKPDLADYINGAPRLRDAGQGTFHRLVGSLDRRGHPAPPAPGSERRCQACGSCIDDPRPAQGKAPPVPRTLQELQAACGMERVLGGLSSPLRLLPAEPRLHMEWIRETHIGDTVCPAEVDSALDSTDNSDNCRTDSEEAGTSQAGWACGRTQGSSPRLRLRGSRPRGHRWSKKAEAELPWGLQAQQHLPRADDVEVENEVKEGRGHTPEGTLFLREDAKPPDLELKRVSLGPQWQPGPGLGSHQPHPLDSRTPCRTAYATTAPMTPESSGPGGQAQVTESHESLEIVSPSSLQQSHAEPSAPHQAWQPTASLCPEGWAPTPPPSRKTTSPVSHRKAALAGLLRLGDQTEPVGIPRPPSRSAVLRTCELPPSQTQPSRPQVRHPLLALSTNNCNNSAPRGLQEPYGGAVHEGRVERGPCSREPEPPLENSRDGGPQGFLGSADVATINSTGITLSLSSEESESSKESEGSLQRTGSGSGGHVLSRASAGAGTGPGSPSAAPLDQNKKRSSSIASTLGLKKLFSALGQSSRPKLGKSRSYSVEQLQPAPPGLTSQSRAPSLQSLHPVSPSHQRRKAASFQNLHSLLSSKGNRSSLYLVAGPGDHSAAGRPAKTSPRRALSVEDVGAPSLARTVGRLVEVFPDGTSQLQLQRSPGGTFGFCVASGNGRPDSGMPSPLPQPHGWGGLSKQGRAFWLWSEAFLVFG

SEQ ID NO: 32610 - protein, 811 aa, Homo sapiens
MKARTRPLRASHDIVPTITQGSRDGHRSPARDPRTTPACRDSLQNGHTSDSSSGESSGGHRPRRGPSPSHVRFEDESAREAEFRHLERLQQRQRQVLSTVLQAADQGPLRSKPDLADYINGAPRLRDAGQGTFHRLVGSLDRRGHPAPPAPGSERRCQACGSCIDDPRPAQGKAPPVPRTLQELQAACGMERVLGGLSSPLRLLPAEPRLHMEWIRETHIGDTVCPAEVDSALDSTDNSDNCRTDSEEAGTSQAGWACGRTQGSSPRLRLRGSRPRGHRWSKKAEAELPWGLQAQQHLPRADDVEVENEVKEGRGHTPEGTLFLREDAKPPDLELKRVSLGPQWQPGPGLGSHQPHPLDSRTPCRTAYATTAPMTPESSGPGGQAQVTESHESLEIVSPSSLQQSHAEPSAPHQAWQPTASLCPEGWAPTPPPSRKTTSPVSHRKAALAGLLRLGDQTEPVGIPRPPSRSAVLRTCELPPSQTQPSRPQVRHPLLALSTNNCNNSAPRGLQEPYGGAVHEGRVERGPCSREPEPPLENSRDGGPQGFLGSADVATINSTGITLSLSSEESESSKESEGSLQRTGSGSGGHVLSRASAGAGTGPGSPSAAPLDQNKKRSSSIASTLGLKKLFSALGQSSRPKLGKSRSYSVEQLQPAPPGLTSQSRAPSLQSLHPVSPSHQRRKAASFQNLHSLLSSKGNRSSLYLVAGPGDHSAAGRPAKTSPRRALSVEDVGAPSLARTVGRLVEVFPDGTSQLQLQRSPGGTFGFCVASGNGRPDSGMPSPLPQPHGWGGLSKQGRAFWLWSEAFLVFG

SEQ ID NO: 32611 - protein, 878 aa, Homo sapiens
MATAPSYPAGLPGSPGPGSPPPPGGLELQSPPPLLPQIPAPGSGVSFHIQIGLTREFVLLPAASELAHVKQLACSIVDQKFPECGFYGLYDKILLFKHDPTSANLLQLVRSSGDIQEGDLVEVVLSASATFEDFQIRPHALTVHSYRAPAFCDHCGEMLFGLVRQGLKCDGCGLNYHKRCAFSIPNNCSGARKRRLSSTSLASGHSVRLGTSESLPCTAEELSRSTTELLPRRPPSSSSSSSASSYTGRPIELDKMLLSKVKVPHTFLIHSYTRPTVCQACKKLLKGLFRQGLQCKDCKFNCHKRCATRVPNDCLGEALINGDVPMEEATDFSEADKSALMDESEDSGVIPGSHSENALHASEEEEGEGGKAQSSLGYIPLMRVVQSVRHTTRKSSTTLREGWVVHYSNKDTLRKRHYWRLDCKCITLFQNNTTNRYYKEIPLSEILTVESAQNFSLVPPGTNPHCFEIVTANATYFVGEMPGGTPGGPSGQGAEAARGWETAIRQALMPVILQDAPSAPGHAPHRQASLSISVSNSQIQENVDIATVYQIFPDEVLGSGQFGVVYGGKHRKTGRDVAVKVIDKLRFPTKQESQLRNEVAILQSLRHPGIVNLECMFETPEKVFVVMEKLHGDMLEMILSSEKGRLPERLTKFLITQILVALRHLHFKNIVHCDLKPENVLLASADPFPQVKLCDFGFARIIGEKSFRRSVVGTPAYLAPEVLLNQGYNRSLDMWSVGVIMYVSLSGTFPFNEDEDINDQIQNAAFMYPASPWSHISAGAIDLINNLLQVKMRKRYSVDKSLSHPWLQEYQTWLDLRELEGKMGERYITHESDDARWEQFAAEHPLPGSGLPTDRDLGGACPPQDHDMQGLAERISVL

SEQ ID NO: 32612 - protein, 721 aa, Homo sapiens
MLFGLVRQGLKCDGCGLNYHKRCAFSIPNNCSGARKRRLSSTSLASGHSVRLGTSESLPCTAEELSRSTTELLPRRPPSSSSSSSASSYTGRPIELDKMLLSKVKVPHTFLIHSYTRPTVCQACKKLLKGLFRQGLQCKDCKFNCHKRCATRVPNDCLGEALINGDVPMEEATDFSEADKSALMDESEDSGVIPGSHSENALHASEEEEGEGGKAQSSLGYIPLMRVVQSVRHTTRKSSTTLREGWVVHYSNKDTLRKRHYWRLDCKCITLFQNNTTNRYYKEIPLSEILTVESAQNFSLVPPGTNPHCFEIVTANATYFVGEMPGGTPGGPSGQGAEAARGWETAIRQALMPVILQDAPSAPGHAPHRQASLSISVSNSQIQENVDIATVYQIFPDEVLGSGQFGVVYGGKHRKTGRDVAVKVIDKLRFPTKQESQLRNEVAILQSLRHPGIVNLECMFETPEKVFVVMEKLHGDMLEMILSSEKGRLPERLTKFLITQILVALRHLHFKNIVHCDLKPENVLLASADPFPQVKLCDFGFARIIGEKSFRRSVVGTPAYLAPEVLLNQGYNRSLDMWSVGVIMYVSLSGTFPFNEDEDINDQIQNAAFMYPASPWSHISAGAIDLINNLLQVKMRKRYSVDKSLSHPWLQEYQTWLDLRELEGKMGERYITHESDDARWEQFAAEHPLPGSGLPTDRDLGGACPPQDHDMQGLAERISVL

SEQ ID NO: 32613 - protein, 888 aa, Homo sapiens
MATAPSYPAGLPGSPGPGSPPPPGGLELQSPPPLLPQIPAPGSGVSFHIQIGLTREFVLLPAASELAHVKQLACSIVDQKFPECGFYGLYDKILLFKHDPTSANLLQLVRSSGDIQEGDLVEVVLSASATFEDFQIRPHALTVHSYRAPAFCDHCGEMLFGLVRQGLKCDGCGLNYHKRCAFSIPNNCSGARKRRLSSTSLASGHSVRLGTSESLPCTAEELSRSTTELLPRRPPSSSSSSSASSYTGRPIELDKMLLSKVKVPHTFLIHSYTRPTVCQACKKLLKGLFRQGLQCKDCKFNCHKRCATRVPNDCLGEALINGDVPMEEATDFSEADKSALMDESEDSGVIPGSHSENALHASEEEEGEGGKAQSSLGYIPLMRVVQSVRHTTRKSSTTLREGWVVHYSNKDTLRKRHYWRLDCKCITLFQNNTTNRYYKEIPLSEILTVESAQNFSLVPPGTNPHCFEIVTANATYFVGEMPGGTPGGPSGQGAEAARGWETAIRQALMPVILQDAPSAPGHAPHRQASLSISVSNSQIQENVDIATVYQIFPDEVLGSGQFGVVYGGKHRKTGRDVAVKVIDKLRFPTKQESQLRNEVAILQSLRHPGIVNLECMFETPEKVFVVMEKLHGDMLEMILSSEKGRLPERLTKFLITQILVALRHLHFKNIVHCDLKPENVLLASADPFPQVKLCDFGFARIIGEKSFRRSVVGTPAYLAPEVLLNQGYNRSLDMWSVGVIMYVSLSGTFPFNEDEDINDQIQNAAFMYPASPWSHISAGGAWGPPTPWAAIDLINNLLQVKMRKRYSVDKSLSHPWLQEYQTWLDLRELEGKMGERYITHESDDARWEQFAAEHPLPGSGLPTDRDLGGACPPQDHDMQGLAERISVL

SEQ ID NO: 32614 - protein, 480 aa, Homo sapiens
MLNFGASLQQTAEERMEMISERPKESMYSWNKTAEKSDFEAVEALMSMSCSWKSDFKKYVENRPVTPVSDLSEEENLLPGTPDFHTIPAFCLTPPYSPSDFEPSQVSNLMAPAPSTVHFKSLSDTAKPHIAAPFKEEEKSPVSAPKLPKAQATSVIRHTADAQLCNHQTCPMKAASILNYQNNSFRRRTHLNVEAARKNIPCAAVSPNRSKCERNTVADVDEKASAALYDFSVPSSETVICRSQPAPVSPQQKSVLVSPPAVSAGGVPPMPVICQMVPLPANNPVVTTVVPSTPPSQPPAVCPPVVFMGTQVPKGAVMFVVPQPVVQSSKPPVVSPNGTRLSPIAPAPGFSPSAAKVTPQIDSSRIRSHICSHPGCGKTYFKSSHLKAHTRTHTGEKPFSCSWKGCERRFARSDELSRHRRTHTGEKKFACPMCDRRFMRSDHLTKHARRHLSAKKLPNWQMEVSKLNDIALPPTPAPTQ

SEQ ID NO: 32615 - protein, 469 aa, Homo sapiens
MEERMEMISERPKESMYSWNKTAEKSDFEAVEALMSMSCSWKSDFKKYVENRPVTPVSDLSEEENLLPGTPDFHTIPAFCLTPPYSPSDFEPSQVSNLMAPAPSTVHFKSLSDTAKPHIAAPFKEEEKSPVSAPKLPKAQATSVIRHTADAQLCNHQTCPMKAASILNYQNNSFRRRTHLNVEAARKNIPCAAVSPNRSKCERNTVADVDEKASAALYDFSVPSSETVICRSQPAPVSPQQKSVLVSPPAVSAGGVPPMPVICQMVPLPANNPVVTTVVPSTPPSQPPAVCPPVVFMGTQVPKGAVMFVVPQPVVQSSKPPVVSPNGTRLSPIAPAPGFSPSAAKVTPQIDSSRIRSHICSHPGCGKTYFKSSHLKAHTRTHTGEKPFSCSWKGCERRFARSDELSRHRRTHTGEKKFACPMCDRRFMRSDHLTKHARRHLSAKKLPNWQMEVSKLNDIALPPTPAPTQ

SEQ ID NO: 32616 - protein, 91 aa, Homo sapiens
MEERMEMISERPKESMYSWNKTAEKSDFEAVEALMSMSCSWKSDFKKYVENRPVTPVSDLSEEENLLPGTPDFHTIPAFQQKSLLRLIHQG

SEQ ID NO: 32617 - protein, 123 aa, Homo sapiens
MEERMEMISERPKESMYSWNKTAEKSDFEAVEALMSMSCSWKSDFKKYVENRPVTPVSDLSEEENLLPGTPDFHTIPAFEKSLSAVAGKVVKGGLPVLMNCPDTGEPTRVRRNLRAPCVTGGS

SEQ ID NO: 32618 - protein, 171 aa, Homo sapiens
MAMSQESLTFKDVFVDFTLEEWQQLDSAQKNLYRDVMLENYSHLVSVGYLVAKPDVIFRLGPGEESWMADGGTPVRTCAGEDRPEVWQVDEQIDHYKESQDKLPWQAAFIGKETLKDESGQESRTCRKSIYLSTEFDSVRQRLPKYYSWEKAFKTSFKLSWSKWKLCKKER

SEQ ID NO: 32619 - protein, 166 aa, Homo sapiens
MAMSQESLTFKDVFVDFTLEEWQQLDSAQKNLYRDVMLENYSHLVSVGYLVAKPDVIFRLGPGEESWMADGGTPVRTCAEVWQVDEQIDHYKESQDKLPWQAAFIGKETLKDESGQESRTCRKSIYLSTEFDSVRQRLPKYYSWEKAFKTSFKLSWSKWKLCKKER

SEQ ID NO: 32620 - protein, 98 aa, Homo sapiens
MAMSQESLTFKDVFVDFTLEEWQQLDSAQKNLYRDVMLENYSHLVSVGYLVAKPDVIFRLGPGEESWMADGGTPVRTCAGEDRPDVSIFASCILKCCY

SEQ ID NO: 32621 - protein, 282 aa, Homo sapiens
MQRLRWLRDWKSSGRGLTAAKEPGARSSPLQAMRILQLILLALATGLVGGETRIIKGFECKPHSQPWQAALFEKTRLLCGATLIAPRWLLTAAHCLKPRYIVHLGQHNLQKEEGCEQTRTATESFPHPGFNNSLPNKDHRNDIMLVKMASPVSITWAVRPLTLSSRCVTAGTSCLISGWGSTSSPQLRLPHTLRCANITIIEHQKCENAYPGNITDTMVCASVQEGGKDSCQGDSGGPLVCNQSLQGIISWGQDPCAITRKPGVYTKVCKYVDWIQETMKNN

SEQ ID NO: 32622 - protein, 250 aa, Homo sapiens
MRILQLILLALATGLVGGETRIIKGFECKPHSQPWQAALFEKTRLLCGATLIAPRWLLTAAHCLKPRYIVHLGQHNLQKEEGCEQTRTATESFPHPGFNNSLPNKDHRNDIMLVKMASPVSITWAVRPLTLSSRCVTAGTSCLISGWGSTSSPQLRLPHTLRCANITIIEHQKCENAYPGNITDTMVCASVQEGGKDSCQGDSGGPLVCNQSLQGIISWGQDPCAITRKPGVYTKVCKYVDWIQETMKNN

SEQ ID NO: 32623 - protein, 307 aa, Homo sapiens
MQRLRWLRDWKSSGRGLTAAKEPGARSSPLQAMRILQLILLALATGLVGGETRIIKGFECKPHSQPWQAALFEKTRLLCGATLIAPRWLLTAAHCLKPWVSLTSPTHVSPDLSSSNYCLSHLSRYIVHLGQHNLQKEEGCEQTRTATESFPHPGFNNSLPNKDHRNDIMLVKMASPVSITWAVRPLTLSSRCVTAGTSCLISGWGSTSSPQLRLPHTLRCANITIIEHQKCENAYPGNITDTMVCASVQEGGKDSCQGDSGGPLVCNQSLQGIISWGQDPCAITRKPGVYTKVCKYVDWIQETMKNN

SEQ ID NO: 32624 - protein, 275 aa, Homo sapiens
MRILQLILLALATGLVGGETRIIKGFECKPHSQPWQAALFEKTRLLCGATLIAPRWLLTAAHCLKPWVSLTSPTHVSPDLSSSNYCLSHLSRYIVHLGQHNLQKEEGCEQTRTATESFPHPGFNNSLPNKDHRNDIMLVKMASPVSITWAVRPLTLSSRCVTAGTSCLISGWGSTSSPQLRLPHTLRCANITIIEHQKCENAYPGNITDTMVCASVQEGGKDSCQGDSGGPLVCNQSLQGIISWGQDPCAITRKPGVYTKVCKYVDWIQETMKNN

SEQ ID NO: 32625 - protein, 519 aa, Homo sapiens
MPMPSRDGGLHPRHHHYGSHSPWSQLLSSPMETPSIKGLYYRRVRKVGALDASPVDLKKEILINVGGRRYLLPWSTLDRFPLSRLSKLRLCRSYEEIVQLCDDYDEDSQEFFFDRSPSAFGVIVSFLAAGKLVLLQEMCALSFQEELAYWGIEEAHLERCCLRKLLRKLEELEELAKLHREDVLRQQRETRRPASHSSRWGLCMNRLREMVENPQSGLPGKVFACLSILFVATTAVSLCVSTMPDLRAEEDQGECSRKCYYIFIVETICVAWFSLEFCLRFVQAQDKCQFFQGPLNIIDILAISPYYVSLAVSEEPPEDGERPSGSSYLEKVGLVLRVLRALRILYVMRLARHSLGLQTLGLTVRRCTREFGLLLLFLAVAITLFSPLVYVAEKESGRVLEFTSIPASYWWAIISMTTVGYGDMVPRSVPGQMVALSSILSGILIMAFPATSIFHTFSHSYLELKKEQEQLQARLRHLQNTGPASECELLDPHVASEHELMNDVNDLILEGPALPIMHM

SEQ ID NO: 32626 - protein, 256 aa, Homo sapiens
MPMPSRDGGLHPRHHHYGSHSPWSQLLSSPMETPSIKGLYYRRVRKVGALDASPVDLKKEILINVGGRRYLLPWSTLDRFPLSRLSKLRLCRSYEEIVQLCDDYDEDSQEFFFDRSPSAFGVIVSFLAAGKLVLLQEMCALSFQEELAYWGIEEAHLERCCLRKLLRKLEELEELAKLHREDVLRQQRETRRPASHSSRWGLCMNRLREMVENPQSGLPGKVFACLSILFVATTAVSLCVSTMPDLRAEEDQVSGL

SEQ ID NO: 32627 - protein, 256 aa, Homo sapiens
MWLLLTLSFLLASTAAQDGDKLLEGDECAPHSQPWQVALYERGRFNCGASLISPHWVLSAAHCQSRFMRVRLGEHNLRKRDGPEQLRTTSRVIPHPRYEARSHRNDIMLLRLVQPARLNPQVRPAVLPTRCPHPGEACVVSGWGLVSHNEPGTAGSPRSQVSLPDTLHCANISIISDTSCDKSYPGRLTNTMVCAGAEGRGAESCEGDSGGPLVCGGILQGIVSWGDVPCDNTTKPGVYTKVCHYLEWIRETMKRN

SEQ ID NO: 32628 - protein, 121 aa, Homo sapiens
MWLLLTLSFLLASTAAQDGDKLLEGDECAPHSQPWQVALYERGRFNCGASLISPHWVLSAAHCQSRFMRVRLGEHNLRKRDGPEQLRTTSRVIPHPRYEARSHRNDIMLLRLVQPARLNPQ

SEQ ID NO: 32629 - protein, 161 aa, Homo sapiens
MWLLLTLSFLLASTAAQDGDKLLEGDECAPHSQPWQVALYERGRFNCGASLISPHWVLSAAHCQSRFMRVRLGEHNLRKRDGPEQLRTTSRVIPHPRYEARSHRNDIMLLRLVQPARLNPQVRPAVLPTRCPHPGEACVVSGWGLVSHNEPGTAGSPRSQG

SEQ ID NO: 32630 - protein, 171 aa, Homo sapiens
MWLLLTLSFLLASTAAQDGDKLLEGDECAPHSQPWQVALYERGRFNCGASLISPHWVLSAAHCQSRFMRVRLGEHNLRKRDGPEQLRTTSRVIPHPRYEARSHRNDIMLLRLVQPARLNPQGDSGGPLVCGGILQGIVSWGDVPCDNTTKPGVYTKVCHYLEWIRETMKRN

SEQ ID NO: 32631 - protein, 255 aa, Homo sapiens
MWLLLTLSFLLASTAQDGDKLLEGDECAPHSQPWQVALYERGRFNCGASLISPHWVLSAAHCQSRFMRVRLGEHNLRKRDGPEQLRTTSRVIPHPRYEARSHRNDIMLLRLVQPARLNPQVRPAVLPTRCPHPGEACVVSGWGLVSHNEPGTAGSPRSQVSLPDTLHCANISIISDTSCDKSYPGRLTNTMVCAGAEGRGAESCEGDSGGPLVCGGILQGIVSWGDVPCDNTTKPGVYTKVCHYLEWIRETMKRN

SEQ ID NO: 32632 - protein, 374 aa, Homo sapiens
MKRQNVRTLSLIVCTFTYLLVGAAVFDALESDHEMREEEKLKAEEIRIKGKYNISSEDYRQLELVILQSEPHRAGVQWKFAGSFYFAITVITTIGYGHAAPGTDAGKAFCMFYAVLGIPLTLVMFQSLGERMNTFVRYLLKRIKKCCGMRNTDVSMENMVTVGFFSCMGTLCIGAAAFSQCEEWSFFHAYYYCFITLTTIGFGDYVALQTKGALQKKPLYVAFSFMYILVGLTVIGAFLNLVVLRFLTMNSEDERRDAEERASLAGNRNSMVIHIPEEPRPSRPRYKADVPDLQSVCSCTCYRSQDYGGRSVAPQNSFSAKLAPHYFHSISYKIEEISPSTLKNSLFPSPISSISPGLHSFTDHQRLMKRRKSV

SEQ ID NO: 32633 - protein, 348 aa, Homo sapiens [sequence omitted]

SEQ ID NO: 32634 - protein, 374 aa, Homo sapiens
MSLLVVSMACVGFFLLQGAWPHEGVHRKPSLLAHPGPLVKSEETVILQCWSDVMFEHFLLHREGMFNDTLRLIGEHHDGVSKANFSISRMTQDLAGTYRCYGSVTHSPYQVSAPSDPLDIVIIGLYEKPSLSAQPGPTVLAGENVTLSCSSRSSYDMYHLSREGEAHERRLPAGPKVNGTFQADFPLGPATHGGTYRCFGSFHDSPYEWSKSSDPLLVSVTGNPSNSWPSPTEPSSKTERMFHHVGQACLKLPTSSDPTVSACQSNPRHLHILIGTSVVIILFILLFFLLHRWCSNKKNAAVMDQESAGNRTANSEDSDEQDPQEVTYTQLNHCVFTQRKITRPSQRPKTPPTDIIVYTELPNAESRSKVVSCP

SEQ ID NO: 32635 - protein, 428 aa, Homo sapiens
MALSGNCSRYYPREQGSAVPNSFPEVVELNVGGQVYFTRHSTLISIPHSLLWKMFSPKRDTANDLAKDSKGRFFIDRDGFLFRYILDYLRDRQVVLPDHFPEKGRLKREAEYFQLPDLVKLLTPDEIKQSPDEFCHSDFEDASQGSDTRICPPSSLLPADRKWGFITVGYRGSCTLGREGQADAKFRRVPRILVCGRISLAKEVFGETLNESRDPDRAPERYTSRFYLKFKHLERAFDMLSECGFHMVACNSSVTASFINQYTDDKIWSSYTEYVFYREPSRWSPSHCDCCCKNGKGDKEGESGTSCNDLSTSSCDSQSEASSPQETVICGPVTRQTNIQTLDRPIKKGPVQLIQQSEMRRKSDLLRTLTSGSRESNMSSKKKAVKEKLSIEEELEKCIQDFLKIKIPDRFPERKHPWQSELLRKYHL

SEQ ID NO: 32636 - protein, 181 aa, Homo sapiens
MGDIFKNNGVLQGRLRAVACAPHCFGPRLRCLHHDQGLTELAWGTWPHSHPVRHQPQMPSARECCSIVCMAAKEVSAPKAPGSPWMVPGDVAMSGHRVGALDERGHPNPQTGHCRGGSVSVTWSSVSCCRGRLAAVRVMIARDPSTCHLAKGCSPAWGFLPQARGPAGTRTPQRRCSSHEA

SEQ ID NO: 32637 - protein, 163 aa, Homo sapiens
MESSRAGCVLWPVLLTALDPGCAVSTTTKDSQSSPGGPGPTVTPSVISLKCHQPVNAAPSSAWQPRRMVPGDVAMSGHRVGALDERGHPNPQTGHCRGGSVSVTWSSVSCCRGRLAAVRVMIARDPSTCHLAKGCSPAWGFLPQARGPAGTRTPQRRCSSHEA

SEQ ID NO: 32638 - protein, 621 aa, Homo sapiens
MANVPWAEVCEKFQAALALSRVELHKNPEKEPYKSKYSARALLEEVKALLGPAPEDEDERPEAEDGPGAGDHALGLPAEVVEPEGPVAQRAVRLAVIEFHLGVNHIDTEELSAGEEHLVKCLRLLRRYRLSHDCISLCIQAQNNLGILWSEREEIETAQAYLESSEALYNQYMKEVGSPPLDPTERFLPEEEKLTEQERSKRFEKVYTHNLYYLAQVYQHLEMFEKAAHYCHSTLKRQLEHNAYHPIEWAINAATLSQFYINKLCFMEARHCLSAANVIFGQTGKISATEDTPEAEGEVPELYHQRKGEIARCWIKYCLTLMQNAQLSMQDNIGELDLDKQSELRALRKKELDEEESIRKKAVQFGTGELCDAISAVEEKVSYLRPLDFEEARELFLLGQHYVFEAKEFFQIDGYVTDHIEVVQDHSALFKVLAFFETDMERRCKMHKRRIAMLEPLTVDLNPQYYLLVNRQIQFEIAHAYYDMMDLKVAIADRLRDPDSHIVKKINNLNKSALKYYQLFLDSLRDPNKVFPEHIGEDVLRPAMLAKFRVARLYGKIITADPKKELENLATSLEHYKFIVDYCEKHPEAAQEIEVELELSKEMVSLLPTKMERFRTKMALT

SEQ ID NO: 32639 - protein, 398 aa, Homo sapiens
MHTVATSGPNASWGAPANASGCPGCGANASDGPVPSPRAVDAWLVPLFFAALMLLGLVGNSLVIYVICRHKPMRTVTNFYIANLAATDVTFLLCCVPFTALLYPLPGWVLGDFMCKFVNYIQQVSVQATCATLTAMSVDRWYVTVFPLRALHRRTPRLALAVSLSIWVGSAAVSAPVLALHRLSPGPRAYCSEAFPSRALERAFALYNLLALYLLPLLATCACYAAMLRHLGRVAVRPAPADSALQGQVLAERAGAVRAKVSRLVAAVVLLFAACWGPIQLFLVLQALGPAGSWHPRSYAAYALKTWAHCMSYSNSALNPLLYAFLGSHFRQAFRRVCPCAPRRPRRPRRPGPSDPAAPHAELLRLGSHPAPARAQKPGSSGLAARGLCVLGEDNAPL

SEQ ID NO: 32640 - protein, 995 aa, Homo sapiens
MEKTDAKDQSSQGDEEKDPPKSHPYSVETPYGFHLDLDFLKYVDDIEKGNTIKRIPIHRRAKQAKFSTLPRNFSLPDSGARPPAAPPLQNWSPVVPREASLGTQEQNQSPPLGNAPQASTSRSEVSYHRKALLAEATRQLEAAEPEDAELTFGSGRPQLLRASSMPATLLHSRASEEPGLSLGPPAPPALPPLQGEGSVCDGTFEPAEGLAGFHSSSPRASTRIPELVQEGAEPPEGVVKVPNHLPLPGPPFSFQNVLVVLEDKEDEHNAREAEVLFTPGSPTPSPPPLPSPIPENELLLEEIELNISEIPPPPPVEVDMRSIGIRVTEESLGLARVDPGSISSLKQQVSALEGELSGRTEELAQVRTALQQQEEEIKAREQRIRELEFTVAQLEGQFHQENAKDTQGQTDVMVNTDPVHGLLTRESCDKGIEVNLLGSMESESWGHRGEENGLLWGPDGHKQGNQSPAERVLLPQLSLPQGPEQVLTSSVHSFLSTELRIEEAGTEQEGGPQGGTRGAGGFLWGSDRKTPPAGREETSSNLPGKEHPGRPPSSPTDATIGQYVKKIQELLQEQWNCLEHGYPELASAIKQPASKLSSIQSQLLSSLNLLLSAYSAQAHPPKEPPASSSSPPVEISPSTSLKSIMKKKDYGFRAGGNGTKKNLQFVGVNGGYETTSSEETSGEDSTPEDLSDSEAEKKCDGPDHKHVKDAHLTCEAGQGIPEGTCHAAQESGPGEEVPHSKAERYKPSEEFLNACRALSQHLPETGTTTDQLLRQSLNTISQEWFRVSSRKSSSPAVVASYLHEVQPHSPHFLKLLVNLADHNGNTALHYSVSHSNFSIVKLLLETGVCNVDHQNKAGYTAVMITPLASAETNEDMAVVWKLLREGNVNIQATQGGQTALMLGVSHDREDMVQALLSCQADVNLQDHDGSSALMVACHHGNVDLVRLLLAHPACDSSLTDKAGRTALSIALKSPTHMEIAGLLRAHAEQGRSLGL

SEQ ID NO: 32641 - protein, 367 aa, Homo sapiens
MEKTDEISPSTSLKSIMKKKDYGFRAGGNGTKKNLQFVGVNGGYETTSSEETSGEDSTPEDLSDSEAEKKCDGPDHKHVKDAHLTCEAGQGIPEGTCHAAQESGPGEEVPHSKAERYKPSEEFLNACRALSQHLPETGTTTDQLLRQSLNTISQEWFRVSSRKSSSPAVVASYLHEVQPHSPHFLKLLVNLADHNGNTALHYSVSHSNFSIVKLLLETGVCNVDHQNKAGYTAVMITPLASAETNEDMAVVWKLLREGNVNIQATQGGQTALMLGVSHDREDMVQALLSCQADVNLQDHDGSSALMVACHHGNVDLVRLLLAHPACDSSLTDKAGRTALSIALKSPTHMEIAGLLRAHAEQGRSLGL

SEQ ID NO: 32642 - protein, 1388 aa, Homo sapiens
MAPGCKTELRSVTNGQSNQPSNEGDAIKVFVRIRPPAERSGSADGEQNLCLSVLSSTSLRLHSNPEPKTFTFDHVADVDTTQESVFATVAKSIVESCMSGYNGTIFAYGQTGSGKTFTMMGPSESDNFSHNLRGVIPRSFEYLFSLIDREKEKAGAGKSFLCKCSFIEIYNEQIYDLLDSASAGLYLREHIKKGVFVVGAVEQVVTSAAEAYQVLSGGWRNRRVASTSMNRESSRSHAVFTITIESMEKSNEIVNIRTSLLNLVDLAGSERQKDTHAEGMRLKEAGNINRSLSCLGQVITALVDVGNGKQRHVCYRDSKLTFLLRDSLGGNAKTAIIANVHPGSRCFGETLSTLNFAQRAKLIKNKAVVNEDTQGNVSQLQAEVKRLKEQLAELASGQTPPESFLTRDKKKTNYMEYFQEAMLFFKKSEQEKKSLIEKVTQLEDLTLKKEKFIQSNKMIVKFREDQIIRLEKLHKESRGGFLPEEQDRLLSELRNEIQTLREQIEHHPRVAKYAMENHSLREENRRLRLLEPVKRAQEMDAQTIAKLEKAFSEISGMEKSDKNQQGFSPKAQKEPCLFANTEKLKAQLLQIQTELNNSKQEYEEFKELTRKRQLELESELQSLQKANLNLENLLEATKACKRQEVSQLNKIHAETLKIITTPTKAYQLHSRPVPKLSPEMGSFGSLYTQNSSILDNDILNEPVPPEMNEQAFEAISEELRTVQEQMSALQAKLDEEEHKNLKLQQHVDKLEHHSTQMQELFSSERIDWTKQQEELLSQLNVLEKQLQETQTKNDFLKSEVHDLRVVLHSADKELSSVKLEYSSFKTNQEKEFNKLSERHMHVQLQLDNLRLENEKLLESKACLQDSYDNLQEIMKFEIDQLSRNLQNFKKENETLKSDLNNLMELLEAEKERNNKLSLQFEEDKENSSKEILKVLEAVRQEKQKETAKCEQQMAKVQKLEESLLATEKVISSLEKSRDSDKKVVADLMNQIQELRTSVCEKTETIDTLKQELKDINCKYNSALVDREESRVLIKKQEVDILDLKETLRLRILSEDIERDMLCEDLAHATEQLNMLTEASKKHSGLLQSAQEELTKKEALIQELQHKLNQKKEEVEQKKNEYNFKMRQLEHVMDSAAEDPQSPKTPPHFQTHLAKLLETQEQEIEDGRASKTSLEHLVTKLNEDREVKNAEILRMKEQLREMENLRLESQQLIEKNWLLQGQLDDIKRQKENSDQNHPDNQQLKNEQEESIKERLAKSKIVEEMLKMKADLEEVQSALYNKEMECLRMTDEVERTQTLESKAFQEKEQLRSKLEEMYEERERTSQEMEMLRKQVECLAEENGKLVGHQNLHQKIQYVVRLKKENVRLAEETEKLRAENVFLKEKKRSES

SEQ ID NO: 32643 - protein, 1291 aa, Homo sapiens
MSGYNGTIFAYGQTGSGKTFTMMGPSESDNFSHNLRGVIPRSFEYLFSLIDREKEKAGAGKSFLCKCSFIEIYNEQIYDLLDSASAGLYLREHIKKGVFVVGAVEQVVTSAAEAYQVLSGGWRNRRVASTSMNRESSRSHAVFTITIESMEKSNEIVNIRTSLLNLVDLAGSERQKDTHAEGMRLKEAGNINRSLSCLGQVITALVDVGNGKQRHVCYRDSKLTFLLRDSLGGNAKTAIIANVHPGSRCFGETLSTLNFAQRAKLIKNKAVVNEDTQGNVSQLQAEVKRLKEQLAELASGQTPPESFLTRDKKKTNYMEYFQEAMLFFKKSEQEKKSLIEKVTQLEDLTLKKEKFIQSNKMIVKFREDQIIRLEKLHKESRGGFLPEEQDRLLSELRNEIQTLREQIEHHPRVAKYAMENHSLREENRRLRLLEPVKRAQEMDAQTIAKLEKAFSEISGMEKSDKNQQGFSPKAQKEPCLFANTEKLKAQLLQIQTELNNSKQEYEEFKELTRKRQLELESELQSLQKANLNLENLLEATKACKRQEVSQLNKIHAETLKIITTPTKAYQLHSRPVPKLSPEMGSFGSLYTQNSSILDNDILNEPVPPEMNEQAFEAISEELRTVQEQMSALQAKLDEEEHKNLKLQQHVDKLEHHSTQMQELFSSERIDWTKQQEELLSQLNVLEKQLQETQTKNDFLKSEVHDLRVVLHSADKELSSVKLEYSSFKTNQEKEFNKLSERHMHVQLQLDNLRLENEKLLESKACLQDSYDNLQEIMKFEIDQLSRNLQNFKKENETLKSDLNNLMELLEAEKERNNKLSLQFEEDKENSSKEILKVLEAVRQEKQKETAKCEQQMAKVQKLEESLLATEKVISSLEKSRDSDKKVVADLMNQIQELRTSVCEKTETIDTLKQELKDINCKYNSALVDREESRVLIKKQEVDILDLKETLRLRILSEDIERDMLCEDLAHATEQLNMLTEASKKHSGLLQSAQEELTKKEALIQELQHKLNQKKEEVEQKKNEYNFKMRQLEHVMDSAAEDPQSPKTPPHFQTHLAKLLETQEQEIEDGRASKTSLEHLVTKLNEDREVKNAEILRMKEQLREMENLRLESQQLIEKNWLLQGQLDDIKRQKENSDQNHPDNQQLKNEQEESIKERLAKSKIVEEMLKMKADLEEVQSALYNKEMECLRMTDEVERTQTLESKAFQEKEQLRSKLEEMYEERERTSQEMEMLRKQVECLAEENGKLVGHQNLHQKIQYVVRLKKENVRLAEETEKLRAENVFLKEKKRSES

SEQ ID NO: 32644 - protein, 436 aa, Homo sapiens
MAKVQKLEESLLATEKVISSLEKSRDSDKKVVADLMNQIQELRTSVCEKTETIDTLKQELKDINCKYNSALVDREESRVLIKKQEVDILDLKETLRLRILSEDIERDMLCEDLAHATEQLNMLTEASKKHSGLLQSAQEELTKKEALIQELQHKLNQKKEEVEQKKNEYNFKMRQLEHVMDSAAEDPQSPKTPPHFQTHLAKLLETQEQEIEDGRASKTSLEHLVTKLNEDREVKNAEILRMKEQLREMENLRLESQQLIEKNWLLQGQLDDIKRQKENSDQNHPDNQQLKNEQEESIKERLAKSKIVEEMLKMKADLEEVQSALYNKEMECLRMTDEVERTQTLESKAFQEKEQLRSKLEEMYEERERTSQEMEMLRKQVECLAEENGKLVGHQNLHQKIQYVVRLKKENVRLAEETEKLRAENVFLKEKKRSES

SEQ ID NO: 32645 - protein, 1199 aa, Homo sapiens
MAPGCKTELRSVTNGQSNQPSNEGDAIKVFVRIRPPAERSGSADGEQNLCLSVLSSTSLRLHSNPEPKTFTFDHVADVDTTQESVFATVAKSIVESCMSGYNGTIFAYGQTGSGKTFTMMGPSESDNFSHNLRGVIPRSFEYLFSLIDREKEKAGAGKSFLCKCSFIEIYNEQIYDLLDSASAGLYLREHIKKGVFVVGAVEQVVTSAAEAYQVLSGGWRNRRVASTSMNRESSRSHAVFTITIESMEKSNEIVNIRTSLLNLVDLAGSERQKDTHAEGMRLKEAGNINRSLSCLGQVITALVDVGNGKQRHVCYRDSKLTFLLRDSLGGNAKTAIIANVHPGSRCFGETLSTLNFAQRAKLIKNKAVVNEDTQGNVSQLQAEVKRLKEQLAELASGQTPPESFLTRDKKKTNYMEYFQEAMLFFKKSEQEKKSLIEKVTQLEDLTLKKEKFIQSNKMIVKFREDQIIRLEKLHKESRGGFLPEEQDRLLSELRNEIQTLREQIEHHPRVAKYAMENHSLREENRRLRLLEPVKRAQEMDAQTIAKLEKAFSEISGMEKSDKNQQGFSPKAQKEPCLFANTEKLKAQLLQIQTELNNSKQEYEEFKELTRKRQLELESELQSLQKANLNLENLLEATKACKRQEVSQLNKIHAETLKIITTPTKAYQLHSRPVPKLSPEMGSFGSLYTQNSSILDNDILNEPVPPEMNEQAFEAISEELRTVQEQMSALQAKLDEEEHKNLKLQQHVDKLEHHSTQMQELFSSERIDWTKQQEELLSQLNVLEKQLQETQTKNDFLKSEVHDLRVVLHSADKELSSVKLEYSSFKTNQEKEFNKLSERHMHVQLQLDNLRLENEKLLESKACLQDSYDNLQEIMKFEIDQLSRNLQNFKKENETLKSDLNNLMELLEAEKERNNKLSLQFEEDKENSSKEILKVLEAVRQEKQKETAKCEQQMAKVQKLEESLLATEKVISSLEKSRDSDKKVVADLMNQIQELRTSVCEKTETIDTLKQELKDINCKYNSALVDREESRVLIKKQEVDILDLKETLRLRILSEDIERDMLCEDLAHATEQLNMLTEASKKHSGLLQSAQERTDQERSPDSGTSAQAKPKERGSRTEEEEYNFKMRQLEHVMDSAAEDPQSPKTPPHFQTHLAKLLETQEQEIEDGRASKTSLEHLVTKLNEDREVKNAEILRMKEQLR

SEQ ID NO: 32646 - protein, 1113 aa, Homo sapiens
MPRPELPLPEGWEEARDFDGKVYYIDHTNRTTSWIDPRDRYTKPLTFADCISDELPLGWEEAYDPQVGDYFIDHNTKTTQIEDPRVQWRREQEHMLKDYLVVAQEALSAQKEIYQVKQQRLELAQQEYQQLHAVWEHKLGSQVSLVSGSSSSSKYDPEILKAEIATAKSRVNKLKREMVHLQHELQFKERGFQTLKKIDKKMSDAQGSYKLDEAQAVLRETKAIKKAITCGEKEKQDLIKSLAMLKDGFRTDRGSHSDLWSSSSSLESSSFPLPKQYLDVSSQTDISGSFGINSNNQLAEKVRLRLRYEEAKRRIANLKIQLAKLDSEAWPGVLDSERDRLILINEKEELLKEMRFISPRKWTQGEVEQLEMARKRLEKDLQAARDTQSKALTERLKLNSKRNQLVRELEEATRQVATLHSQLKSLSSSMQSLSSGSSPGSLTSSRGSLVASSLDSSTSASFTDLYYDPFEQLDSELQSKVEFLLLEGATGFRPSGCITTIHEDEVAKTQKAEGGGRLQALRSLSGTPKSMTSLSPRSSLSSPSPPCSPLMADPLLAGDAFLNSLEFEDPELSATLCELSLGNSAQERYRLEEPGTEGKQLGQAVNTAQGCGLKVACVSAAVSDESVAGDSGVYEASVQRLGASEAAAFDSDESEAVGATRIQIALKYDEKNKQFAILIIQLSNLSALLQQQDQKVNIRVAVLPCSESTTCLFRTRPLDASDTLVFNEVFWVSMSYPALHQKTLRVDVCTTDRSHLEECLGGAQISLAEVCRSGERSTRWYNLLSYKYLKKQSRELKPVGVMAPASGPASTDAVSALLEQTAVELEKRQEGRSSTQTLEDSWRYEETSENEAVAEEEEEEVEEEEGEEDVFTEKASPDMDGYPALKVDKETNTETPAPSPTVVRPKDRRVGTPSQGPFLRGSTIIRSKTFSPGPQSQYVCRLNRSDSDSSTLSKKPPFVRNSLERRSVRMKRPSSVKSLRSERLIRTSLDLELDLQATRTWHSQLTQEISVLKELKEQLEQAKSHGEKELPQWLREDERFRLLLRMLEKRQMDRAEHKGELQTDKMMRAAAKDVHRLRGQSCKEPPEVQSFREKMAFFTRPRMNIPALSADDV

SEQ ID NO: 32647 - protein, 1119 aa, Homo sapiens
MPRPELPLPEGWEEARDFDGKVYYIDHTNRTTSWIDPRDRYTKPLTFADCISDELPLGWEEAYDPQVGDYFIDHNTKTTQIEDPRVQWRREQEHMLKDYLVVAQEALSAQKEIYQVKQQRLELAQQEYQQLHAVWEHKLGSQVSLVSGSSSSSKYDPEILKAEIATAKSRVNKLKREMVHLQHELQFKERGFQTLKKIDKKMSDAQGSYKLDEAQAVLRETKAIKKAITCGEKEKQDLIKSLAMLKDGFRTDRGSHSDLWSSSSSLESSSFPLPKQYLDVSSQTDISGSFGINSNNQLAEKVRLRLRYEEAKRRIANLKIQLAKLDSEAWPGVLDSERDRLILINEKEELLKEMRFISPRKWTQGEVEQLEMARKRLEKDLQAARDTQSKALTERLKLNSKRNQLVRELEEATRQVATLHSQLKSLSSSMQSLSSGSSPGSLTSSRGSLVASSLDSSTSASFTDLYYDPFEQLDSELQSKVEFLLLEGATGFRPSGCITTIHEDEVAKTQKAEGGGRLQALRSLSGTPKSMTSLSPRSSLSSPSPPCSPLMADPLLAGDAFLNSLEFEDPELSATLCELSLGNSAQERYRLEEPGTEGKQLGQAVNTAQGCGLKVACVSAAVSDESVAGDSGVYEASVQRLGASEAAAFDSDESEAVGATRIQIALKYDEKNKQFAILIIQLSNLSALLQQQDQKVNIRVAVLPCSESTTCLFRTRPLDASDTLVFNEVFWVSMSYPALHQKTLRVDVCTTDRSHLEECLGGAQISLAEVCRSGERSTRWYNLLSYKYLKKQSRELKPVGVMAPASGPASTDAVSALLEQTAVELEKRQEGRSSTQTLEDSWRYEETSENEAVAEEEEEEVEEEEGEEDVFTEKASPDMDGYPALKVDKETNTETPAPSPTVVRPKDRRVGTPSQGPFLRGSTIIRSKTFSPGPQSQYVCRLNRSDSDSSTLSKKPPFVRNSLERRSVRMKRPSPPPQPSSVKSLRSERLIRTSLDLELDLQATRTWHSQLTQEISVLKELKEQLEQAKSHGEKELPQWLREDERFRLLLRMLEKRQMDRAEHKGELQTDKMMRAAAKDVHRLRGQSCKEPPEVQSFREKMAFFTRPRMNIPALSADDV

SEQ ID NO: 32648 - protein, 775 aa, Homo sapiens
MMEDNKQLALRIDGAVQSASQEVTNLRAELTATNRRLAELSGGGGPGPGPGAAASASAAGDSAATNMENPQLGAQVLLREEVSRLQEEVHLLRQMKEMLAKDLEESQGGKSSEVLSATELRVQLAQKEQELARAKEALQAMKADRKRLKGEKTDLVSQMQQLYATLESREEQLRDFIRNYEQHRKESEDAVKALAKEKDLLEREKWELRRQAKEATDHATALRSQLDLKDNRMKELEAELAMAKQSLATLTKDVPKRHSLAMPGETVLNGNQEWVVQADLPLTAAIRQSQQTLYHSHPPHPADRQAVRVSPCHSRQPSVISDASAAEGDRSSTPSDINSPRHRTHSLCNGDSPGPVQKNLHNPIVQSLEDLEDQKRKKKKEKMGFGSISRVFARGKQRKSLDPGLFDDSDSQCSPTRQSLSLSEGEEQMDRLQQVELVRTTPMSHWKAGTVQAWLEVVMAMPMYVKACTENVKSGKVLLSLSDEDLQLGLGVCSSLHRRKLRLAIEDYRDAEAGRSLSKAAELDHHWVAKAWLNDIGLSQYSQAFQNHLVDGRMLNSLMKRDLEKHLNVSKKFHQVSILLGIELLYQVNFSREALQERRARCETQNIDPVVWTNQRVLKWVRDIDLKEYADNLTNSGVHGAVLVLEPTFNAEAMATALGIPSGKHILRRHLAEEMSAVFHPANSTGIREAERFGTPPGRASSVTRAGKEENSSGLKYKAGRLPLGKIGRGFSSKDPDFHDDYGSLQNEDCGDDDPQSRLEQCRLEGYNSLEVTNV

SEQ ID NO: 32649 - protein, 421 aa, Homo sapiens
MMEDNKQLALRIDGAVQSASQEVTNLRAELTATNRRLAELSGGGGPGPGPGAAASASAAGDSAATNMENPQLGAQVLLREEVSRLQEEVHLLRQMKEMLAKDLEESQGGKSSEVLSATELRVQLAQKEQELARAKEALQAMKADRKRLKGEKTDLVSQMQQLYATLESREEQLRDFIRNYEQHRKESEDAVKALAKEKDLLEREKWELRRQAKEATDHATALRSQLDLKDNRMKELEAELAMAKQSLATLTKDVPKRHSLAMPGETVLNGNQEWVVQADLPLTAAIRQSQQTLYHSHPPHPADRQAVRVSPCHSRQPSVISDASAAEGDRSSTPSDINSPRHRTHSLCNGDSPGPVQKNLHNPIVQSLEDLEDQKRKKKKEKMGFGSISRVFARGKQRKSLDPGLFDGTAPDYYIEEDADW

SEQ ID NO: 32650 - protein, 415 aa, Homo sapiens
MRAADSGSWERVRQLAAQGEPAPSCGAGAGPARPPGPAACEQCVDAAGPGDRPRAGVPRVRADGDCSQPVLLREEVSRLQEEVHLLRQMKEMLAKDLEESQGGKSSEVLSATELRVQLAQKEQELARAKEALQAMKADRKRLKGEKTDLVSQMQQLYATLESREEQLRDFIRNYEQHRKESEDAVKALAKEKDLLEREKWELRRQAKEATDHATALRSQLDLKDNRMKELEAELAMAKQSLATLTKDVPKRHSLAMPGETVLNGNQEWVVQADLPLTAAIRQSQQTLYHSHPPHPADRQAVRVSPCHSRQPSVISDASAAEGDRSSTPSDINSPRHRTHSLCNGDSPGPVQKNLHNPIVQSLEDLEDQKRKKKKEKMGFGSISRVFARGKQRKSLDPGLFDGTAPDYYIEEDADW

SEQ ID NO: 32651 - protein, 327 aa, Homo sapiens
MKEMLAKDLEESQGGKSSEVLSATELRVQLAQKEQELARAKEALQAMKADRKRLKGEKTDLVSQMQQLYATLESREEQLRDFIRNYEQHRKESEDAVKALAKEKDLLEREKWELRRQAKEATDHATALRSQLDLKDNRMKELEAELAMAKQSLATLTKDVPKRHSLAMPGETVLNGNQEWVVQADLPLTAAIRQSQQTLYHSHPPHPADRQAVRVSPCHSRQPSVISDASAAEGDRSSTPSDINSPRHRTHSLCNGDSPGPVQKNLHNPIVQSLEDLEDQKRKKKKEKMGFGSISRVFARGKQRKSLDPGLFDGTAPDYYIEEDADW

SEQ ID NO: 32652 - protein, 421 aa, Homo sapiens
MMEDNKQLALRIDGAVQSASQEVTNLRAELTATNRRLAELSGGGGPGPGPGAAASASAAGDSAATNMENPQLGAQVLLREEVSRLQEEVHLLRQMKEMLAKDLEESQGGKSSEVLSATELRVQLAQKEQELARAKEALQAMKADRKRLKGEKTDLVSQMQQLYATLESREEQLRDFIRNYEQHRKESEDAVKALAKEKDLLEREKWELRRQAKEATDHATALRSQLDLKDNRMKELEAELAMAKQSLATLTKDVPKRHSLAMPGETVLNGNQEWVVQADLPLTAAIRQSQQTLYHSHPPHPADRQAVRVSPCHSRQPSVISDASAAEGDRSSTPSDINSPRHRTHSLCNVRPAAAGPGPLGPAQKLQGRGWRGEAILAVSSRPPREHSGECISCSVLSFCKKRWMWGEKGMRPVCSLCPGG

SEQ ID NO: 32653 - protein, 1690 aa, Homo sapiens
MAGASVKVAVRVRPFNSREMSRDSKCIIQMSGSTTTIVNPKQPKETPKSFSFDYSYWSHTSPEDINYASQKQVYRDIGEEMLQHAFEGYNVCIFAYGQTGAGKSYTMMGKQEKDQQGIIPQLCEDLFSRINDTTNDNMSYSVEVSYMEIYCERVRDLLNPKNKGNLRVREHPLLGPYVEDLSKLAVTSYNDIQDLMDSGNKARTVAATNMNETSSRSHAVFNIIFTQKRHDAETNITTEKVSKISLVDLAGSERADSTGAKGTRLKEGANINKSLTTLGKVISALAEMDSGPNKNKKKKKTDFIPYRDSVLTWLLRENLGGNSRTAMVAALSPADINYDETLSTLRYADRAKQIRCNAVINEDPNNKLIRELKDEVTRLRDLLYAQGLGDITDMTNALVGMSPSSSLSALSSRAASVSSLHERILFAPGSEEAIERLKETEKIIAELNETWEEKLRRTEAIRMEREALLAEMGVAMREDGGTLGVFSPKKTPHLVNLNEDPLMSECLLYYIKDGITRVGREDGERRQDIVLSGHFIKEEHCVFRSDSRGGSEAVVTLEPCEGADTYVNGKKVTEPSILRSGNRIIMGKSHVFRFNHPEQARQERERTPCAETPAEPVDWAFAQRELLEKQGIDMKQEMEQRLQELEDQYRREREEATYLLEQQRLDYESKLEALQKQMDSRYYPEVNEEEEEPEDEVQWTERECELALWAFRKWKWYQFTSLRDLLWGNAIFLKEANAISVELKKKVQFQFVLLTDTLYSPLPPDLLPPEAAKDRETRPFPRTIVAVEVQDQKNGATHYWTLEKLRQRLDLMREMYDRAAEVPSSVIEDCDNVVTGGDPFYDRFPWFRLVGRAFVYLSNLLYPVPLVHRVAIVSEKGEVKGFLRVAVQAISADEEAPDYGSGVRQSGTAKISFDDQHFEKFQSESCPVVGMSRSGTSQEELRIVEGQGQGADVGPSADEVNNNTCSAVPPEGLLLDSSEKAALDGPLDAALDHLRLGNTFTFRVTVLQASSISAEYADIFCQFNFIHRHDEAFSTEPLKNTGRGPPLGFYHVQNIAVEVTKSFIEYIKSQPIVFEVFGHYQQHPFPPLCKDVLSPLRPSRRHFPRVMPLSKPVPATKLSTLTRPCPGPCHCKYDLLVYFEICELEANGDYIPAVVDHRGGMPCMGTFLLHQGIQRRITVTLLHETGSHIRWKEVRELVVGRIRNTPETDESLIDPNILSLNILSSGYIHPAQDDRTFYQFEAAWDSSMHNSLLLNRVTPYREKIYMTLSAYIEMENCTQPAVVTKDFCMVFYSRDAKLPASRSIRNLFGSGSLRASESNRVTGVYELSLCHVADAGSPGMQRRRRRVLDTSVAYVRGEENLAGWRPRSDSLILDHQWELEKLSLLQEVEKTRHYLLLREKLETAQRPVPEALSPAFSEDSESHGSSSASSPLSAEGRPSPLEAPNERQRELAVKCLRLLTHTFNREYTHSHVCVSASESKLSEMSVTLLRDPSMSPLGVATLTPSSTCPSLVEGRYGATDLRTPQPCSRPASPEPELLPEADSKKLPSPARATETDKEPQRLLVPDIQEIRVSPIVSKKGYLHFLEPHTSGWARRFVVVRRPYAYMYNSDKDTVERFVLNLATAQVEYSEDQQAMLKTPNTFAVCTEHRGILLQAASDKDMHDWLYAFNPLLAGTIRSKLSRRRSAQMRV

SEQ ID NO: 32654 - protein, 1799 aa, Homo sapiens
MAGASVKVAVRVRPFNSREMSRDSKCIIQMSGSTTTIVNPKQPKETPKSFSFDYSYWSHTSPEDINYASQKQVYRDIGEEMLQHAFEGYNVCIFAYGQTGAGKSYTMMGKQEKDQQGIIPQLCEDLFSRINDTTNDNMSYSVEVSYMEIYCERVRDLLNPKNKGNLRVREHPLLGPYVEDLSKLAVTSYNDIQDLMDSGNKARTVAATNMNETSSRSHAVFNIIFTQKRHDAETNITTEKVSKISLVDLAGSERADSTGAKGTRLKEGANINKSLTTLGKVISALAEMDSGPNKNKKKKKTDFIPYRDSVLTWLLRENLGGNSRTAMVAALSPADINYDETLSTLRYADRAKQIRCNAVINEDPNNKLIRELKDEVTRLRDLLYAQGLGDITDTNTVPGGPKLTNALVGMSPSSSLSALSSRAASVSSLHERILFAPGSEEAIERLKETEKIIAELNETWEEKLRRTEAIRMEREALLAEMGVAMREDGGTLGVFSPKKTPHLVNLNEDPLMSECLLYYIKDGITRVGREDGERRQDIVLSGHFIKEEHCVFRSDSRGGSEAVVTLEPCEGADTYVNGKKVTEPSILRSGNRIIMGKSHVFRFNHPEQARQERERTPCAETPAEPVDWAFAQRELLEKQGIDMKQEMEQRLQELEDQYRREREEATYLLEQQRLDYESKLEALQKQMDSRYYPEVNEEEEEPEDEVQWTERECELALWAFRKWKWYQFTSLRDLLWGNAIFLKEANAISVELKKKVQFQFVLLTDTLYSPLPPDLLPPEAAKDRETRPFPRTIVAVEVQDQKNGATHYWTLEKLRQRLDLMREMYDRAAEVPSSVIEDCDNVVTGGDPFYDRFPWFRLVGSSAISGCNSYPLLNTCMSERMAALTPSPTFSSPDSDATEPAEEQSVGEEEEEEEEEEDEEEEDLEDDVFPEHALCDGRDPFYDRPPLFSLVGRAFVYLSNLLYPVPLVHRVAIVSEKGEVKGFLRVAVQAISADEEAPDYGSGVRQSGTAKISFDDQHFEKFQSESCPVVGMSRSGTSQEELRIVEGQGQGADVGPSADEVNNNTCSAVPPEGLLLDSSEKAALDGPLDAALDHLRLGNTFTFRVTVLQASSISAEYADIFCQFNFIHRHDEAFSTEPLKNTGRGPPLGFYHVQNIAVEVTKSFIEYIKSQPIVFEVFGHYQQHPFPPLCKDVLSPLRPSRRHFPRVMPLSKPVPATKLSTLTRPCPGPCHCKYDLLVYFEICELEANGDYIPAVVDHRGGMPCMGTFLLHQGIQRRITVTLLHETGSHIRWKEVRELVVGRIRNTPETDESLIDPNILSLNILSSGYIHPAQDDRVSLGNDTRTFYQFEAAWDSSMHNSLLLNRVTPYREKIYMTLSAYIEMENCTQPAVVTKDFCMVFYSRDAKLPASRSIRNLFGSGSLRASESNRVTGVYELSLCHVADAGSPGMQRRRRRVLDTSVAYVRGEENLAGWRPRSDSLILDHQWELEKLSLLQEVEKTRHYLLLREKLETAQRPVPEALSPAFSEDSESHGSSSASSPLSAEGRPSPLEAPNERQRELAVKCLRLLTHTFNREYTHSHVCVSASESKLSEMSVTLLRDPSMSPLGVATLTPSSTCPSLVEGRYGATDLRTPQPCSRPASPEPELLPEADSKKLPSPARATETDKEPQRLLVPDIQEIRVSPIVSKKGYLHFLEPHTSGWARRFVVVRRPYAYMYNSDKDTVERFVLNLATAQVEYSEDQQAMLKTPNTFAVCTEHRGILLQAASDKDMHDWLYAFNPLLAGTIRSKLSRRRSAQMRV

SEQ ID NO: 32655 - protein, 1791 aa, Homo sapiens
MAGASVKVAVRVRPFNSREMSRDSKCIIQMSGSTTTIVNPKQPKETPKSFSFDYSYWSHTSPEDINYASQKQVYRDIGEEMLQHAFEGYNVCIFAYGQTGAGKSYTMMGKQEKDQQGIIPQLCEDLFSRINDTTNDNMSYSVEVSYMEIYCERVRDLLNPKNKGNLRVREHPLLGPYVEDLSKLAVTSYNDIQDLMDSGNKARTVAATNMNETSSRSHAVFNIIFTQKRHDAETNITTEKVSKISLVDLAGSERADSTGAKGTRLKEGANINKSLTTLGKVISALAEMDSGPNKNKKKKKTDFIPYRDSVLTWLLRENLGGNSRTAMVAALSPADINYDETLSTLRYADRAKQIRCNAVINEDPNNKLIRELKDEVTRLRDLLYAQGLGDITDTNTVPGGPKLTNALVGMSPSSSLSALSSRAASVSSLHERILFAPGSEEAIERLKETEKIIAELNETWEEKLRRTEAIRMEREALLAEMGVAMREDGGTLGVFSPKKTPHLVNLNEDPLMSECLLYYIKDGITRVGREDGERRQDIVLSGHFIKEEHCVFRSDSRGGSEAVVTLEPCEGADTYVNGKKVTEPSILRSGNRIIMGKSHVFRFNHPEQARQERERTPCAETPAEPVDWAFAQRELLEKQGIDMKQEMEQRLQELEDQYRREREEATYLLEQQRLDYESKLEALQKQMDSRYYPEVNEEEEEPEDEVQWTERECELALWAFRKWKWYQFTSLRDLLWGNAIFLKEANAISVELKKKVQFQFVLLTDTLYSPLPPDLLPPEAAKDRETRPFPRTIVAVEVQDQKNGATHYWTLEKLRQRLDLMREMYDRAAEVPSSVIEDCDNVVTGGDPFYDRFPWFRLVGSSAISGCNSYPLLNTCMSERMAALTPSPTFSSPDSDATEPAEEQSVGEEEEEEEEEEDEEEEDLEDDVFPEHALCDGRDPFYDRPPLFSLVGRAFVYLSNLLYPVPLVHRVAIVSEKGEVKGFLRVAVQAISADEEAPDYGSGVRQSGTAKISFDDQHFEKFQSESCPVVGMSRSGTSQEELRIVEGQGQGADVGPSADEVNNNTCSAVPPEGLLLDSSEKAALDGPLDAALDHLRLGNTFTFRVTVLQASSISAEYADIFCQFNFIHRHDEAFSTEPLKNTGRGPPLGFYHVQNIAVEVTKSFIEYIKSQPIVFEVFGHYQQHPFPPLCKDVLSPLRPSRRHFPRVMPLSKPVPATKLSTLTRPCPGPCHCKYDLLVYFEICELEANGDYIPAVVDHRGGMPCMGTFLLHQGIQRRITVTLLHETGSHIRWKEVRELVVGRIRNTPETDESLIDPNILSLNILSSGYIHPAQDDRTFYQFEAAWDSSMHNSLLLNRVTPYREKIYMTLSAYIEMENCTQPAVVTKDFCMVFYSRDAKLPASRSIRNLFGSGSLRASESNRVTGVYELSLCHVADAGSPGMQRRRRRVLDTSVAYVRGEENLAGWRPRSDSLILDHQWELEKLSLLQEVEKTRHYLLLREKLETAQRPVPEALSPAFSEDSESHGSSSASSPLSAEGRPSPLEAPNERQRELAVKCLRLLTHTFNREYTHSHVCVSASESKLSEMSVTLLRDPSMSPLGVATLTPSSTCPSLVEGRYGATDLRTPQPCSRPASPEPELLPEADSKKLPSPARATETDKEPQRLLVPDIQEIRVSPIVSKKGYLHFLEPHTSGWARRFVVVRRPYAYMYNSDKDTVERFVLNLATAQVEYSEDQQAMLKTPNTFAVCTEHRGILLQAASDKDMHDWLYAFNPLLAGTIRSKLSRRRSAQMRV

SEQ ID NO: 32656 - protein, 62 aa, Homo sapiens
MCGSYYGNYYGDHGYGCCGYEGLGYGYGSLRCGYSSCCGYGHGYGSRFFCGCGYGCGSGYYY

SEQ ID NO: 32657 - protein, 1135 aa, Homo sapiens
MVDLESEVPPLPPRYRFRDLLLGDQGWQNDDRVQVEFYMNENTFKERLKLFFIKNQRSSLRIRLFNFSLKLLSCLLYIIRVLLENPSQGNEWSHIFWVNRSLPLWGLQVSVALISLFETILLGYLSYKGNIWEQILRIPFILEIINAVPFIISIFWPSLRNLFVPVFLNCWLAKHALENMINDLHRAIQRTQSAMFNQVLILISTLLCLIFTCICGIQHLERIGKKLNLFDSLYFCIVTFSTVGFGDVTPETWSSKLFVVAMICVALVVLPIQFEQLAYLWMERQKSGGNYSRHRAQTEKHVVLCVSSLKIDLLMDFLNEFYAHPRLQDYYVVILCPTEMDVQVRRVLQIPMWSQRVIYLQGSALKDQDLLRAKMDDAEACFILSSRCEVDRTSSDHQTILRAWAVKDFAPNCPLYVQILKPENKFHIKFADHVVCEEEFKYAMLALNCICPATSTLITLLVHTSRGQEGQQSPEQWQKMYGRCSGNEVYHIVLEESTFFAEYEGKSFTYASFHAHKKFGVCLIGVRREDNKNILLNPGPRYIMNSTDICFYINITKEENSAFKNQDQQRKSNVSRSFYHGPSRLPVHSIIASMGTVAIDLQDTSCRSASGPTLSLPTEGSKEIRRPSIAPVLEVADTSSIQTCDLLSDQSEDETTPDEEMSSNLEYAKGYPPYSPYIGSSPTFCHLLHEKVPFCCLRLDKSCQHNYYEDAKAYGFKNKLIIVAAETAGNGLYNFIVPLRAYYRPKKELNPIVLLLDNPPDMHFLDAICWFPMVYYMVGSIDNLDDLLRCGVTFAANMVVVDKESTMSAEEDYMADAKTIVNVQTLFRLFSSLSIITELTHPANMRFMQFRAKDCYSLALSKLEKKERERGSNLAFMFRLPFAAGRVFSISMLDTLLYQSFVKDYMISITRLLLGLDTTPGSGFLCSMKITADDLWIRTYARLYQKLCSSTGDVPIGIYRTESQKLTTSESQISISVEEWEDTKDSKEQGHHRSNHRNSTSSDQSDHPLLRRKSMQWARRLSRKGPKHSGKTAEKITQQRLNLYRRSERQELAELVKNRMKHLGLSTVGYDEMNDHQSTLSYILINPSPDTRIELNDVVYLIRPDPLAYLPNSEPSRRNSICNVTGQDSREETQL

SEQ ID NO: 32658 - protein, 1111 aa, Homo sapiens
MVDLESEVPPLPPRYRFRDLLLGDQGWQNDDRVQVEFYMNENTFKERLKLFFIKNQRSSLRIRLFNFSLKLLSCLLYIIRVLLENPSQGNEWSHIFWVNRSLPLWGLQVSVALISLFETILLGYLSYKGNIWEQILRIPFILEIINAVPFIISIFWPSLRNLFVPVFLNCWLAKHALENMINDLHRAIQRTQSAMFNQVLILISTLLCLIFTCICGIQHLERIGKKLNLFDSLYFCIVTFSTVGFGDVTPETWSSKLFVVAMICVALVVLPIQFEQLAYLWMERQKSGGNYSRHRAQTEKHVVLCVSSLKIDLLMDFLNEFYAHPRLQDYYVVILCPTEMDVQVRRVLQIPMWSQRVIYLQGSALKDQDLLRAKMDDAEACFILSSRCEVDRTSSDHQTILRAWAVKDFAPNCPLYVQILKPENKFHIKFADHVVCEEEFKYAMLALNCICPATSTLITLLVHTSRGQEGQQSPEQWQKMYGRCSGNEVYHIVLEESTFFAEYEGKSFTYASFHAHKKFGVCLIGVRREDNKNILLNPGPRYIMNSTDICFYINITKEENSAFKNQDQQRKSNVSRSFYHGPSRLPVHSIIASMGTVAIDLQDTSCRSASGPTLSLPTEGSKEIRRPSIAPVLEVADTSSIQTCDLLSDQSEDETTPDEEMSSNLEYAKGYPPYSPYIGSSPTFCHLLHEKVPFCCLRLDKSCQHNYYEDAKAYGFKNKLIIVAAETAGNGLYNFIVPLRAYYRPKKELNPIVLLLDNPLDDLLRCGVTFAANMVVVDKESTMSAEEDYMADAKTIVNVQTLFRLFSSLSIITELTHPANMRFMQFRAKDCYSLALSKLEKKERERGSNLAFMFRLPFAAGRVFSISMLDTLLYQSFVKDYMISITRLLLGLDTTPGSGFLCSMKITADDLWIRTYARLYQKLCSSTGDVPIGIYRTESQKLTTSESQISISVEEWEDTKDSKEQGHHRSNHRNSTSSDQSDHPLLRRKSMQWARRLSRKGPKHSGKTAEKITQQRLNLYRRSERQELAELVKNRMKHLGLSTVGYDEMNDHQSTLSYILINPSPDTRIELNDVVYLIRPDPLAYLPNSEPSRRNSICNVTGQDSREETQL

SEQ ID NO: 32659 - protein, 1068 aa, Homo sapiens
MVDLESEVPPLPPRYRFRDLLLGDQGWQNDDRVQVEFYMNENTFKERLKLFFIKNQRSSLRIRLFNFSLKLLSCLLYIIRVLLENPSQGNEWSHIFWVNRSLPLWGLQVSVALISLFETILLGYLSYKGNIWEQILRIPFILEIINAVPFIISIFWPSLRNLFVPVFLNCWLAKHALENMINDLHRAIQRTQSAMFNQVLILISTLLCLIFTCICGIQHLERIGKKLNLFDSLYFCIVTFSTVGFGDVTPETWSSKLFVVAMICVALVVLPIQFEQLAYLWMERQKSGGNYSRHRAQTEKHVVLCVSSLKIDLLMDFLNEFYAHPRLQDYYVVILCPTEMDVQVRRVLQIPMWSQRVIYLQGSALKDQDLLRAKMDDAEACFILSSRCEVDRTSSDHQTILRAWAVKDFAPNCPLYVQILKPENKFHIKFADHVVCEEEFKYAMLALNCICPATSTLITLLVHTSRGQFGVCLIGVRREDNKNILLNPGPRYIMNSTDICFYINITKEENSAFKNQDQQRKSNVSRSFYHGPSRLPVHSIIASMGTVAIDLQDTSCRSASGPTLSLPTEGSKEIRRPSIAPVLEVADTSSIQTCDLLSDQSEDETTPDEEMSSNLEYAKGYPPYSPYIGSSPTFCHLLHEKVPFCCLRLDKSCQHNYYEDAKAYGFKNKLIIVAAETAGNGLYNFIVPLRAYYRPKKELNPIVLLLDNPLDDLLRCGVTFAANMVVVDKESTMSAEEDYMADAKTIVNVQTLFRLFSSLSIITELTHPANMRFMQFRAKDCYSLALSKLEKKERERGSNLAFMFRLPFAAGRVFSISMLDTLLYQSFVKDYMISITRLLLGLDTTPGSGFLCSMKITADDLWIRTYARLYQKLCSSTGDVPIGIYRTESQKLTTSESRKIASQSQISISVEEWEDTKDSKEQGHHRSNHRNSTSSDQSDHPLLRRKSMQWARRLSRKGPKHSGKTAEKITQQRLNLYRRSERQELAELVKNRMKHLGLSTVGYDEMNDHQSTLSYILINPSPDTRIELNDVVYLIRPDPLAYLPNSEPSRRNSICNVTGQDSREETQL

SEQ ID NO: 32660 - protein, 1052 aa, Homo sapiens
MVDLESEVPPLPPRYRFRDLLLGDQGWQNDDRVQVEFYMNENTFKERLKLFFIKNQRSSLRIRLFNFSLKLLSCLLYIIRVLLENPSQGNEWSHIFWVNRSLPLWGLQVSVALISLFETILLGYLSYKIFWPSLRNLFVPVFLNCWLAKHALENMINDLHRAIQRTQSAMFNQVLILISTLLCLIFTCICGIQHLERIGKKLNLFDSLYFCIVTFSTVGFGDVTPETWSSKLFVVAMICVALVVLPIQFEQLAYLWMERQKSGGNYSRHRAQTEKHVVLCVSSLKIDLLMDFLNEFYAHPRLQDYYVVILCPTEMDVQVRRVLQIPMWSQRVIYLQGSALKDQDLLRAKMDDAEACFILSSRCEVDRTSSDHQTILRAWAVKDFAPNCPLYVQILKPENKFHIKFADHVVCEEEFKYAMLALNCICPATSTLITLLVHTSRGQCVCLCCREGQQSPEQWQKMYGRCSGNEVYHIVLEESTFFAEYEGKSFTYASFHAHKKFGVCLIGVRREDNKNILLNPGPRYIMNSTDICFYINITKEENSAFKNQDQQRKSNVSRSFYHGPSRLPVHSIIASMGTVAIDLQDTSCRSASGPTLSLPTEGSKEIRRPSIAPVLEVADTSSIQTCDLLSDQSEDETTPDEEMSSNLEYAKGYPPYSPYIGSSPTFCHLLHEKVPFCCLRLDKSCQHNYYEDAKAYGFKNKLIIVAAETAGNGLYNFIVPLRAYYRPKKELNPIVLLLDNPLDDLLRCGVTFAANMVVVDKESTMSAEEDYMADAKTIVNVQTLFRLFSSLSIITELTHPANMRFMQFRAKDCYSLALSKLEKKERERGSNLAFMFRLPFAAGRVFSISMLDTLLYQSFVKDYMISITRLLLGLDTTPGSGFLCSMKITADDLWIRTYARLYQKLCSSTGDVPIGIYRTESQKLTTSESRKIASQSQISISVEEWEDTKDSKEQGHHRSNHRNSTSSDQSDHPLLRRKSMQWARRLSRKGPKHSGKTAEKITQQRLNLYRRSERQELAELVKNRMKHLGLSTVGYGMLFKNYCIYGLVISCH

SEQ ID NO: 32661 - protein, 665 aa, Homo sapiens
MAAGGSTQQRRREMAAASAAAISGAGRCRLSKIGATRRPPPARVRVAVRLRPFVDGTAGASDPPCVRGMDSCSLEIANWRNHQETLKYQFDAFYGERSTQQDIYAGSVQPILRHLLEGQNASVLAYGPTGAGKTHTMLGSPEQPGVIPRALMDLLQLTREEGAEGRPWALSVTMSYLEIYQEKVLDLLDPASGDLVIREDCRGNILIPGLSQKPISSFADFERHFLPASRNRTVGATRLNQRSSRSHAVLLVKVDQRERLAPFRQREGKLYLIDLAGSEDNRRTGNKGLRLKESGAINTSLFVLGKVVDALNQGLPRVPYRDSKLTRLLQDSLGGSAHSILIANIAPERRFYLDTVSALNFAARSKEVINRPFTNESLQPHALGPVKLSQKELLGPPEAKRARGPEEEEIGSPEPMAAPASASQKLSPLQKLSSMDPAMLERLLSLDRLLASQGSQGAPLLSTPKRERMVLMKTVEEKDLEIERLKTKQKELEAKMLAQKAEEKENHCPTMLRPLSHRTVTGAKPLKKAVVMPLQLIQEQAASPNAEIHILKNKGRKRKLESLDALEPEEKAEDCWELQISPELLAHGRQKILDLLNEGSARDLRSLQRIGPKKAQLIVGWRELHGPFSQVEDLERVEGITGKQMESFLKANILGLAAGQRCGAS

SEQ ID NO: 32662 - protein, 597 aa, Homo sapiens
MDSCSLEIANWRNHQETLKYQFDAFYGERSTQQDIYAGSVQPILRHLLEGQNASVLAYGPTGAGKTHTMLGSPEQPGVIPRALMDLLQLTREEGAEGRPWALSVTMSYLEIYQEKVLDLLDPASGDLVIREDCRGNILIPGLSQKPISSFADFERHFLPASRNRTVGATRLNQRSSRSHAVLLVKVDQRERLAPFRQREGKLYLIDLAGSEDNRRTGNKGLRLKESGAINTSLFVLGKVVDALNQGLPRVPYRDSKLTRLLQDSLGGSAHSILIANIAPERRFYLDTVSALNFAARSKEVINRPFTNESLQPHALGPVKLSQKELLGPPEAKRARGPEEEEIGSPEPMAAPASASQKLSPLQKLSSMDPAMLERLLSLDRLLASQGSQGAPLLSTPKRERMVLMKTVEEKDLEIERLKTKQKELEAKMLAQKAEEKENHCPTMLRPLSHRTVTGAKPLKKAVVMPLQLIQEQAASPNAEIHILKNKGRKRKLESLDALEPEEKAEDCWELQISPELLAHGRQKILDLLNEGSARDLRSLQRIGPKKAQLIVGWRELHGPFSQVEDLERVEGITGKQMESFLKANILGLAAGQRCGAS

SEQ ID NO: 32663 - protein, 645 aa, Homo sapiens
MPRSRGGRAAPGPPPPPPPPGQAPRWSRWRVPGRLLLLLLPALCCLPGAARAAAAAAGAGNRAAVAVAVARADEAEAPFAGQNWLKSYGYLLPYDSRASALHSAKALQSAVSTMQQFYGIPVTGVLDQTTIEWMKKPRCGVPDHPHLSRRRRNKRYALTGQKWRQKHITYSIHNYTPKVGELDTRKAIRQAFDVWQKVTPLTFEEVPYHEIKSDRKEADIMIFFASGFHGDSSPFDGEGGFLAHAYFPGPGIGGDTHFDSDEPWTLGNANHDGNDLFLVAVHELGHALGLEHSSDPSAIMAPFYQYMETHNFKLPQDDLQGIQKIYGPPAEPLEPTRPLPTLPVRRIHSPSERKHERQPRPPRPPLGDRPSTPGTKPNICDGNFNTVALFRGEMFVFKDRWFWRLRNNRVQEGYPMQIEQFWKGLPARIDAAYERADGRFVFFKGDKYWVFKEVTVEPGYPHSLGELGSCLPREGIDTALRWEPVGKTYFFKGERYWRYSEERRATDPGYPKPITVWKGIPQAPQGAFISKEGYYTYFYKGRDYWKFDNQKLSVEPGYPRNILRDWMGCNQKEVERRKERRLPQDDVDIMVTINDVPGSVNAVAVVIPCILSLCILVLVYTIFQFKNKTGPQPVTYYKRPVQEWV

SEQ ID NO: 32664 - protein, 630 aa, Homo sapiens
MAAGVAAWLPFARAAAIGWMPVASGPMPAPPRQERKRTQDALIVLNVSGTRFQTWQDTLERYPDTLLGSSERDFFYHPETQQYFFDRDPDIFRHILNFYRTGKLHYPRHECISAYDEELAFFGLIPEIIGDCCYEEYKDRRRENAERLQDDADTDTAGESALPTMTARQRVWRAFENPHTSTMALVFYYVTGFFIAVSVIANVVETVPCGSSPGHIKELPCGERYAVAFFCLDTACVMIFTVEYLLRLAAAPSRYRFVRSVMSIIDVVAILPYYIGLVMTDNEDVSGAFVTLRVFRVFRIFKFSRHSQGLRILGYTLKSCASELGFLLFSLTMAIIIFATVMFYAEKGSSASKFTSIPAAFWYTIVTMTTLGYGDMVPKTIAGKIFGSICSLSGVLVIALPVPVIVSNFSRIYHQNQRADKRRAQKKARLARIRAAKSGSANAYMQSKRNGLLSNQLQSSEDEQAFVSKSGSSFETQHHHLLHCLEKTTNHEFVDEQVFEESCMEVATVNRPSSHSPSLSSQQGVTSTCCSRRHKKTFRIPNANVSGSHQGSIQELSTIQIRCVERTPLSNSRSSLNAKMEECVKLNCEQPYVTTAIISIPTPPVTTPEGDDRPESPEYSGGNIVRVSAL

SEQ ID NO: 32665 - protein, 1343 aa, Homo sapiens
MGLEAQRLPGAEEAPVRVALRVRPLLPKELLHGHQSCLQVEPGLGRVTLGRDRHFGFHVVLAEDAGQEAVYQACVQPLLEAFFEGFNATVFAYGQTGSGKTYTMGEASVASLLEDEQGIVPRAMAEAFKLIDENDLLDCLVHVSYLEVYKEEFRDLLEVGTASRDIQLREDERGNVVLCGVKEVDVEGLDEVLSLLEMGNAARHTGATHLNHLSSRSHTVFTVTLEQRGRAPSRLPRPAPGQLLVSKFHFVDLAGSERVLKTGSTGERLKESIQINSSLLALGNVISALGDPQRRGSHIPYRDSKITRILKDSLGGNAKTVMIACVSPSSSDFDETLNTLNYASRAQNIRNRATVNWRPEAERPPEETASGARGPPRHRSETRIIHRGRRAPGPATASAAAAMRLGAECARYRACTDAAYSLLRELQAEPGLPGAAARKVRDWLCAVEGERSALSSASGPDSGIESASVEDQAAQGAGGRKEDEGAQQLLTLQNQVARLEEENRDFLAALEDAMEQYKLQSDRLREQQEEMVELRLRLELVRPGWGGPRLLNGLPPGSFVPRPHTAPLGGAHAHVLGMVPPACLPGDEVGSEQRGEQVTNGREAGAELLTEVNRLGSGSSAASEEEEEEEEPPRRTLHLRRNRISNCSQRAGARPGSLPERKGPELCLEELDAAIPGSRAVGGSKARVQARQVPPATASEWRLAQAQQKIRELAINIRMKEELIGELVRTGKAAQALNRQHSQRIRELEQEAEQVRAELSEGQRQLRELEGKELQDAGERSRLQEFRRRVAAAQSQVQVLKEKKQATERLVSLSAQSEKRLQELERNVQLMRQQQGQLQRRLREETEQKRRLEAEMSKRQHRVKELELKHEQQQKILKIKTEEIAAFQRKRRSGSNGSVVSLEQQQKIEEQKKWLDQEMEKVLQQRRALEELGEELHKREAILAKKEALMQEKTGLESKRLRSSQALNEDIVRVSSRLEHLEKELSEKSGQLRQGSAQSQQQIRGEIDSLRQEKDSLLKQRLEIDGKLRQGSLLSPEEERTLFQLDEAIEALDAAIEYKNEAITCRQRVLRASASLLSQCEMNLMAKLSYLSSSETRALLCKYFDKVVTLREEQHQQQIAFSELEMQLEEQQRLVYWLEVALERQRLEMDRQLTLQQKEHEQNMQLLLQQSRDHLGEGLADSRRQYEARIQALEKELGRYMWINQELKQKLGGVNAVGHSRGGEKRSLCSEGRQAPGNEDELHLAPELLWLSPLTEGAPRTREETRDLVHAPLPLTWKRSSLCGEEQGSPEELRQREAAEPLVGRVLPVGEAGLPWNFGPLSKPRRELRRASPGMIDVRKNPL

SEQ ID NO: 32666 - protein, 158 aa, Homo sapiens
MDLASEITSATQTSSLCSSGRGHAGYPAPGIVAHGFETHGTARVAQGHLLPPCLLPPPQMPVLAALRDLSRRGSTSSSRSPSRPVSTSASKPCLPASCLGETWSISINLVGSSGHLQSPGAQRDAQRETGCLGPSWLPHHQGRDEELSLSHSAQGEEF

SEQ ID NO: 32667 - protein, 477 aa, Homo sapiens
MKSLPILLLLCVAVCSAYPLDGAARGEDTSMNLVQKYLENYYDLKKDVKQFVRRKDSGPVVKKIREMQKFLGLEVTGKLDSDTLEVMRKPRCGVPDVGHFRTFPGIPKWRKTHLTYRIVNYTPDLPKDAVDSAVEKALKVWEEVTPLTFSRLYEGEADIMISFAVREHGDFYPFDGPGNVLAHAYAPGPGINGDAHFDDDEQWTKDTTGTNLFLVAAHEIGHSLGLFHSANTEALMYPLYHSLTDLTRFRLSQDDINGIQSLYGPPPDSPETPLVPTEPVPPEPGTPANCDPALSFDAVSTLRGEILIFKDRHFWRKSLRKLEPELHLISSFWPSLPSGVDAAYEVTSKDLVFIFKGNQFWAIRGNEVRAGYPRGIHTLGFPPTVRKIDAAISDKEKNKTYFFVEDKYWRFDEKRNSMEPGFPKQIAEDFPGIDSKIDAVFEEFGFFYFFTGSSQLEFDPNAKKVTHTLKSNSWLNC

SEQ ID NO: 32668 - protein, 673 aa, Homo sapiens
MDPQRSPLLEVKGNIELKRPLIKAPSQLPLSGSRLKRRPDQMEDGLEPEKKRTRGLGATTKITTSHPRVPSLTTVPQTQGQTTAQKVSKKTGPRCSTAIATGLKNQKPVPAVPVQKSGTSGVPPMAGGKKPSKRPAWDLKGQLCDLNAELKRCRERTQTLDQENQQLQDQLRDAQQQVKALGTERTTLEGHLAKVQAQAEQGQQELKNLRACVLELEERLSTQEGLVQELQKKQVELQEERRGLMSQLEEKERRLQTSEAALSSSQAEVASLRQETVAQAALLTEREERLHGLEMERRRLHNQLQELKGNIRVFCRVRPVLPGEPTPPPGLLLFPSGPGGPSDPPTRLSLSRSDERRGTLSGAPAPPTRHDFSFDRVFPPGSGQDEVFEEIAMLVQSALDGYPVCIFAYGQTGSGKTFTMEGGPGGDPQLEGLIPRALRHLFSVAQELSGQGWTYSFVASYVEIYNETVRDLLATGTRKGQGGECEIRRAGPGSEELTVTNARYVPVSCEKEVDALLHLARQNRAVARTAQNERSSRSHSVFQLQISGEHSSRGLQCGAPLSLVDLAGSERLDPGLALGPGERERLRETQAINSSLSTLGLVIMALSNKESHVPYRNSKLTYLLQNSLGGSAKMLMFVNISPLEENVSESLNSLRFASKVNQCVIGTAQANRK

SEQ ID NO: 32669 - protein, 792 aa, Homo sapiens
MQGEDARYLKRKVKGGNIDVHPSEKALIVHYEVEATILGEMGDPMLGERKECQKIIRLKSLNANTDITSLARKVVEECKLIHPSKLNEVEQLLYYLQNRRDSLSGKEKKEKSSKPKDPPPFEGMEIDEVANINDMDEYIELLYEDIPDKVRGSALILQLARNPDNLEELLLNETALGALARVLREDWKQSVELATNIIYIFFCFSSFSQFHGLITHYKIGALCMNIIDHELKRHELWQEELSKKKKAVDEDPENQTLRKDYEKTFKKYQGLVVKQEQLLRVALYLLLNLAEDTRTELKMRNKNIVHMLVKALDRDNFELLILVVSFLKKLSIFMENKNDMVEMDIVEKLVKMIPCEHEDLLNITLRLLLNLSFDTGLRNKMVQVGLLPKLTALLGNDNYKQIAMCVLYHISMDDRFKSMFAYTDCIPQLMKMLFECSDERIDLELISFCINLAANKRNVQLICEGNGLKMLMKRALKFKDPLLMKMIRNISQHDGPTKNLFIDYVGDLAAQISNDEEEEFVIECLGTLANLTIPDLDWELVLKEYKLVPYLKDKLKPGAAEDDLVLEVVIMIGTVSMDDSCAALLAKSGIIPALIELLNAQQEDDEFVCQIIYVFYQMVFHQATRDVIIKETQAPAYLIDLMHDKNNEIRKVCDNTLDIIAEYDEEWAKKIQSEKFRWHNSQWLEMVESRQMDESEQYLYGDDRIEPYIHEGDILERPDLFYNSDGLIASEGAISPDFFNDYHLQNGDVVGQHSFPGSLGMDGFGQPVGILGRPATAYGFRPDEPYYYGYGS

SEQ ID NO: 32670 - protein, 748 aa, Homo sapiens
MQGEDARYLKSIRLKSLNANTDITSLARKVVEECKLIHPSKLNEVEQLLYYLQNRRDSLSGKEKKEKSSKPKDPPPFEGMEIDEVANINDMDEYIELLYEDIPDKVRGSALILQLARNPDNLEELLLNETALGALARVLREDWKQSVELATNIIYIFFCFSSFSQFHGLITHYKIGALCMNIIDHELKRHELWQEELSKKKKAVDEDPENQTLRKDYEKTFKKYQGLVVKQEQLLRVALYLLLNLAEDTRTELKMRNKNIVHMLVKALDRDNFELLILVVSFLKKLSIFMENKNDMVEMDIVEKLVKMIPCEHEDLLNITLRLLLNLSFDTGLRNKMVQVGLLPKLTALLGNDNYKQIAMCVLYHISMDDRFKSMFAYTDCIPQLMKMLFECSDERIDLELISFCINLAANKRNVQLICEGNGLKMLMKRALKFKDPLLMKMIRNISQHDGPTKNLFIDYVGDLAAQISNDEEEEFVIECLGTLANLTIPDLDWELVLKEYKLVPYLKDKLKPGAAEDDLVLEVVIMIGTVSMDDSCAALLAKSGIIPALIELLNAQQEDDEFVCQIIYVFYQMVFHQATRDVIIKETQAPAYLIDLMHDKNNEIRKVCDNTLDIIAEYDEEWAKKIQSEKFRWHNSQWLEMVESRQMDESEQYLYGDDRIEPYIHEGDILERPDLFYNSDGLIASEGAISPDFFNDYHLQNGDVVGQHSFPGSLGMDGFGQPVGILGRPATAYGFRPDEPYYYGYGS

SEQ ID NO: 32671 - protein, 752 aa, Homo sapiens
MGDPMLGERKECQKIIRLKSLNANTDITSLARKVVEECKLIHPSKLNEVEQLLYYLQNRRDSLSGKEKKEKSSKPKDPPPFEGMEIDEVANINDMDEYIELLYEDIPDKVRGSALILQLARNPDNLEELLLNETALGALARVLREDWKQSVELATNIIYIFFCFSSFSQFHGLITHYKIGALCMNIIDHELKRHELWQEELSKKKKAVDEDPENQTLRKDYEKTFKKYQGLVVKQEQLLRVALYLLLNLAEDTRTELKMRNKNIVHMLVKALDRDNFELLILVVSFLKKLSIFMENKNDMVEMDIVEKLVKMIPCEHEDLLNITLRLLLNLSFDTGLRNKMVQVGLLPKLTALLGNDNYKQIAMCVLYHISMDDRFKSMFAYTDCIPQLMKMLFECSDERIDLELISFCINLAANKRNVQLICEGNGLKMLMKRALKFKDPLLMKMIRNISQHDGPTKNLFIDYVGDLAAQISNDEEEEFVIECLGTLANLTIPDLDWELVLKEYKLVPYLKDKLKPGAAEDDLVLEVVIMIGTVSMDDSCAALLAKSGIIPALIELLNAQQEDDEFVCQIIYVFYQMVFHQATRDVIIKETQAPAYLIDLMHDKNNEIRKVCDNTLDIIAEYDEEWAKKIQSEKFRWHNSQWLEMVESRQMDESEQYLYGDDRIEPYIHEGDILERPDLFYNSDGLIASEGAISPDFFNDYHLQNGDVVGQHSFPGSLGMDGFGQPVGILGRPATAYGFRPDEPYYYGYGS

SEQ ID NO: 32672 - protein, 714 aa, Homo sapiens
MSIALGNTYRRSLSDSETVSVLQASLCEEKKEKSSKPKDPPPFEGMEIDEVANINDMDEYIELLYEDIPDKVRGSALILQLARNPDNLEELLLNETALGALARVLREDWKQSVELATNIIYIFFCFSSFSQFHGLITHYKIGALCMNIIDHELKRHELWQEELSKKKKAVDEDPENQTLRKDYEKTFKKYQGLVVKQEQLLRVALYLLLNLAEDTRTELKMRNKNIVHMLVKALDRDNFELLILVVSFLKKLSIFMENKNDMVEMDIVEKLVKMIPCEHEDLLNITLRLLLNLSFDTGLRNKMVQVGLLPKLTALLGNDNYKQIAMCVLYHISMDDRFKSMFAYTDCIPQLMKMLFECSDERIDLELISFCINLAANKRNVQLICEGNGLKMLMKRALKFKDPLLMKMIRNISQHDGPTKNLFIDYVGDLAAQISNDEEEEFVIECLGTLANLTIPDLDWELVLKEYKLVPYLKDKLKPGAAEDDLVLEVVIMIGTVSMDDSCAALLAKSGIIPALIELLNAQQEDDEFVCQIIYVFYQMVFHQATRDVIIKETQAPAYLIDLMHDKNNEIRKVCDNTLDIIAEYDEEWAKKIQSEKFRWHNSQWLEMVESRQMDESEQYLYGDDRIEPYIHEGDILERPDLFYNSDGLIASEGAISPDFFNDYHLQNGDVVGQHSFPGSLGMDGFGQPVGILGRPATAYGFRPDEPYYYGYGS

SEQ ID NO: 32673 - protein, 267 aa, Homo sapiens
MRLTVLCAVCLLPGSLALPLPQEAGGMSELQWEQAQDYLKRFYLYDSETKNANSLEAKLKEMQKFFGLPITGMLNSRVIEIMQKPRCGVPDVAEYSLFPNSPKWTSKVVTYRIVSYTRDLPHITVDRLVSKALNMWGKEIPLHFRKVVWGTADIMIGFARGAHGDSYPFDGPGNTLAHAFAPGTGLGGDAHFDEDERWTDGSSLGINFLYAATHELGHSLGMGHSSDPNAVMYPTYGNGDPQNFKLSQDDIKGIQKLYGKRSNSRKK

SEQ ID NO: 32674 - protein, 84 aa, Homo sapiens
MDDDAAPRVEGVPVAVHKHALHDGLRQVAGPGAAAAHLPRWPPPQLAASRREAPPLSQRPHRTQGAGSPPETNEKLTNPQVKEK

SEQ ID NO: 32675 - protein, 467 aa, Homo sapiens [sequence omitted]

SEQ ID NO: 32676 - protein, 343 aa, Homo sapiens
MASLQRSRVLRCCSCRLFQAHQVKKSVKWTCKACGEKQSFLQAYGEGSGADCRRHVQKLNLLQGQVSELPLRSLEETVSASEEENVGHQQAGNVKQQEKSQPSESRWLKYLEKDSQELELEGTGVCFSKQPSSKMEEPGPRFSQDLPRKRKWSRSTVQPPCSRGVQDSGGSEVAWGPQKGQAGLTWKVKQGSSPCLQENSADCSAGELRGPGKELWSPIQQVTATSSKWAQFVLPPRKSSHVDSEQPRSLQRDPRPAGPAQAKQGTPRAQASREGLSRPTAAVQLPRATHPVTSGSERPCGKTSWDARTPWAEGGPLVLEAQNPRPTRLCDLFITGEDFDDDV

SEQ ID NO: 32677 - protein, 271 aa, Homo sapiens
MQSARAWLPGDCTSRDGVASAFSGATLLQLPPLPGAPGKKECQVDMQSLWREAVLFAEFPRHGAPASELPVPSGSEMDGAESGKAYGEGSGADCRRHVQKLNLLQGQVSELPLRSLEETVSASEEENVGHQQAGNVKQQEKSQPSESRWLKYLEKDSQELELEGTGVCFSKQPSSKMEEPGPRFSQDLPRKRKWSRSTVQPPCSRGVQDSGGSEVAWGPQKGQAGLTWKVKQGSSPCLQENSADCSAGELRGPGKELWSPIQQDGYKEILF

SEQ ID NO: 32678 - protein, 288 aa, Homo sapiens
MASLQRSRVLRCCSCRLFQAHQVKKSVKWTCKACGEKQSFLQEKSQPSESRWLKYLEKDSQELELEGTGVCFSKQPSSKMEEPGPRFSQDLPRKRKWSRSTVQPPCSRGVQDSGGSEVAWGPQKGQAGLTWKVKQGSSPCLQENSADCSAGELRGPGKELWSPIQQVTATSSKWAQFVLPPRKSSHVDSEQPRSLQRDPRPAGPAQAKQGTPRAQASREGLSRPTAAVQLPRATHPVTSGSERPCGKTSWDARTPWAEGGPLVLEAQNPRPTRLCDLFITGEDFDDDV

SEQ ID NO: 32679 - protein, 707 aa, Homo sapiens
MSLWQPLVLVLLVLGCCFAAPRQRQSTLVLFPGDLRTNLTDRQLAEEYLYRYGYTRVAEMRGESKSLGPALLLLQKQLSLPETGELDSATLKAMRTPRCGVPDLGRFQTFEGDLKWHHHNITYWIQNYSEDLPRAVIDDAFARAFALWSAVTPLTFTRVYSRDADIVIQFGVAEHGDGYPFDGKDGLLAHAFPPGPGIQGDAHFDDDELWSLGKGVVVPTRFGNADGAACHFPFIFEGRSYSACTTDGRSDGLPWCSTTANYDTDDRFGFCPSERLYTQDGNADGKPCQFPFIFQGQSYSACTTDGRSDGYRWCATTANYDRDKLFGFCPTRADSTVMGGNSAGELCVFPFTFLGKEYSTCTSEGRGDGRLWCATTSNFDSDKKWGFCPDQGYSLFLVAAHEFGHALGLDHSSVPEALMYPMYRFTEGPPLHKDDVNGIRHLYGPRPEPEPRPPTTTTPQPTAPPTVCPTGPPTVHPSERPTAGPTGPPSAGPTGPPTAGPSTATTVPLSPVDDACNVNIFDAIAEIGNQLYLFKDGKYWRFSEGRGSRPQGPFLIADKWPALPRKLDSVFEERLSKKLFFFSGRQVWVYTGASVLGPRRLDKLGLGADVAQVTGALRSGRGKMLLFSGRRLWRFDVKAQMVDPRSASEVDRMFPGVPLDTHDVFQYREKAYFCQDRFYWRVSSRSELNQVDQVGYVTYDILQCPED

SEQ ID NO: 32680 - protein, 1674 aa, Homo sapiens
MTEAITEAAVASSEEVSEERDDLGPLELHDSGTFQQVVNLLDIIDSESAKTDTTGAGLDMRKTLASVIIMEKATTEPSVVINTLIRCLQVPEISTQRKVNIYNILQDIIQQEGELEEQCVQRLVAIASKEMREIPEMEGYMKAEVASDTLVALSRNHFSLVMYELQHHLKPLNLTDEFVIITLAKLANGNVFEFMPYMGITLATIFTMLRLANEAKIRQAICSAMETFCETVQFYLKHLEESVYPVMTEEEFALKVFPMYRYFVTVWLRHYNPEVKLGVIKSLKPMLGLLLPNDDLREQVYDYIPLLLAEYQGSLEVLFVTQVLRQILELSVTTNTPVPQMQLHTIFTELHVQVCNKAPAQHQYSSQNLMEMVHCFVALARSYPKELMKFFFSQMETNKEAVRVGTLNLIRAIVSADEPRMSIRAIYLAIRVVKNTISDTRSKVRMAILHIIGQLALCGYQERIKGWGLKYLSVQLTLSTYKLTNRREKFYQRDLEERMVHKVTMDTVKIITSSVSGMTTEFWVRLLCYIMETDYVEALTPICISLTNLAEHQLHGQDVDVSVAGKSRQVDLPAPQKLLARLLVLMSSPYKGEGRGIAMLNLLRTLSQSIAPSMADMWELEIALLVRYLEEHTEFTWDQKAWEDKLIQFLRNSLKKTRGSSWSLRLSKELNNQIASFDSPSLEKGFLYRALGFTLATGLEASKVEVLLLELLYKTDYSNDFDSEGVIMCFGLCARGQVKTVLNVLHDFEERIQESEQSWQISAWRKDHPWRRETVKSALMVMYSCVASYCHPQLLLNLVDSPITAKIIHHYVSSCQDICLKMAFMKSVVQVTKAINNIKDLEDFHFAQKTTLTSIIVAVIKAEPTDNLVSPVRALAMEALSHLSKLKPFYSTEENSELMDISIHSVISLQLPGEDNESIKTLYANALSSLEQLMESLLQRQLDPKGLQEMVQLLEKWILSEKEWEREKAVSLHLYLMWIYVHSTAVCIHLKLGQFGTMVGLIAPCTCDAHQRTRMASMNVLSSLLDLHASQTCSLWGPSKQKELEKCKGDLQSTDVEKIFCASSRIAKVVCMEFSCDEVVSLIQKLCENTGAMNLQHDKASVTWIAFFLQMRAKELEDKVAEILSAILVHLPVVDHPEVRRLLIDGILLLAHHHQETILTSLLRQPLPMESHLAEVWLAVSENVPFARTMLHSLMGRLQSRLSPRISATSKADIWRLAAVDPLMTLCTIHLLIQKLDENDKLPDFLPDLIYTLLLQLGSSHRPEAAPPVLKMWKLVHTTPLPEEMNLQRVTIKSMQLLFKRVKSQHLAHTLDEQAVWDLLQDGGTFLEGVSLLARLCMQHVEGHRQRLAELVLRGMDSEVLSCRISSTAVCFMSGPVLYQEKLLKPAALLLEKGADQEEDEALRVLSLRALGNMALGAPKKVKQYRKVLLEKCLGPLREPVSNSVTAEGMEALTKILAELREGDVGSSFDAMSEQCRIFFDNESELLRLKAFILFGKLARVVGMSKKHFFKGEVKKAWIPLMLHSQDPCSNAAQACMATMFQCVHFWGWKSLEHPSGPSDTATDDKMTVFQTTMCSILTRKKPAVLYRFLLETMAYVKNNLSRIRIAACNLAGIIMKQMSTHYLKKLDFPALRNSLQELQLDPDPGVRRAALETLTVLDSCSQHGFLASPQGMS

SEQ ID NO: 32681 - protein, 1585 aa, Homo sapiens
MTLSTEESIEMFGDINLTLGMLNKEDIVNKEDIYSHLTSVIQNTDILDDAIVQRLIYYASKDMRDNNMLREIRMLAGEVLVSLAAHDFNSVMYEVQSNFRILELPDEFVVLALAELATSYVSQSIPFMMMTLLTMQTMLRLAEDERMKGTFCIALEKFSKAIYKYVNHWRDFPYPRLDANRLSDKIFMLFWYIMEKWAPLASPMQTLSIVKAHGPTVSLLLHREDFRGYALGQVPWLLNQYKDKEIDFHVTQSLKQILTAAVLYDIGLPRSLRRSIFINLLQQICRAPEPPVKENEMKASSCFLILAHSNPGELMEFFDEQVRSNNEAIRVGILTLLRLAVNADEPRLRDHIISIERTVKIVMGDLSTKVRNSVLLLIQTMCEKSYIEAREGWPLIDYVFSQFATLNRNLEKPVKTNFHENEKEEESVRETSLEVLKTLDPLVIGMPQVLWPRILTFVVPAEYTEALEPLFSIIRILIMAEEKKQHSAKESTALVVSTGAVKLPSPQQLLARLLVISMPASLGELRGAGAIGLLKILPEIIHPKLVDLWKTRLPELLQPLEGKNISTVLWETMLLQLLKESLWKISDVAWTIQLTQDFKQQMGSYSNNSTEKKFLWKALGTTLACCQDSDFVNSQIKEFLTAPNQLGDQRQGITSILGYCAENHLDIVLKVLKTFQNQEKFFMNRCKSLFSGKKSLTKTDVMVIYGAVALHAPKKQLLSRLNQDIISQVLSLHGQCSQVLGMSVMNKDMDLQMSFTRSITEIGIAVQDAEDQGFQFSYKEMLIGYMLDFIRDEPLDSLASPIRWKALIAIRYLSKLKPQLSLQDHLNILEENIRRLLPLPPLENLKSEGQTDKDKEHIQFLYERSMDALGKLLKTMMWDNVNAEDCQEMFNLLQMWLVSQKEWERERAFQITAKVLTNDIEAPENFKIGSLLGLLAPHSCDTLPTIRQAAASSTIGLFYIKGIHLEVERLQGLQEGLESDDVQVQIKISSKIAKIVSKFIPNEEILMFLEEMLDGLESLNPTCTKACGIWMITVLKQQGAALEDQLLEILGTIYHHMPVLRQKEESFQFILEAISQIASFHMDTVVVNLLQKPLPFDRDTKTLWKALAEKPASSGKLLQALIDKLETELEDDIARVEAISVACAMYEVISMGTSVTGLYPELFTLLLKLVSCTLGQKMLTCPWSHRRHVMQQGEQQQIPDPCRLSTATLKCLQAQAMREGLAKESDEGDNLWTLLSSPSTHHIGVCSLARSMAVWQHGVILDIMEQLLSSLTSSSENYRITGAAFFSELMKEPILWKHGNLRNVLILMDQSAWDSNATLRQMAIRGLGNTASGAPHKVKKHKQLMLESIIRGLYHLARTEVVCESLKALKKILELLTDRDVSFYFKEIVLQTRTFFEDEQDDVRLTAIFLFEDLAPLTGRRWKIFFAEEIKKSLISFLLHLWDPNPKIGVACRDVLMVCIPFLGLQELYGVLDRLLDQDLPRARDFYRQFCVKLAKKNQEILWILHTHSFTFFTSTWEVIRSAAVKLTDAVVLNLTSQYVELLDREQLTTRLQALRQDPCISVQRAAEAALQTLLRRCKETSIPL

SEQ ID NO: 32682 - protein, 1289 aa, Homo sapiens
MKASSCFLILAHSNPGELMEFFDEQVRSNNEAIRVGILTLLRLAVNADEPRLRDHIISIERTVKIVMGDLSTKVRNSVLLLIQTMCEKSYIEAREGWPLIDYVFSQFATLNRNLEKPVKTNFHENEKEEESVRETSLEVLKTLDPLVIGMPQVLWPRILTFVVPAEYTEALEPLFSIIRILIMAEEKKQHSAKESTALVVSTGAVKLPSPQQLLARLLVISMPASLGELRGAGAIGLLKILPEIIHPKLVDLWKTRLPELLQPLEGKNISTVLWETMLLQLLKESLWKISDVAWTIQLTQDFKQQMGSYSNNSTEKKFLWKALGTTLACCQDSDFVNSQIKEFLTAPNQLGDQRQGITSILGYCAENHLDIVLKVLKTFQNQEKFFMNRCKSLFSGKKSLTKTDVMVIYGAVALHAPKKQLLSRLNQDIISQVLSLHGQCSQVLGMSVMNKDMDLQMSFTRSITEIGIAVQDAEDQGFQFSYKEMLIGYMLDFIRDEPLDSLASPIRWKALIAIRYLSKLKPQLSLQDHLNILEENIRRLLPLPPLENLKSEGQTDKDKEHIQFLYERSMDALGKLLKTMMWDNVNAEDCQEMFNLLQMWLVSQKEWERERAFQITAKVLTNDIEAPENFKIGSLLGLLAPHSCDTLPTIRQAAASSTIGLFYIKGIHLEVERLQGLQEGLESDDVQVQIKISSKIAKIVSKFIPNEEILMFLEEMLDGLESLNPTCTKACGIWMITVLKQQGAALEDQLLEILGTIYHHMPVLRQKEESFQFILEAISQIASFHMDTVVVNLLQKPLPFDRDTKTLWKALAEKPASSGKLLQALIDKLETELEDDIARVEAISVACAMYEVISMGTSVTGLYPELFTLLLKLVSCTLGQKMLTCPWSHRRHVMQQGEQQQIPDPCRLSTATLKCLQAQAMREGLAKESDEGDNLWTLLSSPSTHHIGVCSLARSMAVWQHGVILDIMEQLLSSLTSSSENYRITGAAFFSELMKEPILWKHGNLRNVLILMDQSAWDSNATLRQMAIRGLGNTASGAPHKVKKHKQLMLESIIRGLYHLARTEVVCESLKALKKILELLTDRDVSFYFKEIVLQTRTFFEDEQDDVRLTAIFLFEDLAPLTGRRWKIFFAEEIKKSLISFLLHLWDPNPKIGVACRDVLMVCIPFLGLQELYGVLDRLLDQDLPRARDFYRQFCVKLAKKNQEILWILHTHSFTFFTSTWEVIRSAAVKLTDAVVLNLTSQYVELLDREQLTTRLQALRQDPCISVQRAAEAALQTLLRRCKETSIPL

SEQ ID NO: 32683 - protein, 1618 aa, Homo sapiens
MDGQTLRKAERSWSCSREKKEGYAKDMVTDFDEKHDEYLILLQQRNRILKHLKSKDPVQLRLEHLEQGFSVYVNGANSELKSSPRKAIHSDFSRSASHTEGTHDYGRRTLFREAEEALRRSSRTAPSKVQRRGWHQKSVQIRTEAGPRLHIEPPVDYSDDFELCGDVTLQANNTSEDRPQELRRSLELSVNLQRKQKDCSSDEYDSIEEDILSEPEPEDPALVGHPRHDRPPSSGDWTQKDVHGEQETEGRSSPGPDTLVVLEFNPASKSHKRERNLSAKRKDNAEVFVPTKPEPNLTPQAPAVFPDQERMCSRPGSRRERPLSATRKTLCEAEYPEEDASAVLQAIQVENAALQRALLSRKAEQPASPLQDAEGPPAKPWTSLLEEKEETLELLPITTATTTQEPAGAAGGARAINQAMDRIGLLGSRQQQKLLKVLQAVESDSAHLGRVVSPTKEQVSDTEDKQRMRADEIKDAIYVTMEILSNWGNSWWVGLTEVEFFDLNDTKLYVSPHDVDIRNTATPGELGRLVNRNLAGKKDSSPWTCPFHPPLQLFFVIRNTRQLGDFHLAKIKVRNYWTADGDLDIGAKNVKLYVNRNLIFNGKLDKGDREAPADHSILVDQKNEKSEQLEEAMNAHSEESKGTHEMAGASGDKELGLGCSPPAETLADAKLSSQGNVSGKRKNSTNCRKDSLSQLEEYLRLSAVPTSMGDMPSAPATSPPVKCPPVHEEPSLIQQLENLMGRKICEPPGKTPSWLQPSPTGKDRKQGGRKPKPLWLSPEKPLAWKGRLPSDDVIGEGPGETEARDKGLRHEPGWGTSRSVNTKERPQRATTKVHSDDSDIFNQPPNRERPASGRRGSRKDAGSSSHGDDQPASREDTWSSRTPSRSRWRSEQEHTLHESWSSLSAFDRSHRGRISNTELPGDILDELLQQKSSRHSDLPPSKKGEQPGLSRGQDGYSGETDAGGDFKIPVLPYGQRLVIDIKSTWGDRHYVGLNGIEIFSSKGEPVQISNIKADPPDINILPAYGKDPRVVTNLIDGVNRTQDDMHVWLAPFTRGRSHSITIDFTHPCHVALIRIWNYNKSRIHSFRGVKDITMLLDTQCIFEGEIAKASGTLAGAPEHFGDTILFTTDDDILEAIFYSDEMFDLDVGSLDSLQDEEAMRRPSTADGEGDERPFTQAGLGADERIPELELPSSSPVPQVTTPEPGIYHGICLQLNFTASWGDLHYLGLTGLEVVGKEGQALPIHLHQISASPRDLNELPEYSDDSRALDKLIDGTNITMEDEHMWLIPFSPGLDHVVTIRLDRAESIAGLRFWNYNKSPEDTYRGAKIVHVSLDGLCVSPPEGFLIRKGPGNCHFDFAQEILFVDYLRAQLLPQPARRLDMRSLECASMDYEAPLMPCGFIFQFQLLTSWGDPYYIGLTGLELYDERGEKIPLSENNIAAFPDSVNSLEGVGGDVRTPDKLIDQVNDTSDGRHMWLAPILPGLVNRVYVIFDLPTTVSMIKLWNYAKTPHRGVKEFGLLVDDLLVYNGILAMVSHLVGGILPTCEPTVPYHTILFTEDRDIRHQEKHTTISNQAEDQDVQMMNENQIITNAKRKQSVVDPALRPKTCISEKETRRRRC

SEQ ID NO: 32684 - protein, 479 aa, Homo sapiens
MDATIAPHRIPPEMPQYGEENHIFELMQNMLEQLLIHQPEDPIPFMIQHLHRDNDNVPRIVILGPPASGKTTIAMWLCKHLNSSLLTLENLILNEFSYTATEARRLYLQRKTVPSALLVQLIQERLAEEDCIKQGWILDGIPETREQALRIQTLGITPRHVIVLSAPDTVLIERNLGKRIDPQTGEIYHTTFDWPPESEIQNRLMVPEDISELETAQKLLEYHRNIVRVIPSYPKILKVISADQPCVDVFYQALTYVQSNHRTNAPFTPRVLLLGPVGSGKSLQAALLAQKYRLVNVCCGQLLKEAVADRTTFGELIQPFFEKEMAVPDSLLMKVLSQRLDQQDCIQKGWVLHGVPRDLDQAHLLNRLGYNPNRVFFLNVPFDSIMERLTLRRIDPVTGERYHLMYKPPPTMEIQARLLQNPKDAEEQVKLKMDLFYRNSADLEQLYGSAITLNGDQDPYTVFEYIESGIINPLPKKIP

SEQ ID NO: 32685 - protein, 275 aa, Homo sapiens
MVPEDISELETAQKLLEYHRNIVRVIPSYPKILKVISADQPCVDVFYQALTYVQSNHRTNAPFTPRVLLLGPVGSGKSLQAALLAQKYRLVNVCCGQLLKEAVADRTTFGELIQPFFEKEMAVPDSLLMKVLSQRLDQQDCIQKGWVLHGVPRDLDQAHLLNRLGYNPNRVFFLNVPFDSIMERLTLRRIDPVTGERYHLMYKPPPTMEIQARLLQNPKDAEEQVKLKMDLFYRNSADLEQLYGSAITLNGDQDPYTVFEYIESGIINPLPKKIP

SEQ ID NO: 32686 - protein, 694 aa, Homo sapiens
MPEFLEDPSVLTKDKLKSELVANNVTLPAGEQRKDVYVQLYLQHLTARNRPPLPAGTNSKGPPDFSSDEEREPTPVLGSGAAAAGRSRAAVGRKATKKTDKPRQEDKDDLDVTELTNEDLLDQLVKYGVNPGPIVGTTRKLYEKKLLKLREQGTESRSSTPLPTISSSAENTRQNGSNDSDRYSDNEEGKKKEHKKVKSTRDIVPFSELGTTPSGGGFFQGISFPEISTRPPLGSTELQAAKKVHTSKGDLPREPLVATNLPGRGQLQKLASERNLFISCKSSHDRCLEKSSSSSSQPEHSAMLVSTAASPSLIKETTTGYYKDIVENICGREKSGIQPLCPERSHISDQSPLSSKRKALEESESSQLISPPLAQAIRDYVNSLLVQGGVGSLPGTSNSMPPLDVENIQKRIDQSKFQETEFLSPPRKVPRLSEKSVEERDSGSFVAFQNIPGSELMSSFAKTVVSHSLTTLGLEVAKQSQHDKIDASELSFPFHESILKVIEEEWQQVDRQLPSLACKYPVSSREATQILSVPKVDDEILGFISEATPLGGIQAASTESCNQQLDLALCRAYEAAASALQIATHTAFVAKAMQADISQAAQILSSDPSRTHQALGILSKTYDAASYICEAAFDEVKMAAHTMGNATVGRRYLWLKDCKINLASKNKLASTPFKGGTLFGGEVCKVIKKRGNKH

SEQ ID NO: 32687 - protein, 454 aa, Homo sapiens
MPEFLEDPSVLTKDKLKSELVANNVTLPAGEQRKDVYVQLYLQHLTARNRPPLPAGTNSKGPPDFSSDEEREPTPVLGSGAAAAGRSRAAVGRKATKKTDKPRQEDKDDLDVTELTNEDLLDQLVKYGVNPGPIVGTTRKLYEKKLLKLREQGTESRSSTPLPTISSSAENTRQNGSNDSDRYSDNEEDSKIELKLEKREPLKGRAKTPVTLKQRRVEHNQSYSQAGITETEWTSGSSKGGPLQALTRESTRGSRRTPRKRVETSEHFRIDGPVISESTPIAETIMASSNESLVVNRVTGNFKHASPILPITEFSDIPRRAPKKPLTRAEVGEKTEERRVERDILKEMFPYEASTPTGISASCRRPIKGAAGRPLELSDFRMEESFSSKYVPKYVPLADVKSEKTKKGRSIPVWIKILLFVVVAVFLFLVYQAMETNQVNPFSNFLHVDPRKSN

SEQ ID NO: 32688 - protein, 345 aa, Homo sapiens
MPEFLEDPSVLTKDKLKSELVANNVTLPAGEQRKDVYVQLYLQHLTARNRPPLPAGTNSKGPPDFSSDEEREPTPVLGSGAAAAGRSRAAVGRKATKKTDKPRQEDKDDLDVTELTNEDLLDQLVKYGVNPGPIVGTTRKLYEKKLLKLREQGTESRSSTPLPTISSSAENTRQNGSNDSDRYSDNEEDSKIELKLEKREPLKGRAKTPVTLKQRRVEHNQVGEKTEERRVERDILKEMFPYEASTPTGISASCRRPIKGAAGRPLELSDFRMEESFSSKYVPKYVPLADVKSEKTKKGRSIPVWIKILLFVVVAVFLFLVYQAMETNQVNPFSNFLHVDPRKSN

SEQ ID NO: 32689 - protein, 248 aa, Homo sapiens
MPEFLEDPSVLTKDKLKSELVANNVTLPAGEQRKDVYVQLYLQHLTARNRPPLPAGTNSKGPPDFSSDEEREPTPVLGSGAAAAGRSRAAVGRKATKKTDKPRQEDKDDLDVTELTNEDLLDQLVKYGVNPGPIVGTTRKLYEKKLLKLREQGTESRSSTPLPTISSSAENTRQNGSNDSDRYSDNEEDSKIELKLEKREPLKGRAKTPVTLKQRRVEHNQVSLVLLPPCTGINNLLTTLIHVLAFNG

SEQ ID NO: 32690 - protein, 379 aa, Homo sapiens
MLKRCGRRLLLALAGALLACLLVLTADPPPPPLPAERGRRALRSLAGPAGAAPAPGLGAAAAAPGALVRDVHSLSEYFSLLTRARRDAGPPPGAAPRPADGHPRPLAEPLAPRDVFIAVKTTKKFHRARLDLLLETWISRHKEMTFIFTDGEDEALARHTGNVVITNCSAAHSRQALSCKMAVEYDRFIESGRKWFCHVDDDNYVNLRALLRLLASYPHTRDVYVGKPSLDRPIQAMERVSENKVRPVHFWFATGGAGFCISRGLALKMSPWASGGHFMNTAERIRLPDDCTIGYIVEALLGVPLIRSGLFHSHLENLQQVPTSELHEQVTLSYGMFENKRNAVHVKGPFSVEADPSRFRSIHCHLYPDTPWCPRTAIF

SEQ ID NO: 32691 - protein, 250 aa, Homo sapiens
MTPGRCCLAADIQVETFIFTDGEDEALARHTGNVVITNCSAAHSRQALSCKMAVEYDRFIESGRKWFCHVDDDNYVNLRALLRLLASYPHTRDVYVGKPSLDRPIQAMERVSENKVRPVHFWFATGGAGFCISRGLALKMSPWASGGHFMNTAERIRLPDDCTIGYIVEALLGVPLIRSGLFHSHLENLQQVPTSELHEQVTLSYGMFENKRNAVHVKGPFSVEADPSRFRSIHCHLYPDTPWCPRTAIF

SEQ ID NO: 32692 - protein, 361 aa, Homo sapiens
MLKRCGRRLLLALAGALLACLLVLTADPPPPPLPAERGRRALRSLAGPAGAAPAPGLGAAAAAPGALVRDVHSLSEYFSLLTRARRDAGPPPGAAPRPADGHPRPLAEPLAPRDVFIAVKTTKKFHRARLDLLLETWISRHKEMTFIFTDGEDEALARHTGNVVITNCSAAHSRQALSCKMAVEYDRFIESGRKWFCHVDDDNYVNLRALLRLLASYPHTRDVYVGKPSLDRPIQAMERVSENKVRPVHFWFATGGAGFCISRGLALKMSPWASGGHFMNTAERIRLPDDCTIGYIVEALLGVPLIRSGLFHSHLENLQQVPTSELHEQVTLSYGMFENKRNAVHVKGPFSVEADPSRWGN

SEQ ID NO: 32693 - protein, 308 aa, Homo sapiens
MDEQTGRLRLDTYCMSAKQIWAWSKCSGRLWDEHMKWMEGWTDRWTDGWMDGWMDEWSPTPALRSYGGGLSQQTFIFTDGEDEALARHTGNVVITNCSAAHSRQALSCKMAVEYDRFIESGRKWFCHVDDDNYVNLRALLRLLASYPHTRDVYVGKPSLDRPIQAMERVSENKVRPVHFWFATGGAGFCISRGLALKMSPWASGGHFMNTAERIRLPDDCTIGYIVEALLGVPLIRSGLFHSHLENLQQVPTSELHEQVTLSYGMFENKRNAVHVKGPFSVEADPSRFRSIHCHLYPDTPWCPRTAIF

SEQ ID NO: 32694 - protein, 1545 aa, Homo sapiens
MLEKFCNSTFWNSSFLDSPEADLPLCFEQTVLVWIPLGYLWLLAPWQLLHVYKSRTKRSSTTKLYLAKQVFVGFLLILAAIELALVLTEDSGQATVPAVRYTNPSLYLGTWLLVLLIQYSRQWCVQKNSWFLSLFWILSILCGTFQFQTLIRTLLQGDNSNLAYSCLFFISYGFQILILIFSAFSENNESSNNPSSIASFLSSITYSWYDSIILKGYKRPLTLEDVWEVDEEMKTKTLVSKFETHMKRELQKARRALQRRQEKSSQQNSGARLPGLNKNQSQSQDALVLEDVEKKKKKSGTKKDVPKSWLMKALFKTFYMVLLKSFLLKLVNDIFTFVSPQLLKLLISFASDRDTYLWIGYLCAILLFTAALIQSFCLQCYFQLCFKLGVKVRTAIMASVYKKALTLSNLARKEYTVGETVNLMSVDAQKLMDVTNFMHMLWSSVLQIVLSIFFLWRELGPSVLAGVGVMVLVIPINAILSTKSKTIQVKNMKNKDKRLKIMNEILSGIKILKYFAWEPSFRDQVQNLRKKELKNLLAFSQLQCVVIFVFQLTPVLVSVVTFSVYVLVDSNNILDAQKAFTSITLFNILRFPLSMLPMMISSMLQASVSTERLEKYLGGDDLDTSAIRHDCNFDKAMQFSEASFTWEHDSEATVRDVNLDIMAGQLVAVIGPVGSGKSSLISAMLGEMENVHGHITIKGTTAYVPQQSWIQNGTIKDNILFGTEFNEKRYQQVLEACALLPDLEMLPGGDLAEIGEKGINLSGGQKQRISLARATYQNLDIYLLDDPLSAVDAHVGKHIFNKVLGPNGLLKGKTRLLVTHSMHFLPQVDEIVVLGNGTIVEKGSYSALLAKKGEFAKNLKTFLRHTGPEEEATVHDGSEEEDDDYGLISSVEEIPEDAASITMRRENSFRRTLSRSSRSNGRHLKSLRNSLKTRNVNSLKEDEELVKGQKLIKKEFIETGKVKFSIYLEYLQAIGLFSIFFIILAFVMNSVAFIGSNLWLSAWTSDSKIFNSTDYPASQRDMRVGVYGALGLAQGIFVFIAHFWSAFGFVHASNILHKQLLNNILRAPMRFFDTTPTGRIVNRFAGDISTVDDTLPQSLRSWITCFLGIISTLVMICMATPVFTIIVIPLGIIYVSVQMFYVSTSRQLRRLDSVTRSPIYSHFSETVSGLPVIRAFEHQQRFLKHNEVRIDTNQKCVFSWITSNRWLAIRLELVGNLTVFFSALMMVIYRDTLSGDTVGFVLSNALNITQTLNWLVRMTSEIETNIVAVERITEYTKVENEAPWVTDKRPPPDWPSKGKIQFNNYQVRYRPELDLVLRGITCDIGSMEKIGVVGRTGAGKSSLTNCLFRILEAAGGQIIIDGVDIASIGLHDLREKLTIIPQDPILFSGSLRMNLDPFNNYSDEEIWKALELAHLKSFVASLQLGLSHEVTEAGGNLSIGQRQLLCLGRALLRKSKILVLDEATAAVDLETDNLIQTTIQNEFAHCTVITIAHRLHTIMDSDKVMVLDNGKIIECGSPEELLQIPGPFYFMAKEAGIENVNSTKF

SEQ ID NO: 32695 - protein, 1527 aa, Homo sapiens
MDALCGSGELGSKFWDSNLSVHTENPDLTPCFQNSLLAWVPCIYLWVALPCYLLYLRHHCRGYIILSHLSKLKMVLGVLLWCVSWADLFYSFHGLVHGRAPAPVFFVTPLVVGVTMLLATLLIQYERLQGVQSSGVLIIFWFLCVVCAIVPFRSKILLAKAEGEISDPFRFTTFYIHFALVLSALILACFREKPPFFSAKNVDPNPYPETSAGFLSRLFFWWFTKMAIYGYRHPLEEKDLWSLKEEDRSQMVVQQLLEAWRKQEKQTARHKASAAPGKNASGEDEVLLGARPRPRKPSFLKALLATFGSSFLISACFKLIQDLLSFINPQLLSILIRFISNPMAPSWWGFLVAGLMFLCSMMQSLILQHYYHYIFVTGVKFRTGIMGVIYRKALVITNSVKRASTVGEIVNLMSVDAQRFMDLAPFLNLLWSAPLQIILAIYFLWQNLGPSVLAGVAFMVLLIPLNGAVAVKMRAFQVKQMKLKDSRIKLMSEILNGIKVLKLYAWEPSFLKQVEGIRQGELQLLRTAAYLHTTTTFTWMCSPFLVTLITLWVYVYVDPNNVLDAEKAFVSVSLFNILRLPLNMLPQLISNLTQASVSLKRIQQFLSQEELDPQSVERKTISPGYAITIHSGTFTWAQDLPPTLHSLDIQVPKGALVAVVGPVGCGKSSLVSALLGEMEKLEGKVHMKGSVAYVPQQAWIQNCTLQENVLFGKALNPKRYQQTLEACALLADLEMLPGGDQTEIGEKGINLSGGQRQRVSLARAVYSDADIFLLDDPLSAVDSHVAKHIFDHVIGPEGVLAGKTRVLVTHGISFLPQTDFIIVLADGQVSEMGPYPALLQRNGSFANFLCNYAPDEDQGHLEDSWTALEGAEDKEALLIEDTLSNHTDLTDNDPVTYVVQKQFMRQLSALSSDGEGQGRPVPRRHLGPSEKVQVTEAKADGALTQEEKAAIGTVELSVFWDYAKAVGLCTTLAICLLYVGQSAAAIGANVWLSAWTNDAMADSRQNNTSLRLGVYAALGILQGFLVMLAAMAMAAGGIQAARVLHQALLHNKIRSPQSFFDTTPSGRILNCFSKDIYVVDEVLAPVILMLLNSFFNAISTLVVIMASTPLFTVVILPLAVLYTLVQRFYAATSRQLKRLESVSRSPIYSHFSETVTGASVIRAYNRSRDFEIISDTKVDANQRSCYPYIISNRWLSIGVEFVGNCVVLFAALFAVIGRSSLNPGLVGLSVSYSLQVTFALNWMIRMMSDLESNIVAVERVKEYSKTETEAPWVVEGSRPPEGWPPRGEVEFRNYSVRYRPGLDLVLRDLSLHVHGGEKVGIVGRTGAGKSSMTLCLFRILEAAKGEIRIDGLNVADIGLHDLRSQLTIIPQDPILFSGTLRMNLDPFGSYSEEDIWWALELSHLHTFVSSQPAGLDFQCSEGGENLSVGQRQLVCLARALLRKSRILVLDEATAAIDLETDNLIQATIRTQFDTCTVLTIAHRLNTIMDYTRVLVLDKGVVAEFDSPANLIAARGIFYGMARDAGLA

SEQ ID NO: 32696 - protein, 1238 aa, Homo sapiens
MDALCGSGELGSKFWDSNLSVHTENPDLTPCFQNSLLAWVPCIYLWVALPCYLLYLRHHCRGYIILSHLSKLKMVLGVLLWCVSWADLFYSFHGLVHGRAPAPVFFVTPLVVGVTMLLATLLIQYERLQGVQSSGVLIIFWFLCVVCAIVPFRSKILLAKAEGEISDPFRFTTFYIHFALVLSALILACFREKPPFFSAKNVDPNPYPETSAGFLSRLFFWWFTKMAIYGYRHPLEEKDLWSLKEEDRSQMVVQQLLEAWRKQEKQTARHKASAAPGKNASGEDEVLLGARPRPRKPSFLKALLATFGSSFLISACFKLIQDLLSFINPQLLSILIRFISNPMAPSWWGFLVAGLMFLCSMMQSLILQHYYHYIFVTGVKFRTGIMGVIYRKALVITNSVKRASTVGEIVNLMSVDAQRFMDLAPFLNLLWSAPLQIILAIYFLWQNLGPSVLAGVAFMVLLIPLNGAVAVKMRAFQVKQMKLKDSRIKLMSEILNGIKVLKLYAWEPSFLKQVEGIRQGELQLLRTAAYLHTTTTFTWMCSPFLVTLITLWVYVYVDPNNVLDAEKAFVSVSLFNILRLPLNMLPQLISNLTQASVSLKRIQQFLSQEELDPQSVERKTISPGYAITIHSGTFTWAQDLPPTLHSLDIQVPKGALVAVVGPVGCGKSSLVSALLGEMEKLEGKVHMKGSVAYVPQQAWIQNCTLQENVLFGKALNPKRYQQTLEACALLADLEMLPGGDQTEIGEKGINLSGGQRQRVSLARAVYSDADIFLLDDPLSAVDSHVAKHIFDHVIGPEGVLAGKTRVLVTHGISFLPQTDFIIVLADGQVSEMGPYPALLQRNGSFANFLCNYAPDEDQGHLEDSWTALEGAEDKEALLIEDTLSNHTDLTDNDPVTYVVQKQFMRQLSALSSDGEGQGRPVPRRHLGPSEKVQVTEAKADGALTQEEKAAIGTVELSVFWDYAKAVGLCTTLAICLLYVGQSAAAIGANVWLSAWTNDAMADSRQNNTSLRLGVYAALGILQGFLVMLAAMAMAAGGIQAARVLHQALLHNKIRSPQSFFDTTPSGRILNCFSKDIYVVDEVLAPVILMLLNSFFNAISTLVVIMASTPLFTVVILPLAVLYTLVQRFYAATSRQLKRLESVSRSPIYSHFSETVTGASVIRAYNRSRDFEIISDTKVDANQRSCYPYIISNRSEAASLAPCSSRNSQQALWCSGSLSLLSPKQKTGPALPLPHFLLI

SEQ ID NO: 32697 - protein, 510 aa, Homo sapiens
MDALCGSGELGSKFWDSNLSVHTENPDLTPCFQNSLLAWVPCIYLWVALPCYLLYLRHHCRGYIILSHLSKLKMVLGVLLWCVSWADLFYSFHGLVHGRAPAPVFFVTPLVVGVTMLLATLLIQYERLQGVQSSGVLIIFWFLCVVCAIVPFRSKILLAKAEGEISDPFRFTTFYIHFALVLSALILACFREKPPFFSAKNVDPNPYPETSAGFLSRLFFWWFTKLLNPDPLRGCLPGFTSPQDGHLWLPASPGGEGPLVPKGRGQIPDGGAAAAGGMEEAGKADGTTQGFSSTWEKCLRRGRGAAGCPAQAPEALLPEGPAGHLRLQLPHQCLLQAYPGPALLHQSTAAQHPDQVYLQPHGPLLVGLPGGWADVPVLHDAVADLTTLLPLHLCDWGEVSYWDHGCHLQEGSGYHQLSQTCVHCGGNCQPHVSGCPALHGPCPLPQSAVVSTPADHPGDLLPLAEPRSLCPGWSRFHGLADSTQRSCGREDARLPGKANEIEGLAHQADE

SEQ ID NO: 32698 - protein, 1578 aa, Homo sapiens
MPACTVKESPNCKRNFCKADHIVNTSGGSNLERVGKQKTIQKGQFSQRSVCTDALCGSGELGSKFWDSNLSVHTENPDLTPCFQNSLLAWVPCIYLWVALPCYLLYLRHHCRGYIILSHLSKLKMVLGVLLWCVSWADLFYSFHGLVHGRAPAPVFFVTPLVVGVTMLLATLLIQYERLQGVQSSGVLIIFWFLCVVCAIVPFRSKILLAKAEGEISDPFRFTTFYIHFALVLSALILACFREKPPFFSAKNVDPNPYPETSAGFLSRLFFWWFTKMAIYGYRHPLEEKDLWSLKEEDRSQMVVQQLLEAWRKQEKQTARHKASAAPGKNASGEDEVLLGARPRPRKPSFLKALLATFGSSFLISACFKLIQDLLSFINPQLLSILIRFISNPMAPSWWGFLVAGLMFLCSMMQSLILQHYYHYIFVTGVKFRTGIMGVIYRKALVITNSVKRASTVGEIVNLMSVDAQRFMDLAPFLNLLWSAPLQIILAIYFLWQNLGPSVLAGVAFMVLLIPLNGAVAVKMRAFQVKQMKLKDSRIKLMSEILNGIKVLKLYAWEPSFLKQVEGIRQGELQLLRTAAYLHTTTTFTWMCSPFLVTLITLWVYVYVDPNNVLDAEKAFVSVSLFNILRLPLNMLPQLISNLTQASVSLKRIQQFLSQEELDPQSVERKTISPGYAITIHSGTFTWAQDLPPTLHSLDIQVPKGALVAVVGPVGCGKSSLVSALLGEMEKLEGKVHMKGSVAYVPQQAWIQNCTLQENVLFGKALNPKRYQQTLEACALLADLEMLPGGDQTEIGEKGINLSGGQRQRVSLARAVYSDADIFLLDDPLSAVDSHVAKHIFDHVIGPEGVLAGKTRVLVTHGISFLPQTDFIIVLADGQVSEMGPYPALLQRNGSFANFLCNYAPDEDQGHLEDSWTALEGAEDKEALLIEDTLSNHTDLTDNDPVTYVVQKQFMRQLSALSSDGEGQGRPVPRRHLGPSEKVQVTEAKADGALTQEEKAAIGTVELSVFWDYAKAVGLCTTLAICLLYVGQSAAAIGANVWLSAWTNDAMADSRQNNTSLRLGVYAALGILQGFLVMLAAMAMAAGGIQAARVLHQALLHNKIRSPQSFFDTTPSGRILNCFSKDIYVVDEVLAPVILMLLNSFFNAISTLVVIMASTPLFTVVILPLAVLYTLVQRFYAATSRQLKRLESVSRSPIYSHFSETVTGASVIRAYNRSRDFEIISDTKVDANQRSCYPYIISNRWLSIGVEFVGNCVVLFAALFAVIGRSSLNPGLVGLSVSYSLQVTFALNWMIRMMSDLESNIVAVERVKEYSKTETEAPWVVEGSRPPEGWPPRGEVEFRNYSVRYRPGLDLVLRDLSLHVHGGEKVGIVGRTGAGKSSMTLCLFRILEAAKGEIRIDGLNVADIGLHDLRSQLTIIPQDPILFSGTLRMNLDPFGSYSEEDIWWALELSHLHTFVSSQPAGLDFQCSEGGENLSVGQRQLVCLARALLRKSRILVLDEATAAIDLETDNLIQATIRTQFDTCTVLTIAHRLNTIMDYTRVLVLDKGVVAEFDSPANLIAARGIFYGMARDAGLA

SEQ ID NO: 32699 - protein, 572 aa, Homo sapiens
MDALCGSGELGSKFWDSNLSVHTENPDLTPCFQNSLLAWVPCIYLWVALPCYLLYLRHHCRGYIILSHLSKLKMVLGVLLWCVSWADLFYSFHGLVHGRAPAPVFFVTPLVVGVTMLLATLLIQYERLQGVQSSGVLIIFWFLCVVCAIVPFRSKILLAKAEGEISDPFRFTTFYIHFALVLSALILACFREKPPFFSAKNVDPNPYPETSAGFLSRLFFWWFTKMAIYGYRHPLEEKDLWSLKEEDRSQMVVQQLLEAWRKQEKQTARHKASAAPGKNASGEDEVLLGARPRPRKPSFLKALLATFGSSFLISACFKLIQDLLSFINPQLLSILIRFISNPMAPSWWGFLVAGLMFLCSMMQSLILQHYYHYIFVTGVKFRTGIMGVIYRKALVITNSVKRASTVGEIVNLMSVDAQRFMDLAPFLNLLWSAPLQIILAIYFLWQNLGPSVLAGVAFMVLLIPLNGAVAVKMRAFQVKQMKLKDSRIKLMSEILNGIKVLKLYAWEPSFLKQVEGIRQGELQLLRTAAYLHTTTTFTWMCSPFLVRLGTGLGPCLQGSGCPGMARAHWTLP

SEQ ID NO: 32700 - protein, 585 aa, Homo sapiens
MTPPRLFWVWLLVAGTQGVNDGDMRLADGGATNQGRVEIFYRGQWGTVCDNLWDLTDASVVCRALGFENATQALGRAAFGQGSGPIMLDEVQCTGTEASLADCKSLGWLKSNCRHERDAGVVCTNETRSTHTLDLSRELSEALGQIFDSQRGCDLSISVNVQGEDALGFCGHTVILTANLEAQALWKEPGSNVTMSVDAECVPMVRDLLRYFYSRRIDITLSSVKCFHKLASAYGARQLQGYCASLFAILLPQDPSFQMPLDLYAYAVATGDALLEKLCLQFLAWNFEALTQAEAWPSVPTDLLQLLLPRSDLAVPSELALLKAVDTWSWGERASHEEVEGLVEKIRFPMMLPEELFELQFNLSLYWSHEALFQKKTLQALEFHTVPFQLLARYKGLNLTEDTYKPRIYTSPTWSAFVTDSSWSARKSQLVYQSRRGPLVKYSSDYFQAPSDYRYYPYQSFQTPQHPSFLFQDKRVSWSLVYLPTIQSCWNYGFSCSSDELPVLGLTKSGGSDRTIAYENKALMLCEGLFVADVTDFEGWKAAIPSALDTNSSKSTSSFPCPAGHFNGFRTVIRPFYLTNSSGVD

SEQ ID NO: 32701 - protein, 756 aa, Homo sapiens
MLGICRGRRKFLAASLSLLCIPAITWIYLFSGSFEDGKPVSLSPLESQAHSPRYTASSQRERESLEVRMREVEEENRALRRQLSLAQGRAPSHRRGNHSKTYSMEEGTGDSENLRAGIVAGNSSECGQQPVVEKCETIHVAIVCAGYNASRDVVTLVKSVLFHRRNPLHFHLIADSIAEQILATLFQTWMVPAVRVDFYNADELKSEVSWIPNKHYSGIYGLMKLVLTKTLPANLERVIVLDTDITFATDIAELWAVFHKFKGQQVLGLVENQSDWYLGNLWKNHRPWPALGRGYNTGVILLLLDKLRKMKWEQMWRLTAERELMGMLSTSLADQDIFNAVIKQNPFLVYQLPCFWNVQLSDHTRSEQCYRDVSDLKVIHWNSPKKLRVKNKHVEFFRNLYLTFLEYDGNLLRRELFGCPSEADVNSENLQKQLSELDEDDLCYEFRRERFTVHRTHLYFLHYEYEPAADSTDVTLVAQLSMDRLQMLEAICKHWEGPISLALYLSDAEAQQFLRYAQGSEVLMSRHNVGYHIVYKEGQFYPVNLLRNVAMKHISTPYMFLSDIDFLPMYGLYEYLRKSVIQLDLANTKKAMIVPAFETLRYRLSFPKSKAELLSMLDMGTLFTFRYHVWTKGHAPTNFAKWRTATTPYRVEWEADFEPYVVVRRDCPEYDRRFVGFGWNKVAHIMELDVQEYEFIVLPNAYMIHMPHAPSFDITKFRSNKQYRICLKTLKEEFQQDMSRRYGFAALKYLTAENNS

SEQ ID NO: 32702 - protein, 704 aa, Homo sapiens
MLGICRGRRKFLAASLSLLCIPAITWIYLFSGSFEDGKPVSLSPLESQAHSPRYTASSQRERESLEVRMREVEEENRALRRQLSLAQGRAPSHRRGNHSKTYSMEEGTGDSENLRAGIVAGNSSECGQQPVVEKCETIHVAIVCAGYNASRDVVTLVKSVLFHRRNPLHFHLIADSIAEQILATLFQTWMVPAVRVDFYNADELKSEVSWIPNKHYSGIYGLMKLVLTKTLPANLERVIVLDTDITFATDIAELWAVFHKFKGQQVLGLVENQSDWYLGNLWKNHRPWPALGRGYNTGVILLLLDKLRKMKWEQMWRLTAERELMGMLSTSLADQDIFNAVIKQNPFLVYQLPCFWNVQLSDHTRSEQCYRDVSDLKLQKQLSELDEDDLCYEFRRERFTVHRTHLYFLHYEYEPAADSTDVTLVAQLSMDRLQMLEAICKHWEGPISLALYLSDAEAQQFLRYAQGSEVLMSRHNVGYHIVYKEGQFYPVNLLRNVAMKHISTPYMFLSDIDFLPMYGLYEYLRKSVIQLDLANTKKAMIVPAFETLRYRLSFPKSKAELLSMLDMGTLFTFRYHVWTKGHAPTNFAKWRTATTPYRVEWEADFEPYVVVRRDCPEYDRRFVGFGWNKVAHIMELDVQEYEFIVLPNAYMIHMPHAPSFDITKFRSNKQYRICLKTLKEEFQQDMSRRYGFAALKYLTAENNS

SEQ ID NO: 32703 - protein, 304 aa, Homo sapiens
MSAKSKGNPSSSCPAEGPPAASKTKVKEQIKIIVEDLELVLGDLKDVAKELKEVVDQIDTLTSDLQLEDEMTDSSKTDTLNSSSSGTTASSLEKIKVQANAPLIKPPAHPSAILTVLRKPNPPPPPPRLTPVKCEDPKRVVPTANPVKTNGTLLRNGGLPGGPNKIPNGDICCIPNSNLDKAPVQLLMHRPEKDRCPQAGPRERVRFNEKVQYHGYCPDCDTRYNIKNREVHLHSEPVHPPGKIPHQGPPLPPTPHLPPFPLENGGMGISHSNSFPPIRPATVPPPTAPKPQKTILRKSTTTTV

SEQ ID NO: 32704 - protein, 234 aa, Homo sapiens
MTDSSKTDTLNSSSSGTTASSLEKIKVQANAPLIKPPAHPSAILTVLRKPNPPPPPPRLTPVKCEDPKRVVPTANPVKTNGTLLRNGGLPGGPNKIPNGDICCIPNSNLDKAPVQLLMHRPEKDRCPQAGPRERVRFNEKVQYHGYCPDCDTRYNIKNREVHLHSEPVHPPGKIPHQGPPLPPTPHLPPFPLENGGMGISHSNSFPPIRPATVPPPTAPKPQKTILRKSTTTTV

SEQ ID NO: 32705 - protein, 281 aa, Homo sapiens
MAQSGLTATSASQVQAILLPQPASVRHYAWVVDQIDTLTSDLQLEDEMTDSSKTDTLNSSSSGTTASSLEKIKVQANAPLIKPPAHPSAILTVLRKPNPPPPPPRLTPVKCEDPKRVVPTANPVKTNGTLLRNGGLPGGPNKIPNGDICCIPNSNLDKAPVQLLMHRPEKDRCPQAGPRERVRFNEKVQYHGYCPDCDTRYNIKNREVHLHSEPVHPPGKIPHQGPPLPPTPHLPPFPLENGGMGISHSNSFPPIRPATVPPPTAPKPQKTILRKSTTTTV

SEQ ID NO: 32706 - protein, 951 aa, Homo sapiens
MPGPLGLLCFLALGLLGSAGPSGAAPPLCAAPCSCDGDRRVDCSGKGLTAVPEGLSAFTQALDISMNNITQLPEDAFKNFPFLEELQLAGNDLSFIHPKALSGLKELKVLTLQNNQLKTVPSEAIRGLSALQSLRLDANHITSVPEDSFEGLVQLRHLWLDDNSLTEVPVHPLSNLPTLQALTLALNKISSIPDFAFTNLSSLVVLHLHNNKIRSLSQHCFDGLDNLETLDLNYNNLGEFPQAIKALPSLKELGFHSNSISVIPDGAFDGNPLLRTIHLYDNPLSFVGNSAFHNLSDLHSLVIRGASMVQQFPNLTGTVHLESLTLTGTKISSIPNNLCQEQKMLRTLDLSYNNIRDLPSFNGCHALEEISLQRNQIYQIKEGTFQGLISLRILDLSRNLIHEIHSRAFATLGPITNLDVSFNELTSFPTEGLNGLNQLKLVGNFKLKEALAAKDFVNLRSLSVPYAYQCCAFWGCDSYANLNTEDNSLQDHSVAQEKGTADAANVTSTLENEEHSQIIIHCTPSTGAFKPCEYLLGSWMIRLTVWFIFLVALFFNLLVILTTFASCTSLPSSKLFIGLISVSNLFMGIYTGILTFLDAVSWGRFAEFGIWWETGSGCKVAGFLAVFSSESAIFLLMLATVERSLSAKDIMKNGKSNHLKQFRVAALLAFLGATVAGCFPLFHRGEYSASPLCLPFPTGETPSLGFTVTLVLLNSLAFLLMAVIYTKLYCNLEKEDLSENSQSSMIKHVAWLIFTNCIFFCPVAFFSFAPLITAISISPEIMKSVTLIFFPLPACLNPVLYVFFNPKFKEDWKLLKRRVTKKSGSVSVSISSQGGCLEQDFYYDCGMYSHLQGNLTVCDCCESFLLTKPVSCKHLIKSHSCPALAVASCQRPEGYWSDCGTQSAHSDYADEEDSFVSDSSDQVQACGRACFYQSRGFPLVRYAYNLPRVKD

SEQ ID NO: 32707 - protein, 927 aa, Homo sapiens
MPGPLGLLCFLALGLLGSAGPSGAAPPLCAAPCSCDGDRRVDCSGKGLTAVPEGLSAFTQALQLAGNDLSFIHPKALSGLKELKVLTLQNNQLKTVPSEAIRGLSALQSLRLDANHITSVPEDSFEGLVQLRHLWLDDNSLTEVPVHPLSNLPTLQALTLALNKISSIPDFAFTNLSSLVVLHLHNNKIRSLSQHCFDGLDNLETLDLNYNNLGEFPQAIKALPSLKELGFHSNSISVIPDGAFDGNPLLRTIHLYDNPLSFVGNSAFHNLSDLHSLVIRGASMVQQFPNLTGTVHLESLTLTGTKISSIPNNLCQEQKMLRTLDLSYNNIRDLPSFNGCHALEEISLQRNQIYQIKEGTFQGLISLRILDLSRNLIHEIHSRAFATLGPITNLDVSFNELTSFPTEGLNGLNQLKLVGNFKLKEALAAKDFVNLRSLSVPYAYQCCAFWGCDSYANLNTEDNSLQDHSVAQEKGTADAANVTSTLENEEHSQIIIHCTPSTGAFKPCEYLLGSWMIRLTVWFIFLVALFFNLLVILTTFASCTSLPSSKLFIGLISVSNLFMGIYTGILTFLDAVSWGRFAEFGIWWETGSGCKVAGFLAVFSSESAIFLLMLATVERSLSAKDIMKNGKSNHLKQFRVAALLAFLGATVAGCFPLFHRGEYSASPLCLPFPTGETPSLGFTVTLVLLNSLAFLLMAVIYTKLYCNLEKEDLSENSQSSMIKHVAWLIFTNCIFFCPVAFFSFAPLITAISISPEIMKSVTLIFFPLPACLNPVLYVFFNPKFKEDWKLLKRRVTKKSGSVSVSISSQGGCLEQDFYYDCGMYSHLQGNLTVCDCCESFLLTKPVSCKHLIKSHSCPALAVASCQRPEGYWSDCGTQSAHSDYADEEDSFVSDSSDQVQACGRACFYQSRGFPLVRYAYNLPRVKD

SEQ ID NO: 32708 - protein, 535 aa, Homo sapiens
MAALLAAAAVRARILQVSSKVKSSPTWYSASSFSSSVPTVKLFIGGKFVESKSDKWIDIHNPATNEVIGRVPQATKAEMDAAIASCKRAFPAWADTSVLSRQQVLLRYQQLIKENLKEIAKLITLEQGKTLADAEGDVFRGLQVVEHACSVTSLMMGETMPSITKDMDLYSYRLPLGVCAGIAPFNFPAMIPLWMFPMAMVCGNTFLMKPSERVPGATMLLAKLLQDSGAPDGTLNIIHGQHEAVNFICDHPDIKAISFVGSNKAGEYIFERGSRHGKRVQANMGAKNHGVVMPDANKENTLNQLVGAAFGAAGQRCMALSTAVLVGEAKKWLPELVEHAKNLRVNAGDQPGADLGPLITPQAKERVCNLIDSGTKEGASILLDGRKIKVKGYENGNFVGPTIISNVKPNMTCYKEEIFGPVLVVLETETLDEAIQIVNNNPYGNGTAIFTTNGATARKYAHLVDVGQVGVNVPIPVPLPMFSFTGSRSSFRGDTNFYGKQGIQFYTQLKTITSQWKEEDATLSSPAVVMPTMGR

SEQ ID NO: 32709 - protein, 522 aa, Homo sapiens
MAALLAAAAVRARILQVSSKVKSSPTWYSASSFSSSVPTVKLFIGGKFVESKSDKWIDIHNPATNEVIGRVPQATKAEMDAAIASCKRAFPAWADTSVLSRQQKEIAKLITLEQGKTLADAEGDVFRGLQVVEHACSVTSLMMGETMPSITKDMDLYSYRLPLGVCAGIAPFNFPAMIPLWMFPMAMVCGNTFLMKPSERVPGATMLLAKLLQDSGAPDGTLNIIHGQHEAVNFICDHPDIKAISFVGSNKAGEYIFERGSRHGKRVQANMGAKNHGVVMPDANKENTLNQLVGAAFGAAGQRCMALSTAVLVGEAKKWLPELVEHAKNLRVNAGDQPGADLGPLITPQAKERVCNLIDSGTKEGASILLDGRKIKVKGYENGNFVGPTIISNVKPNMTCYKEEIFGPVLVVLETETLDEAIQIVNNNPYGNGTAIFTTNGATARKYAHLVDVGQVGVNVPIPVPLPMFSFTGSRSSFRGDTNFYGKQGIQFYTQLKTITSQWKEEDATLSSPAVVMPTMGR

SEQ ID NO: 32710 - protein, 371 aa, Homo sapiens
MSHEKSFLVSGDNYPPPNPGYPGGPQPPMPPYAQPPYPGAPYPQPPFQPSPYGQPGYPHGPSPYPQGGYPQGPYPQGGYPQGPYPQEGYPQGPYPQGGYPQGPYPQSPFPPNPYGQPQVFPGQDPDSPQHGNYQEEGPPSYYDNQDFPATNWDDKSIRQAFIRKVFLVLTLQLSVTLSTVSVFTFVAEVKGFVRENVWTYYVSYAVFFISLIVLSCCGDFRRKHPWNLVALSVLTASLSYMVGMIASFYNTEAVIMAVGITTAVCFTVVIFSMQTRYDFTSCMGVLLVSMVVLFIFAILCIFIRNRILEIVYASLGALLFTCFLAVDTQLLLGNKQLSLSPEEYVFAALNLYTDIINIFLYILTIIGRAKE

SEQ ID NO: 32711 - protein, 250 aa, Homo sapiens
MVAGSDAGRALGVLSVVCLLHCFGFISCFSQQIYGVVYGNVTFHVPSNVPLKEVLWKKQKDKVAELENSEFRAFSSFKNRVYLDTVSGSLTIYNLTSSDEDEYEMESPNITDTMKFFLYVLESLPSPTLTCALTNGSIEVQCMIPEHYNSHRGLIMYSWDCPMEQCKRNSTSIYFKMENDLPQKIQCTLSNPLFNTTSSIILTTCIPSSGHSRHRYALIPIPLAVITTCIVLYMNGILKCDRKPDRTNSN

SEQ ID NO: 32712 - protein, 237 aa, Homo sapiens
MVAGSDAGRALGVLSVVCLLHCFGFISCFSQQIYGVVYGNVTFHVPSNVPLKEVLWKKQKDKVAELENSEFRAFSSFKNRVYLDTVSGSLTIYNLTSSDEDEYEMESPNITDTMKFFLYVLESLPSPTLTCALTNGSIEVQCMIPEHYNSHRGLIMYSWDCPMEQCKRNSTSIYFKMENDLPQKIQCTLSNPLFNTTSSIILTTCIPSSGHSRHRYALIPIPLAVITTCIVLYMNVL

SEQ ID NO: 32713 - protein, 248 aa, Homo sapiens
MVAGSDAGRALGVLSVVCLLHCFGFISCFSQQIYGVVYGNVTFHVPSNVPLKEVLWKKQKDKVAELENSEFRAFSSFKNRVYLDTVSGSLTIYNLTSSDEDEYEMESPNITDTMKFFLYVLESLPSPTLTCALTNGSIEVQCMIPEHYNSHRGLIMYSWDCPMEQCKRNSTSIYFKMENDLPQKIQCTLSNPLFNTTSSIILTTCIPSSGHSRHRYALIPIPLAVITTCIVLYMNGILKCDRKPDRTK

SEQ ID NO: 32714 - protein, 1308 aa, Homo sapiens
MDPSGSRGRPTWVLAGGLLAVALALGGRGCLGASSRPRWRPLGAQPPRDPQVAPRSGPGLRIPPGRSGAGPESSTQDLPCMIWPKVECCHFKTAVEAPLGMKLDKKMEVFIPLSTSAASSGPWAHSLFAFIPSWPKKNLFKRESPITHRLYGDISREVQGTSENGVIFQKCALVSGSSEAQTARIWLLVNNTKTTSSANLSELLLLDSIAGLTIWDSVGNRTSEGFQAFSKKFLQVGDAFAVSYAATLQAGDLGNGESLKLPAQLTFQSSSRNRTQLKVLFSITAEENVTVLPHHGLHAAGFFIAFLLSLVLTWAALFLMVRYQCLKGNMLTRHRVWQYESKLEPLPFTSADGVNEDLSLNDQMIDILSSEDPGSMLQALEELEIATLNRADADLEACRTQISKDIIALLLKNLTSSGHLSPQVERKMSAVFKKQFLLLENEIQEEYDRKMVALTAECDLETRKKMENQYQREMMAMEEAEELLKRAGERSAVECSNLLRTLHGLEQEHLRKSLALQQEEDFAKAHRQLAVFQRNELHSIFFTQIKSAIFKGELKPEAAKMLLQNYSKIQENVEELMDFFQASKRYHLSKRFGHREYLVQNLQSSETRVQGLLSTAAAQLTHLIQKHERAGYLDEDQMEMLLERAQTEVFSIKQKLDNDLKQEKKKLHQKLITKRRRELLQKHREQRREQASVGEAFRTVEDAGQYLHQKRSLMEEHGATLEELQERLDQAALDDLRTLTLSLFEKATDELRRLQNSAMTQELLKRGVPWLFLQQILEEHGKEMAARAEQLEGEERDRDQEGVQSVRQRLKDDAPEAVTEEQAELRRWEHLIFMKLCSSVFSLSEEELLRMRQEVHGCFAQMDRSLALPKIRARVLLQQFQTAWREAEFVKLDQAVAAPELQQQSKVRKSRSKSKSKGELLKKCIEDKIHLCEEQASEDLVEKVRGELLRERVQRMEAQEGGFAQSLVALQFQKASRVTETLSAYTALLSIQDLLLEELSASEMLTKSACTQILESHSRELQELERKLEDQLVQQEAAQQQQALASWQQWVADGPGILNEPGEVDSERQVSTVLHQALSKSQTLLEQHQQCLREEQQNSVVLEDLLENMEADTFATLCSQELRLASYLARMAMVPGATLRRLLSVVLPTASQPQLLALLDSATERHVDHAAESDGGAEQADVGRRRKHQSWWQALDGKLRGDLISRGLEKMLWARKRKQSILKKTCLPLRERMIFSGKGSWPHLSLEPIGELAPVPIVGAETIDLLNTGEKLFIFRNPKEPEISLHVPPRKKKNFLNAKKAMRALGMD

SEQ ID NO: 32715 - protein, 1228 aa, Homo sapiens
MIWPKVECCHFKTAVEAPLGMKLDKKMEVFIPLSTSAASSGPWAHSLFAFIPSWPKKNLFKRESPITHRLYGDISREVQGTSENGVIFQKCALVSGSSEAQTARIWLLVNNTKTTSSANLSELLLLDSIAGLTIWDSVGNRTSEGFQAFSKKFLQVGDAFAVSYAATLQAGDLGNGESLKLPAQLTFQSSSRNRTQLKVLFSITAEENVTVLPHHGLHAAGFFIAFLLSLVLTWAALFLMVRYQCLKGNMLTRHRVWQYESKLEPLPFTSADGVNEDLSLNDQMIDILSSEDPGSMLQALEELEIATLNRADADLEACRTQISKDIIALLLKNLTSSGHLSPQVERKMSAVFKKQFLLLENEIQEEYDRKMVALTAECDLETRKKMENQYQREMMAMEEAEELLKRAGERSAVECSNLLRTLHGLEQEHLRKSLALQQEEDFAKAHRQLAVFQRNELHSIFFTQIKSAIFKGELKPEAAKMLLQNYSKIQENVEELMDFFQASKRYHLSKRFGHREYLVQNLQSSETRVQGLLSTAAAQLTHLIQKHERAGYLDEDQMEMLLERAQTEVFSIKQKLDNDLKQEKKKLHQKLITKRRRELLQKHREQRREQASVGEAFRTVEDAGQYLHQKRSLMEEHGATLEELQERLDQAALDDLRTLTLSLFEKATDELRRLQNSAMTQELLKRGVPWLFLQQILEEHGKEMAARAEQLEGEERDRDQEGVQSVRQRLKDDAPEAVTEEQAELRRWEHLIFMKLCSSVFSLSEEELLRMRQEVHGCFAQMDRSLALPKIRARVLLQQFQTAWREAEFVKLDQAVAAPELQQQSKVRKSRSKSKSKGELLKKCIEDKIHLCEEQASEDLVEKVRGELLRERVQRMEAQEGGFAQSLVALQFQKASRVTETLSAYTALLSIQDLLLEELSASEMLTKSACTQILESHSRELQELERKLEDQLVQQEAAQQQQALASWQQWVADGPGILNEPGEVDSERQVSTVLHQALSKSQTLLEQHQQCLREEQQNSVVLEDLLENMEADTFATLCSQELRLASYLARMAMVPGATLRRLLSVVLPTASQPQLLALLDSATERHVDHAAESDGGAEQADVGRRRKHQSWWQALDGKLRGDLISRGLEKMLWARKRKQSILKKTCLPLRERMIFSGKGSWPHLSLEPIGELAPVPIVGAETIDLLNTGEKLFIFRNPKEPEISLHVPPRKKKNFLNAKKAMRALGMD

SEQ ID NO: 32716 - protein, 1246 aa, Homo sapiens
MDPSGSRGRPTWVLAGGLLAVALALGGRGCLGASSRPRWRPLGAQPPRDPQVAPRSGPGLRIPPGRSGAGPESSTQDLPCMIWPKVECCHFKTAVEAPLGMKLDKKMEVFIPLSTSAASSGPWAHSLFAFIPSWPKKNLFKRESPITHRLYGDISREVQGTSENGVIFQKCALVSGSSEAQTARIWLLVNNTKTTSSANLSELLLLDSIAGLTIWDSVGNRTSEGFQAFSKKFLQVGDAFAVSYAATLQAGDLGNGESLKLPAQLTFQSSSRNRTQLKVLFSITAEENVTVLPHHGLHAAGFFIAFLLSLVLTWAALFLMVRYQCLKGNMLTRHRVWQYESKLEPLPFTSADGVNEDLSLNDQMIDILSSEDPGSMLQALEELEIATLNRADADLEACRTQISKDIIALLLKNLTSSGHLSPQVERKMSAVFKKQFLLLENEIQEEYDRKMVALTAECDLETRKKMENQYQREMMAMEEAEELLKRAGERSAVECSNLLRTLHGLEQEHLRKSLALQQEEDFAKAHRQLAVFQRNELHSIFFTQIKSAIFKGELKPEAAKMLLQNYSKIQENVEELMDFFQASKRYHLSKRFGHREYLVQNLQSSETRVQGLLSTAAAQLTHLIQKHERAGYLDEDQMEMLLERAQTEVFSIKQKLDNDLKQEKKKLHQKLITKRRRELLQKHREQRREQASVGEAFRTVEDAGQYLHQKRSLMEEHGATLEELQERLDQAALDDLRTLTLSLFEKATDELRRLQNSAMTQELLKRGVPWLFLQQILEEHGKEMAARAEQLEGEERDRDQEGVQSVRQRLKDDAPEAVTEEQAELRRWEHLIFMKLCSSVFSLSEEELLRMRQEVHGCFAQMDRSLALPKIRARVLLQQFQTAWREAEFVKLDQAVAAPELQQQSKVRKSRSKSKSKGELLKKCIEDKIHLCEEQASEDLVEKVRGELLRERVQRMEAQEGGFAQSLVALQFQKASRVTETLSAYTALLSIQDLLLEELSASEMLTKSACTQILESHSRELQELERKLEDQLVQQEAAQQQQALASWQQWVADGPGILNEPGEVDSERQVSTVLHQALSKSQTLLEQHQQCLREEQQNSVVLEDLLENMEADTFATLCSQELRLASYLARMAMVPGATLRRLLSVVLPTASQPQLLALLDSATERHVDHAAESDGGAEQADVGRRRKHQSWWQALDGKLRGDLISRGLEKMLWARKRKQRSGNQESFWQYLVGTPEIGLIEWMSEK

SEQ ID NO: 32717 - protein, 117 aa, Homo sapiens; identical to SEQ ID NO: 31603

SEQ ID NO: 32718 - protein, 615 aa, Homo sapiens
MPSRKFADGEVVRGRWPGSSLYYEVEILSHDSTSQLYTVKYKDGTELELKENDIKPLTSFRQRKGGSTSSSPSRRRGSRSRSRSRSPGRPPKSARRSASASHQADIKEARREVEVKLTPLILKPFGNSISRYNGEPEHIERNDAPHKNTQEKFSLSQESSYIATQYSLRPRREEVKLKEIDSKEEKYVAKELAVRTFEVTPIRAKDLEFGGVPGVFLIMFGLPVFLFLLLLMCKQKDPSLLNFPPPLPALYELWETRVFGVYLLWFLIQVLFYLLPIGKVVEGTPLIDGRRLKYRLNGFYAFILTSAVIGTSLFQGVEFHYVYSHFLQFALAATVFCVVLSVYLYMRSLKAPRNDLSPASSGNAVYDFFIGRELNPRIGTFDLKYFCELRPGLIGWVVINLVMLLAEMKIQDRAVPSLAMILVNSFQLLYVVDALWNEEALLTTMDIIHDGFGFMLAFGDLVWVPFIYSFQAFYLVSHPNEVSWPMASLIIVLKLCGYVIFRGANSQKNAFRKNPSDPKLAHLKTIHTSTGKNLLVSGWWGFVRHPNYLGDLIMALAWSLPCGFNHILPYFYIIYFTMLLVHREARDEYHCKKKYGVAWEKYCQRVPYRIFPYIY

SEQ ID NO: 32719 - protein, 3695 aa, Homo sapiens
MAKRLCAGSALCVRGPRGPAPLLLVGLALLGAARAREEAGGGFSLHPPYFNLAEGARIAASATCGEEAPARGSPRPTEDLYCKLVGGPVAGGDPNQTIRGQYCDICTAANSNKAHPASNAIDGTERWWQSPPLSRGLEYNEVNVTLDLGQVFHVAYVLIKFANSPRPDLWVLERSMDFGRTYQPWQFFASSKRDCLERFGPQTLERITRDDAAICTTEYSRIVPLENGEIVVSLVNGRPGAMNFSYSPLLREFTKATNVRLRFLRTNTLLGHLMGKALRDPTVTRRYYYSIKDISIGGRCVCHGHADACDAKDPTDPFRLQCTCQHNTCGGTCDRCCPGFNQQPWKPATANSANECQSCNCYGHATDCYYDPEVDRRRASQSLDGTYQGGGVCIDCQHHTTGVNCERCLPGFYRSPNHPLDSPHVCRRCNCESDFTDGTCEDLTGRCYCRPNFSGERCDVCAEGFTGFPSCYPTPSSSNDTREQVLPAGQIVNCDCSAAGTQGNACRKDPRVGRCLCKPNFQGTHCELCAPGFYGPGCQPCQCSSPGVADDRCDPDTGQCRCRVGFEGATCDRCAPGYFHFPLCQLCGCSPAGTLPEGCDEAGRCLCQPEFAGPHCDRCRPGYHGFPNCQACTCDPRGALDQLCGAGGLCRCRPGYTGTACQECSPGFHGFPSCVPCHCSAEGSLHAACDPRSGQCSCRPRVTGLRCDTCVPGAYNFPYCEAGSCHPAGLAPVDPALPEAQVPCMCRAHVEGPSCDRCKPGFWGLSPSNPEGCTRCSCDLRGTLGGVAECQPGTGQCFCKPHVCGQACASCKDGFFGLDQADYFGCRSCRCDIGGALGQSCEPRTGVCRCRPNTQGPTCSEPARDHYLPDLHHLRLELEEAATPEGHAVRFGFNPLEFENFSWRGYAQMAPVQPRIVARLNLTSPDLFWLVFRYVNRGAMSVSGRVSVREEGRSATCANCTAQSQPVAFPPSTEPAFITVPQRGFGEPFVLNPGTWALRVEAEGVLLDYVVLLPSAYYEAALLQLRVTEACTYRPSAQQSGDNCLLYTHLPLDGFPSAAGLEALCRQDNSLPRPCPTEQLSPSHPPLITCTGSDVDVQLQVAVPQPGRYALVVEYANEDARQEVGVAVHTPQRAPQQGLLSLHPCLYSTLCRGTARDTQDHLAVFHLDSEASVRLTAEQARFFLHGVTLVPIEEFSPEFVEPRVSCISSHGAFGPNSAACLPSRFPKPPQPIILRDCQVIPLPPGLPLTHAQDLTPAMSPAGPRPRPPTAVDPDAEPTLLREPQATVVFTTHVPTLGRYAFLLHGYQPAHPTFPVEVLINAGRVWQGHANASFCPHGYGCRTLVVCEGQALLDVTHSELTVTVRVPKGRWLWLDYVLVVPENVYSFGYLREEPLDKSYDFISHCAAQGYHISPSSSSLFCRNAAASLSLFYNNGARPCGCHEVGATGPTCEPFGGQCPCHAHVIGRDCSRCATGYWGFPNCRPCDCGARLCDELTGQCICPPRTIPPDCLLCQPQTFGCHPLVGCEECNCSGPGIQELTDPTCDTDSGQCKCRPNVTGRRCDTCSPGFHGYPRCRPCDCHEAGTAPGVCDPLTGQCYCKENVQGPKCDQCSLGTFSLDAANPKGCTRCFCFGATERCRSSSYTRQEFVDMEGWVLLSTDRQVVPHERQPGTEMLRADLRHVPEAVPEAFPELYWQAPPSYLGDRVSSYGGTLRYELHSETQRGDVFVPMESRPDVVLQGNQMSITFLEPAYPTPGHVHRGQLQLVEGNFRHTETRNTVSREELMMVLASLEQLQIRALFSQISSAVFLRRVALEVASPAGQGALASNVELCLCPASYRGDSCQECAPGFYRDVKGLFLGRCVPCQCHGHSDRCLPGSGVCVDCQHNTEGAHCERCQAGFVSSRDDPSAPCVSCPCPLSVPSNNFAEGCVLRGGRTQCLCKPGYAGASCERCAPGFFGNPLVLGSSCQPCDCSGNGDPNLLFSDCDPLTGACRGCLRHTTGPRCEICAPGFYGNALLPGNCTRCDCTPCGTEACDPHSGHCLCKAGVTGRRCDRCQEGHFGFDGCGGCRPCACGPAAEGSECHPQSGQCHCRPGTMGPQCRECAPGYWGLPEQGCRRCQCPGGRCDPHTGRCNCPPGLSGERCDTCSQQHQVPVPGGPVGHSIHCEVCDHCVVLLLDDLERAGALLPAIHEQLRGINASSMAWARLHRLNASIADLQSQLRSPLGPRHETAQQLEVLEQQSTSLGQDARRLGGQAVGTRDQASQLLAGTEATLGHAKTLLAAIRAVDRTLSELMSQTGHLGLANASAPSGEQLLRTLAEVERLLWEMRARDLGAPQAAAEAELAAAQRLLARVQEQLSSLWEENQALATQTRDRLAQHEAGLMDLREALNRAVDATREAQELNSRNQERLEEALQRKQELSRDNATLQATLHAARDTLASVFRLLHSLDQAKEELERLAASLDGARTPLLQRMQTFSPAGSKLRLVEAAEAHAQQLGQLALNLSSIILDVNQDRLTQRAIEASNAYSRILQAVQAAEDAAGQALQQADHTWATVVRQGLVDRAQQLLANSTALEEAMLQEQQRLGLVWAALQGARTQLRDVRAKKDQLEAHIQAAQAMLAMDTDETSKKIAHAKAVAAEAQDTATRVQSQLQAMQENVERWQGQYEGLRGQDLGQAVLDAGHSVSTLEKTLPQLLAKLSILENRGVHNASLALSASIGRVRELIAQARGAASKVKVPMKFNGRSGVQLRTPRDLADLAAYTALKFYLQGPEPEPGQGTEDRFVMYMGSRQATGDYMGVSLRDKKVHWVYQLGEAGPAVLSIDEDIGEQFAAVSLDRTLQFGHMSVTVERQMIQETKGDTVAPGAEGLLNLRPDDFVFYVGGYPSTFTPPPLLRFPGYRGCIEMDTLNEEVVSLYNFERTFQLDTAVDRPCARSKSTGDPWLTDGSYLDGTGFARISFDSQISTTKRFEQELRLVSYSGVLFFLKQQSQFLCLAVQEGSLVLLYDFGAGLKKAVPLQPPPPLTSASKAIQVFLLGGSRKRVLVRVERATVYSVEQDNDLELADAYYLGGVPPDQLPPSLRRLFPTGGSVRGCVKGIKALGKYVDLKRLNTTGVSAGCTADLLVGRAMTFHGHGFLRLALSNVAPLTGNVYSGFGFHSAQDSALLYYRASPDGLCQVSLQQGRVSLQLLRTEVKTQAGFADGAPHYVAFYSNATGVWLYVDDQLQQMKPHRGPPPELQPQPEGPPRLLLGGLPESGTIYNFSGCISNVFVQRLLGPQRVFDLQQNLGSVNVSTGCAPALQAQTPGLGPRGLQATARKASRRSRQPARHPACMLPPHLRTTRDSYQFGGSLSSHLEFVGILARHRNWPSLSMHVLPRSSRGLLLFTARLRPGSPSLALFLSNGHFVAQMEGLGTRLRAQSRQRSRPGRWHKVSVRWEKNRILLVTDGARAWSQEGPHRQHQGAEHPQPHTLFVGGLPASSHSSKLPVTVGFSGCVKRLRLHGRPLGAPTRMAGVTPCILGPLEAGLFFPGSGGVITLDLPGATLPDVGLELEVRPLAVTGLIFHLGQARTPPYLQLQVTEKQVLLRADDGAGEFSTSVTRPSVLCDGQWHRLAVMKSGNVLRLEVDAQSNHTVGPLLAAAAGAPAPLYLGGLPEPMAVQPWPPAYCGCMRRLAVNRSPVAMTRSVEVHGAVGASGCPAA

SEQ ID NO: 32720 - protein, 561 aa, Homo sapiens
MAKRLCAGSALCVRGPRGPAPLLLVGLALLGAARAREEAGGGFSLHPPYFNLAEGARIAASATCGEEAPARGSPRPTEDLYCKLVGGPVAGGDPNQTIRGQYCDICTAANSNKAHPASNAIDGTERWWQSPPLSRGLEYNEVNVTLDLGQVFHVAYVLIKFANSPRPDLWVLERSMDFGRTYQPWQFFASSKRDCLERFGPQTLERITRDDAAICTTEYSRIVPLENGEIVVSLVNGRPGAMNFSYSPLLREFTKATNVRLRFLRTNTLLGHLMGKALRDPTVTRRYYYSIKDISIGGRCVCHGHADACDAKDPTDPFRLQCTCQHNTCGGTCDRCCPGFNQQPWKPATANSANECQSCNCYGHATDCYYDPEVDRRRASQSLDGTYQGGGVCIDCQHHTTGVNCERCLPGFYRSPNHPLDSPHVCRRCNCESDFTDGTCEDLTGRCYCRPNFSGERCDVCAEGFTGFPSCYPTPSSSNDTREQVLPAGQIVSGVSLCRPGWSAVARSRLTSTSASWVRAILLPQSPEWLGLQAPATTPGQFFVFLVETGFHHVGQAGLEL

SEQ ID NO: 32721 - protein, 61 aa, Homo sapiens
MDPNCSCSPVGSCACAGSCKCKECKCTSCKKSCCSCCPVGCAKCAQGCICKGTSDKCSCCA

SEQ ID NO: 32722 - protein, 352 aa, Homo sapiens
MESGGRPSLCQFILLGTTSVVTAALYSVYRQKARVSQELKGAKKVHLGEDLKSILSEAPGKCVPYAVIEGAVRSVKETLNSQFVENCKGVIQRLTLQEHKMVWNRTTHLWNDCSKIIHQRTNTVPFDLVPHEDGVDVAVRVLKPLDSVDLGLETVYEKFHPSIQSFTDVIGHYISGERPKGIQETEEMLKVGATLTGVGELVLDNNSVRLQPPKQGMQYYLSSQDFDSLLQRQESSVRLWKVLALVFGFATCATLFFILRKQYLQRQERLRLKQMQEEFQEHEAQLLSRAKPEDRESLKSACVVCLSSFKSCVFLECGHVCSCTECYRALPEPKKCPICRQAITRVIPLYNS

SEQ ID NO: 32723 - protein, 332 aa, Homo sapiens
MSTVKEQLIEKLIEDDENSQCKITIVGTGAVGMACAISILLKDLADELALVDVALDKLKGEMMDLQHGSLFFSTSKITSGKDYSVSANSRIVIVTAGARQQEGETRLALVQRNVAIMKSIIPAIVHYSPDCKILVVSNPVDILTYIVWKISGLPVTRVIGSGCNLDSARFRYLIGEKLGVHPTSCHGWIIGEHGDSSVPLWSGVNVAGVALKTLDPKLGTDSDKEHWKNIHKQVIQSAYEIIKLKGYTSWAIGLSVMDLVGSILKNLRRVHPVSTMVKGLYGIKEELFLSIPCVLGRNGVSDVVKINLNSEEEALFKKSAETLWNIQKDLIF

SEQ ID NO: 32724 - protein, 334 aa, Homo sapiens
MATRQRESSITSCCSTSSCDADDEGVRGTCEDASLCKRFAVSIGYWHDPYIQHFVRLSKERKAPEINRGYFARVHGVSQLIKAFLRKTECHCQIVNLGAGMDTTFWRLKDEDLLPSKYFEVDFPMIVTRKLHSIKCKPPLSSPILELHSEDTLQMDGHILDSKRYAVIGADLRDLSELEEKLKKCNMNTQLPTLLIAECVLVYMTPEQSANLLKWAANSFERAMFINYEQVNMGDRFGQIMIENLRRRQCDLAGVETCKSLESQKERLLSNGWETASAVDMMELYNRLPRAEVSRIESLEFLDEMELLEQLMRHYCLCWATKGGNELGLKEITY

SEQ ID NO: 32725 - protein, 357 aa, Homo sapiens
MLPCARELPSAAPDSTLLLTAQHWVANLFILATLIGWTVRSFFLGRMETCCSHLGLRSGRRFAVSIGYWHDPYIQHFVRLSKERKAPEINRGYFARVHGVSQLIKAFLRKTECHCQIVNLGAGMDTTFWRLKDEDLLPSKYFEVDFPMIVTRKLHSIKCKPPLSSPILELHSEDTLQMDGHILDSKRYAVIGADLRDLSELEEKLKKCNMNTQLPTLLIAECVLVYMTPEQSANLLKWAANSFERAMFINYEQVNMGDRFGQIMIENLRRRQCDLAGVETCKSLESQKERLLSNGWETASAVDMMELYNRLPRAEVSRIESLEFLDEMELLEQLMRHYCLCWATKGGNELGLKEITY

SEQ ID NO: 32726 - protein, 279 aa, Homo sapiens
MATRQRESSITSCCSTSSCDADDEGVRGTCEDASLCKRFAVSIGYWHDPYIQHFVRLSKERKAPEINRGYFARVHGVSQLIKAFLRKTECHCQIVNLGAGMDTTFWRLKDEDLLPSKYFEVDFPMIVTRKLHSIKLPTLLIAECVLVYMTPEQSANLLKWAANSFERAMFINYEQVNMGDRFGQIMIENLRRRQCDLAGVETCKSLESQKERLLSNGWETASAVDMMELYNRLPRAEVSRIESLEFLDEMELLEQLMRHYCLCWATKGGNELGLKEITY

SEQ ID NO: 32727 - protein, 187 aa, Homo sapiens
MRQGLLVLALVLVLVLVLAAGSQVQEWYPRESHALNWNKFSGFWYILATATDAQGFLPARDKRKLGASVVKVNKVGQLRVLLAFRRGQGCGRAQPRHPGTSGHLWASLSVKGVKAFHVLSTDYSYGLVYLRLGRATQNYKNLLLFHRQNVSSFQSLKEFMDACDILGLSKAAVILPKDASRTHTILP

SEQ ID NO: 32728 - protein, 200 aa, Homo sapiens
MRQGLLVLALVLVLVLVLAAGSQVQEWYPRESHALNWNKFSGFWYILATATDAQGFLPARDKRKLGASVVKVNKVGQLRVLLAFRRLKGCQSQEVILRKDGKKPVFGNACAYAAGPREGQEGVKGVKAFHVLSTDYSYGLVYLRLGRATQNYKNLLLFHRQNVSSFQSLKEFMDACDILGLSKAAVILPKDASRTHTILP

SEQ ID NO: 32729 - protein, 602 aa, Homo sapiens
MDKGRERMAAAAAAAAAAAAAAQCRSPRCAAERRGFRRELDSWRHRLMHCVGFESILEGLYGPRLRRDLSLFEDCEPEELTDWSMDEKCSFCNLQREAVSDCIPSLDSSQSTPTEELSSQGQSNTDKIECQAENYLNALFRKKDLPQNCDPNIPLVAQELMKKMIRQFAIEYISKSGKTQENRNGSIGPSIVCKSIQMNQAENSLQEEQEGPLDLTVNRMQEQNTQQGDGVLDLSTKKTSIKSEESSICDPSSENSVAGRLHRNREDYVERSAEFADGLLSKALKDIQSGALDINKAGILYGIPQKTLLLHLEALPAGKPASFKNKTRDFHDSYSYKDSKETCAVLQKVALWARAQAERTEKSKLNLLETSEIKFPTASTYLHQLTLQKMVTQFKEKNESLQYETSNPTVQLKIPQLRVSSVSKSQPDGSGLLDVMYQVSKTSSVLEGSALQKLKNILPKQNKIECSGPVTHSSVDSYFLHGDLSPLCLNSKNGTVDGTSENTEDGLDRKDSKQPRKKRGRYRQYDHEIMEEAIAMVMSGKMSVSKAQGIYGVPHSTLEYKVKERSGTLKTPPKKKLRLPDTGLYNMTDSGTGSCKNSSKPV

SEQ ID NO: 32730 - protein, 213 aa, Homo sapiens
MVTQFKEKNESLQYETSNPTVQLKIPQLRVSSVSKSQPDGSGLLDVMYQVSKTSSVLEGSALQKLKNILPKQNKIECSGPVTHSSVDSYFLHGDLSPLCLNSKNGTVDGTSENTEDGLDRKDSKQPRKKRGRYRQYDHEIMEEAIAMVMSGKMSVSKAQGIYGVPHSTLEYKVKERSGTLKTPPKKKLRLPDTGLYNMTDSGTGSCKNSSKPV

SEQ ID NO: 32731 - protein, 318 aa, Homo sapiens
MDKGRERMAAAAAAAAAAAAAAQCRSPRCAAERRGFRRELDSWRHRLMHCVGFESILEGLYGPRLRRDLSLFEDCEPEELTDWSMDEKCSFCNLQREAVSDCIPSLDSSQSTPTEELSSQGQSNTDKIECQAENYLNALFRKKDLPQNCDPNIPLVAQELMKKMIRQFAIEYISKSGKTQENRNGSIGPSIVCKSIQMNQAENSLQEEQEGPLDLTVNRMQEQNTQQGDGVLDLSTKKTSIKSEESSICDPSSENSVAGMLQVKTDEKLNVSDENTASCPLSPIKMCLNRPIEWNLNLTTASLTSCTVHNQNLKSEEK

SEQ ID NO: 32732 - protein, 466 aa, Homo sapiens
MLLGGPPRSPRSGTSPKGPWSSTGHVQFGKSPQTWPRRTRPRSPEPAAPSGVRGSTWTRRRDSPRRAGPTALSRYVGHLWMGRRPPSPEARGPVPRSSAASRARRSLASPGISPGPLTATIGGAVAGGGPRQGRAEAHKEVFPGQRVGKMAAPMELFCWSGGWGLPSVDLDSLAVLTYARFTGAPLKVHKISNPWQSPSGTLPALRTSHGEVISVPHKIITHLRKEKYNADYDLSARQGADTLAFMSLLEEKLLPVLVHTFWIDTKNYVEVTRKWYAEAMPFPLNFFLPGRMQRQYMERLQLLTGEHRPEDEEELEKELYREARECLTLLSQRLGSQKFFFGDAPASLDAFVFSYLALLLQAKLPSGKLQVHLRGLHNLCAYCTHILSLYFPWDGAEVPPQRQTPAGPETEEEPYRRRNQILSVLAGLAAMVGYALLSGIVSIQRATPARAPGTRTLGMAEEDEEE

SEQ ID NO: 32733 - protein, 435 aa, Homo sapiens
MLLGGPPRSPRSGTSPKGPWSSTGHVQFGKSPQTWPRRTRPRSPEPAAPSGVRGSTWTRRRDSPRRAGPTALSRYVGHLWMGRRPPSPEARGPVPRSSAASRARRSLASPGISPGPLTATIGGAVAGGGPRQGRAEAHKEVFPGQRVGKMAAPMELFCWSGGWGLPSVDLDSLAVLTYARFTGAPLKVHKISNPWQSPSGTLPALRTSHGEVISVPHKIITHLRKEVHTFWIDTKNYVEVTRKWYAEAMPFPLNFFLPGRMQRQYMERLQLLTGEHRPEDEEELEKELYREARECLTLLSQRLGSQKFFFGDAPASLDAFVFSYLALLLQAKLPSGKLQVHLRGLHNLCAYCTHILSLYFPWDGAEVPPQRQTPAGPETEEEPYRRRNQILSVLAGLAAMVGYALLSGIVSIQRATPARAPGTRTLGMAEEDEEE

SEQ ID NO: 32734 - protein, 317 aa, Homo sapiens
MAAPMELFCWSGGWGLPSVDLDSLAVLTYARFTGAPLKVHKISNPWQSPSGTLPALRTSHGEVISVPHKIITHLRKEKYNADYDLSARQGADTLAFMSLLEEKLLPVLVHTFWIDTKNYVEVTRKWYAEAMPFPLNFFLPGRMQRQYMERLQLLTGEHRPEDEEELEKELYREARECLTLLSQRLGSQKFFFGDAPASLDAFVFSYLALLLQAKLPSGKLQVHLRGLHNLCAYCTHILSLYFPWDGAEVPPQRQTPAGPETEEEPYRRRNQILSVLAGLAAMVGYALLSGIVSIQRATPARAPGTRTLGMAEEDEEE

SEQ ID NO: 32735 - protein, 736 aa, Homo sapiens
MGNPENIEDAYVAVIRPKNTASLNSREYRAKSYEILLHEVPIEGQKKKRKKVLLETKLQGNSEITQGILDYVVETTKPISPANQGIRGKRVVLMKKFPLDGEKMGREASLFIVPSVVKDNTKYTYTPGCPIFYCLQDIMRVCSESSTHFATLTARMLIALDKWLDERHAQSHFIPALFRPSPLERIKTNVINPAYATESGQTENSLHMGYSALEIKSKMLALEKADTCIYNPLFGSDLQYTNRVDKVVINPYFGLGAPDYSKIQIPKQEKWQRSMSSVTEDKERQWVDDFPLHRSACEGDSELLSRLLSERFSVNQLDSDHWAPIHYACWYGKVEATRILLEKGKCNPNLLNGQLSSPLHFAAGGGHAEIVQILLNHPETDRHITDQQGRSPLNICEENKQNNWEEAAKLLKEAINKPYEKVRIYRMDGSYRSVELKHGNNTTVQQIMEGMRLSQETQQYFTIWICSENLSLQLKPYHKPLQHVRDWPEILAELTNLDPQRETPQLFLRRDVRLPLEVEKQIEDPLAILILFDEARYNLLKGFYTAPDAKLITLASLLLQIVYGNYESKKHKQGFLNEENLKSIVPVTKLKSKAPHWTNRILHEYKNLSTSEGVSKEMHHLQRMFLQNCWEIPTYGAAFFTGQIFTKASPSNHKVIPVYVGVNIKGLHLLNMETKALLISLKYGCFMWQLGDTDTCFQIHSMENKMSFIVHTKQAGLVVKLLMKLNGQLMPTERNS

SEQ ID NO: 32736 - protein, 529 aa, Homo sapiens
MGYSALEIKSKMLALEKADTCIYNPLFGSDLQYTNRVDKVVINPYFGLGAPDYSKIQIPKQEKWQRSMSSVTEDKERQWVDDFPLHRSACEGDSELLSRLLSERFSVNQLDSDHWAPIHYACWYGKVEATRILLEKGKCNPNLLNGQLSSPLHFAAGGGHAEIVQILLNHPETDRHITDQQGRSPLNICEENKQNNWEEAAKLLKEAINKPYEKVRIYRMDGSYRSVELKHGNNTTVQQIMEGMRLSQETQQYFTIWICSENLSLQLKPYHKPLQHVRDWPEILAELTNLDPQRETPQLFLRRDVRLPLEVEKQIEDPLAILILFDEARYNLLKGFYTAPDAKLITLASLLLQIVYGNYESKKHKQGFLNEENLKSIVPVTKLKSKAPHWTNRILHEYKNLSTSEGVSKEMHHLQRMFLQNCWEIPTYGAAFFTGQIFTKASPSNHKVIPVYVGVNIKGLHLLNMETKALLISLKYGCFMWQLGDTDTCFQIHSMENKMSFIVHTKQAGLVVKLLMKLNGQLMPTERNS

SEQ ID NO: 32737 - protein, 688 aa, Homo sapiens
MGNPENIEDAYVAVIRPKNTASLNSREYRAKSYEILLHEVPIEGQKKKRKKVLLETKLQGNSEITQGILDYVVETTKPISPANQGIRGKRVVLMKKFPLDGEKMGREASLFIVPSVVKDNTKYTYTPGCPIFYCLQDIMRVCSESSTHFATLTARMLIALDKWLDERHAQSHFIPALFRPSPLERIKTNVINPAYATESGQTENSLHMGYSALEIKSKMLALEKADTCIYNPLFGSDLQYTNRVDKVVINPYFGLGAPDYSKIQIPKQEKWQRSMSSVTEDKYGKVEATRILLEKGKCNPNLLNGQLSSPLHFAAGGGHAEIVQILLNHPETDRHITDQQGRSPLNICEENKQNNWEEAAKLLKEAINKPYEKVRIYRMDGSYRSVELKHGNNTTVQQIMEGMRLSQETQQYFTIWICSENLSLQLKPYHKPLQHVRDWPEILAELTNLDPQRETPQLFLRRDVRLPLEVEKQIEDPLAILILFDEARYNLLKGFYTAPDAKLITLASLLLQIVYGNYESKKHKQGFLNEENLKSIVPVTKLKSKAPHWTNRILHEYKNLSTSEGVSKEMHHLQRMFLQNCWEIPTYGAAFFTGQIFTKASPSNHKVIPVYVGVNIKGLHLLNMETKALLISLKYGCFMWQLGDTDTCFQIHSMENKMSFIVHTKQAGLVVKLLMKLNGQLMPTERNS

SEQ ID NO: 32738 - protein, 455 aa, Homo sapiens
MASKCLKAGFSSGSLKSPGGASGGSTRVSAMYSSSSCKLPSLSPVARSFSACSVGLGRSSYRATSCLPALCLPAGGFATSYSGGGGWFGEGILTGNEKETMQSLNDRLAGYLEKVRQLEQENASLESRIREWCEQQVPYMCPDYQSYFRTIEELQKKTLCSKAENARLVVEIDNAKLAADDFRTKYETEVSLRQLVESDINGLRRILDDLTLCKSDLEAQVESLKEELLCLKKNHEEEVNSLRCQLGDRLNVEVDAAPPVDLNRVLEEMRCQYETLVENNRRDAEDWLDTQSEELNQQVVSSSEQLQSCQAEIIELRRTVNALEIELQAQHSMRDALESTLAETEARYSSQLAQMQCMITNVEAQLAEIRADLERQNQEYQVLLDVRARLECEINTYRGLLESEDSKLPCNPCAPDYSPSKSCLPCLPAASCGPSAARTNCSPRPICVPCPGGRF

SEQ ID NO: 32739 - protein, 1064 aa, Homo sapiens
MMKFRFRRQGADPQREKLKQELFAFNKTVEHGFPNQPSALAFDPELRIMAIGTRSGAVKIYGAPGVEFTGLHRDAATVTQMHFLTGQGRLLSLLDDSSLHLWEIVHHNGCAHLEEALSFQLPSRPGFDGASAPLSLTRVTVVLLVAASDIAALGTEGSSVFFLDVTTLTLLEGQTLAPGEVLRSVPDDYRCGKALGPVESLQGHLRDPTKILIGYSRGLLVIWNQASQCVDHIFLGNQQLESLCWGRDSSTVVSSHSDGSYAVWSVDAGSFPTLQPTVATTPYGPFPCKAINKILWRNCESGGHFIIFSGGMPRASYGDRHCVSVLRAETLVTLDFTSRIIDFFTVHSTRPEDEFDDPQALAVLLEEELVVLDLQTPGWPAVPAPYLAPLHSSAITCSAHVASVPAKLWARIVSAGEQQSPQPVSSALSWPITGGRNLAQEPSQRGLLLTGHEDGTVRFWDASGVALRPLYKLSTAGLFQTDCEHADSLAQAAEDDWPPFRKVGCFDPYSDDPRLGVQKVALCKYTAQMVVAGTAGQVLVLELSDVPVEQAVSVAIIDLLQDREGFTWKGHERLSPRTGPLPWPAGFQPRVLVQCLPPAAVTAVTLHTEWSLVAFGTSHGFGLFDYQRKSPVLARCTLHPNDSLAMEGPLSRVKSLKKSLRQSFRRIRKSRVSGKKRAANASSKLQEANAQLAEQACPHDVEMTPVQRRIEPRSADDSLSGVVRCLYFADTFLRDGAHHGPTMWAGTNSGSVFAYALEVPAAAVGGEKRPEQAVEAVLGKEVQLMHRAPVVAIAVLDGRGRPLPEPYEASRDLAQAPDMQGGHAVLIASEEQFKVFTLPKVSAKTKFKLTAHEGCRVRKVALATFASVACEDYAETCLACLTNLGDVHVFSVPGLRPQVHYSCIRKEDISGIASCVFTRHGQGFYLISPSEFERFSLSARNITEPLCSLDINWPRDATQASYRIRESPKLSQANGTPSILLAPQSLDGSPDPAHSMGPDTPEPPEAALSPMSIDSATSADTTLDTTGDVTVEDVKDFLGSSEESEKNLRNLAEDEAHACAILIK

SEQ ID NO: 32740 - protein, 94 aa, Homo sapiens
MAHHSLNTFYIWHNNVLHTHLVFFLPHLLNQPFSRGSFLIWLLLCWNSWYHLRTLRRQANQANKLSMMLLRVKQSPGTKLCHGDSELTSGLLAT

SEQ ID NO: 32741 - protein, 449 aa, Homo sapiens
MTSFYSTSSCPLGCTMAPGARNVFVSPIDVGCQPVAEANAASMCLLANVAHANRVRVGSTPLGRPSLCLPPTSHTACPLPGTCHIPGNIGICGAYGKNTLNGHEKETMKFLNDRLANYLEKVRQLEQENAELETTLLERSKCHESTVCPDYQSYFRTIEELQQKILCSKAENARLIVQIDNAKLAADDFRIKLESERSLHQLVEADKCGTQKLLDDATLAKADLEAQQESLKEEQLSLKSNHEQEVKILRSQLGEKFRIELDIEPTIDLNRVLGEMRAQYEAMVETNHQDVEQWFQAQSEGISLQAMSCSEELQCCQSEILELRCTVNALEVERQAQHTLKDCLQNSLCEAEDRYGTELAQMQSLISNLEEQLSEIRADLERQNQEYQVLLDVKARLENEIATYRNLLESEDCKLPCNPCSTPASCTSCPSCGPVTGGSPSGHGASMGR

SEQ ID NO: 32742 - protein, 291 aa, Homo sapiens
MVWKKLGSRNFSSCPSGSIQWIWDVLGECAQDGWDEASVGLGLISILCFAASTFPQFIKAYKTGNMDQALSLWFLLGWIGGDSCNLIGSFLADQLPLQTYTAVYYVLADLVMLTLYFYYKFRTRPSLLSAPINSVLLFLMGMACATPLLSAAGPVAAPREAFRGRALLSVESGSKPFTRQEVIGFVIGSISSVLYLLSRLPQIRTNFLRKSTQGISYSLFALVMLGNTLYGLSVLLKNPEEGQSEGSYLLHHLPWLVGSLGVLLLDTIISIQFLVYRRSTAASELEPLLPS

SEQ ID NO: 32743 - protein, 180 aa, Homo sapiens
MLTLYFYYKFRTRPSLLSAPINSVLLFLMGMACATPLLSAAGPVAAPREAFRGRALLSVESGSKPFTRQEVIGFVIGSISSVLYLLSRLPQIRTNFLRKSTQGISYSLFALVMLGNTLYGLSVLLKNPEEGQSEGSYLLHHLPWLVGSLGVLLLDTIISIQFLVYRRSTAASELEPLLPS

SEQ ID NO: 32744 - protein, 226 aa, Homo sapiens
MDQALSLWFLLGWIGGDSCNLIGSFLADQLPLQTYTAVYYVLADLVMLTLYFYYKFRTRPSLLSAPINSVLLFLMGMACATPLLSAAGPVAAPREAFRGRALLSVESGSKPFTRQEVIGFVIGSISSVLYLLSRLPQIRTNFLRKSTQGISYSLFALVMLGNTLYGLSVLLKNPEEGQSEGSYLLHHLPWLVGSLGVLLLDTIISIQFLVYRRSTAASELEPLLPS

SEQ ID NO: 32745 - protein, 242 aa, Homo sapiens
MSGCDAREGDCCSRRCGAQDKEHPRYLIPELCKQFYHLGWVTGTGGGISLKHGDEIYIAPSGVQKERIQPEDMFVCDINEKDISGPSPSKKLKKSQCTPLFMNAYTMRGAGAVIHTHSKAAVMATLLFPGREFKITHQEMIKGIKKCTSGGYYRYDDMLVVPIIENTPEEKDLKDRMAHAMNEYPDSCAVLVRRHGVYVWGETWEKAKTMCECYDYLFDIAVSMKKVGLDPSQLPVGENGIV

SEQ ID NO: 32746 - protein, 204 aa, Homo sapiens
MLGRETVVPGDAARSDEIYIAPSGVQKERIQPEDMFVCDINEKDISGPSPSKKLKKSQCTPLFMNAYTMRGAGAVIHTHSKAAVMATLLFPGREFKITHQEMIKGIKKCTSGGYYRYDDMLVVPIIENTPEEKDLKDRMAHAMNEYPDSCAVLVRRHGVYVWGETWEKAKTMCECYDYLFDIAVSMKKVGLDPSQLPVGENGIV

SEQ ID NO: 32747 - protein, 295 aa, Homo sapiens
MELSQLLNEIRANYEKILTRNQIETVLSTRIQLEEDISKKMDKDEEALKAAQAELKEARRQWHHLQVEIESLHAVERGLENSLHASEQHYQMQLQDLETVIEGLEKELQEVRRGIEKQLQEHEMLLNTKMRLEQEIATYRHLLEKEEIRYYGCIQGGKKDKKPTTSRVGFVLPSAIINEISFTTKVPQKYENENVETVTKQAILNGSIVKESTEAHGTIQTEKVDEVIKEWEGSFFKDNPRLRKKSVSLRFDLHLAATDEGCLETKQDNLPDIEVRLIMRRSCSIPSIKPPSTAN

SEQ ID NO: 32748 - protein, 255 aa, Homo sapiens
MDKDEEALKAAQAELKEARRQWHHLQVEIESLHAVERGLENSLHASEQHYQMQLQDLETVIEGLEKELQEVRRGIEKQLQEHEMLLNTKMRLEQEIATYRHLLEKEEIRYYGCIQGGKKDKKPTTSRVGFVLPSAIINEISFTTKVPQKYENENVETVTKQAILNGSIVKESTEAHGTIQTEKVDEVIKEWEGSFFKDNPRLRKKSVSLRFDLHLAATDEGCLETKQDNLPDIEVRLIMRRSCSIPSIKPPSTAN

SEQ ID NO: 32749 - protein, 404 aa, Homo sapiens
MSYSCGLPSLSCRTSCSSRPCVPPSCHGCTLPGACNIPANVSNCNWFCEGSFNGSEKETMQFLNDRLASYLEKVRQLERDNAELENLIRERSQQQEPLVCASYQSYFKTIEELQQKILCSKSENARLVVQIDNAKLASDDFRTKYETELSLRQLVESDINGLRRILDELTLCRSDLEAQVESLKEELLCLKQNHEQEVNTLRCQLGDRLNVEVDAAPTVDLNQVLNETRSQYEALVETNRREVEQWFATQTEELNKQVVSSSEQLQSYQAEIIELRRTVNALEIELQAQHNLRDSLENTLTESEARYSSQLSQVQRLITNVESQLAEIRSDLERQNQEYQVLLDVRARLECEINTYRSLLESEDCKLPSNPCATTNACDKSTGPCISNPCGLRARCGPCNTFGY

SEQ ID NO: 32750 - protein, 309 aa, Homo sapiens
MEELLRRELGCSSVRATGHSGGGCISQGRSYDTDQGRVFVKVNPKAEARRMFEGEMASLTAILKTNTVKVPKPIKVLDAPGGGSVLVMEHMDMRHLSSHAAKLGAQLADLHLDNKKLGEMRLKEAGTVGRGGGQEERPFVARFGFDVVTCCGYLPQVNDWQEDWVVFYARQRIQPQMDMVEKESGDREALQLWSALQLKIPDLFRDLEIIPALLHGDLWGGNVAEDSSGPVIFDPASFYGHSEYELAIAGMFGGFSSSFYSAYHGKIPKAPGFEKRLQLYQLFHYLNHWNHFGSGYRGSSLNIMRNLVK

SEQ ID NO: 32751 - protein, 733 aa, Homo sapiens
MDLSMKKFAVRRFFSVYLRRKSRSKSSSLSRLEEEGVVKEIDISHHVKEGFEKADPSQFELLKVLGQGSYGKVFLVRKVKGSDAGQLYAMKVLKKATLKVRDRVRSKMERDILAEVNHPFIVKLHYAFQTEGKLYLILDFLRGGDLFTRLSKEVMFTEEDVKFYLAELALALDHLHSLGIIYRDLKPENILLDEEGHIKITDFGLSKEAIDHDKRAYSFCGTIEYMAPEVVNRRGHTQSADWWSFGVLMFEMLTGSLPFQGKDRKETMALILKAKLGMPQFLSGEAQSLLRALFKRNPCNRLGAGIDGVEEIKRHPFFVTIDWNTLYRKEIKPPFKPAVGRPEDTFHFDPEFTARTPTDSPGVPPSANAHHLFRGFSFVASSLIQEPSQQDLHKVPVHPIVQQLHGNNIHFTDGYEIKEDIGVGSYSVCKRCVHKATDTEYAVKIIDKSKRDPSEEIEILLRYGQHPNIITLKDVYDDGKFVYLVMELMRGGELLDRILRQRYFSEREASDVLCTITKTMDYLHSQGVVHRDLKPSNILYRDESGSPESIRVCDFGFAKQLRAGNGLLMTPCYTANFVAPEVLKRQGYDAACDIWSLGILLYTMLAGFTPFANGPDDTPEEILARIGSGKYALSGGNWDSISDAAKDVVSKMLHVDPHQRLTAMQVLKHPWVVNREYLSPNQLSRQDVHLVKGAMAATYFALNRTPQAPRLEPVLSSNLAQRRGMKRLTSTRL

SEQ ID NO: 32752 - protein, 758 aa, Homo sapiens
MPIAQLLELWKKIEVEPMEIETTEEDLNLDVGPATEDTAEEGKSDSAACKTKVAGSVEEEGVVKEIDISHHVKEGFEKADPSQFELLKVLGQGSYGKVFLVRKVKGSDAGQLYAMKVLKKATLKVRDRVRSKMERDILAEVNHPFIVKLHYAFQTEGKLYLILDFLRGGDLFTRLSKEVMFTEEDVKFYLAELALALDHLHSLGIIYRDLKPENILLDEEGHIKITDFGLSKEAIDHDKRAYSFCGTIEYMAPEVVNRRGHTQSADWWSFGVLMFEMLTGSLPFQGKDRKETMALILKAKLGMPQFLSGEAQSLLRALFKRNPCNRLGAGIDGVEEIKRHPFFVTIDWNTLYRKEIKPPFKPAVGRPEDTFHFDPEFTARTPTDSPGVPPSANAHHLFRGFSFVASSLIQEPSQQDLHKVPVHPIVQQLHGNNIHFTDGYEIKEDIGVGSYSVCKRCVHKATDTEYAVKIIDKSKRDPSEEIEILLRYGQHPNIITLKDVYDDGKFVYLVMELMRGGELLDRILRQRYFSEREASDVLCTITKTMDYLHSQGVVHRDLKPSNILYRDESGSPESIRVCDFGFAKQLRAGNGLLMTPCYTANFVAPEVLKRQGYDAACDIWSLGILLYTMLAGFTPFANGPDDTPEEILARIGSGKYALSGGNWDSISDAAKDVVSKMLHVDPHQRLTAMQVLKHPWVVNREYLSPNQLSRQDVHLVKGAMAATYFALNRTPQAPRLEPVLSSNLAQRRGMKRLTSTRL

SEQ ID NO: 32753 - protein, 741 aa, Homo sapiens
MPIAQLLELWKKIEVEPMEIETTEEDLNLDVEPTTEDTAEEEEGVVKEIDISHHVKEGFEKADPSQFELLKVLGQGSYGKVFLVRKVKGSDAGQLYAMKVLKKATLKVRDRVRSKMERDILAEVNHPFIVKLHYAFQTEGKLYLILDFLRGGDLFTRLSKEVMFTEEDVKFYLAELALALDHLHSLGIIYRDLKPENILLDEEGHIKITDFGLSKEAIDHDKRAYSFCGTIEYMAPEVVNRRGHTQSADWWSFGVLMFEMLTGSLPFQGKDRKETMALILKAKLGMPQFLSGEAQSLLRALFKRNPCNRLGAGIDGVEEIKRHPFFVTIDWNTLYRKEIKPPFKPAVGRPEDTFHFDPEFTARTPTDSPGVPPSANAHHLFRGFSFVASSLIQEPSQQDLHKVPVHPIVQQLHGNNIHFTDGYEIKEDIGVGSYSVCKRCVHKATDTEYAVKIIDKSKRDPSEEIEILLRYGQHPNIITLKDVYDDGKFVYLVMELMRGGELLDRILRQRYFSEREASDVLCTITKTMDYLHSQGVVHRDLKPSNILYRDESGSPESIRVCDFGFAKQLRAGNGLLMTPCYTANFVAPEVLKRQGYDAACDIWSLGILLYTMLAGFTPFANGPDDTPEEILARIGSGKYALSGGNWDSISDAAKDVVSKMLHVDPHQRLTAMQVLKHPWVVNREYLSPNQLSRQDVHLVKGAMAATYFALNRTPQAPRLEPVLSSNLAQRRGMKRLTSTRL

SEQ ID NO: 32754 - protein, 702 aa, Homo sapiens
MAAAVTIPGPRIGALQSSGLTLLLSLAAHCSGPQAKVLSPGGLDASGANLWASANCSLLQGFWCQPASQLPRDQLSALIQRLALLQVPLQAWQLSCLANLASRCGLQDDFTLHPPNLLLFYNLSQVREADCRAFIRRAAQGDVELLSHLPDQRVALWRAAVACLVGAGLRLSASDQQLLGALVCDMDASSIGAADPHMLENLRRCPRLTAAQRIALNSLLAGGKTSLGPPGSWTLEGLQALGPLATYISPHLWAQVQEAVGLGFFRSVVASCQVGRLGQREARCFVTSFLESKTKPVSSRPRLSTGNITAATLRDDLFLVHYDCAELESCLDGCILRTNLDTLLQHLLPTECQHVVKAKLAQIYPQGLPEDQLRLITSLVYLYSRTEIGQWSITSQDTVMALLASDVALENQTEAVLQKFLEHNGTVSGALLLAIGGTRLCWMSPHQIQTIHPQELRLAGALDLSSCPQSRKDVLYTKAHETFGSSGTLAAYYRLMRPYLGGSPGGAQPPSPVPPGGAPVEELRHLAHANISMDIDTFTSLNPLELQSLDVGNVTALLGHNVGDLQKARSHPTVRAWLRSLNSSTLGQLGLDASPTSPTGPAHGTRGPPSTTHQVLHLVHTSGLPTNDAQASTSGSLWAPLGYLPLAMALPCSLLCLLHWGTCILVSVDSVASGWLGSQGSGAGKTEVLDSAGRPLGLTGQL

SEQ ID NO: 32755 - protein, 936 aa, Homo sapiens
MLRPEISSTSPSAPAVSPSSGETRSPQGPRYNFGLQETPQSRPSVQVVSASTCPGTSGAAGDRSSSSSSLPCPAPNSRPAQGSYFGNKRAYAENTVASNFTFGASSSSARDTNYPQTLKTPLSTGNPQRSGYKSWTPQVGYSASSSSAISAHSPSVIVAVVEGRGLARGEIGMASIDLKNPQIILSQFADNTTYAKVITKLKILSPLEIIMSNTACAVGNSTKLFTLITENFKNVNFTTIQRKYFNETKGLEYIEQLCIAEFSTVLMEVQSKYYCLAAVAALLKYVEFIQNSVYAPKSLKICFQGSEQTAMIDSSSAQNLELLINNQDYRNNHTLFGVLNYTKTPGGSRRLRSNILEPLVDIETINMRLDCVQELLQDEELFFGLQSVISRFLDTEQLLSVLVQIPKQDTVNAAESKITNLIYLKHTLELVDPLKIAMKNCNTPLLRAYYGSLEDKRFGIILEKIKTVINDDARYMKGCLNMRTQKCYAVRSNINEFLDIARRTYTEIVDDIAGMISQLGEKYSLPLRTSFSSARGFFIQMTTDCIALPSDQLPSEFIKISKVKNSYSFTSADLIKMNERCQESLREIYHMTYMIVCKLLSEIYEHIHCLYKLSDTVSMLDMLLSFAHACTLSDYVRPEFTDTLAIKQGWHPILEKISAEKPIANNTYVTEGSNFLIITGPNMSGKSTYLKQIALCQIMAQIGSYVPAEYSSFRIAKQIFTRISTDDDIETNSSTFMKEMKEIAYILHNANDKSLILIDELGRGTNTEEGIGICYAVCEYLLSLKAFTLFATHFLELCHIDALYPNVENMHFEVQHVKNTSRNKEAILYTYKLSKGLTEEKNYGLKAAEVSSLPPSIVLDAKEITTQITRQILQNQRSTPEMERQRAVYHLATRLVQTARNSQLDPDSLRIYLSNLKKKYKEDFPRTEQVPEKTEE

SEQ ID NO: 32756 - protein, 350 aa, Homo sapiens [sequence omitted]

SEQ ID NO: 32757 - protein, 123 aa, Homo sapiens
MEPAEQPSELVSAEGRNRKAVLCQRCGSRVLQPGTALFSRRQLFLPSMRKKPALSDGSNPDGDLLQEHWLVEDMFIFENVGFTKDVGNIKFLVCADCEIGPIGWHCLDDKNSFYVALERVSHE

SEQ ID NO: 32758 - protein, 114 aa, Homo sapiens
MNVLLGSVVIFATFVTLCNASCYFIPNEGVPGDSTRKCMDLKGNKHPINSEWQTDNCETCTCYETEISCCTLVSTPVGYDKDNCQRIFKKEDCKYIVVEKKDPKKTCSVSEWII

SEQ ID NO: 32759 - protein, 77 aa, Homo sapiens
MNVLLGSVVIFATFVTLCNASCYFIPNEGVPGDSTRMFLHLWVMTKTTAKESSRRRTASISWWRRRTQKRPVLSVNG

SEQ ID NO: 32760 - protein, 834 aa, Homo sapiens
MASLGANPRRTPQGPRPGAASSGFPSPAPVPGPREAEEEEVEEEEELAEIHLCVLWNSGYLGIAYYDTSDSTIHFMPDAPDHESLKLLQRVLDEINPQSVVTSAKQDENMTRFLGKLASQEHREPKRPEIIFLPSVDFGLEISKQRLLSGNYSFIPDAMTATEKILFLSSIIPFDCLLTVRALGGLLKFLGRRRIGVELEDYNVSVPILGFKKFMLTHLVNIDQDTYSVLQIFKSESHPSVYKVASGLKEGLSLFGILNRCHCKWGEKLLRLWFTRPTHDLGELSSRLDVIQFFLLPQNLDMAQMLHRLLGHIKNVPLILKRMKLSHTKVSDWQVLYKTVYSALGLRDACRSLPQSIQLFRDIAQEFSDDLHHIASLIGKVVDFEGSLAENRFTVLPNIDPEIDEKKRRLMGLPSFLTEVARKELENLDSRIPSCSVIYIPLIGFLLSIPRLPSMVEASDFEINGLDFMFLSEEKLHYRSARTKELDALLGDLHCEIRDQETLLMYQLQCQVLARAAVLTRVLDLASRLDVLLALASAARDYGYSRPRYSPQVLGVRIQNGRHPLMELCARTFVPNSTECGGDKGRVKVITGPNSSGKSIYLKQVGLITFMALVGSFVPAEEAEIGAVDAIFTRIHSCESISLGLSTFMIDLNQVAKAVNNATAQSLVLIDEFGKGTNTVDGLALLAAVLRHWLARGPTCPHIFVATNFLSLVQLQLLPQGPLVQYLTMETCEDGNDLVFFYQVCEGVAKASHASHTAAQAGLPDKLVARGKEVSDLIRSGKPIKPVKDLLKKNQMENCQTLVDKFMKLDLEDPNLDLNVFMSQEVLPAATSIL

SEQ ID NO: 32761 - protein, 835 aa, Homo sapiens
MASLGANPRRTPQGPRPGAASSGFPSPAPVPGPREAEEEEVEEEEELAEIHLCVLWNSGYLGIAYYDTSDSTIHFMPDAPDHESLKLLQRVLDEINPQSVVTSAKQDENMTRFLGKLASQEHREPKRPEIIFLPSVDFGLEISKQRLLSGNYSFIPDAMTATEKILFLSSIIPFDCLLTVRALGGLLKFLGRRRIGVELEDYNVSVPILGFKKFMLTHLVNIDQDTYSVLQIFKSESHPSVYKVASGLKEGLSLFGILNRCHCKWGEKLLRLWFTRPTHDLGELSSRLDVIQFFLLPQNLDMAQMLHRLLGHIKNVPLILKRMKLSHTKVSDWQVLYKTVYSALGLRDACRSLPQSIQLFRDIAQEFSDDLHHIASLIGKVVDFEGSLAENRFTVLPNIDPEIDEKKRRLMGLPSFLTEVARKELENLDSRIPSCSVIYIPLIGFLLSIPRLPSMVEASDFEINGLDFMFLSEEKLHYRSARTKELDALLGDLHCEIRDQETLLMYQLQCQVLARAAVLTRVLDLASRLDVLLALASAARDYGYSRPRYSPQVLGVRIQNGRHPLMELCARTFVPNSTECGGDKGRVKVITGPNSSGKSIYLKQVGLITFMALVGSFVPAEEAEIGAVDAIFTRIHSCESISLGLSTFMIDLNQQVAKAVNNATAQSLVLIDEFGKGTNTVDGLALLAAVLRHWLARGPTCPHIFVATNFLSLVQLQLLPQGPLVQYLTMETCEDGNDLVFFYQVCEGVAKASHASHTAAQAGLPDKLVARGKEVSDLIRSGKPIKPVKDLLKKNQMENCQTLVDKFMKLDLEDPNLDLNVFMSQEVLPAATSIL

SEQ ID NO: 32762 - protein, 851 aa, Homo sapiens
MASLGANPRRTPQGPRPGAASSGFPSPAPVPGPREAEEEEVEEEEELAEIHLCVLWNSGYLGIAYYDTSDSTIHFMPDAPDHESLKLLQRVLDEINPQSVVTSAKQDENMTRFLGKLASQEHREPKRPEIIFLPSVDFGLEISKQRLLSGNYSFIPDAMTATEKILFLSSIIPFDCLLTPPGDLRFTPIPLLIPSQVRALGGLLKFLGRRRIGVELEDYNVSVPILGFKKFMLTHLVNIDQDTYSVLQIFKSESHPSVYKVASGLKEGLSLFGILNRCHCKWGEKLLRLWFTRPTHDLGELSSRLDVIQFFLLPQNLDMAQMLHRLLGHIKNVPLILKRMKLSHTKVSDWQVLYKTVYSALGLRDACRSLPQSIQLFRDIAQEFSDDLHHIASLIGKVVDFEGSLAENRFTVLPNIDPEIDEKKRRLMGLPSFLTEVARKELENLDSRIPSCSVIYIPLIGFLLSIPRLPSMVEASDFEINGLDFMFLSEEKLHYRSARTKELDALLGDLHCEIRDQETLLMYQLQCQVLARAAVLTRVLDLASRLDVLLALASAARDYGYSRPRYSPQVLGVRIQNGRHPLMELCARTFVPNSTECGGDKGRVKVITGPNSSGKSIYLKQVGLITFMALVGSFVPAEEAEIGAVDAIFTRIHSCESISLGLSTFMIDLNQVAKAVNNATAQSLVLIDEFGKGTNTVDGLALLAAVLRHWLARGPTCPHIFVATNFLSLVQLQLLPQGPLVQYLTMETCEDGNDLVFFYQVCEGVAKASHASHTAAQAGLPDKLVARGKEVSDLIRSGKPIKPVKDLLKKNQMENCQTLVDKFMKLDLEDPNLDLNVFMSQEVLPAATSIL

SEQ ID NO: 32763 - protein, 822 aa, Homo sapiens
MASLGANPRRTPQGPRPGAASSGFPSPAPVPGPREAEEEEVEEEEELAEIHLCVLWNSGYLGIAYYDTSDSTIHFMPDAPDHESLKLLQRVLDEINPQSVVTSAKQDENMTRFLGKLASQEHREPKRPEIIFLPSVDFGLEISKQRLLSGNYSFIPDAMTATEKILFLSSIIPFDCLLTPPGDLRFTPIPLLIPSQVRALGGLLKFLGRRRIGVELEDYNVSVPILGFKKFMLTHLVNIDQDTYSVLQIFKSESHPSVYKVASGLKEGLSLFGILNRCHCKWGEKLLRLWFTRPTHDLGELSSRLDVIQFFLLPQNLDMAQMLHRLLGHIKNVPLILKRMKLSHTKVSDWQVLYKTVYSALGLRDACRSLPQSIQLFRDIAQEFSDDLHHIASLIGKVVDFEGSLAENRFTVLPNIDPEIDEKKRRLMGLPSFLTEVARKELENLDSRIPSCSVIYIPLIGFLLSIPRLPSMVEASDFEINGLDFMFLSEEKLHYRSARTKELDALLGDLHCEIRDQETLLMYQLQCQVLARAAVLTRVLDLASRLDVLLALASAARDYGYSRPRYSPQVLGVRIQNGRHPLMELCARTFVPNSTECGGDKGRVKVITGPNSSGKSIYLKQVGLITFMALVGSFVPAEEAEIGAVDAIFTRIHSCESISLGLSTFMIDLNQQVAKAVNNATAQSLVLIDEFGKGTNTVDGLALLAAVLRHWLARGPTCPHIFVATNFLSLVQLQLLPQGPLVQYLTMETCEDGNDLVFFYQVSDLIRSGKPIKPVKDLLKKNQMENCQTLVDKFMKLDLEDPNLDLNVFMSQEVLPAATSIL

SEQ ID NO: 32764 - protein, 248 aa, Homo sapiens
MDQRQRRILGQPLSIPTSQPKQKRTSMISFFSKVSWKLRFQKREPLKNVFFILAERARDPSAKKRHMAMRNLGTMAYEAPDKVRKYKKIVLDLLVYGLYDPVNLEVIHESMKTLTVVLGKIQGKGLGSFFIDITLQTRTLLDDENDSLRYSAFVLFGQLAAFAGRKWKKFFTSQVKQTRDSLLIHLQDRNPQVAKACKTTFQACSPYLKLKEEYSFQSEEDQRNTKLYQQLSHYHPEILQFFYANKIL

SEQ ID NO: 32765 - protein, 210 aa, Homo sapiens
MAWGSKGIQGWENLAESSHLATTRESSPPESGTGSGSSRGSRLQEPQVSWKLRFQKREPLKNVFFILAERARDPSAKKRHMAMRNLGTMAYEAPDKVRKYKKIVLDLLVYGLYDPVNLEVIHESMKTLTVVLGKIQGKGLGSFFIDITLQTRTLLDDACKTTFQACSPYLKLKEEYSFQSEEDQRNTKLYQQLSHYHPEILQFFYANKIL

SEQ ID NO: 32766 - protein, 262 aa, Homo sapiens
MAWGSKGIQGWENLAESSHLATTRESSPPESGTGSGSSRGSRLQEPQVSWKLRFQKREPLKNVFFILAERARDPSAKKRHMAMRNLGTMAYEAPDKVRKYKKIVLDLLVYGLYDPVNLEVIHESMKTLTVVLGKIQGKGLGSFFIDITLQTRTLLDDENDSLRYSAFVLFGQLAAFAGRKWKKFFTSQVKQTRDSLLIHLQDRNPQVAKACKTTFQACSPYLKLKEEYSFQSEEDQRNTKLYQQLSHYHPEILQFFYANKIL

SEQ ID NO: 32767 - protein, 196 aa, Homo sapiens
MDQRQRRILGQPLSIPTSQPKQKRTSMISFFSKVSWKLRFQKREPLKNVFFILAERARDPSAKKRHMAMRNLGTMAYEAPDKVRKYKKIVLDLLVYGLYDPVNLEVIHESMKTLTVVLGKIQGKGLGSFFIDITLQTRTLLDDACKTTFQACSPYLKLKEEYSFQSEEDQRNTKLYQQLSHYHPEILQFFYANKIL

SEQ ID NO: 32768 - protein, 204 aa, Homo sapiens
MEAPAELLAALPALATALALLLAWLLVRRGAAASPEPARAPPEPAPPAEATGAPAPSRPCAPEPAASPAGPEEPGEPAGLGELGEPAGPGEPEGPGDPAAAPAEAEEQAVEARQEEEQDLDGEKGPSSEGPEEEDGEGFSFKYSPGKLRGNQYKKMMTKEELEEEQRVQKEQLAAIFKLMKDNKETFGEMSDGDVQEQLRLYDM

SEQ ID NO: 32769 - protein, 170 aa, Homo sapiens
MEAPAELLAALPALATALALLLAWLLVRRGAAASPEPARAPPEPAPPAEATGAPAPSRPCAPEPAASPAGPEEPGEPAGLGELGEPAGPGEPEGPGDPAAAPAEAEEQAVEARQEEEQDLDGEKGPSSEGPEEEDGEGFSFKYSPGKLRGNQYKKMMTKEELEEEQRTEE

SEQ ID NO: 32770 - protein, 177 aa, Homo sapiens
MEAPAELLAALPALATALALLLAWLLVRRGAAASPEPARAPPEPAPPAEATGAPAPSRPCAPEPAASPAGPEEPGEPAGLGELGEPAGPGEPEGPGDPAAAPAEAEEQAVEARQEEEQDLDGEKGPSSEGPEEEDGEGFSFKYSPGKLRGNQYKKMMTKEELEEEQRIELTSDLTSL

SEQ ID NO: 32771 - protein, 864 aa, Homo sapiens
MPNVLLPPKESNLFKRILKCYEQKQYKNGLKFCKMILSNPKFAEHGETLAMKGLTLNCLGKKEEAYEFVRKGLRNDVKSHVCWHVYGLLQRSDKKYDEAIKCYRNALKLDKDNLQILRDLSLLQIQMRDLEGYRETRYQLLQLRPTQRASWIGYAIAYHLLKDYDMALKLLEEFRQTQQVPPNKIDYEYSELILYQNQVMREADLLQESLEHIEMYEKQICDKLLVEEIKGEILLKLGRLKEASEVFKNLIDRNAENWCYYEGLEKALQISTLEERLQIYEEISKQHPKAITPRRLPLTLVPGERFRELMDKFLRVNFSKGCPPLFTTLKSLYYNTEKVSIIQELVTNYEASLKTCDFFSPYENGEKEPPTTLLWVQYFLAQHFDKLGQYSLALDYINAAIASTPTLIELFYMKAKIYKHIGNLKEAAKWMDEAQSLDTADRFINSKCAKYMLRANMIKEAEEMCSKFTREGTSAMENLNEMQCMWFQTECISAYQRLGRYGDALKKCHEVERHFFEITDDQFDFHTYCMRKMTLRAYVDLLRLEDILRRHAFYFKAARSAIEIYLKLYDNPLTNESKQQEINSENLSAKELKKMLSKQRRAQKKAKLEEERKHAERERQQKNQKKKRDEEEEEASGLKEELIPEKLERVENPLEEAVKFLIPLKNLVADNIDTHLLAFEIYFRKGKFLLMLQSVKRAFAINSNNPWLHECLIRFSKSVSNHSNLPDIVSKVLSQEMQKIFVKKDLESFNEDFLKRNATSLQHLLSGAKMMYFLDKSRQEKAIAIATRLDETIKDKDVKTLIKVSEALLDGSFGNCSSQYEEYRMACHNLLPFTSAFLPAVNEVDNPNVALNHTANYDVLANEI

SEQ ID NO: 32772 - protein, 530 aa, Homo sapiens
MPNVLLPPKESNLFKRILKCYEQKQYKNGLKFCKMILSNPKFAEHGETLAMKGLTLNCLGKKEEAYEFVRKGLRNDVKSHVCWHVYGLLQRSDKKYDEAIKCYRNALKLDKDNLQILRDLSLLQIQMRDLEGYRETRYQLLQLRPTQRASWIGYAIAYHLLKDYDMALKLLEEFRQTQQVPPNKIDYEYSELILYQNQVMREADLLQESLEHIEMYEKQICDKLLVEEIKGEILLKLGRLKEASEVFKNLIDRNAENWCYYEGLEKALQISTLEERLQIYEEISKQHPKAITPRRLPLTLVPGERFRELMDKFLRVNFSKGCPPLFTTLKSLYYNTEKVSIIQELVTNYEASLKTCDFFSPYENGEKEPPTTLLWVQYFLAQHFDKLGQYSLALDYINAAIASTPTLIELFYMKAKIYKHIGNLKEAAKWMDEAQSLDTADRFINSKCAKYMLRANMIKEAEEMCSKFTREGTSAMENLNEMQCMWFQTECISAYQRLGRYGDALKKCHEVERHSPSTWTTGGKEPQMHP

SEQ ID NO: 32773 - protein, 516 aa, Homo sapiens
MPNVLLPPKESNLFKRILKCYEQKQYKNGLKFCKMILSNPKFAEHGETLAMKGLTLNCLGKKEEAYEFVRKGLRNDVKSHVCWHVYGLLQRSDKKYDEAIKCYRNALKLDKDNLQILRDLSLLQIQMRDLEGYRETRYQLLQLRPTQRASWIGYAIAYHLLKDYDMALKLLEEFRQTQQVPPNKIDYEYSELILYQNQVMREADLLQESLEHIEMYEKQICDKLLVEEIKGEILLKLGRLKEASEVFKNLIDRNAENWCYYEGLEKALQISTLEERLQIYEEISKQHPKAITPRRLPLTLVPGERFRELMDKFLRVNFSKGCPPLFTTLKSLYYNTEKVSIIQELVTNYEASLKTCDFFSPYENGEKEPPTTLLWVQYFLAQHFDKLGQYSLALDYINAAIASTPTLIELFYMKAKIYKHIGNLKEAAKWMDEAQSLDTADRFINSKCAKYMLRANMIKEAEEMCSKFTREGTSAMENLNEMQCMWFQTECISAYQRLGRYGDALKKCHEVERVSC

SEQ ID NO: 32774 - protein, 429 aa, Homo sapiens
MPNVLLPPKESNLFKRILKCYEQKQYKNGLKFCKMILSNPKFAEHGETLAMKGLTLNCLGKKEEAYEFVRKGLRNDVKSHVCWHVYGLLQRSDKKYDEAIKCYRNALKLDKDNLQILRDLSLLQIQMRDLEGYRETRYQLLQLRPTQRASWIGYAIAYHLLKDYDMALKLLEEFRQTQQVPPNKIDYEYSELILYQNQVMREADLLQESLEHIEMYEKQICDKLLVEEIKGEILLKLGRLKEASEVFKNLIDRNAENWCYYEGLEKALQISTLEERLQIYEEISKQHPKAITPRRLPLTLVPGERFRELMDKFLRVNFSKGCPPLFTTLKSLYYNTEKVSIIQELVTNYEASLKTCDFFSPYENGEKEPPTTLLWVQYFLAQHFDKLGQYSLALDYINAAIASTPTLIELFYMKAKIYKVKSESCFLSS

SEQ ID NO: 32775 - protein, 311 aa, Homo sapiens
MPNVLLPPKESNLFKRILKCYEQKQYKNGLKFCKMILSNPKFAEHGETLAMKGLTLNCLGKKEEAYEFVRKGLRNDVKSHVCWHVYGLLQRSDKKYDEAIKCYRNALKLDKDNLQILRDLSLLQIQMRDLEGYRETRYQLLQLRPTQRASWIGYAIAYHLLKDYDMALKLLEEFRQTQQVPPNKIDYEYSELILYQNQVMREADLLQESLEHIEMYEKQICDKLLVEEIKGEILLKLGRLKEASEVFKNLIDRNAENWCYYEGLEKALQISTLEERLQIYEEISKQHPKAITPRRLPLTLVPGFYNPGTCY

SEQ ID NO: 32776 - protein, 442 aa, Homo sapiens
MALPSRILLWKLVLLQSSAVLLHSGSSVPAAAGSSVVSESAVSWEAGARAVLRCQSPRMVWTQDRLHDRQRVLHWDLRGPGGGPARRLLDLYSAGEQRVYEARDRGRLELSASAFDDGNFSLLIRAVEETDAGLYTCNLHHHYCHLYESLAVRLEVTDGPPATPAYWDGEKEVLAVARGAPALLTCVNRGHVWTDRHVEEAQQVVHWDRQPPGVPHDRADRLLDLYASGERRAYGPLFLRDRVAVGADAFERGDFSLRIEPLEVADEGTYSCHLHHHYCGLHERRVFHLTVAEPHAEPPPRGSPGNGSSHSGAPGPDPTLARGHNVINVIVPESRAHFFQQLGYVLATLLLFILLLVTVLLAARRRRGGYEYSDQKSGKSKGKDVNLAEFAVAAGDQMLYRSEDIQLDYKNNILKERAELAHSPLPAKYIDLDKGFRKENCK

SEQ ID NO: 32777 - protein, 450 aa, Homo sapiens
MALPSRILLWKLVLLQSSAVLLHSGSSVPAAAGSSVVSESAVSWEAGARAVLRCQSPRMVWTQDRLHDRQRVLHWDLRGPGGGPARRLLDLYSAGEQRVYEARDRGRLELSASAFDDGNFSLLIRAVEETDAGLYTCNLHHHYCHLYESLAVRLEVTDGPPATPAYWDGEKEVLAVARGAPALLTCVNRGHVWTDRHVEEAQQVVHWDRQPPGVPHDRADRLLDLYASGERRAYGPLFLRDRVAVGADAFERGDFSLRIEPLEVADEGTYSCHLHHHYCGLHERRVFHLTVAEPHAEPPPRGSPGNGSSHSGAPGPDPTLARGHNVINVIVPESRAHFFQQLGYVLATLLLFILLLVTVLLAARRRRGGYEYSDQKSGKSKGKDVNLAEFAVAAGDQMLYRSEDIQLASSPPTDYKNNILKERAELAHSPLPAKYIDLDKDPSGLCPLGA

SEQ ID NO: 32778 - protein, 433 aa, Homo sapiens
MIRCAATGSAVLLHSGSSVPAAAGSSVVSESAVSWEAGARAVLRCQSPRMVWTQDRLHDRQRVLHWDLRGPGGGPARRLLDLYSAGEQRVYEARDRGRLELSASAFDDGNFSLLIRAVEETDAGLYTCNLHHHYCHLYESLAVRLEVTDGPPATPAYWDGEKEVLAVARGAPALLTCVNRGHVWTDRHVEEAQQVVHWDRQPPGVPHDRADRLLDLYASGERRAYGPLFLRDRVAVGADAFERGDFSLRIEPLEVADEGTYSCHLHHHYCGLHERRVFHLTVAEPHAEPPPRGSPGNGSSHSGAPGPDPTLARGHNVINVIVPESRAHFFQQLGYVLATLLLFILLLVTVLLAARRRRGGYEYSDQKSGKSKGKDVNLAEFAVAAGDQMLYRSEDIQLDYKNNILKERAELAHSPLPAKYIDLDKGFRKENCK

SEQ ID NO: 32779 - protein, 341 aa, Homo sapiens
MALPSRILLWKLVLLQSSAVLLHSAVEETDAGLYTCNLHHHYCHLYESLAVRLEVTDGPPATPAYWDGEKEVLAVARGAPALLTCVNRGHVWTDRHVEEAQQVVHWDRQPPGVPHDRADRLLDLYASGERRAYGPLFLRDRVAVGADAFERGDFSLRIEPLEVADEGTYSCHLHHHYCGLHERRVFHLTVAEPHAEPPPRGSPGNGSSHSGAPGPDPTLARGHNVINVIVPESRAHFFQQLGYVLATLLLFILLLVTVLLAARRRRGGYEYSDQKSGKSKGKDVNLAEFAVAAGDQMLYRSEDIQLDYKNNILKERAELAHSPLPAKYIDLDKGFRKENCK

SEQ ID NO: 32780 - protein, 658 aa, Homo sapiens
MGRRRAPAGGSLGRALMRHQTQRSRSHRHTDSWLHTSELNDGYDWGRLNLQSVTEQSSLDDFLATAELAGTEFVAEKLNIKFVPAEARTGLLSFEESQRIKKLHEENKQFLCIPRRPNWNQNTTPEELKQAEKDNFLEWRRQLVRLEEEQKLILTPFERNLDFWRQLWRVIERSDIVVQIVDARNPLLFRCEDLECYVKEMDANKENVILINKADLLTAEQRSAWAMYFEKEDVKVIFWSALAGAIPLNGDSEEEANRDDRQSNTTKFGHSSFDQAEISHSESEHLPARDSPSLSENPTTDEDDSEYEDCPEEEEDDWQTCSEEDGPKEEDCSQDWKESSTADSEARSRKTPQKRQIHNFSHLVSKQELLELFKELHTGRKVKDGQLTVGLVGYPNVGKSSTINTIMGNKKVSVSATPGHTKHFQTLYVEPGLCLCDCPGLVMPSFVSTKAEMTCSGILPIDQMRDHVPPVSLVCQNIPRHVLEATYGINIITPREDEDPHRPPTSEELLTAYGYMRGFMTAHGQPDQPRSARYILKDYVSGKLLYCHPPPGRDPVTFQHQHQRLLENKMNSDEIKMQLGRNKKAKQIENIVDKTFFHQENVRALTKGVQAVMGYKPGSGVVTASTASSENGAGKPWKKHGNRNKKEKSRRLYKHLDM

SEQ ID NO: 32781 - protein, 1097 aa, Homo sapiens
MMDIYVCLKRPSWMVDNKRMRTASNFQWLLSTFILLYLMNQVNSQKKGAPHDLKCVTNNLQVWNCSWKAPSGTGRGTDYEVCIENRSRSCYQLEKTSIKIPALSHGDYEITINSLHDFGSSTSKFTLNEQNVSLIPDTPEILNLSADFSTSTLYLKWNDRGSVFPHRSNVIWEIKVLRKESMELVKLVTHNTTLNGKDTLHHWSWASDMPLECAIHFVEIRCYIDNLHFSGLEEWSDWSPVKNISWIPDSQTKVFPQDKVILVGSDITFCCVSQEKVLSALIGHTNCPLIHLDGENVAIKIRNISVSASSGTNVVFTTEDNIFGTVIFAGYPPDTPQQLNCETHDLKEIICSWNPGRVTALVGPRATSYTLVESFSGKYVRLKRAEAPTNESYQLLFQMLPNQEIYNFTLNAHNPLGRSQSTILVNITEKVYPHTPTSFKVKDINSTAVKLSWHLPGNFAKINFLCEIEIKKSNSVQEQRNVTIKGVENSSYLVALDKLNPYTLYTFRIRCSTETFWKWSKWSNKKQHLTTEASPSKGPDTWREWSSDGKNLIIYWKPLPINEANGKILSYNVSCSSDEETQSLSEIPDPQHKAEIRLDKNDYIISVVAKNSVGSSPPSKIASMEIPNDDLKIEQVVGMGKGILLTWHYDPNMTCDYVIKWCNSSRSEPCLMDWRKVPSNSTETVIESDEFRPGIRYNFFLYGCRNQGYQLLRSMIGYIEELAPIVAPNFTVEDTSADSILVKWEDIPVEELRGFLRGYLFYFGKGERDTSKMRVLESGRSDIKVKNITDISQKTLRIADLQGKTSYHLVLRAYTDGGVGPEKSMYVVTKENSVGLIIAILIPVAVAVIVGVVTSILCYRKREWIKETFYPDIPNPENCKALQFQKSVCEGSSALKTLEMNPCTPNNVEVLETRSAFPKIEDTEIISPVAERPEDRSDAEPENHVVVSYCPPIIEEEIPNPAADEAGGTAQVIYIDVQSMYQPQAKPEEEQENDPVGGAGYKPQMHLPINSTVEDIAAEEDLDKTAGYRPQANVNTWNLVSPDSPRSIDSNSEIVSFGSPCSINSRQFLIPPKDEDSPKSNGGGWSFTNFFQNKPND

SEQ ID NO: 32782 - protein, 102 aa, Homo sapiens
MADDVDQQQTTNTVEEPLDLIRLSLDERIYVKMRNDRELRGRLHAYDQHLNMILGDVEETVTTIEIDEETYEEIYKSTKRNIPMLFVRGDGVVLVAPPLRVG

SEQ ID NO: 32783 - protein, 259 aa, Homo sapiens
MDPPAEKPGEAGGLQITPQLLKSRTGEFSLESILLLKLRGLGLADLGCLGECLGLEWLDLSGNALTHLGPLASLRQLAVLNVSNNRLTGLEPLATCENLQSLNAAGNLLATPGQLQCLAGLPCLEYLRLRDPLARLSNPLCANPSYWAAVRELLPGLKVIDGERVIGRGSEFYQLCRDLDSSLRPSSSPGPRATEAQPWVEPGYWESWPSRSSSILEEACRQFQDTLQECWDLDRQASDSLAQAEQVLSSAGPTSSFVF

SEQ ID NO: 32784 - protein, 728 aa, Homo sapiens
MATPGSEPQPFVPALSVATLHPLHHPHHHHHHHQHHGGTGAPGGAGGGGGGSGGFNLPLNRGLERALEEAANSGGLNLSARKLKEFPRTAAPGHDLSDTVQADLSKNRLVEVPMELCHFVSLEILNLYHNCIRVIPEAIVNLQMLTYLNLSRNQLSALPACLCGLPLKVLIASNNKLGSLPEEIGQLKQLMELDVSCNEITALPQQIGQLKSLRELNVRRNYLKVLPQELVDLSLVKFDFSCNKVLVIPICFREMKQLQVLLLENNPLQSPPAQICTKGKVHIFKYLSIQACQIKTADSLYLHTMERPHLHQHVEDGKKDSDSGVGSDNGDKRLSATEPSDEDTVSLNVPMSNIMEEEQIIKEDSCHRLSPVKGEFHQEFQPEPSLLGDSTNSGEERDQFTDRADGLHSEFMNYKARAEDCEELLRIEEDVHWQTEGIISSSKDQDMDIAMIEQLREAVDLLQDPNGLSTDITERSVLNLYPMGSAEALELQDSALNGQIQLETSPVCEVQSDLTLQSNGSQYSPNEIRENSPAVSPTTNSTAPFGLKPRSVFLRPQRNLESIDPQFTIRRKMEQMREEKELVEQLRESIEMRLKVSLHEDLGAALMDGVVLCHLVNHIRPRSVASIHVPSPAVPKLSMAKCRRNVENFLEACRKLGVPEADLCSPCDILQLDFRHIRKTVDTLLALGEKAPPPTSALRSRDLIGFCLVHILFIVLVYITYHWNALSA

SEQ ID NO: 32785 - protein, 696 aa, Homo sapiens
MATPGSEPQPFVPALSVATLHPLHHPHHHHHHHQHHGGTGAPGGAGGGGGGSGGFNLPLNRGLERALEEAANSGGLNLSARKLKEFPRTAAPGHDLSDTVQADLSKNRLVEVPMELCHFVSLEILNLYHNCIRVIPEAIVNLQMLTYLNLSRNQLSALPACLCGLPLKVLIASNNKLGSLPEEIGQLKQLMELDVSCNEITALPQQIGQLKSLRELNVRRNYLKVLPQELVDLSLVKFDFSCNKVLVIPICFREMKQLQVLLLENNPLQSPPAQICTKGKVHIFKYLSIQACQIKTADSLYLHTMERPHLHQHVEDGKKDSDSGVGSDNGDKRLSATEPSDEDTVSLNVPMSNIMEEEQIIKEDSCHRLSPVKGEFHQEFQPEPSLLGDSTNSGEERDQFTDRADGLHSEFMNYKARAEDCEELLRIEEDVHWQTEGIISSSKDQDMDIAMIEQLREAVDLLQDPNGLSTDITERSVLNLYPMGSAEALELQDSALNGQIQLETSPVCEVQSDLTLQSNGSQYSPNEIRENSPAVSPTTNSTAPFGLKPRSVFLRPQRNLESIDPQFTIRRKMEQMREEKELVEQLRESIEMRLKVSLHEDLGAALMDGVVLCHLVNHIRPRSVASIHVPSPAVPKLSMAKCRRNVENFLEACRKLGVPEEKLCLPHHILEEKGLVKVGITIQALLDITVTKALFT

SEQ ID NO: 32786 - protein, 763 aa, Homo sapiens
MATPGSEPQPFVPALSVATLHPLHHPHHHHHHHQHHGGTGAPGGAGGGGGGSGGFNLPLNRGLERALEEAANSGGLNLSARKLKEFPRTAAPGHDLSDTVQADLSKNRLVEVPMELCHFVSLEILNLYHNCIRVIPEAIVNLQMLTYLNLSRNQLSALPACLCGLPLKVLIASNNKLGSLPEEIGQLKQLMELDVSCNEITALPQQIGQLKSLRELNVRRNYLKVLPQELVDLSLVKFDFSCNKVLVIPICFREMKQLQVLLLENNPLQSPPAQICTKGKVHIFKYLSIQACQIKTADSLYLHTMERPHLHQHVEDGKKDSDSGVGSDNGDKRLSATEPSDEDTVSLNVPMSNIMEEEQIIKEDSCHRLSPVKGEFHQEFQPEPSLLGDSTNSGEERDQFTDRADGLHSEFMNYKARAEDCEELLRIEEDVHWQTEGIISSSKDQDMDIAMIEQLREAVDLLQDPNGLSTDITERSVLNLYPMGSAEALELQDSALNGQIQLETSPVCEVQSDLTLQSNGSQYSPNEIRENSPAVSPTTNSTAPFGLKPRSDPALILPPISFNTLTQAQTWDSSSYSVPSEGDSDNVFLRPQRNLESIDPQFTIRRKMEQMREEKELVEQLRESIEMRLKVSLHEDLGAALMDGVVLCHLVNHIRPRSVASIHVPSPAVPKLSMAKCRRNVENFLEACRKLGVPEADLCSPCDILQLDFRHIRKTVDTLLALGEKAPPPTSALRSRDLIGFCLVHILFIVLVYITYHWNALSA

SEQ ID NO: 32787 - protein, 145 aa, Homo sapiens
MLSVQPDTKPKGCAGCNRKIKDRYLLKALDKYWHEDCLKCACCDCRLGEVGSTLYTKANLILCRRDYLRLFGVTGNCAACSKLIPAFEMVMRAKDNVYHLDCFACQLCNQRFCVGDKFFLKNNMILCQTDYEEGLMKEGYAPQVR

SEQ ID NO: 32788 - protein, 167 aa, Homo sapiens
MLSVQPDTKPKGCAGCNRKIKDRYLLKALDKYWHEDCLKCACCDCRLGEHLKRCGSIYIHAAHTEIGICVTLEWPLPFVIIDFSQQITIAWLFGVTGNCAACSKLIPAFEMVMRAKDNVYHLDCFACQLCNQRFCVGDKFFLKNNMILCQTDYEEGLMKEGYAPQVR

SEQ ID NO: 32789 - protein, 156 aa, Homo sapiens
MQKKEKSFGIQMLSVQPDTKPKGCAGCNRKIKDRYLLKALDKYWHEDCLKCACCDCRLGEVGSTLYTKANLILCRRDYLRLFGVTGNCAACSKLIPAFEMVMRAKDNVYHLDCFACQLCNQRFCVGDKFFLKNNMILCQTDYEEGLMKEGYAPQVR

SEQ ID NO: 32790 - protein, 163 aa, Homo sapiens
MLMEGGRAAAARNVSSIQMLSVQPDTKPKGCAGCNRKIKDRYLLKALDKYWHEDCLKCACCDCRLGEVGSTLYTKANLILCRRDYLRLFGVTGNCAACSKLIPAFEMVMRAKDNVYHLDCFACQLCNQRFCVGDKFFLKNNMILCQTDYEEGLMKEGYAPQVR

SEQ ID NO: 32791 - protein, 307 aa, Homo sapiens
MTKAGSKGGNLRDKLDGNELDLSLSDLNEVPVKELAALPKATILDLSCNKLTTLPSDFCGLTHLVKLDLSKNKLQQLPADFGRLVNLQHLDLLNNKLVTLPVSFAQLKNLKWLDLKDNPLDPVLAKVAGDCLDEKQCKQCANKVLQHMKAVQADQERERQRRLEVEREAEKKREAKQRAKEAQERELRKREKAEEKERRRKEYDALKAAKREQEKKPKKEANQAPKSKSGSRPRKPPPRKHTRSWAVLKLLLLLLLFGVAGGLVACRVTELQQQPLCTSVNTIYDNAVQGLRRHEILQWVLQTDSQQ

SEQ ID NO: 32792 - protein, 122 aa, Homo sapiens
MTWLDKGVWTQEDENSCSFSESDFPGCRDQINPSIPSIWTAVSGMMISLEVRWWIKGKQGYVISLGHALSPRLECSGTFSAHCILGLPGGSSYPPASVSQVVGTTALYLVEEAWAEAGKMRS

SEQ ID NO: 32793 - protein, 581 aa, Homo sapiens
MPLKHYLLLLVGCQAWGAGLAYHGCPSECTCSRASQVECTGARIVAVPTPLPWNAMSLQILNTHITELNESPFLNISALIALRIEKNELSRITPGAFRNLGSLRYLSLANNKLQVLPIGLFQGLDSLESLLLSSNQLLQIQPAHFSQCSNLKELQLHGNHLEYIPDGAFDHLVGLTKLNLGKNSLTHISPRVFQHLGNLQVLRLYENRLTDIPMGTFDGLVNLQELALQQNQIGLLSPGLFHNNHNLQRLYLSNNHISQLPPSVFMQLPQLNRLTLFGNSLKELSPGIFGPMPNLRELWLYDNHISSLPDNVFSNLRQLQVLILSRNQISFISPGAFNGLTELRELSLHTNALQDLDGNVFRMLANLQNISLQNNRLRQLPGNIFANVNGLMAIQLQNNQLENLPLGIFDHLGKLCELRLYDNPWRCDSDILPLRNWLLLNQPRLGTDTVPVCFSPANVRGQSLIIINVNVAVPSVHVPEVPSYPETPWYPDTPSYPDTTSVSSTTELTSPVEDYTDLTTIQVTDDRSVWGMTQAQSGLAIAAIVIGIVALACSLAACVGCCCCKKRSQAVLMQMKAPNEC

SEQ ID NO: 32794 - protein, 587 aa, Homo sapiens
MPLDKAMPLKHYLLLLVGCQAWGAGLAYHGCPSECTCSRASQVECTGARIVAVPTPLPWNAMSLQILNTHITELNESPFLNISALIALRIEKNELSRITPGAFRNLGSLRYLSLANNKLQVLPIGLFQGLDSLESLLLSSNQLLQIQPAHFSQCSNLKELQLHGNHLEYIPDGAFDHLVGLTKLNLGKNSLTHISPRVFQHLGNLQVLRLYENRLTDIPMGTFDGLVNLQELALQQNQIGLLSPGLFHNNHNLQRLYLSNNHISQLPPSVFMQLPQLNRLTLFGNSLKELSPGIFGPMPNLRELWLYDNHISSLPDNVFSNLRQLQVLILSRNQISFISPGAFNGLTELRELSLHTNALQDLDGNVFRMLANLQNISLQNNRLRQLPGNIFANVNGLMAIQLQNNQLENLPLGIFDHLGKLCELRLYDNPWRCDSDILPLRNWLLLNQPRLGTDTVPVCFSPANVRGQSLIIINVNVAVPSVHVPEVPSYPETPWYPDTPSYPDTTSVSSTTELTSPVEDYTDLTTIQVTDDRSVWGMTQAQSGLAIAAIVIGIVALACSLAACVGCCCCKKRSQAVLMQMKAPNEC

SEQ ID NO: 32795 - protein, 353 aa, Homo sapiens
MNECHYDKHMDFFYNRSNTDTVDDWTGTKLVIVLCVGTFFCLFIFFSNSLVIAAVIKNRKFHFPFYYLLANLAAADFFAGIAYVFLMFNTGPVSKTLTVNRWFLRQGLLDSSLTASLTNLLVIAVERHMSIMRMRVHSNLTKKRVTLLILLVWAIAIFMGAVPTLGWNCLCNISACSSLAPIYSRSYLVFWTVSNLMAFLIMVVVYLRIYVYVKRKTNVLSPHTSGSISRRRTPMKLMKTVMTVLGAFVVCWTPGLVVLLLDGLNCRQCGVQHVKRWFLLLALLNSVVNPIIYSYKDEDMYGTMKKMICCFSQENPERRPSRIPSTVLSRSDTGSQYIEDSISQGAVCNKSTS

SEQ ID NO: 32796 - protein, 1202 aa, Homo sapiens
MMCEVMPTISEAEGPPGGGGGHGSGSPSQPDADSHFEQLMVSMLEERDRLLDTLRETQETLALTQGKLHEVGHERDSLQRQLNTALPQEFAALTKELNVCREQLLEREEEIAELKAERNNTRLLLEHLECLVSRHERSLRMTVVKRQAQSPAGVSSEVEVLKALKSLFEHHKALDEKVRERLRVALERCSLLEEELGATHKELMILKEQNNQKKTLTDGVLDINHEQENTPSTSGKRSSDGSLSHEEDLAKVIELQEIISKQSREQSQMKERLASLSSHVTELEEDLDTARKDLIKSEEMNTKLQRDVREAMAQKEDMEERITTLEKRYLAAQREATSVHDLNDKLENEIANKDSMHRQTEDKNRQLQERLELAEQKLQQTLRKAETLPEVEAELAQRVAALSKAEERHGNIEERLRQMEAQLEEKNQELQRARQREKMNEEHNKRLSDTVDKLLSESNERLQLHLKERMAALEDKNSLLREVESAKKQLEETQHDKDQLVLNIEALRAELDHMRLRGASLHHGRPHLGSVPDFRFPMADGHTDSYSTSAVLRRPQKGRLAALRDEPSKVQTLNEQDWERAQQASVLANVAQAFESDADVSDGEDDRDTLLSSVDLLSPSGQADAHTLAMMLQEQLDAINKEIRLIQEEKENTEQRAEEIESRVGSGSLDNLGRFRSMSSIPPYPASSLASSSPPGSGRSTPRRIPHSPAREVDRLGVMTLLPPSREEVRDDKTTIKCETSPPSSPRALRLDRLHKGALHTVSHEDIRDIRNSTGSQDGPVSNPSSSNSSQDSLHKAPKKKGIKSSIGRLFGKKEKGRPGQTGKEALGQAGVSETDNSSQDALGLSKLGGQAEKNRKLQKKHELLEEARRQGLPFAQWDGPTVVVWLELWVGMPAWYVAACRANVKSGAIMSALSDTEIQREIGISNPLHRLKLRLAIQEIMSLTSPSAPPTSRTTLAYGDMNHEWIGNEWLPSLGLPQYRSYFMECLVDARMLDHLTKKDLRGQLKMVDSFHRNSFQCGIMCLRRLNYDRKELERKREESQSEIKDVLVWSNDRVIRWILSIGLKEYANNLIESGVHGALLALDETFDFSALALLLQIPTQNTQARAVLEREFNNLLVMGTDRRFDEDDDKSFRRAPSWRKKFRPKDIRGLAAGSAETLPANFRVTSSMSSPSMQPKKMQMDGNVSGTQRLDSATVRTYSC

SEQ ID NO: 32797 - protein, 1185 aa, Homo sapiens
MMCEVMPTISEAEGPPGGGGGHGSGSPSQPDADSHFEQLMVSMLEERDRLLDTLRETQETLALTQGKLHEVGHERDSLQRQLNTALPQEFAALTKELNVCREQLLEREEEIAELKAERNNTRLLLEHLECLVSRHERSLRMTVVKRQAQSPAGVSSEVEVLKALKSLFEHHKALDEKVRERLRVALERCSLLEEELGATHKELMILKEQNNQKKTLTDGVLDINHEQENTPSTSGKRSSDGSLSHEEDLAKVIELQEIISKQSREQSQMKERLASLSSHVTELEEDLDTARKDLIKSEEMNTKLQRDVREAMAQKEDMEERITTLEKRYLAAQREATSVHDLNDKLENEIANKDSMHRQTEDKNRQLQERLELAEQKLQQTLRKAETLPEVEAELAQRVAALSKAEERHGNIEERLRQMEAQLEEKNQELQRARQREKMNEEHNKRLSDTVDKLLSESNERLQLHLKERMAALEDKNSLLREVESAKKQLEETQHDKDQLVLNIEALRAELDHMRLRGASLHHGRPHLGSVPDFRFPMADGHTDSYSTSAVLRRPQKGRLAALRDEPSKVQTLNEQDWERAQQASVLANVAQAFESDADVSDGEDDRDTLLSSVDLLSPSGQADAHTLAMMLQEQLDAINKEIRLIQEEKENTEQRAEEIESRVGSGSLDNLGRFRSMSSIPPYPASSLASSSPPGSGRSTPRRIPHSPAREVDRLGVMTLLPPSREEVRDDKTTIKCETSPPSSPRALRLDRLHKGALHTVSHEDIRDIRNSTGSQDGPVSNPSSSNSSQDSLHKAPKKKGIKSSIGRLFGKKEKGRPGQTGKEALGQAGVSETDNSSQDALGLSKLGGQAEKNRKLQKKHELLEEARRQGLPFAQWDGPTVVVWLELWVGMPAWYVAACRANVKSGAIMSALSDTEIQREIGISNPLHRLKLRLAIQEIMSLTSPSAPPTSRTTLAYGDMNHEWIGNEWLPSLGLPQYRSYFMECLVDARMLDHLTKKDLRGQLKMVDSFHRNSFQCGIMCLRRLNYDRKELERKREESQSEIKDVLVWSNDRVIRWILSIGLKEYANNLIESGVHGALLALDETFDFSALALLLQIPTQNTQARAVLEREFNNLLVMGTDRRFDEDDDKSFRRAPSWRKKFRPKDIRGLAAGSAETLPANFRVTSSMSSPSMQPKKMQMDGM

SEQ ID NO: 32798 - protein, 370 aa, Homo sapiens
MKVTGITILFWPLSMILLSDKIQSSKREVQCNFTEKNYTLIPADIKKDVTILDLSYNQITLNGTDTRVLQTYFLLTELYLIENKVTILHNNGFGNLSSLEILNICRNSIYVIQQGAFLGLNKLKQLYLCQNKIEQLNADVFVPLRSLKLLNLQGNLISYLDVPPLFHLELITLYGNLWNCSCSLFNLQNWLNTSNVTLENENITMCSYPNSLQSYNIKTVPHKAECHSKFPSSVTEDLYIHFQPISNSIFNSSSNNLTRNSEHEPLGKSWAFLVGVVVTVLTTSLLIFIAIKCPIWYNILLSYNHHRLEEHEAETYEDGFTGNPSSLSQIPETNSEETTVIFEQLHSFVVDDDGFIEDKYIDIHELCEEN

SEQ ID NO: 32799 - protein, 896 aa, Homo sapiens
MNYVGQLAGQVIVTVKELYKGINQATLSGCIDVIVVQQQDGSYQCSPFHVRFGKLGVLRSKEKVIDIEINGSAVDLHMKLGDNGEAFFVEETEEEYEKLPAYLATSPIPTEDQFFKDIDTPLVKSGGDETPSQSSDISHVLETETIFTPSSVKKKKRRRKKYKQDSKKEEQAASAAAEDTCDVGVSSDDDKGAQAARGSSNASLKEEECKEPLLFHSGDHYPLSDGDWSPLETTYPQTACPKSDSELEVKPAESLLRSESHMEWTWGGFPESTKVSKRERSDHHPRTATITPSENTHFRVIPSEDNLISEVEKDASMEDTVCTIVKPKPRALGTQMSDPTSVAELLEPPLESTQISSMLDADHLPNAALAEAPSESKPAAKVDSPSKKKGVHKRSQHQGPDDIYLDDLKGLEPEVAALYFPKSESEPGSRQWPESDTLSGSQSPQSVGSAAADSGTECLSDSAMDLPDVTLSLCGGLSENGEISKEKFMEHIITYHEFAENPGLIDNPNLVIRIYNRYYNWALAAPMILSLQVFQKSLPKATVESWVKDKMPKKSGRWWFWRKRESMTKQLPESKEGKSEAPPASDLPSSSKEPAGARPAENDSSSDEGSQELEESITVDPIPTEPLSHGSTTSYKKSLRLSSDQIAKLKLHDGPNDVVFSITTQYQGTCRCAGTIYLWNWNDKIIISDIDGTITKSDALGQILPQLGKDWTHQGIAKLYHSINENGYKFLYCSARAIGMADMTRGYLHWVNDKGTILPRGPLMLSPSSLFSAFHREVIEKKPEKFKIECLNDIKNLFAPSKQPFYAAFGNRPNDVYAYTQVGVPDCRIFTVNPKGELIQERTKGNKSSYHRLSELVEHVFPLLSKEQNSAFPCPEFSSFCYWRDPIPEVDLDDLS

SEQ ID NO: 32800 - protein, 1119 aa, Homo sapiens
MSAPSLRARAAGLGLLLCAVLGRAGRSDSGGRGELGQPSGVAAERPCPTTCRCLGDLLDCSRKRLARLPEPLPSWVARLDLSHNRLSFIKASSMSHLQSLREVKLNNNELETIPNLGPVSANITLLSLAGNRIVEILPEHLKEFQSLETLDLSSNNISELQTAFPALQLKYLYLNSNRVTSMEPGYFDNLANTLLVLKLNRNRISAIPPKMFKLPQLQHLELNRNKIKNVDGLTFQGLGALKSLKMQRNGVTKLMDGAFWGLSNMEILQLDHNNLTEITKGWLYGLLMLQELHLSQNAINRISPDAWEFCQKLSELDLTFNHLSRLDDSSFLGLSLLNTLHIGNNRVSYIADCAFRGLSSLKTLDLKNNEISWTIEDMNGAFSGLDKLRRLILQGNRIRSITKKAFTGLDALEHLDLSDNAIMSLQGNAFSQMKKLQQLHLNTSSLLCDCQLKWLPQWVAENNFQSFVNASCAHPQLLKGRSIFAVSPDGFVCDDFPKPQITVQPETQSAIKGSNLSFICSAASSSDSPMTFAWKKDNELLHDAEMENYAHLRAQGGEVMEYTTILRLREVEFASEGKYQCVISNHFGSSYSVKAKLTVNMLPSFTKTPMDLTIRAGAMARLECAAVGHPAPQIAWQKDGGTDFPAARERRMHVMPEDDVFFIVDVKIEDIGVYSCTAQNSAGSISANATLTVLETPSFLRPLLDRTVTKGETAVLQCIAGGSPPPKLNWTKDDSPLVVTERHFFAAGNQLLIIVDSDVSDAGKYTCEMSNTLGTERGNVRLSVIPTPTCDSPQMTAPSLDDDGWATVGVVIIAVVCCVVGTSLVWVVIIYHTRRRNEDCSITNTDETNLPADIPSYLSSQGTLADRQDGYVSSESGSHHQFVTSSGAGFFLPQHDSSGTCHIDNSSEADVEAATDLFLCPFLGSTGPMYLKGNVYGSDPFETYHTGCSPDPRTVLMDHYEPSYIKKKECYPCSHPSEESCERSFSNISWPSHVRKLLNTSYSHNEGPGMKNLCLNKSSLDFSANPEPASVASSNSFMGTFGKALRRPHLDAYSSFGQPSDCQPRAFYLKAHSSPDLDSGSEEDGKERTDFQEENHICTFKQTLENYRTPNFQSYDLDT

SEQ ID NO: 32801 - protein, 1059 aa, Homo sapiens
MVDVLLLFSLCLLFHISRPDLSHNRLSFIKASSMSHLQSLREVKLNNNELETIPNLGPVSANITLLSLAGNRIVEILPEHLKEFQSLETLDLSSNNISELQTAFPALQLKYLYLNSNRVTSMEPGYFDNLANTLLVLKLNRNRISAIPPKMFKLPQLQHLELNRNKIKNVDGLTFQGLGALKSLKMQRNGVTKLMDGAFWGLSNMEILQLDHNNLTEITKGWLYGLLMLQELHLSQNAINRISPDAWEFCQKLSELDLTFNHLSRLDDSSFLGLSLLNTLHIGNNRVSYIADCAFRGLSSLKTLDLKNNEISWTIEDMNGAFSGLDKLRRLILQGNRIRSITKKAFTGLDALEHLDLSDNAIMSLQGNAFSQMKKLQQLHLNTSSLLCDCQLKWLPQWVAENNFQSFVNASCAHPQLLKGRSIFAVSPDGFVCDDFPKPQITVQPETQSAIKGSNLSFICSAASSSDSPMTFAWKKDNELLHDAEMENYAHLRAQGGEVMEYTTILRLREVEFASEGKYQCVISNHFGSSYSVKAKLTVNMLPSFTKTPMDLTIRAGAMARLECAAVGHPAPQIAWQKDGGTDFPAARERRMHVMPEDDVFFIVDVKIEDIGVYSCTAQNSAGSISANATLTVLETPSFLRPLLDRTVTKGETAVLQCIAGGSPPPKLNWTKDDSPLVVTERHFFAAGNQLLIIVDSDVSDAGKYTCEMSNTLGTERGNVRLSVIPTPTCDSPQMTAPSLDDDGWATVGVVIIAVVCCVVGTSLVWVVIIYHTRRRNEDCSITNTDETNLPADIPSYLSSQGTLADRQDGYVSSESGSHHQFVTSSGAGFFLPQHDSSGTCHIDNSSEADVEAATDLFLCPFLGSTGPMYLKGNVYGSDPFETYHTGCSPDPRTVLMDHYEPSYIKKKECYPCSHPSEESCERSFSNISWPSHVRKLLNTSYSHNEGPGMKNLCLNKSSLDFSANPEPASVASSNSFMGTFGKALRRPHLDAYSSFGQPSDCQPRAFYLKAHSSPDLDSGSEEDGKERTDFQEENHICTFKQTLENYRTPNFQSYDLDT

SEQ ID NO: 32802 - protein, 198 aa, Homo sapiens
MEKYLSLSGNHSSNKRSLEGLSAFRSLEELILDNNQLGDDLVLPGLPRLHTLTLNKNRITDLENLLDHLAEVTPALEYLSLLGNVACPNELVSLEKDEEDYKRYRCFVLYKLPNLKFLDAQKVTRQEREEALVRGVFMKVVKPKASSEDVASSPERHYTPLPSASRELTSHQGVLGKCRYVYYGKNSEGNRFIRDDQL

SEQ ID NO: 32803 - protein, 397 aa, Homo sapiens
MLLETGLERDRARPGAAAVCTLGGTREIPLCAGCDQHILDRFILKALDRHWHSKCLKCSDCHTPLAERCFSRGESVYCKDDFFKRFGTKCAACQLGIPPTQVVRRAQDFVYHLHCFACVVCKRQLATGDEFYLMEDSRLVCKADYETAKQREAEATAKRPRTTITAKQLETLKSAYNTSPKPARHVREQLSSETGLDMRVVQVWFQNRRAKEKRLKKDAGRQRWGQYFRNMKRSRGGSKSDKDSVQEGQDSDAEVSFPDEPSLAEMGPANGLYGSLGEPTQALGRPSGALGNFSLEHGGLAGPEQYRELRPGSPYGVPPSPAAPQSLPGPQPLLSSLVYPDTSLGLVPSGAPGGPPPMRVLAGNGPSSDLSTGSSGGYPDFPASPASWLDEVDHAQF

SEQ ID NO: 32804 - protein, 402 aa, Homo sapiens
MEARGELGPARESAGGDLLLALLARRADLRREIPLCAGCDQHILDRFILKALDRHWHSKCLKCSDCHTPLAERCFSRGESVYCKDDFFKRFGTKCAACQLGIPPTQVVRRAQDFVYHLHCFACVVCKRQLATGDEFYLMEDSRLVCKADYETAKQREAEATAKRPRTTITAKQLETLKSAYNTSPKPARHVREQLSSETGLDMRVVQVWFQNRRAKEKRLKKDAGRQRWGQYFRNMKRSRGGSKSDKDSVQEGQDSDAEVSFPDEPSLAEMGPANGLYGSLGEPTQALGRPSGALGNFSLEHGGLAGPEQYRELRPGSPYGVPPSPAAPQSLPGPQPLLSSLVYPDTSLGLVPSGAPGGPPPMRVLAGNGPSSDLSTGSSGGYPDFPASPASWLDEVDHAQF

SEQ ID NO: 32805 - protein, 456 aa, Homo sapiens
MDSRLQEIRERQKLRRQLLAQQLGAESADSIGAVLNSKDEQREIAETRETCRASYDTSAPNAKRKYLDEGETDEDKMEEYKDELEMQQDEENLPYEEEIYKDSSTFLKGTQSLNPHNDYCQHFVDTGHRPQNFIRDVGLADRFEEYPKLRELIRLKDELIAKSNTPPMYLQADIEAFDIRELTPKFDVILLEPPLEEYYRETGITANEKCWTWDDIMKLEIDEIAAPRSFIFLWCGSGEGLDLGRVCLRKWGYRRCEDICWIKTNKNNPGKTKTLDPKAVFQRTKEHCLMGIKGTVKRSTDGDFIHANVDIDLIITEEPEIGNIEKPVEIFHIIEHFCLGRRRLHLFGRDSTIRPGWLTVGPTLTNSNYNAETYASYFSAPNSYLTGCTEEIERLRPKSPPPKSKSDRGGGAPRGGGRGGTSAGRGRERNRSNFRGERGGFRGGRGGAHRGGFPPR

SEQ ID NO: 32806 - protein, 274 aa, Homo sapiens
MGPELGWGHPRGGDVCSSDSFNEDNTAFAKQVRSERPFFSSNPELDNLMIQAIQVLRFHLLELEKGKMPIDLVIEDRDGGCREDFEDYPASCPSLPDQNNIWIRDHEDSGSVHLGTPGPSSGGLASQSGDNSSDQGVGLDTSVASPSSGGEDEDLDQEPRRNKKRGIFPKVATNIMRAWLFQHLSHPYPSEEQKKQLAQDTGLTILQVNNWFINARRRIVQPMIDQSNRTGQGAAFSPEGQPIGGYTETEPHVAFRAPASVGMSLNSEGEWHYL

SEQ ID NO: 32807 - protein, 303 aa, Homo sapiens
MAGAACEPVARPSLTSISSGELRSLWTCDCELALLPLAQLLRLQPGAFQLSGDQLVVARPGEPAAARGGFNVFGDGLVRLDGQLYRLSSYIKRYVELTNYCDYKDYRETILSKPMLFFINVQTKKDTSKERTYAFLVNTRHPKIRRQIEQGMDMVISSVIGESYRLQFDFQEAVKNFFPPGNEVVNGENLSFAYEFKADALFDFFYWFGLSNSVVKVNGKVLNLSSTSPEKKETIKLFLEKMSEPLIRRSSFSDRKFSVTSRGSIDDVFNCNLSPRSSLTEPLLAELPFPSVLESEETPNQFI

SEQ ID NO: 32808 - protein, 150 aa, Homo sapiens
MLFFINVQTKKDTSKERTYAFLVNTRHPKIRRQIEQGMDMVISSVIGESYRLQFDFQEAVKNFFPPGNEVVNGENLSFAYEFKADALFDFFYWFGLSNSVVKVNGKVLLGSIDDVFNCNLSPRSSLTEPLLAELPFPSVLESEETPNQFI

SEQ ID NO: 32809 - protein, 234 aa, Homo sapiens
MLRYPYFCRMYKECLSCWLESGIPNLGVWPKRIHTTAEKYREYEAREQTDQTQVQELHRSQDRDFETMAKLHIPVMVDEVVHCLSPQKGQIFLDMTFGSGGHTKAILQKESDIVLYALDRDPTAYALAEHLSELYPKQIRAMLGQFSQAEALLMKAGVQPGTFDGVLMDLGCSSMQLDTPERGSSLRKDGPLDIRMDGGRNISSLCYLYTERLTTAIYLYCHQDFPGSSHICEQ

SEQ ID NO: 32810 - protein, 233 aa, Homo sapiens
MGEPQQVSALPPPPMQYIKEYTDENIQEGLAPKPPPPIKDSYMMFGNQFQCDDLIIRPLESQGIERLHPMQFDHKKELRKLNMSILINFLDLLDILIRSPGSIKREEKLEDLKLLFVHVHHLINEYRPHQARETLRVMMEVQKRQRLETAERFQKHLERVIEMIQNCLASLPDDLPHSEAGMRVKTEPMDADDSNNCTGQNEHQRENSGHRRDQIIEKDAALCVLIDEMNERP

SEQ ID NO: 32811 - protein, 587 aa, Homo sapiens
MAEKGDCIASVYGYDLGGRFVDFQPLGFGVNGLVLSAVDSRACRKVAVKKIALSDARSMKHALREIKIIRRLDHDNIVKVYEVLGPKGTDLQGELFKFSVAYIVQEYMETDLARLLEQGTLAEEHAKLFMYQLLRGLKYIHSANVLHRDLKPANIFISTEDLVLKIGDFGLARIVDQHYSHKGYLSEGLVTKWYRSPRLLLSPNNYTKAIDMWAAGCILAEMLTGRMLFAGAHELEQMQLILETIPVIREEDKDELLRVMPSFVSSTWEVKRPLRKLLPEVNSEAIDFLEKILTFNPMDRLTAEMGLQHPYMSPYSCPEDEPTSQHPFRIEDEIDDIVLMAANQSQLSNWDTCSSRYPVSLSSDLEWRPDRCQDASEVQRDPRAGSAPLAEDVQVDPRKDSHSSSERFLEQSHSSMERAFEADYGRSCDYKVGSPSYLDKLLWRDNKPHHYSEPKLILDLSHWKQAAGAPPTATGLADTGAREDEPASLFLEIAQWVKSTQGGPEHASPPADDPERRLSASPPGRPAPVDGGASPQFDLDVFISRALKLCTKPEDLPDNKLGDLNGACIPEHPGDLVQTEAFSKERW

SEQ ID NO: 32812 - protein, 1479 aa, Homo sapiens
MGPGRPAPAPWPRHLLRCVLLLGCLHLGRPGAPGDAALPEPNVFLIFSHGLQGCLEAQGGQVRVTPACNTSLPAQRWKWVSRNRLFNLGTMQCLGTGWPGTNTTASLGMYECDREALNLRWHCRTLGDQLSLLLGARTSNISKPGTLERGDQTRSGQWRIYGSEEDLCALPYHEVYTIQGNSHGKPCTIPFKYDNQWFHGCTSTGREDGHLWCATTQDYGKDERWGFCPIKSNDCETFWDKDQLTDSCYQFNFQSTLSWREAWASCEQQGADLLSITEIHEQTYINGLLTGYSSTLWIGLNDLDTSGGWQWSDNSPLKYLNWESDQPDNPSEENCGVIRTESSGGWQNRDCSIALPYVCKKKPNATAEPTPPDRWANVKVECEPSWQPFQGHCYRLQAEKRSWQESKKACLRGGGDLVSIHSMAELEFITKQIKQEVEELWIGLNDLKLQMNFEWSDGSLVSFTHWHPFEPNNFRDSLEDCVTIWGPEGRWNDSPCNQSLPSICKKAGQLSQGAAEEDHGCRKGWTWHSPSCYWLGEDQVTYSEARRLCTDHGSQLVTITNRFEQAFVSSLIYNWEGEYFWTALQDLNSTGSFFWLSGDEVMYTHWNRDQPGYSRGGCVALATGSAMGLWEVKNCTSFRARYICRQSLGTPVTPELPGPDPTPSLTGSCPQGWASDTKLRYCYKVFSSERLQDKKSWVQAQGACQELGAQLLSLASYEEEHFVANMLNKIFGESEPEIHEQHWFWIGLNRRDPRGGQSWRWSDGVGFSYHNFDRSRHDDDDIRGCAVLDLASLQWVAMQCDTQLDWICKIPRGTDVREPDDSPQGRREWLRFQEAEYKFFEHHSTWAQAQRICTWFQAELTSVHSQAELDFLSHNLQKFSRAQEQHWWIGLHTSESDGRFRWTDGSIINFISWAPGKPRPVGKDKKCVYMTASREDWGDQRCLTALPYICKRSNVTKETQPPDLPTTALGGCPSDWIQFLNKCFQVQGQEPQSRVKWSEAQFSCEQQEAQLVTITNPLEQAFITASLPNVTFDLWIGLHASQRDFQWVEQEPLMYANWAPGEPSGPSPAPSGNKPTSCAVVLHSPSAHFTGRWDDRSCTEETHGFICQKGTDPSLSPSPAALPPAPGTELSYLNGTFRLLQKPLRWHDALLLCESRNASLAYVPDPYTQAFLTQAARGLRTPLWIGLAGEEGSRRYSWVSEEPLNYVGWQDGEPQQPGGCTYVDVDGAWRTTSCDTKLQGAVCGVSSGPPPPRRISYHGSCPQGLADSAWIPFREHCYSFHMELLLGHKEARQRCQRAGGAVLSILDEMENVFVWEHLQSYEGQSRGAWLGMNFNPKGGTLVWQDNTAVNYSNWGPPGLGPSMLSHNSCYWIQSNSGLWRPGACTNITMGVVCKLPRAEQSSFSPSALPENPAALVVVLMAVLLLLALLTAALILYRRRQSIERGAFEGARYSRSSSSPTEATEKNILVSDMEMNEQQE

SEQ ID NO: 32813 - protein, 183 aa, Homo sapiens
MSQKPAKEGPRLSKNQKYSEHFSIHCCPPFTFLNSKKEIVDRKYSICKSGCFYQKKEEDWICCACQKTRTSRRAKSPQRPKQQPAAPPAVVRAPAKPRSPPRSERQPRSPPRSERQPRSPPRSERQPRSPPRSERQPRPRPEVRPPPAKQRPPQKSKQQPRSSPLRGPGASRGGSPVKASRFW

SEQ ID NO: 32814 - protein, 182 aa, Homo sapiens
MSQKPAKEGPRLSKNQKYSEHFSIHCCPPFTFLNSKKEIVDRKYSICKSGCFYQKKEEDWICCACQKTRTSRRAKSPQRPKQQPAAPPAVVRAPAKPRSPPRSERQPRSPPRSERQPRSPPRSERQPRSPPRSERQPRPRPEVRPPPAKQRPPQKSKQQPRSSPLRGPGASRGGSPVKASRF

SEQ ID NO: 32815 - protein, 81 aa, Homo sapiens
MSQKPAKEGPRLSKNQKYSEHFSIHCCPPFTFLNSKKEIVDRKYSICKSGCFYQKKEEDWICCACQKTRLKRKIRPTPKKK

SEQ ID NO: 32816 - protein, 206 aa, Homo sapiens
MSQKPAKEGPRLSKNQKYSEHFSIHCCPPFTFLNSKKEIVDRKYSICKSGCFYQKKEEDWICCACQKTSSCQRRLSSRGEPWLPPPASFGPLRTSRRAKSPQRPKQQPAAPPAVVRAPAKPRSPPRSERQPRSPPRSERQPRSPPRSERQPRSPPRSERQPRPRPEVRPPPAKQRPPQKSKQQPRSSPLRGPGASRGGSPVKASRF

SEQ ID NO: 32817 - protein, 268 aa, Homo sapiens
MQREEKQLEASLDALLSQVADLKNSLGSFICKLENEYGRLTWPSVLDSFALLSGQLNTLNKVLKHEKTPLFRNQVIIPLVLSPDRDEDLMRQTEGRVPVFSHEVVPDHLRTKPDPEVEEQEKQLTTDAARIGADAAQKQIQSLNKMCSNLLEKISKEERESESGGLRPNKQTFNPTDTNALVAAVAFGKGLSNWRPSGSSGPGQAGQPGAGTILAGTSGLQQVQMAGAPSQQQPMLSGVQMAQAGQPGKMPSGIKTNIKSASMHPYQR

SEQ ID NO: 32818 - protein, 301 aa, Homo sapiens
MQREEKQLEASLDALLSQVADLKNSLGSFICKLENEYGRLTWPSVLDSFALLSGQLNTLNKVLKHEKTPLFRNQVIIPLVLSPDRDEDLMRQTEGRVPVFSHEVVPDHLRTKPDPEVEEQEKQLTTDAARIGADAAQKQIQSLNKMCSNLLEKISKEERESESGGLRPNKQTFNPTDTNALVAAVAFGKGLSNWRPSGSSGPGQAGQPGAGTILAGTSGLQQVQMAGAPSQQQPMLSGVQMAQAGQPGKMPSGIKTNIKSASMHPYQRPSCLGFILAIPLRRKVKKLLGQEGKKNAHLQLW

SEQ ID NO: 32819 - protein, 179 aa, Homo sapiens
MRQTEGRVPVFSHEVVPDHLRTKPDPEVEEQEKQLTTDAARIGADAAQKQIQSLNKMCSNLLEKISKEERESESGGLRPNKQTFNPTDTNALVAAVAFGKGLSNWRPSGSSGPGQAGQPGAGTILAGTSGLQQVQMAGAPSQQQPMLSGVQMAQAGQPGKMPSGIKTNIKSASMHPYQR

SEQ ID NO: 32820 - protein, 385 aa, Homo sapiens
MDVQKWYLRTSKLALALAIIRSKPADKSSREYTEHLAMLLSEEQSKWRSKVEILEAEVMQLRQKLLVSRLCSGSFKSGYVSSQLEAQEPKSSESTLTSMEDSGCDLSNEQRTESSDLSQHFVESCTPTHFPPLPLVKRPCAILQNPLSSHMQFLQYLLELKNLTESGNLKRDLTHFEKDSSTVSDSVFQLLDGLITFYRNPKLPFSRFWTEAVGTLASLISDYNLSSHILKKCSKKLEEFEKTLLHAILGNNHINQFQVQHYVSQSLVTLGNCSLLRKSIISLLLSEVNGFADDLGAINQEQASYDVSRYENIFYLFWVLEQLLQKETEEGNTSSIGHDDQEIKKFLQKHDETIFQLSDAFPLFTFYLWRVGILLSSAQIETLRK

SEQ ID NO: 32821 - protein, 381 aa, Homo sapiens
MGPIGAEADENQTVEEMKVEQYGPQTTPRGELVPDPEPELIDSTKLIEVQVVLILAYCSIILLGVIGNSLVIHVVIKFKSMRTVTNFFIANLAVADLLVNTLCLPFTLTYTLMGEWKMGPVLCHLVPYAQGLAVQVSTITLTVIALDRHRCIVYHLESKISKRISFLIIGLAWGISALLASPLAIFREYSLIEIIPDFEIVACTEKWPGEEKSIYGTVYSLSSLLILYVLPLGIISFSYTRIWSKLKNHVSPGAANDHYHQRRQKTTKMLVCVVVVFAVSWLPLHAFQLAVDIDSQVLDLKEYKLIFTVFHIIAMCSTFANPLLYGWMNSNYRKAFLSAFRCEQRLDAIHSEVSVTFKAKKNLEVRKNSGPNDSFTEATNV

SEQ ID NO: 32822 - protein, 375 aa, Homo sapiens; identical to SEQ ID NO: 23593

SEQ ID NO: 32823 - protein, 515 aa, Homo sapiens
MVLSQEEPDSARGTSEAQPLGPAPTGAAPPPGPGPSDSPEAAVEKVEVELAGPATAEPHEPPEPPEGGWGWLVMLAAMWCNGSVFGIQNACGVLFVSMLETFGSKDDDKMVFKTAWVGSLSMGMIFFCCPIVSVFTDLFGCRKTAVVGAAVGFVGLMSSSFVSSIEPLYLTYGIIFACGCSFAYQPSLVILGHYFKKRLGLVNGIVTAGSSVFTILLPLLLRVLIDSVGLFYTLRVLCIFMFVLFLAGFTYRPLATSTKDKESGGSGSSLFSRKKFSPPKKIFNFAIFKVTAYAVWAVGIPLALFGYFVPYVHLMKHVNERFQDEKNKEVVLMCIGVTSGVGRLLFGRIADYVPGVKKVYLQVLSFFFIGLMSMMIPLCSIFGALIAVCLIMGLFDGCFISIMAPIAFELVGAQDVSQAIGFLLGFMSIPMTVGPPIAGLLRDKLGSYDVAFYLAGVPPLIGGAVLCFIPWIHSKKQREISKTTGKEKMEKMLENQNSLLSSSSGMFKKESDSII

SEQ ID NO: 32824 - protein, 388 aa, Homo sapiens
MGAAAWARPLSVSFLLLLLPLPGMPAGSWDPAGYLLYCPCMGRFGNQADHFLGSLAFAKLLNRTLAVPPWIEYQHHKPPFTNLHVSYQKYFKLEPLQAYHRVISLEDFMEKLAPTHWPPEKRVAYCFEVAAQRSPDKKTCPMKEGNPFGPFWDQFHVSFNKSELFTGISFSASYREQWSQRFSPKEHPVLALPGAPAQFPVLEEHRPLQKYMVWSDEMVKTGEAQIHAHLVRPYVGIHLRIGSDWKNACAMLKDGTAGSHFMASPQCVGYSRSTAAPLTMTMCLPDLKEIQRAVKLWVRSLDAQSVYVATDSESYVPELQQLFKGKVKVVSLKPEVAQVDLYILGQADHFIGNCVSSFTAFVKRERDLQGRPSSFFGMDRPPKLRDEF

SEQ ID NO: 32825 - protein, 194 aa, Homo sapiens
MGAAAWARPLSVSFLLLLLPLPGMPAGSWDPAGYLLYCPCMGRFGNQADHFLGSLAFAKLLNRTLAVPPWIEYQHHKPPFTNLHVSYQKYFKLEPLQAYHRVISLEDFMEKLAPTHWPPEKRVAYCFEVAAQRSPDKKTCPMKEGNPFGPFWDQFHVSFNKSELFTGISFSASYREQWSQRRENHSCVTLLFPR

SEQ ID NO: 32826 - protein, 521 aa, Homo sapiens
MSASEGMKFKFHSGEKVLCFEPDPTKARVLYDAKIVDVIVGKDEKGRKIPEYLIHFNGWNRSWDRWAAEDHVLRDTDENRRLQRKLARKAVARLRSTGRKKKRCRLPGVDSVLKGLPTEEKDENDENSLSSSSDCSENKDEEISEESDIEEKTEVKEEPELQTRREMEERTITIEIPEVLKKQLEDDCYYINRRKRLVKLPCQTNIITILESYVKHFAINAAFSANERPRHHHVMPHANMNVHYIPAEKNVDLCKEMVDGLRITFDYTLPLVLLYPYEQAQYKKVTSSKFFLPIKESATSTNRSQEELSPSPPLLNPSTPQSTESQPTTGEPATPKRRKAEPEALQSLRRSTRHSANCDRLSESSASPQPKRRQQDTSASMPKLFLHLEKKTPVHSRSSSPIPLTPSKEGSAVFAGFEGRRTNEINEVLSWKLVPDNYPPGDQPPPPSYIYGAQHLLRLFVKLPEILGKMSFSEKNLKALLKHFDLFLRFLAEYHDDFFPESAYVAACEAHYSTKNPRAIY

SEQ ID NO: 32827 - protein, 462 aa, Homo sapiens
MPSWDRWAAEDHVLRDTDENRRLQRKLARKAVARLRSTGRKKKRCRLPGVDSVLKGLPTEEKDENDENSLSSSSDCSENKDEEISEESDIEEKTEVKEEPELQTRREMEERTITIEIPEVLKKQLEDDCYYINRRKRLVKLPCQTNIITILESYVKHFAINAAFSANERPRHHHVMPHANMNVHYIPAEKNVDLCKEMVDGLRITFDYTLPLVLLYPYEQAQYKKVTSSKFFLPIKESATSTNRSQEELSPSPPLLNPSTPQSTESQPTTGEPATPKRRKAEPEALQSLRRSTRHSANCDRLSESSASPQPKRRQQDTSASMPKLFLHLEKKTPVHSRSSSPIPLTPSKEGSAVFAGFEGRRTNEINEVLSWKLVPDNYPPGDQPPPPSYIYGAQHLLRLFVKLPEILGKMSFSEKNLKALLKHFDLFLRFLAEYHDDFFPESAYVAACEAHYSTKNPRAIY

SEQ ID NO: 32828 - protein, 509 aa, Homo sapiens
MSPSVRPGAGWAPVGRPGRPIQIVDVIVGKDEKGRKIPEYLIHFNGWNRSWDRWAAEDHVLRDTDENRRLQRKLARKAVARLRSTGRKKKRCRLPGVDSVLKGLPTEEKDENDENSLSSSSDCSENKDEEISEESDIEEKTEVKEEPELQTRREMEERTITIEIPEVLKKQLEDDCYYINRRKRLVKLPCQTNIITILESYVKHFAINAAFSANERPRHHHVMPHANMNVHYIPAEKNVDLCKEMVDGLRITFDYTLPLVLLYPYEQAQYKKVTSSKFFLPIKESATSTNRSQEELSPSPPLLNPSTPQSTESQPTTGEPATPKRRKAEPEALQSLRRSTRHSANCDRLSESSASPQPKRRQQDTSASMPKLFLHLEKKTPVHSRSSSPIPLTPSKEGSAVFAGFEGRRTNEINEVLSWKLVPDNYPPGDQPPPPSYIYGAQHLLRLFVKLPEILGKMSFSEKNLKALLKHFDLFLRFLAEYHDDFFPESAYVAACEAHYSTKNPRAIY

SEQ ID NO: 32829 - protein, 355 aa, Homo sapiens
MEERTITIEIPEVLKKQLEDDCYYINRRKRLVKLPCQTNIITILESYVKHFAINAAFSANERPRHHHVMPHANMNVHYIPAEKNVDLCKEMVDGLRITFDYTLPLVLLYPYEQAQYKKVTSSKFFLPIKESATSTNRSQEELSPSPPLLNPSTPQSTESQPTTGEPATPKRRKAEPEALQSLRRSTRHSANCDRLSESSASPQPKRRQQDTSASMPKLFLHLEKKTPVHSRSSSPIPLTPSKEGSAVFAGFEGRRTNEINEVLSWKLVPDNYPPGDQPPPPSYIYGAQHLLRLFVKLPEILGKMSFSEKNLKALLKHFDLFLRFLAEYHDDFFPESAYVAACEAHYSTKNPRAIY

SEQ ID NO: 32830 - protein, 416 aa, Homo sapiens
MSASEGMKFKFHSGEKVLCFEPDPTKARVLYDAKIVDVIVGKDEKGRKIPEYLIHFNGWNRSWDRWAAEDHVLRDTDENRRLQRKLARKAVARLRSTGRKKKRCRLPGVDSVLKGLPTEEKDENDENSLSSSSDCSENKDEEISEESDIEEKTEVKEEPELQTRREMEERTITIEIPEVLKKQLEDDCYYINRRKRLVKLPCQTNIITILESYVKHFAINAAFSANERPRHHHVMPHANMNVHYIPAEKNVDLCKEMVDGLRITFDYTLPLVLLYPYEQAQYKKVTSSKFFLPIKESATSTNRSQEELSPSPPLLNPSTPQSTESQPTTGEPATPKRRKAEPEALQSLRRSTRHSANCDRLSESSASPQPKRRQQDTSASMPKLFLHLEKSRFILGCPRPGRASVYFVFSQCQAWC

SEQ ID NO: 32831 - protein, 372 aa, Homo sapiens
MKMMKTKEEPELQTRREMEERTITIEIPEVLKKQLEDDCYYINRRKRLVKLPCQTNIITILESYVKHFAINAAFSANERPRHHHVMPHANMNVHYIPAEKNVDLCKEMVDGLRITFDYTLPLVLLYPYEQAQYKKVTSSKFFLPIKESATSTNRSQEELSPSPPLLNPSTPQSTESQPTTGEPATPKRRKAEPEALQSLRRSTRHSANCDRLSESSASPQPKRRQQDTSASMPKLFLHLEKKTPVHSRSSSPIPLTPSKEGSAVFAGFEGRRTNEINEVLSWKLVPDNYPPGDQPPPPSYIYGAQHLLRLFVKLPEILGKMSFSEKNLKALLKHFDLFLRFLAEYHDDFFPESAYVAACEAHYSTKNPRAIY

SEQ ID NO: 32832 - protein, 447 aa, Homo sapiens
MPDRACAVGSVARALSRSRRYVCARDADASRRRRRPFNYGLSIEEKNENDENSLSSSSDSSEDKDEKISEECDIEEKTEVKEEPELQTKREMEERTVTLEIPEVLKRQLEDDCYYINRRKRLVQLPCHTNIITILESYVKHFAISAAFSANERPRHHHAMPHASMNVPYIPAEKNIDLCKEMVDGLRITFDYTLPLVLLYPYEQAQYKKVTASKVFLAIKESATNTNRSQEKLSPSLRLLNPSRPQSTESQSTSGEPATPKRRKAEPQAVQSLRRSSPHTANCDRLSKSSTSPQPKRWQQDMSTSVPKLFLHLEKKTPVHSRSSSPTLTPSQEGSPVFAGFEGRRTNEINEVLSWKLVPDNYPPGDQPPPPSYIYGAQHLLRLFVKLPEILGKMSFTEKNLKALLKHFDLFVRFLAEYHDDFFPESAYVAASEVHYSTRNPQAVNKC

SEQ ID NO: 32833 - protein, 313 aa, Homo sapiens
MLARNNSLVTEFILAGLTDHPEFQQPLFFLFLVVYIVTMVGNLGLIILFGLNSHLHTPMYYFLFNLSFIDLCYSSVFTPKMLMNFVSKKNIISYVGCMTQLFFFLFFVISECYMLTSMAYDRYVAICNPLLYKVTMSHQVCSMLTFAAYIMGLAGATAHTGCMLRLTFCSANIINHYLCDILPLLQLSCTSTYVNEVVVLIVVGINIMVPSCTILISYVFIVTSILHIKSTQGRSKAFSTCSSHVIALSLFFGSAAFMYIKYSSGSMEQGKVSSVFYTNVVPMLNPLIYSLRNKDVKVALRKALIKIQRRNIF

SEQ ID NO: 32834 - protein, 2070 aa, Homo sapiens
MLEAIDKNRALHAAERLQTKLRERGDVANEDKLSLLKSVLQSPLFSQILSLQTSVQQLKDQVNIATSATSNIEYAHVPHLSPAVIPTLQNESFLLSPNNGNLEALTGPGIPHINGKPACDEFDQLIKNMAQGRHVEVFELLKPPSGGLGFSVVGLRSENRGELGIFVQEIQEGSVAHRDGRLKETDQILAINGQALDQTITHQQAISILQKAKDTVQLVIARGSLPQLVSPIVSRSPSAASTISAHSNPVHWQHMETIELVNDGSGLGFGIIGGKATGVIVKTILPGGVADQHGRLCSGDHILKIGDTDLAGMSSEQVAQVLRQCGNRVKLMIARGAIEERTAPTALGITLSSSPTSTPELRVDASTQKGEESETFDVELTKNVQGLGITIAGYIGDKKLEPSGIFVKSITKSSAVEHDGRIQIGDQIIAVDGTNLQGFTNQQAVEVLRHTGQTVLLTLMRRGMKQEAELMSREDVTKDADLSPVNASIIKENYEKDEDFLSSTRNTNILPTEEEGYPLLSAEIEEIEDAQKQEAALLTKWQRIMGINYEIVVAHVSKFSENSGLGISLEATVGHHFIRSVLPEGPVGHSGKLFSGDELLEVNGITLLGENHQDVVNILKELPIEVTMVCCRRTVPPTTQSELDSLDLCDIELTEKPHVDLGEFIGSSETEDPVLAMTDAGQSTEEVQAPLAMWEAGIQHIELEKGSKGLGFSILDYQDPIDPASTVIIIRSLVPGGIAEKDGRLLPGDRLMFVNDVNLENSSLEEAVEALKGAPSGTVRIGVAKPLPLSPEEGYVSAKEDSFLYPPHSCEEAGLADKPLFRADLALVGTNDADLVDESTFESPYSPENDSIYSTQASILSLHGSSCGDGLNYGSSLPSSPPKDVIENSCDPVLDLHMSLEELYTQNLLQRQDENTPSVDISMGPASGFTINDYTPANAIEQQYECENTIVWTESHLPSEVISSAELPSVLPDSAGKGSEYLLEQSSLACNAECVMLQNVSKESFERTINIAKGNSSLGMTVSANKDGLGMIVRSIIHGGAISRDGRIAIGDCILSINEESTISVTNAQARAMLRRHSLIGPDIKITYVPAEHLEEFKISLGQQSGRVMALDIFSSYTGRDIPELPEREEGEGEESELQNTAYSNWNQPRRVELWREPSKSLGISIVGGRGMGSRLSNGEVMRGIFIKHVLEDSPAGKNGTLKPGDRIVEVDGMDLRDASHEQAVEAIRKAGNPVVFMVQSIINRPRKSPLPSLLHNLYPKYNFSSTNPFADSLQINADKAPSQSESEPEKAPLCSVPPPPPSAFAEMGSDHTQSSASKISQDVDKEDEFGYSWKNIRERYGTLTGELHMIELEKGHSGLGLSLAGNKDRSRMSVFIVGIDPNGAAGKDGRLQIADELLEINGQILYGRSHQNASSIIKCAPSKVKIIFIRNKDAVNQMAVCPGNAVEPLPSNSENLQNKETEPTVTTSDAAVDLSSFKNVQHLELPKDQGGLGIAISEEDTLSGVIIKSLTEHGVAATDGRLKVGDQILAVDDEIVVGYPIEKFISLLKTAKMTVKLTIHAENPDSQAVPSAAGAASGEKKNSSQSLMVPQSGSPEPESIRNTSRSSTPAIFASDPATCPIIPGCETTIEISKGRTGLGLSIVGGSDTLLGAIIIHEVYEEGAACKDGRLWAGDQILEVNGIDLRKATHDEAINVLRQTPQRVRLTLYRDEAPYKEEEVCDTLTIELQKKPGKGLGLSIVGKRNDTGVFVSDIVKGGIADADGRLMQGDQILMVNGEDVRNATQEAVAALLKCSLGTVTLEVGRIKAGPFHSERRPSQSSQVSEGSLSSFTFPLSGSSTSESLESSSKKNALASEIQGLRTVEMKKGPTDSLGISIAGGVGSPLGDVPIFIAMMHPTGVAAQTQKLRVGDRIVTICGTSTEGMTHTQAVNLLKNASGSIEMQVVAGGDVSVVTGHQQEPASSSLSFTGLTSSSIFQDDLGPPQCKSITLERGPDGLGFSIVGGYGSPHGDLPIYVKTVFAKGAASEDGRLKRGDQIIAVNGQSLEGVTHEEAVAILKRTKGTVTLMVLS

SEQ ID NO: 32835 - protein, 2041 aa, Homo sapiens
MLEAIDKNRALHAAERLQTKLRERGDVANEDKLSLLKSVLQSPLFSQILSLQTSVQQLKDQVNIATSATSNIEYAHVPHLSPAVIPTLQNESFLLSPNNGNLEALTGPGIPHINGKPACDEFDQLIKNMAQGRHVEVFELLKPPSGGLGFSVVGLRSENRGELGIFVQEIQEGSVAHRDGRLKETDQILAINGQALDQTITHQQAISILQKAKDTVQLVIARGSLPQLVSPIVSRSPSAASTISAHSNPVHWQHMETIELVNDGSGLGFGIIGGKATGVIVKTILPGGVADQHGRLCSGDHILKIGDTDLAGMSSEQVAQVLRQCGNRVKLMIARGAIEERTAPTALGITLSSSPTSTPELRVDASTQKGEESETFDVELTKNVQGLGITIAGYIGDKKLEPSGIFVKSITKSSAVEHDGRIQIGDQIIAVDGTNLQGFTNQQAVEVLRHTGQTVLLTLMRRGMKQEAELMSREDVTKDADLSPVNASIIKENYEKDEDFLSSTRNTNILPTEEEGYPLLSAEIEEIEDAQKQEAALLTKWQRIMGINYEIVVAHVSKFSENSGLGISLEATVGHHFIRSVLPEGPVGHSGKLFSGDELLEVNGITLLGENHQDVVNILKELPIEVTMVCCRRTVPPTTQSELDSLDLCDIELTEKPHVDLGEFIGSSETEDPVLAMTDAGQSTEEVQAPLAMWEAGIQHIELEKGSKGLGFSILDYQDPIDPASTVIIIRSLVPGGIAEKDGRLLPGDRLMFVNDVNLENSSLEEAVEALKGAPSGTVRIGVAKPLPLSPEEGYVSAKEDSFLYPPHSCEEAGLADKPLFRADLALVGTNDADLVDESTFESPYSPENDSIYSTQASILSLHGSSCGDGLNYGSSLPSSPPKDVIENSCDPVLDLHMSLEELYTQNLLQRQDENTPSVDISMGPASGFTINDYTPANAIEQQYECENTIVWTESHLPSEVISSAELPSVLPDSAGKGSEYLLEQSSLACNAECVMLQNVSKESFERTINIAKGNSSLGMTVSANKDGLGMIVRSIIHGGAISRDGRIAIGDCILSINEESTISVTNAQARAMLRRHSLIGPDIKITYVPAEHLEEFKISLGQQSGRVMALDIFSSYTGRDIPELPEREEGEGEESELQNTAYSNWNQPRRVELWREPSKSLGISIVGGRGMGSRLSNGEVMRGIFIKHVLEDSPAGKNGTLKPGDRIVEVDGMDLRDASHEQAVEAIRKAGNPVVFMVQSIINRPRKSPLPSLLHNLYPKYNFSSTNPFADSLQINADKAPSQSESEPEKAPLCSVPPPPPSAFAEMGSDHTQSSASKISQDVDKEDEFGYSWKNIRERYGTLTGELHMIELEKGHSGLGLSLAGNKDRSRMSVFIVGIDPNGAAGKDGRLQIADELLEINGQILYGRSHQNASSIIKCAPSKVKIIFIRNKDAVNQMAVCPGNAVEPLPSNSENLQNKETEPTVTTSDAAVDLSSFKNVQHLELPKDQGGLGIAISEEDTLSGVIIKSLTEHGVAATDGRLKVGDQILAVDDEIVVGYPIEKFISLLKTAKMTVKLTIHAENPDSQAVPSAAGAASGEKKNSSQSLMVPQSGSPEPESIRNTSRSSTPAIFASDPATCPIIPGCETTIEISKGRTGLGLSIVGGSDTLLGAIIIHEVYEEGAACKDGRLWAGDQILEVNGIDLRKATHDEAINVLRQTPQRVRLTLYRDEAPYKEEEVCDTLTIELQKKPGKGLGLSIVGKRNDTGVFVSDIVKGGIADADGRLMQGDQILMVNGEDVRNATQEAVAALLKVSEGSLSSFTFPLSGSSTSESLESSSKKNALASEIQGLRTVEMKKGPTDSLGISIAGGVGSPLGDVPIFIAMMHPTGVAAQTQKLRVGDRIVTICGTSTEGMTHTQAVNLLKNASGSIEMQVVAGGDVSVVTGHQQEPASSSLSFTGLTSSSIFQDDLGPPQCKSITLERGPDGLGFSIVGGYGSPHGDLPIYVKTVFAKGAASEDGRLKRGDQIIAVNGQSLEGVTHEEAVAILKRTKGTVTLMVLS

SEQ ID NO: 32836 - protein, 2037 aa, Homo sapiens
MLEAIDKNRALHAAERLQTKLRERGDVANEDKLSLLKSVLQSPLFSQILSLQTSVQQLKDQVNIATSATSNIEYAHVPHLSPAVIPTLQNESFLLSPNNGNLEALTGPGIPHINGKPACDEFDQLIKNMAQGRHVEVFELLKPPSGGLGFSVVGLRSENRGELGIFVQEIQEGSVAHRDGRLKETDQILAINGQALDQTITHQQAISILQKAKDTVQLVIARGSLPQLVSPIVSRSPSAASTISAHSNPVHWQHMETIELVNDGSGLGFGIIGGKATGVIVKTILPGGVADQHGRLCSGDHILKIGDTDLAGMSSEQVAQVLRQCGNRVKLMIARGAIEERTAPTALGITLSSSPTSTPELRVDASTQKGEESETFDVELTKNVQGLGITIAGYIGDKKLEPSGIFVKSITKSSAVEHDGRIQIGDQIIAVDGTNLQGFTNQQAVEVLRHTGQTVLLTLMRRGMKQEAELMSREDVTKDADLSPVNASIIKENYEKDEDFLSSTRNTNILPTEEEGYPLLSAEIEEIEDAQKQEAALLTKWQRIMGINYEIVVAHVSKFSENSGLGISLEATVGHHFIRSVLPEGPVGHSGKLFSGDELLEVNGITLLGENHQDVVNILKELPIEVTMVCCRRTVPPTTQSELDSLDLCDIELTEKPHVDLGEFIGSSETEDPVLAMTDAGQSTEEVQAPLAMWEAGIQHIELEKGSKGLGFSILDYQDPIDPASTVIIIRSLVPGGIAEKDGRLLPGDRLMFVNDVNLENSSLEEAVEALKGAPSGTVRIGVAKPLPLSPEEGYVSAKEDSFLYPPHSCEEAGLADKPLFRADLALVGTNDADLVDESTFESPYSPENDSIYSTQASILSLHGSSCGDGLNYGSSLPSSPPKDVIENSCDPVLDLHMSLEELYTQNLLQRQDENTPSVDISMGPASGFTINDYTPANAIEQQYECENTIVWTESHLPSEVISSAELPSVLPDSAGKGSEYLLEQSSLACNAECVMLQNVSKESFERTINIAKGNSSLGMTVSANKDGLGMIVRSIIHGGAISRDGRIAIGDCILSINEESTISVTNAQARAMLRRHSLIGPDIKITYVPAEHLEEFKISLGQQSGRVMALDIFSSYTGRDIPELPEREEGEGEESELQNTAYSNWNQPRRVELWREPSKSLGISIVGGRGMGSRLSNGEVMRGIFIKHVLEDSPAGKNGTLKPGDRIVEVDGMDLRDASHEQAVEAIRKAGNPVVFMVQSIINRPRAPSQSESEPEKAPLCSVPPPPPSAFAEMGSDHTQSSASKISQDVDKEDEFGYSWKNIRERYGTLTGELHMIELEKGHSGLGLSLAGNKDRSRMSVFIVGIDPNGAAGKDGRLQIADELLEINGQILYGRSHQNASSIIKCAPSKVKIIFIRNKDAVNQMAVCPGNAVEPLPSNSENLQNKETEPTVTTSDAAVDLSSFKNVQHLELPKDQGGLGIAISEEDTLSGVIIKSLTEHGVAATDGRLKVGDQILAVDDEIVVGYPIEKFISLLKTAKMTVKLTIHAENPDSQAVPSAAGAASGEKKNSSQSLMVPQSGSPEPESIRNTSRSSTPAIFASDPATCPIIPGCETTIEISKGRTGLGLSIVGGSDTLLGAIIIHEVYEEGAACKDGRLWAGDQILEVNGIDLRKATHDEAINVLRQTPQRVRLTLYRDEAPYKEEEVCDTLTIELQKKPGKGLGLSIVGKRNDTGVFVSDIVKGGIADADGRLMQGDQILMVNGEDVRNATQEAVAALLKCSLGTVTLEVGRIKAGPFHSERRPSQSSQVSEGSLSSFTFPLSGSSTSESLESSSKKNALASEIQGLRTVEMKKGPTDSLGISIAGGVGSPLGDVPIFIAMMHPTGVAAQTQKLRVGDRIVTICGTSTEGMTHTQAVNLLKNASGSIEMQVVAGGDVSVVTGHQQEPASSSLSFTGLTSSSIFQDDLGPPQCKSITLERGPDGLGFSIVGGYGSPHGDLPIYVKTVFAKGAASEDGRLKRGDQIIAVNGQSLEGVTHEEAVAILKRTKGTVTLMVLS

SEQ ID NO: 32837 - protein, 2008 aa, Homo sapiens
MLEAIDKNRALHAAERLQTKLRERGDVANEDKLSLLKSVLQSPLFSQILSLQTSVQQLKDQVNIATSATSNIEYAHVPHLSPAVIPTLQNESFLLSPNNGNLEALTGPGIPHINGKPACDEFDQLIKNMAQGRHVEVFELLKPPSGGLGFSVVGLRSENRGELGIFVQEIQEGSVAHRDGRLKETDQILAINGQALDQTITHQQAISILQKAKDTVQLVIARGSLPQLVSPIVSRSPSAASTISAHSNPVHWQHMETIELVNDGSGLGFGIIGGKATGVIVKTILPGGVADQHGRLCSGDHILKIGDTDLAGMSSEQVAQVLRQCGNRVKLMIARGAIEERTAPTALGITLSSSPTSTPELRVDASTQKGEESETFDVELTKNVQGLGITIAGYIGDKKLEPSGIFVKSITKSSAVEHDGRIQIGDQIIAVDGTNLQGFTNQQAVEVLRHTGQTVLLTLMRRGMKQEAELMSREDVTKDADLSPVNASIIKENYEKDEDFLSSTRNTNILPTEEEGYPLLSAEIEEIEDAQKQEAALLTKWQRIMGINYEIVVAHVSKFSENSGLGISLEATVGHHFIRSVLPEGPVGHSGKLFSGDELLEVNGITLLGENHQDVVNILKELPIEVTMVCCRRTVPPTTQSELDSLDLCDIELTEKPHVDLGEFIGSSETEDPVLAMTDAGQSTEEVQAPLAMWEAGIQHIELEKGSKGLGFSILDYQDPIDPASTVIIIRSLVPGGIAEKDGRLLPGDRLMFVNDVNLENSSLEEAVEALKGAPSGTVRIGVAKPLPLSPEEGYVSAKEDSFLYPPHSCEEAGLADKPLFRADLALVGTNDADLVDESTFESPYSPENDSIYSTQASILSLHGSSCGDGLNYGSSLPSSPPKDVIENSCDPVLDLHMSLEELYTQNLLQRQDENTPSVDISMGPASGFTINDYTPANAIEQQYECENTIVWTESHLPSEVISSAELPSVLPDSAGKGSEYLLEQSSLACNAECVMLQNVSKESFERTINIAKGNSSLGMTVSANKDGLGMIVRSIIHGGAISRDGRIAIGDCILSINEESTISVTNAQARAMLRRHSLIGPDIKITYVPAEHLEEFKISLGQQSGRVMALDIFSSYTGRDIPELPEREEGEGEESELQNTAYSNWNQPRRVELWREPSKSLGISIVGGRGMGSRLSNGEVMRGIFIKHVLEDSPAGKNGTLKPGDRIVEVDGMDLRDASHEQAVEAIRKAGNPVVFMVQSIINRPRAPSQSESEPEKAPLCSVPPPPPSAFAEMGSDHTQSSASKISQDVDKEDEFGYSWKNIRERYGTLTGELHMIELEKGHSGLGLSLAGNKDRSRMSVFIVGIDPNGAAGKDGRLQIADELLEINGQILYGRSHQNASSIIKCAPSKVKIIFIRNKDAVNQMAVCPGNAVEPLPSNSENLQNKETEPTVTTSDAAVDLSSFKNVQHLELPKDQGGLGIAISEEDTLSGVIIKSLTEHGVAATDGRLKVGDQILAVDDEIVVGYPIEKFISLLKTAKMTVKLTIHAENPDSQAVPSAAGAASGEKKNSSQSLMVPQSGSPEPESIRNTSRSSTPAIFASDPATCPIIPGCETTIEISKGRTGLGLSIVGGSDTLLGAIIIHEVYEEGAACKDGRLWAGDQILEVNGIDLRKATHDEAINVLRQTPQRVRLTLYRDEAPYKEEEVCDTLTIELQKKPGKGLGLSIVGKRNDTGVFVSDIVKGGIADADGRLMQGDQILMVNGEDVRNATQEAVAALLKVSEGSLSSFTFPLSGSSTSESLESSSKKNALASEIQGLRTVEMKKGPTDSLGISIAGGVGSPLGDVPIFIAMMHPTGVAAQTQKLRVGDRIVTICGTSTEGMTHTQAVNLLKNASGSIEMQVVAGGDVSVVTGHQQEPASSSLSFTGLTSSSIFQDDLGPPQCKSITLERGPDGLGFSIVGGYGSPHGDLPIYVKTVFAKGAASEDGRLKRGDQIIAVNGQSLEGVTHEEAVAILKRTKGTVTLMVLS

SEQ ID NO: 32838 - protein, 910 aa, Homo sapiens
MDVVGENEALQQFFEAQGANGTLENPALDTSLLEEFLGNDFDLGALQRQLPDTPPYSASDSCSPPQVKGACYPTLRPTAGRTPAPFLHPTAAPAMPPMHPLQSTSGMGDSCQIHGGFHSCHSNASHLATPLDQSVSSHLGIGCSYPQQPLCHSPGASLPPTKKRKCTQALEDSGECRVWACHCRPMTSRSRSSEVQDPDSEGQNRMPTDQCSPALKWQPCHSVPWHSLLNSHYEKLPDVGYRVVTDKGFNFSPADEAFVCQKKNHFQITIHIQVWGSPKFVETEMGLKPIEMFYLKVFGTKVEATNQIIAIEQSQADRSKKIFNPVKIDLLADQVTKVTLGRLHFSETTANNMRKKGKPNPDQRYFMLVVGLYAANQDQFYLLSAHISERIIVRASNPGQFENDSDALWQRGQVPESIVCHGRVGINTDAPDEALVVCGNMKVMGTIMHPSDSRAKQNIQEVDTNEQLKRIAQMRIVEYDYKPEFASAMGINTAHQTGMIAQEVQEILPRAVREVGDVTCGNGETLENFLMVDKDQIFMENVGAVKQLCKLTNNLEERIEELEIWNRKLARLKRLSSWKSSASEASTISKSSRAVSASSPRRAVHKKNNKVYFSGKRQACPNWVFQTLVITLIAVMAFCALTIVALYILSLKDQDRRVPNLPPSNITSSQEPALLPTASSSAPNTSLVTTPASLQVPEITFCEILPCQETYCCPIRGMKEVSSSPVQRQSEEKEFHQRRWSEDKSKSVLARNALSGPDWESDWIDTTISSIQIMEIQQIIDHQYCIQSLQCGSGNYNYNIPVNKHTPTNVKFSLEINTTEPLIVFQCKFTLGNICFHSKRGTKGLESHREISQEMTQGYQHIWSLPVAPFSDSMFHFRVAAPDLADCSTDPYFAGIFFTDYFFYFYRRCA

SEQ ID NO: 32839 - protein, 127 aa, Homo sapiens [sequence omitted]

SEQ ID NO: 32840 - protein, 500 aa, Homo sapiens
MPPAVGGPVGYTPPDGGWGWAVVIGAFISIGFSYAFPKSITVFFKEIEGIFHATTSEVSWISSIMLAVMYGGGPISSILVNKYGSRIVMIVGGCLSGCGLIAASFCNTVQQLYVCIGVIGGLGLAFNLNPALTMIGKYFYKRRPLANGLAMAGSPVFLCTLAPLNQVFFGIFGWRGSFLILGGLLLNCCVAGALMRPIGPKPTKAGKDKSKASLEKAGKSGVKKDLHDANTDLIGRHPKQEKRSVFQTINQFLDLTLFTHRGFLLYLSGNVIMFFGLFAPLVFLSSYGKSQHYSSEKSAFLLSILAFVDMVARPSMGLVANTKPIRPRIQYFFAASVVANGVCHMLAPLSTTYVGFCVYAGFFGFAFGWLSSVLFETLMDLVGPQRFSSAVGLVTIVECCPVLLGPPLLGRLNDMYGDYKYTYWACGVVLIISGIYLFIGMGINYRLLAKEQKANEQKKESKEEETSIDVAGKPNEVTKAAESPDQKDTDGGPKEEESPV

SEQ ID NO: 32841 - protein, 430 aa, Homo sapiens
MPPAVGGPVGYTPPDGGWGWAVVIGAFISIGFSYAFPKSITVFFKEIEGIFHATTSEVSWISSIMLAVMYGGGPISSILVNKYGSRIVMIVGGCLSGCGLIAASFCNTVQQLYVCIGVIGGLGLAFNLNPALTMIGKYFYKRRPLANGLAMAGSPVFLCTLAPLNQVFFGIFGWRGSFLILGGLLLNCCVAGALMRPIGPKPTKAGKDKSKASLEKAGKSGVKKDLHDANTDLIGRHPKQEKRSVFQTINQFLDLTLFTHRGFLLYLSGNVIMFFGLFAPLVFLSSYGKSQHYSSEKSAFLLSILAFVDMVARPSMGLVANTKPIRPRIQYFFAASVVANGVCHMLAPLSTTYVGFCVYAGFFGFAFGWLSSVLFETLMDLVGPQRFSSAVGLVTIVECCPVLLGPPLLGIVYLPTNVGLLQNKHVRWEC

SEQ ID NO: 32842 - protein, 469 aa, Homo sapiens
MHSFPPLLLLLFWGVVSHSFPATLETQEQDVDLVQKYLEKYYNLKNDGRQVEKRRNSGPVVEKLKQMQEFFGLKVTGKPDAETLKVMKQPRCGVPDVAQFVLTEGNPRWEQTHLTYRIENYTPDLPRADVDHAIEKAFQLWSNVTPLTFTKVSEGQADIMISFVRGDHRDNSPFDGPGGNLAHAFQPGPGIGGDAHFDEDERWTNNFREYNLHRVAAHELGHSLGLSHSTDIGALMYPSYTFSGDVQLAQDDIDGIQAIYGRSQNPVQPIGPQTPKACDSKLTFDAITTIRGEVMFFKDRFYMRTNPFYPEVELNFISVFWPQLPNGLEAAYEFADRDEVRFFKGNKYWAVQGQNVLHGYPKDIYSSFGFPRTVKHIDAALSEENTGKTYFFVANKYWRYDEYKRSMDPGYPKMIAHDFPGIGHKVDAVFMKDGFFYFFHGTRQYKFDPKTKRILTLQKANSWFNCRKN

SEQ ID NO: 32843 - protein, 1183 aa, Homo sapiens
MEEFDLVKTLHKTSSSVGSDENSLHSLGLNLNTDRSSPHLSTNGVSSFSGKTRPSVIQGTVEVLTSLMQELQNSGKTDSELWKNCETRWLQLFNLVEKQCQEQIVAQQEQFHNQIQHIQEEIKNLVKLQTSSASLASCEGNSSNKQVSSESQMGFFSLSSERNESVIHYPESTEPEIQQEMSTSQPDCNVDSCSVSSGYGTFCISELNLYKSKDPKEFMEHIDVPKGQYVAPAVPAESLVDGVKNENFYIQTPEECHVSLKEDVSISPGEFEHNFLGENKVSEVYSGKTNSNAITSWAQKLKQNQPKRAHVEDGGSRSKQGNEQSKKTPIEKSDFAAATHPRAFYLSKPDETPNAWMSDSGTGLTYWKLEEKDMHHSLPETLEKTFISLSSTDVSPNQSNTSNEMKLPSLKDIYYKKQRENKQLPERNLTSASNPNHPPEVLTLDPTLHMKPKQQISGIQPHGLPNALDDRISFSPDSVLEPSMSSPSDIDSFSQASNVTSQLPGFPKYPSHTKASPVDSWKNQTFQNESRTSSTFPSVYTITSNDISVNTVDEENTVMVASASVSQSQLPGTANSVPECISLTSLEDPVILSKIRQNLKEKHARHIADLRAYYESEINSLKQKLEAKEISGVEDWKITNQILVDRCGQLDSALHEATSRVRTLENKNNLLEIEVNDLRERFSAASSASKILQERIEEMRTSSKEKDNTIIRLKSRLQDLEEAFENAYKLSDDKEAQLKQENKMFQDLLGEYESLGKEHRRVKDALNTTENKLLDAYTQISDLKRMISKLEAQVKQVEHENMLSLRHNSRIHVRPSRANTLATSDVSRRKWLIPGAEYSIFTGQPLDTQDSNVDNQLEETCSLGHRSPLEKDSSPGSSSTSLLIKKQRETSDTPIMRALKELDEGKIFKNWGTQTEKEDTSNINPRQTETSVNASRSPEKCAQQRQKRLNSASQRSSSLPPSNRKSSTPTKREIMLTPVTVAYSPKRSPKENLSPGFSHLLSKNESSPIRFDILLDDLDTVPVSTLQRTNPRKQLQFLPLDDSEEKTYSEKATDNHVNHSSCPEPVPNGVKKVSVRTAWEKNKSVSYEQCKPVSVTPQGNDFEYTAKIRTLAETERFFDELTKEKDQIEAALSRMPSPGGRITLQTRLNQEALEDRLERINRELGSVRMTLKKFHVLRTSANL

SEQ ID NO: 32844 - protein, 1180 aa, Homo sapiens
MEEFDLVKTLHKTSSSVGSDENSLHSLGLNLNTDRSSPHLSTNGVSSFSGKTRPSVIQGTVEVLTSLMQELQNSGKTDSELWKNCETRWLQLFNLVEKQCQEQIVAQQEQFHNQIQHIQEEIKNLVKLQTSSASLASCEGNSSNKQVSSESQMGFFSLSSERNESVIHYPESTEPEIQQEMSTSQPDCNVDSCSVSSGYGTFCISELNLYKSKDPKEFMEHIDVPKGQYVAPAVPAESLVDGVKNENFYIQTPEECHVSLKEDVSISPGEFEHNFLGENKVSEVYSGKTNSNAITSWAQKLKQNQPKRAHVEDGGSRSKQGNEQSKKTPIEKSDFAAATHPRAFYLSKPDETPNAWMSDSGTGLTYWKLEEKDMHHSLPETLEKTFISLSSTDVSPNQSNTSNEMKLPSLKDIYYKKQRENKQLPERNLTSASNPNHPPEVLTLDPTLHMKPKQQISGIQPHGLPNALDDRISFSPDSVLEPSMSSPSDIDSFSQASNVTSQLPGFPKYPSHTKASPVDSWKNQTFQNESRTSSTFPSVYTITSNDISVNTVDEENTVMVASASVSQSQLPGTANSVPECISLTSLEDPVILSKIRQNLKEKHARHIADLRAYYESEINSLKQKLEAKEISGVEDWKITNQILVDRCGQLDSALHEATSRVRTLENKNNLLEIEVNDLRERFSAASSASKILQERIEEMRTSSKEKDNTIIRLKSRLQDLEEAFENAYKLSDDKEAQLKQENKMFQDLLGEYESLGKEHRRVKDALNTTENKLLDAYTQISDLKRMISKLEAQVKQVEHENMLSLRHNSRIHVRPSRANTLATSDVSRRKWLIPGAEYSIFTGQPLDTQDSNVDNQLEETCSLGHRSPLEKDSSPGSSSTSLLIKKQRETSDTPIMRALKELDEGKIFKNWGTQTEKEDTSNINPRQTETSVNASRSPEKCAQQRQKRLNSASQRSSSLPPSNRKSSTPTKREIMLTPVTVAYSPKRSPKENLSPGFSHLLSKNESSPIRFDILLDDLDTVPVSTLQRTNPRKQLQFLPLDDSEEKTYSEKATDNHVNHSSCPEPVPNGVKKVSVRTAWEKNKSVSYEQCKPVSVTPQGNDFEYTAKIRTLAETERFFDELTKEKDQIEAALSRMPSPGGRITLQTRLNQTPQICEESSHKCAFAGHYVPCHLYDYRFQG

SEQ ID NO: 32845 - protein, 706 aa, Homo sapiens
MGRKVTVATCALNQWALDFEGNLQRILKSIEIAKNRGARYRLGPELEICGYGCWDHYYESDTLLHSFQVLAALVESPVTQDIICDVGMPVMHRNVRYNCRVIFLNRKILLIRPKMALANEGNYRELRWFTPWSRSRHTEEYFLPRMIQDLTKQETVPFGDAVLVTWDTCIGSEICEELWTPHSPHIDMGLDGVEIITNASGSHQVLRKANTRVDLVTMVTSKNGGIYLLANQKGCDGDRLYYDGCAMIAMNGSVFAQGSQFSLDDVEVLTATLDLEDVRSYRAEISSRNLAASRASPYPRVKVDFALSCHEDLLAPISEPIEWKYHSPEEEISLGPACWLWDFLRRSQQAGFLLPLSGGVDSAATACLIYSMCCQVCEAVRSGNEEVLADVRTIVNQISYTPQDPRDLCGRILTTCYMASKNSSQETCTRARELAQQIGSHHISLNIDPAVKAVMGIFSLVTGKSPLFAAHGGSSRENLALQNVQARIRMVLAYLFAQLSLWSRGVHGGLLVLGSANVDESLLGYLTKYDCSSADINPIGGISKTDLRAFVQFCIQRFQLPALQSILLAPATAELEPLADGQVSQTDEEDMGMTYAELSVYGKLRKVAKMGPYSMFCKLLGMWRHICTPRQVADKVKRFFSKYSMNRHKMTTLTPAYHAENYSPEDNRFDLRPFLYNTSWPWQFRCIENQVLQLERAEPQSLDGVD

SEQ ID NO: 32846 - protein, 446 aa, Homo sapiens
MGISGQEVLTATLDLEDVRSYRAEISSRNLAASRASPYPRVKVDFALSCHEDLLAPISEPIEWKYHSPEEEISLGPACWLWDFLRRSQQAGFLLPLSGGVDSAATACLIYSMCCQVCEAVRSGNEEVLADVRTIVNQISYTPQDPRDLCGRILTTCYMASKNSSQETCTRARELAQQIGSHHISLNIDPAVKAVMGIFSLVTGKSPLFAAHGGSSRENLALQNVQARIRMVLAYLFAQLSLWSRGVHGGLLVLGSANVDESLLGYLTKYDCSSADINPIGGISKTDLRAFVQFCIQRFQLPALQSILLAPATAELEPLADGQVSQTDEEDMGMTYAELSVYGKLRKVAKMGPYSMFCKLLGMWRHICTPRQVADKVKRFFSKYSMNRHKMTTLTPAYHAENYSPEDNRFDLRPFLYNTSWPWQFRCIENQVLQLERAEPQSLDGVD

SEQ ID NO: 32847 - protein, 727 aa, Homo sapiens
MLRIPVRKALVGLSKSPKGCVRTTATAASNLIEVFVDGQSVMVEPGTTVLQACEKVGMQIPRFCYHERLSVAGNCRMCLVEIEKAPKVVAACAMPVMKGWNILTNSEKSKKAREGVMEFLLANHPLDCPICDQGGECDLQDQSMMFGNDRSRFLEGKRAVEDKNIGPLVKTIMTRCIQCTRCIRFASEIAGVDDLGTTGRGNDMQVGTYIEKMFMSELSGNIIDICPVGALTSKPYAFTARPWETRKTESIDVMDAVGSNIVVSTRTGEVMRILPRMHEDINEEWISDKTRFAYDGLKRQRLTEPMVRNEKGLLTYTSWEDALSRVAGMLQSFQGKDVAAIAGGLVDAEALVALKDLLNRVDSDTLCTEEVFPTAGAGTDLRSNYLLNTTIAGVEEADVVLLVGTNPRFEAPLFNARIRKSWLHNDLKVALIGSPVDLTYTYDHLGDSPKILQDIASGSHPFSQVLKEAKKPMVVLGSSALQRNDGAAILAAVSSIAQKIRMTSGVTGDWKVMNILHRIASQVAALDLGYKPGVEAIRKNPPKVLFLLGADGGCITRQDLPKDCFIIYQGHHGDVGAPIADVILPGAAYTEKSATYVNTEGRAQQTKVAVTPPGLAREDWKIIRALSEIAGMTLPYDTLDQVRNRLEEVSPNLVRYDDIEGANYFQQANELSKLVNQQLLADPLVPPQLTIKDFYMTDSISRASQTMAKCVKAVTEGAQAVEEPSIC

SEQ ID NO: 32848 - protein, 741 aa, Homo sapiens
MRIRGSSGTLSRINMLRIPVRKALVGLSKSPKGCVRTTATAASNLIEVFVDGQSVMVEPGTTVLQACEKVGMQIPRFCYHERLSVAGNCRMCLVEIEKAPKVVAACAMPVMKGWNILTNSEKSKKAREGVMEFLLANHPLDCPICDQGGECDLQDQSMMFGNDRSRFLEGKRAVEDKNIGPLVKTIMTRCIQCTRCIRFASEIAGVDDLGTTGRGNDMQVGTYIEKMFMSELSGNIIDICPVGALTSKPYAFTARPWETRKTESIDVMDAVGSNIVVSTRTGEVMRILPRMHEDINEEWISDKTRFAYDGLKRQRLTEPMVRNEKGLLTYTSWEDALSRVAGMLQSFQGKDVAAIAGGLVDAEALVALKDLLNRVDSDTLCTEEVFPTAGAGTDLRSNYLLNTTIAGVEEADVVLLVGTNPRFEAPLFNARIRKSWLHNDLKVALIGSPVDLTYTYDHLGDSPKILQDIASGSHPFSQVLKEAKKPMVVLGSSALQRNDGAAILAAVSSIAQKIRMTSGVTGDWKVMNILHRIASQVAALDLGYKPGVEAIRKNPPKVLFLLGADGGCITRQDLPKDCFIIYQGHHGDVGAPIADVILPGAAYTEKSATYVNTEGRAQQTKVAVTPPGLAREDWKIIRALSEIAGMTLPYDTLDQVRNRLEEVSPNLVRYDDIEGANYFQQANELSKLVNQQLLADPLVPPQLTIKDFYMTDSISRASQTMAKCVKAVTEGAQAVEEPSIC

SEQ ID NO: 32849 - protein, 616 aa, Homo sapiens
MWEGVMEFLLANHPLDCPICDQGGECDLQDQSMMFGNDRSRFLEGKRAVEDKNIGPLVKTIMTRCIQCTRCIRFASEIAGVDDLGTTGRGNDMQVGTYIEKMFMSELSGNIIDICPVGALTSKPYAFTARPWETRKTESIDVMDAVGSNIVVSTRTGEVMRILPRMHEDINEEWISDKTRFAYDGLKRQRLTEPMVRNEKGLLTYTSWEDALSRVAGMLQSFQGKDVAAIAGGLVDAEALVALKDLLNRVDSDTLCTEEVFPTAGAGTDLRSNYLLNTTIAGVEEADVVLLVGTNPRFEAPLFNARIRKSWLHNDLKVALIGSPVDLTYTYDHLGDSPKILQDIASGSHPFSQVLKEAKKPMVVLGSSALQRNDGAAILAAVSSIAQKIRMTSGVTGDWKVMNILHRIASQVAALDLGYKPGVEAIRKNPPKVLFLLGADGGCITRQDLPKDCFIIYQGHHGDVGAPIADVILPGAAYTEKSATYVNTEGRAQQTKVAVTPPGLAREDWKIIRALSEIAGMTLPYDTLDQVRNRLEEVSPNLVRYDDIEGANYFQQANELSKLVNQQLLADPLVPPQLTIKDFYMTDSISRASQTMAKCVKAVTEGAQAVEEPSIC

SEQ ID NO: 32850 - protein, 670 aa, Homo sapiens
MQIPRFCYHERLSVAGNCRMCLVEIEKAPKVVAACAMPVMKGWNILTNSEKSKKAREGVMEFLLANHPLDCPICDQGGECDLQDQSMMFGNDRSRFLEGKRAVEDKNIGPLVKTIMTRCIQCTRCIRFASEIAGVDDLGTTGRGNDMQVGTYIEKMFMSELSGNIIDICPVGALTSKPYAFTARPWETRKTESIDVMDAVGSNIVVSTRTGEVMRILPRMHEDINEEWISDKTRFAYDGLKRQRLTEPMVRNEKGLLTYTSWEDALSRVAGMLQSFQGKDVAAIAGGLVDAEALVALKDLLNRVDSDTLCTEEVFPTAGAGTDLRSNYLLNTTIAGVEEADVVLLVGTNPRFEAPLFNARIRKSWLHNDLKVALIGSPVDLTYTYDHLGDSPKILQDIASGSHPFSQVLKEAKKPMVVLGSSALQRNDGAAILAAVSSIAQKIRMTSGVTGDWKVMNILHRIASQVAALDLGYKPGVEAIRKNPPKVLFLLGADGGCITRQDLPKDCFIIYQGHHGDVGAPIADVILPGAAYTEKSATYVNTEGRAQQTKVAVTPPGLAREDWKIIRALSEIAGMTLPYDTLDQVRNRLEEVSPNLVRYDDIEGANYFQQANELSKLVNQQLLADPLVPPQLTIKDFYMTDSISRASQTMAKCVKAVTEGAQAVEEPSIC

SEQ ID NO: 32851 - protein, 691 aa, Homo sapiens
MLRIPVRKALVGLSKSPKGCVRTTATAASNLIEVFVDGQSVMVEPGTTVLQVVAACAMPVMKGWNILTNSEKSKKAREGVMEFLLANHPLDCPICDQGGECDLQDQSMMFGNDRSRFLEGKRAVEDKNIGPLVKTIMTRCIQCTRCIRFASEIAGVDDLGTTGRGNDMQVGTYIEKMFMSELSGNIIDICPVGALTSKPYAFTARPWETRKTESIDVMDAVGSNIVVSTRTGEVMRILPRMHEDINEEWISDKTRFAYDGLKRQRLTEPMVRNEKGLLTYTSWEDALSRVAGMLQSFQGKDVAAIAGGLVDAEALVALKDLLNRVDSDTLCTEEVFPTAGAGTDLRSNYLLNTTIAGVEEADVVLLVGTNPRFEAPLFNARIRKSWLHNDLKVALIGSPVDLTYTYDHLGDSPKILQDIASGSHPFSQVLKEAKKPMVVLGSSALQRNDGAAILAAVSSIAQKIRMTSGVTGDWKVMNILHRIASQVAALDLGYKPGVEAIRKNPPKVLFLLGADGGCITRQDLPKDCFIIYQGHHGDVGAPIADVILPGAAYTEKSATYVNTEGRAQQTKVAVTPPGLAREDWKIIRALSEIAGMTLPYDTLDQVRNRLEEVSPNLVRYDDIEGANYFQQANELSKLVNQQLLADPLVPPQLTIKDFYMTDSISRASQTMAKCVKAVTEGAQAVEEPSIC

SEQ ID NO: 32852 - protein, 234 aa, Homo sapiens
MLRVPEPRPGEAKAEGAAPPTPSKPLTSFLIQDILRDGAQRQGGRTSSQRQRDPEPEPEPEPEGGRSRAGAQNDQLSTGPRAAPEEAETLAETEPERHLGSYLLDSENTSGALPRLPQTPKQPQKRSRAAFSHTQVIELERKFSHQKYLSAPERAHLAKNLKLTETQVKIWFQNRRYKTKRKQLSSELGDLEKHSSLPALKEEAFSRASLVSVYNSYPYYPYLYCVGSWSPAFW

SEQ ID NO: 32853 - protein, 185 aa, Homo sapiens
MLRVPEPEPEPEPEGGRSRAGAQNDQLSTGPRAAPEEAETLAETEPERHLGSYLLDSENTSGALPRLPQTPKQPQKRSRAAFSHTQVIELERKFSHQKYLSAPERAHLAKNLKLTETQVKIWFQNRRYKTKRKQLSSELGDLEKHSSLPALKEEAFSRASLVSVYNSYPYYPYLYCVGSWSPAFW

SEQ ID NO: 32854 - protein, 159 aa, Homo sapiens
MLRVPEPRPGEAETLAETEPERHLGSYLLDSENTSGALPRLPQTPKQPQKRSRAAFSHTQVIELERKFSHQKYLSAPERAHLAKNLKLTETQVKIWFQNRRYKTKRKQLSSELGDLEKHSSLPALKEEAFSRASLVSVYNSYPYYPYLYCVGSWSPAFW

SEQ ID NO: 32855 - protein, 165 aa, Homo sapiens
MLRVPEPRPGEAKAPEEAETLAETEPERHLGSYLLDSENTSGALPRLPQTPKQPQKRSRAAFSHTQVIELERKFSHQKYLSAPERAHLAKNLKLTETQVKIWFQNRRYKTKRKQLSSELGDLEKHSSLPALKEEAFSRASLVSVYNSYPYYPYLYCVGSWSPAFW

SEQ ID NO: 32856 - protein, 190 aa, Homo sapiens
MLRVPEPRPGEAKAEGAAPPTPSKPLTSFLIQDILRDGAPEEAETLAETEPERHLGSYLLDSENTSGALPRLPQTPKQPQKRSRAAFSHTQVIELERKFSHQKYLSAPERAHLAKNLKLTETQVKIWFQNRRYKTKRKQLSSELGDLEKHSSLPALKEEAFSRASLVSVYNSYPYYPYLYCVGSWSPAFW

SEQ ID NO: 32857 - protein, 543 aa, Homo sapiens
MSSFSYEPYYSTSYKRRYVETPRVHISSVRSGYSTARSAYSSYSAPVSSSLSVRRSYSSSSGSLMPSLENLDLSQVAAISNDLKSIRTQEKAQLQDLNDRFASFIERVHELEQQNKVLEAELLVLRQKHSEPSRFRALYEQEIRDLRLAAEDATNEKQALQGEREGLEETLRNLQARYEEEVLSREDAEGRLMEARKGADEAALARAELEKRIDSLMDEISFLKKVHEEEIAELQAQIQYAQISVEMDVTKPDLSAALKDIRAQYEKLAAKNMQNAEEWFKSRFTVLTESAAKNTDAVRAAKDEVSESRRLLKAKTLEIEACRGMNEALEKQLQELEDKQNADISAMQDTINKLENELRTTKSEMARYLKEYQDLLNVKMALDIEIAAYRKLLEGEETRLSFTSVGSITSGYSQSSQVFGRSAYGGLQTSSYLMSTRSFPSYYTSHVQEEQIEVEETIEAAKAEEAKDEPPSEGEAEEEEKDKEEAEEEEAAEEEEAAKEESEEAKEEEEGGEGEEGEETKEAEEEEKKVEGAGEEQAAKKKD

SEQ ID NO: 32858 - protein, 231 aa, Homo sapiens
MSKQRGTFSEVSLAQDPKRQQRKPKGNKSSISGTEQEIFQVELNLQNPSLNHQGIDKIYDCQGLLPPPEKLTAEVLGIICIVLMATVLKTIVLIPFLEQNNSSPNTRTQKARHCGHCPEEWITYSNSCYYIGKERRTWEESLLACTSKNSSLLSIDNEEEMKFLASILPSSWIGVFRNSSHHPWVTINGLAFKHKIKDSDNAELNCAVLQVNRLKSAQCGSSMIYHCKHKL

SEQ ID NO: 32859 - protein, 354 aa, Homo sapiens
MSLSPKHTTPFSVSDILSPIEETYKKFSGAMDGAPPGLGAPLGAAAAYRAPPPGPSSQAATVAGMQPSHAMAGHNAAAAAAAAAAAAAAAATYHMPPGVSQFPHGAMGSYCNGGLGNMGELPAYTDGMRGGAATGWYGANPDPRYSSISRFMGPSAGVNVAGMGSLTGIADAAKSLGPLHAAAAAAAPRRKRRVLFSQAQVYELERRFKQQKYLSAPEREHLASMIHLTPTQVKIWFQNHRYKMKRQAKDKAAQQLQQEGGLGPPPPPPPSPRRVAVPVLVKDGKPCQNGASTPTPGQAGPQPPAPTPAPELEELSPSPPALHGPGGGLAALDAAAGEYSGGVLGANLLYGRTW

SEQ ID NO: 32860 - protein, 371 aa, Homo sapiens
MSMSPKHTTPFSVSDILSPLEESYKKVGMEGGGLGAPLAAYRQGQAAPPTAAMQQHAVGHHGAVTAAYHMTAAGVPQLSHSAVGGYCNGNLGNMSELPPYQDTMRNSASGPGWYGANPDPRFPAISRFMGPASGMNMSGMGGLGSLGDVSKNMAPLPSAPRRKRRVLFSQAQVYELERRFKQQKYLSAPEREHLASMIHLTPTQVKIWFQNHRYKMKRQAKDKAAQQQLQQDSGGGGGGGGTGCPQQQQAQQQSPRRVAVPVLVKDGKPCQAGAPAPGAASLQGHAQQQAQHQAQAAQAAAAAISVGSGGAGLGAHPGHQPGSAGQSPDLAHHAASPAALQGQVSSLSHLNSSGSDYGTMSCSTLLYGRTW

SEQ ID NO: 32861 - protein, 401 aa, Homo sapiens
MWSGGSGKARGWEAAAGGRSSPGRLSRRRIMSMSPKHTTPFSVSDILSPLEESYKKVGMEGGGLGAPLAAYRQGQAAPPTAAMQQHAVGHHGAVTAAYHMTAAGVPQLSHSAVGGYCNGNLGNMSELPPYQDTMRNSASGPGWYGANPDPRFPAISRFMGPASGMNMSGMGGLGSLGDVSKNMAPLPSAPRRKRRVLFSQAQVYELERRFKQQKYLSAPEREHLASMIHLTPTQVKIWFQNHRYKMKRQAKDKAAQQQLQQDSGGGGGGGGTGCPQQQQAQQQSPRRVAVPVLVKDGKPCQAGAPAPGAASLQGHAQQQAQHQAQAAQAAAAAISVGSGGAGLGAHPGHQPGSAGQSPDLAHHAASPAALQGQVSSLSHLNSSGSDYGTMSCSTLLYGRTW

SEQ ID NO: 32862 - protein, 485 aa, Homo sapiens
MAAAVPDEAVARDVQRLLVQFQDEGGQLLGSPFDVPVDITPDRLQLVCNALLAQEDPLPLAFFVHDAEIVSSLGKTLESQAVETEKVLDIIYQPQAIFRVRAVTRCTSSLEGHSEAVISVAFSPTGKYLASGSGDTTVRFWDLSTETPHFTCKGHRHWVLSISWSPDGRKLASGCKNGQILLWDPSTGKQVGRTLAGHSKWITGLSWEPLHANPECRYVASSSKDGSVRIWDTTAGRCERILTGHTQSVTCLRWGGDGLLYSASQDRTIKVWRAHDGVLCRTLQGHGHWVNTMALSTDYALRTGAFEPAEASVNPQDLQGSLQELKERALSRYNLVRGQGPERLVSGSDDFTLFLWSPAEDKKPLTRMTGHQALINQVLFSPDSRIVASASFDKSIKLWDGRTGKYLASLRGHVAAVYQIAWSADSRLLVSGSSDSTLKVWDVKAQKLAMDLPGHADEVYAVDWSPDGQRVASGGKDKCLRIWRR

SEQ ID NO: 32863 - protein, 193 aa, Homo sapiens
MALSTDYALRTGAFEPAEASVNPQDLQGSLQELKERALSRYNLVRGQGPERLVSGSDDFTLFLWSPAEDKKPLTRMTGHQALINQVLFSPDSRIVASASFDKSIKLWDGRTGKYLASLRGHVAAVYQIAWSADSRLLVSGSSDSTLKVWDVKAQKLAMDLPGHADEVYAVDWSPDGQRVASGGKDKCLRIWRR

SEQ ID NO: 32864 - protein, 264 aa, Homo sapiens
MAAAAVARLWWRGILGASALTRGTGRPSVLLLPVRRESAGADTRPTVRPRNDVAHKQLSAFGEYVAEILPKYVQQVQVSCFNELEVCIHPDGVIPVLTFLRDHTNAQFKSLVDLTAVDVPTRQNRFEIVYNLLSLRFNSRIRVKTYTDELTPIESAVSVFKAANWYEREIWDMFGVFFANHPDLRRILTDYGFEGHPFRKDFPLSGYVELRYDDEVKRVVAEPVELAQEFRKFDLNSPWEAFPVYRQPPESLKLEAGDKKPDAK

SEQ ID NO: 32865 - protein, 132 aa, Homo sapiens
MAAAAVARLWWRGILGASALTRGTGRPSVLLLPVRRESAGADTRPTVRPRNDVAHKQLSAFGEYVAEILPKYVQQVQVSCFNELEVCIHPDGVIPVLTFLRDHTNAQFKSLVDLTAVDVPTRQNRFEVSWEI

SEQ ID NO: 32866 - protein, 590 aa, Homo sapiens
MAGAVPGAIMDEDYYGSAAEWGDEADGGQQEDDSGEGEDDAEVQQECLHKFSTRDYIMEPSIFNTLKRYFQAGGSPENVIQLLSENYTAVAQTVNLLAEWLIQTGVEPVQVQETVENHLKSLLIKHFDPRKADSIFTEEGETPAWLEQMIAHTTWRDLFYKLAEAHPDCLMLNFTVKLISDAGYQGEITSVSTACQQLEVFSRVLRTSLATILDGGEENLEKNLPEFAKMVCHGEHTYLFAQAMMSVLAQEEQGGSAVRRIAQEVQRFAQEKGHDASQITLALGTAASYPRACQALGAMLSKGALNPADITVLFKMFTSMDPPPVELIRVPAFLDLFMQSLFKPGARINQDHKHKYIHILAYAASVVETWKKNKRVSINKDELKSTSKAVETVHNLCCNENKGASELVAELSTLYQCIRFPVVAMGVLKWVDWTVSEPRYFQLQTDHTPVHLALLDEISTCHQLLHPQVLQLLVKLFETEHSQLDVMEQLELKKTLLDRMVHLLSRGYVLPVVSYIRKCLEKLDTDISLIRYFVTEVLDVIAPPYTSDFVQLFLPILENDSIAGTIKTEGEHDPVTEFIAHCKSNFIMVN

SEQ ID NO: 32867 - protein, 201 aa, Homo sapiens
MAGAVPGAIMDEDYYGSAAEWGDEADGGQQEDDSGEGEDDAEVQQECLHKFSTRDYIMEPSIFNTLKRYFQAGGSPENVIQLLSENYTAVAQTVNLLAEWLIQTGVEPVQVQETVENHLKSLLIKHFDPRKADSIFTEEGETPAWLEQMIAHTTWRDLFYKLAEAHPDCLMLNFTVKVGRVLELRRKVFMNVYFWLLVCFL

SEQ ID NO: 32868 - protein, 581 aa, Homo sapiens
MDEDYYGSAAEWGDEADGGQQEDDSGEGEDDAEVQQECLHKFSTRDYIMEPSIFNTLKRYFQAGGSPENVIQLLSENYTAVAQTVNLLAEWLIQTGVEPVQVQETVENHLKSLLIKHFDPRKADSIFTEEGETPAWLEQMIAHTTWRDLFYKLAEAHPDCLMLNFTVKLISDAGYQGEITSVSTACQQLEVFSRVLRTSLATILDGGEENLEKNLPEFAKMVCHGEHTYLFAQAMMSVLAQEEQGGSAVRRIAQEVQRFAQEKGHDASQITLALGTAASYPRACQALGAMLSKGALNPADITVLFKMFTSMDPPPVELIRVPAFLDLFMQSLFKPGARINQDHKHKYIHILAYAASVVETWKKNKRVSINKDELKSTSKAVETVHNLCCNENKGASELVAELSTLYQCIRFPVVAMGVLKWVDWTVSEPRYFQLQTDHTPVHLALLDEISTCHQLLHPQVLQLLVKLFETEHSQLDVMEQLELKKTLLDRMVHLLSRGYVLPVVSYIRKCLEKLDTDISLIRYFVTEVLDVIAPPYTSDFVQLFLPILENDSIAGTIKTEGEHDPVTEFIAHCKSNFIMVN

SEQ ID NO: 32869 - protein, 1375 aa, Homo sapiens
MEGDRVAGRPVLSSLPVLLLLPLLMLRAAALHPDELFPHGESWGDQLLQEGDDESSAVVKLANPLHFYEARFSNLYVGTNGIISTQDFPRETQYVDYDFPTDFPAIAPFLADIDTSHGRGRVLYREDTSPAVLGLAARYVRAGFPRSARFTPTHAFLATWEQVGAYEEVKRGALPSGELNTFQAVLASDGSDSYALFLYPANGLQFLGTRPKESYNVQLQLPARVGFCRGEADDLKSEGPYFSLTSTEQSVKNLYQLSNLGIPGVWAFHIGSTSPLDNVRPAAVGDLSAAHSSVPLGRSFSHATALESDYNEDNLDYYDVNEEEAEYLPGEPEEALNGHSSIDVSFQSKVDTKPLEESSTLDPHTKEGTSLGEVGGPDLKGQVEPWDERETRSPAPPEVDRDSLAPSWETPPPYPENGSIQPYPDGGPVPSEMDVPPAHPEEEIVLRSYPASGHTTPLSRGTYEVGLEDNIGSNTEVFTYNAANKETCEHNHRQCSRHAFCTDYATGFCCHCQSKFYGNGKHCLPEGAPHRVNGKVSGHLHVGHTPVHFTDVDLHAYIVGNDGRAYTAISHIPQPAAQALLPLTPIGGLFGWLFALEKPGSENGFSLAGAAFTHDMEVTFYPGEETVRITQTAEGLDPENYLSIKTNIQGQVPYVSANFTAHISPYKELYHYSDSTVTSTSSRDYSLTFGAINQTWSYRIHQNITYQVCRHAPRHPSFPTTQQLNVDRVFALYNDEERVLRFAVTNQIGPVKEDSDPTPGNPCYDGSHMCDTTARCHPGTGVDYTCECASGYQGDGRNCVDENECATGFHRCGPNSVCINLPGSYRCECRSGYEFADDRHTCILITPPANPCEDGSHTCAPAGQARCVHHGGSTFSCACLPGYAGDGHQCTDVDECSENRCHPAATCYNTPGSFSCRCQPGYYGDGFQCIPDSTSSLTPCEQQQRHAQAQYAYPGARFHIPQCDEQGNFLPLQCHGSTGFCWCVDPDGHEVPGTQTPPGSTPPHCGPSPEPTQRPPTICERWRENLLEHYGGTPRDDQYVPQCDDLGHFIPLQCHGKSDFCWCVDKDGREVQGTRSQPGTTPACIPTVAPPMVRPTPRPDVTPPSVGTFLLYTQGQQIGYLPLNGTRLQKDAAKTLLSLHGSIIVGIDYDCRERMVYWTDVAGRTISRAGLELGAEPETIVNSGLISPEGLAIDHIRRTMYWTDSVLDKIESALLDGSERKVLFYTDLVNPRAIAVDPIRGNLYWTDWNREAPKIETSSLDGENRRILINTDIGLPNGLTFDPFSKLLCWADAGTKKLECTLPDGTGRRVIQNNLKYPFSIVSYADHFYHTDWRRDGVVSVNKHSGQFTDEYLPEQRSHLYGITAVYPYCPTGRK

SEQ ID NO: 32870 - protein, 1274 aa, Homo sapiens
MEGDRVKLANPLHFYEARFSNLYVGTNGIISTQDFPRETQYVDYDFPTDFPAIAPFLADIDTSHGRGRVLYREDTSPAVLGLAARYVRAGFPRSARFTPTHAFLATWEQVGAYEEVKRGALPSGELNTFQAVLASDGSDSYALFLYPANGLQFLGTRPKESYNVQLQLPARVGFCRGEADDLKSEGPYFSLTSTEQSVKNLYQLSNLGIPGVWAFHIGSTSPLDNVRPAAVGDLSAAHSSVPLGRSFSHATALESDYNEDNLDYYDVNEEEAEYLPGEPEEALNGHSSIDVSFQSKVDTKPLEESSTLDPHTKEGTSLGEVGGPDLKGQVEPWDERETRSPAPPEVDRDSLAPSWETPPPYPENGSIQPYPDGGPVPSEMDVPPAHPEEEIVLRSYPASGHTTPLSRGTYEVGLEDNIGSNTEVFTYNAANKETCEHNHRQCSRHAFCTDYATGFCCHCQSKFYGNGKHCLPEGAPHRVNGKVSGHLHVGHTPVHFTDVDLHAYIVGNDGRAYTAISHIPQPAAQALLPLTPIGGLFGWLFALEKPGSENGFSLAGAAFTHDMEVTFYPGEETVRITQTAEGLDPENYLSIKTNIQGQVPYVSANFTAHISPYKELYHYSDSTVTSTSSRDYSLTFGAINQTWSYRIHQNITYQVCRHAPRHPSFPTTQQLNVDRVFALYNDEERVLRFAVTNQIGPVKEDSDPTPGNPCYDGSHMCDTTARCHPGTGVDYTCECASGYQGDGRNCVDENECATGFHRCGPNSVCINLPGSYRCECRSGYEFADDRHTCIYVDECSENRCHPAATCYNTPGSFSCRCQPGYYGDGFQCIPDSTSSLTPCEQQQRHAQAQYAYPGARFHIPQCDEQGNFLPLQCHGSTGFCWCVDPDGHEVPGTQTPPGSTPPHCGPSPEPTQRPPTICERWRENLLEHYGGTPRDDQYVPQCDDLGHFIPLQCHGKSDFCWCVDKDGREVQGTRSQPGTTPACIPTVAPPMVRPTPRPDVTPPSVGTFLLYTQGQQIGYLPLNGTRLQKDAAKTLLSLHGSIIVGIDYDCRERMVYWTDVAGRTISRAGLELGAEPETIVNSGLISPEGLAIDHIRRTMYWTDSVLDKIESALLDGSERKVLFYTDLVNPRAIAVDPIRGNLYWTDWNREAPKIETSSLDGENRRILINTDIGLPNGLTFDPFSKLLCWADAGTKKLECTLPDGTGRRVIQNNLKYPFSIVSYADHFYHTDWRRDGVVSVNKHSGQFTDEYLPEQRSHLYGITAVYPYCPTGRK

SEQ ID NO: 32871 - protein, 704 aa, Homo sapiens
MIARCLLAVRSLRRVGGSRILLRMTLGREVMSPLQAMSSYTVAGRNVLRWDLSPEQIKTRTEELIVQTKQVYDAVGMLGIEEVTYENCLQALADVEVKYIVERTMLDFPQHVSSDKEVRAASTEADKRLSRFDIEMSMRGDIFERIVHLQETCDLGKIKPEARRYLEKSIKMGKRNGLHLPEQVQNEIKSMKKRMSELCIDFNKNLNEDDTFLVFSKAELGALPDDFIDSLEKTDDDKYKITLKYPHYFPVMKKCCIPETRRRMEMAFNTRCKEENTIILQQLLPLRTKVAKLLGYSTHADFVLEMNTAKSTSRVTAFLDDLSQKLKPLGEAEREFILNLKKKECKDRGFEYDGKINAWDLYYYMTQTEELKYSIDQEFLKEYFPIEVVTEGLLNTYQELLGLSFEQMTDAHVWNKSVTLYTVKDKATGEVLGQFYLDLYPREGKYNHAACFGLQPGCLLPDGSRMMAVAALVVNFSQPVAGRPSLLRHDEVRTYFHEFGHVMHQICAQTDFARFSGTNVETDFVEVPSQMLENWVWDVDSLRRLSKHYKDGSPIADDLLEKLVASRLVNTGLLTLRQIVLSKVDQSLHTNTSLDAASEYAKYCSEILGVAATPGTNMPATFGHLAGGYDGQYYGYLWSEVFSMDMFYSCFKKEGIMNPEVGMKYRNLILKPGGSLDGMDMLHNFLKREPNQKAFLMSRGLHAP

SEQ ID NO: 32872 - protein, 114 aa, Homo sapiens
MSQAELSTCSAPQTQRIFQEAVRKGNTQELQSLLQNMTNCEFNVNSFGPEGQTALHQSVIDGNLELVKLLVKFGADIRLANRDGWSALHIAAFGGHQDIVLYLITKAKYAASGR

SEQ ID NO: 32873 - protein, 438 aa, Homo sapiens
MIRKLFIVLLLLLVTIEEARMSSLSFLNIEKTEILFFTKTEETILVSSSYENKRPNSSHLFVKIEDPKILQMVNVAKKISSDATNFTINLVTDEEGETNVTIQLWDSEGRQERLIEEIKNVKVKVLKQKDSLLQAPMHIDRNILMLILPLILLNKCAFGCKIELQLFQTVWKRPLPVILGAVTQFFLMPFCGFLLSQIVALPEAQAFGVVMTCTCPGGGGGYLFALLLDGDFTLAILMTCTSTLLALIMMPVNSYIYSRILGLSGTFHIPVSKIVSTLLFILVPVSIGIVIKHRIPEKASFLERIIRPLSFILMFVGIYLTFTVGLVFLKTDNLEVILLGLLVPALGLLFGYSFAKVCTLPLPVCKTVAIESGMLNSFLALAVIQLSFPQSKANLASVAPFTVAMCSGCEMLLIILVYKAKKRCIFFLQDKRKRNFLI

SEQ ID NO: 32874 - protein, 287 aa, Homo sapiens
MEVMEGPLNLAHQQSRRADRLLAAGKYEEAISCHKKAAAYLSEAMKLTQSEQAHLSLELQRDSHMKQLLLIQERWKRAQREERLKAQQNTDKDAAAHLQTSHKPSAEDAEGQSPLSQKYSPSTEKCLPEIQGIFDRDPDTLLYLLQQKSEPAEPCIGSKAPKDDKTIIEEQATKIADLKRHVEFLVAENERLRKENKQLKAEKARLLKGPIEKELDVDADFVETSELWSLPPHAETATASSTWQKFAANTGKAKDIPIPNLPPLDFPSPELPLMELSEDILKGFMNN

SEQ ID NO: 32875 - protein, 237 aa, Homo sapiens
MEVMEGPLNLAHQQSRRADRLLAAGKYEEAISCHKKAAAYLSEAMKLTQSEQAHLSLELQRDSHMKQLLLIQERWKRAQREERLKAQQNTLLYLLQQKSEPAEPCIGSKAPKDDKTIIEEQATKIADLKRHVEFLVAENERLRKENKQLKAEKARLLKGPIEKELDVDADFVETSELWSLPPHAETATASSTWQKFAANTGKAKDIPIPNLPPLDFPSPELPLMELSEDILKGFMNN

SEQ ID NO: 32876 - protein, 277 aa, Homo sapiens
MFPGATTPLPKAAAYPGVYGSNGRTPQPAYLSEAMKLTQSEQAHLSLELQRDSHMKQLLLIQERWKRAQREERLKAQQNTDKDAAAHLQTSHKPSAEDAEGQSPLSQKYSPSTEKCLPEIQGIFDRDPDTLLYLLQQKSEPAEPCIGSKAPKDDKTIIEEQATKIADLKRHVEFLVAENERLRKENKQLKAEKARLLKGPIEKELDVDADFVETSELWSLPPHAETATASSTWQKFAANTGKAKDIPIPNLPPLDFPSPELPLMELSEDILKGFMNN

SEQ ID NO: 32877 - protein, 340 aa, Homo sapiens
MRLLERMRKDWFMVGIVLAIAGAKLEPSIGVNGGPLKPEITVSYIAVATIFFNSGLSLKTEELTSALVHLKLHLFIQIFTLAFFPATIWLFLQLLSITPINEWLLKGLQTVGCMPPPVSSAVILTKAVGGNEAAAIFNSAFGSFLGIVITPLLLLLFLGSSSSVPFTSIFSQLFMTVVVPLIIGQIVRRYIKDWLERKKPPFGAISSSVLLMIIYTTFCDTFSNPNIDLDKFSLVLILFIIFSIQLSFMLLTFIFSTRNNSGFTPADTVAIIFCSTHKSLTLGIPMLKIVFAGHEHLSLISVPLLIYHPAQILLGSVLVPTIKSWMVSRQKGVKLTRPTV

SEQ ID NO: 32878 - protein, 358 aa, Homo sapiens
MRLLERMRKDWFMVGIVLAIAGAKLEPSIGVNGGPLKPEITVSYIAVATIFFNSGLSLKTEELTSALVHLKLHLFIQIFTLAFFPATIWLFLQLLSITPINEWLLKGLQTVGCMPPPVSSAVILTKAVGGNEAAAIFNSAFGSFLGIVITPLLLLLFLGSSSSVPFTSIFSQLFMTVVVPLIIGQIVRRYIKDWLERKKPPFGAISSSVLLMIIYTTFCDTFSNPNIDLDKFSLVLILFIIFSIQLSFMLLTFIFSTRNNSGFTPADTVAIIFCSTHKSLTLGIPMLKIVFAGHEHLSLISVPLLIYHPAQILLGSVLVPTIKSWMVSRQKKLLQTRGPLANLNNPEGLEYLSIKFGH

SEQ ID NO: 32879 - protein, 327 aa, Homo sapiens
MRLLERMRKDWFMVGIVLAIAGAKLEPSIGVNGGPLKPEITVSYIAVATIFFNSGLSLKTEELTSALVHLKLHLFIQIFTLAFFPATIWLFLQLLSITPINEWLLKGLQTVGCMPPPVSSAVILTKAVGGNEGIVITPLLLLLFLGSSSSVPFTSIFSQLFMTVVVPLIIGQIVRRYIKDWLERKKPPFGAISSSVLLMIIYTTFCDTFSNPNIDLDKFSLVLILFIIFSIQLSFMLLTFIFSTRNNSGFTPADTVAIIFCSTHKSLTLGIPMLKIVFAGHEHLSLISVPLLIYHPAQILLGSVLVPTIKSWMVSRQKGVKLTRPTV

SEQ ID NO: 32880 - protein, 186 aa, Homo sapiens
MRLLERMRKDWFMVGIVLAIAGAKLEPSIGVNGGPLKPEITVSYIAVATIFFNSGLSLKTEELTSALVHLKLHLFIQIFTLAFFPATIWLFLQLLSITPINEWLLKGLQTVGCMPPPVSSAVILTKAVGGNEAAAIFNSAFGSFLGIVITPLLLLLFLGSSSSVPFTSIFSQLFMTVVVPLIIGQE

SEQ ID NO: 32881 - protein, 159 aa, Homo sapiens
MRLLERMRKDWFMVGIVLAIAGAKLEPSIGVNGGPLKPEITVSYIAVATIFFNSGLSLKTEELTSALVHLKLHLFIQIFTLAFFPATIWLFLQLLSITPINEWLLKGLQTVGCMPPPVSSAVILTKAVGGNEAAAIFNSAFGSFLVSKHSLTCLLQLLL

SEQ ID NO: 32882 - protein, 64 aa, Homo sapiens
MRLLERMRKDWFMVGIVLAIAGAKLEPSIGVNGGPLKPEITVSYIAVATIFFNSGLSLKTELLT

SEQ ID NO: 32883 - protein, 85 aa, Homo sapiens
MRLLERMRKDWFMVGIVLAIAGAKLEPSIGVNGGPLKPEITVSYIAVATIFFNSGLSLKTEFADSRLHASACVFCSDFNQGSWWK

SEQ ID NO: 32884 - protein, 300 aa, Homo sapiens
MALQDVCKWQSPDTQGPSPHLPRAGGWAVPRGCDPQTFLQIHGPRLAHGTTTLAFRFRHGVIAAADTRSSCGSYVACPASCKVIPVHQHLLGTTSGTSADCATWYRVLQRELRLRELREGQLPSVASAAKLLSAMMSQYRGLDLCVATALCGWDRSGPELFYVYSDGTRLQGDIFSVGSGSPYAYGVLDRGYRYDMSTQEAYALARCAVAHATHRDAYSGGSVDLFHVRESGWEHVSRSDACVLYVELQKLLEPEPEEDASHAHPEPATAHRAAEDRELSVGPGEVTPGDSRMPAGTETV

SEQ ID NO: 32885 - protein, 283 aa, Homo sapiens
MAHRGAHFAFRSRWQKTDDELCRHSMSFILHKAIRNDFFQSYLYLLEKIPLVKLYALTSQVINGEMQFYARAKLFYQEVPATEEGMMGNFIELSSPDIQASQKFLRKFVGGPGRAGTDCALDCGSGIGRVSKHVLLPVFNSVELVDMMESFLLEAQNYLQVKGDKVESYHCYSLQEFTPPFRRYDVIWIQWVSGHLTDKDLLAFLSRCRDGLKENGIIILKDNVAREGCILDLSDSSVTRDMDILRSLIRKSGLVVLGQEKQDGFPEQCIPVWMFALHSDRHS

SEQ ID NO: 32886 - protein, 480 aa, Homo sapiens
MDRSLPVFSIQDSPFGDAPLGRSHYWPSQSQTWCPKTLSPSRSQRSRLPQAPKALATGPNSPELFEESWPSSSGTPSLPSTTEGQMWASPAPTLIDSGDSVVAKYINRFRQAQPTSREERQPAGPTPADFWWLQSDSPDPSSQSAAAGANKPEGRPHTAVPTAVNVTSASHAVAPLQEIKQNLHTWNSSLLDLETLSLQSRAARLLKRSKASISSSSSLSPSDASTSSFPTSSDGLSPFSETFIPDSSKGLGPRAPASPAPAQAQTPTPAPAPASSQAPLRPEDDILYQWRQRRKLEQAQGSKGDRAWVPPLTPALRTLAESLKAKALPPAAGSVIRKSEATPSPGACLQPEVPLSPAEQATTVKASPPAFQVGSPEALAPPPPAADHAPSEALLAQAALLLQAAEDSDGSEFQDDPVLQVLRAHRAELSRQKREADARLSFLLDQAEDLGSWSPPAGSPPRSPRRLLRREGDSLEARRL

SEQ ID NO: 32887 - protein, 324 aa, Homo sapiens
MDRSLPVFSIQDSPFGDAPLGRSHYWPSQSQTWCPKTLSPSRSQRSRLPQAPKALATGPNSPELFEESWPSSSGTPSLPSTTEGQMWASPAPTLIDSGDSVVAKYINRFRQAQPTSREERQPAGPTPADFWWLQSDSPDPSSQSAAGANKPEGRPHTAVPTAVNVTSASHAVAPLQEIKQNLHTWNSSLLDLETLSLQSRAARLLKRSPSDASTSSFPTSSDGLSPFSETFIPDSSKGLGPRAPASPAPAQAQTPTPAPAPASSQAPLRPEDDILYQWRQRRKLEQAQGSKGDRAWVPPLTPALRTLVSRGREEPGGSWRRGWV

SEQ ID NO: 32888 - protein, 193 aa, Homo sapiens
MDRSLPVFSIQDSPFGDAPLGRSHYWPSQSQTWCPKTLSPSRSQRSRLPQAPKALATGPNSPELFEESWPSSSGTPSLPSTTEGQMWASPAPTLIDSGDSVVAKYINRFRQAQPTSREERQPAGPTPADFWWLQSDSPDPSSQSAAGANKPEGRPHTAVPTAVNVTSASHAVAPLQEIKQVTSPFTPSLGCLN

SEQ ID NO: 32889 - protein, 194 aa, Homo sapiens
MDRSLPVFSIQDSPFGDAPLGRSHYWPSQSQTWCPKTLSPSRSQRSRLPQAPKALATGPNSPELFEESWPSSSGTPSLPSTTEGQMWASPAPTLIDSGDSVVAKYINRFRQAQPTSREERQPAGPTPADFWWLQSDSPDPSSQSAAAGANKPEGRPHTAVPTAVNVTSASHAVAPLQEIKQVTSPFTPSLGCLN

SEQ ID NO: 32890 - protein, 364 aa, Homo sapiens
MWVRTTLTIERWTKEKTEPKARSWDEALSDVNRLPSWERGHLLAGVASSTDVSTFSEGGDCKEPDKCCWRHKQCTGHIIYPFASDCVRHSLHLHSVNHCNCNSRLKDSSEDSSSSRGAGPTCSHVIESPCFELTPEEEHVERFRYGWCKSYRPVSVAVIHHPLYHECGADDLNEEEEEEEEESKPPIPTQVGPATASPDLGTSMATGTPDSTAPITIWRSESPTGKGQGSKVIKKVKKKKEKEKDKEEMDEKAKLKKKAKKGQLTKKKSPVKLEPSPPDVSRSLSARQLARMSESSPESREELESEDSYNGRGQGELSSEDIVESSSPRKRENTVQAKKTGAKPSQARKVNKRKSPPGSNPNLS

SEQ ID NO: 32891 - protein, 336 aa, Homo sapiens
MWVRTTLTIERWTKEKTEPKARSWDESRCRGDCKEPDKCCWRHKQCTGHIIYPFASDCVRHSLHLHSVNHCNCNSRLKDSSEDSSSSRGAGPTCSHVIESPCFELTPEEEHVERFRYGWCKSYRPVSVAVIHHPLYHECGADDLNEEEEEEEEESKPPIPTQVGPATASPDLGTSMATGTPDSTAPITIWRSESPTGKGQGSKVIKKVKKKKEKEKDKEEMDEKAKLKKKAKKGQLTKKKSPVKLEPSPPDVSRSLSARQLARMSESSPESREELESEDSYNGRGQGELSSEDIVESSSPRKRENTVQAKKTGAKPSQARKVNKRKSPPGSNPNLS

SEQ ID NO: 32892 - protein, 338 aa, Homo sapiens
MSITYVNRLPSWERGHLLAGVASSTDVSTFSEGDCKEPDKCCWRHKQCTGHIIYPFASDCVRHSLHLHSVNHCNCNSRLKDSSEDSSSSRGAGPTCSHVIESPCFELTPEEEHVERFRYGWCKSYRPVSVAVIHHPLYHECGADDLNEEEEEEEEESKPPIPTQVGPATASPDLGTSMATGTPDSTAPITIWRSESPTGKGQGSKVIKKVKKKKEKEKDKEEMDEKAKLKKKAKKGQLTKKKSPVKLEPSPPDVSRSLSARQLARMSESSPESREELESEDSYNGRGQGELSSEDIVESSSPRKRENTVQAKKTGAKPSQARKVNKRKSPPGSNPNLS

SEQ ID NO: 32893 - protein, 176 aa, Homo sapiens
MRKHLSWWWLATVCMLLFSHLSAVQTRGIKHRIKWNRKALPSTAQITEAQVAENRPGAFIKQGRKLDIDFGAEGNRYYEANYWQFPDGIHYNGCSEANVTKEAFVTGCINATQAANQGEFQKPDNKLHQQVLWRLVQELCSLKHCEFWLERGAGLRVTMHQPVLLCLLALIWLTVK

SEQ ID NO: 32894 - protein, 343 aa, Homo sapiens
MAQKGVLGPGQLGAVAILLYLGLLRSGTGAEGAEAPCGVAPQARITGGSSAVAGQWPWQVSITYEGVHVCGGSLVSEQWVLSAAHCFPSEHHKEAYEVKLGAHQLDSYSEDAKVSTLKDIIPHPSYLQEGSQGDIALLQLSRPITFSRYIRPICLPAANASFPNGLHCTVTGWGHVAPSVSLLTPKPLQQLEVPLISRETCNCLYNIDAKPEEPHFVQEDMVCAGYVEGGKDACQGDSGGPLSCPVEGLWYLTGIVSWGDACGARNRPGVYTLASSYASWIQSKVTELQPRVVPQTQESQPDSNLCGSHLAFSSAPAQGLLRPILFLPLGLALGLLSPWLSEH

SEQ ID NO: 32895 - protein, 289 aa, Homo sapiens
MAQKGVLGPGQLGAVAILLYLGLLRSGTGAEGAEAPCGVAPQARITGGSSAVAGQWPWQVSTLKDIIPHPSYLQEGSQGDIALLQLSRPITFSRYIRPICLPAANASFPNGLHCTVTGWGHVAPSVSLLTPKPLQQLEVPLISRETCNCLYNIDAKPEEPHFVQEDMVCAGYVEGGKDACQGDSGGPLSCPVEGLWYLTGIVSWGDACGARNRPGVYTLASSYASWIQSKVTELQPRVVPQTQESQPDSNLCGSHLAFSSAPAQGLLRPILFLPLGLALGLLSPWLSEH

SEQ ID NO: 32896 - protein, 522 aa, Homo sapiens
MASSRASSTQATKTKAPDDLVAPVVKKPHIYYGSLEEKERERLAKGESGILGKDGLKAGIEAGNINITSGEVFEIEEHISERQAEVLAEFERRKRARQINVSTDDSEVKACLRALGEPITLFGEGPAERRERLRNILSVVGTDALKKTKKDDEKSKKSKEEYQQTWYHEGPNSLKVARLWIANYSLPRAMKRLEEARLHKEIPETTRTSQMQELHKSLRSLNNFCSQIGDDRPISYCHFSPNSKMLATACWSGLCKLWSVPDCNLLHTLRGHNTNVGAIVFHPKSTVSLDPKDVNLASCAADGSVKLWSLDSDEPVADIEGHTVRVARVMWHPSGRFLGTTCYDRSWRLWDLEAQEEILHQEGHSMGVYDIAFHQDGSLAGTGGLDAFGRVWDLRTGRCIMFLEGHLKEIYGINFSPNGYHIATGSGDNTCKVWDLRQRRCVYTIPAHQNLVTGVKFEPIHGNFLLTGAYDNTAKIWTHPGWSPLKTLAGHEGKVMGLDISSDGQLIATCSYDRTFKLWMAE

SEQ ID NO: 32897 - protein, 521 aa, Homo sapiens
MASSRASSTATKTKAPDDLVAPVVKKPHIYYGSLEEKERERLAKGESGILGKDGLKAGIEAGNINITSGEVFEIEEHISERQAEVLAEFERRKRARQINVSTDDSEVKACLRALGEPITLFGEGPAERRERLRNILSVVGTDALKKTKKDDEKSKKSKEEYQQTWYHEGPNSLKVARLWIANYSLPRAMKRLEEARLHKEIPETTRTSQMQELHKSLRSLNNFCSQIGDDRPISYCHFSPNSKMLATACWSGLCKLWSVPDCNLLHTLRGHNTNVGAIVFHPKSTVSLDPKDVNLASCAADGSVKLWSLDSDEPVADIEGHTVRVARVMWHPSGRFLGTTCYDRSWRLWDLEAQEEILHQEGHSMGVYDIAFHQDGSLAGTGGLDAFGRVWDLRTGRCIMFLEGHLKEIYGINFSPNGYHIATGSGDNTCKVWDLRQRRCVYTIPAHQNLVTGVKFEPIHGNFLLTGAYDNTAKIWTHPGWSPLKTLAGHEGKVMGLDISSDGQLIATCSYDRTFKLWMAE

SEQ ID NO: 32898 - protein, 491 aa, Homo sapiens
MSLVAYASSDESEPDEAEPEPEEEEAVAPTSGPALGGLFASLPAPKGPALLPPPPQMLAPAFPPPLLLPPPTGDPRLQPPPPLPFGLGGFPPPPGVSPAEAAGVGEGLGLGLPSPRGPGLNLPPPIGGAGPPLGLPKPKKRKEPVKIAAPELHKGDSDSEEDEPTKKKTILQGSSEGTGLSALLPQPKNLTVKETNRLLLPHAFSRKPSDGSPDTKPSRLASKTKTSSLAPVVGTTTTTPSPSAIKAAAKSAALQVTKQITQEEDDSDEEVAPENFFSLPEKAEPPGVEPYPYPIPTVPEELPPGTEPEPAFQDDAANAPLEFKMAAGSSGAPWMPKPGDDYSYNQFSTYGDANAAGAYYQDYYSGGYYPAQDPALVPPQEIAPDASFIDDEAFKRLQGKRNRGREEINFVEIKGDDQLSGAQQWMTKSLTEEKTMKSFSKKKGEQPTGQQRRKHQITYLIHQAKERELELKNTWSENKLSRRQTQAKYGF

SEQ ID NO: 32899 - protein, 1147 aa, Homo sapiens
MDSKDESSHVWPTSAEHEQNAAQVHFVPDTGTVAQIVYTDDQVRPPQQVVYTADGASYTSVDGPEHTLVYIHPVEAAQTLFTDPGQVAYVQQDATAQQASLPVHNQVLPSIESVDGSDPLATLQTPLGRLEAKEEEDEDEDEDTEEDEEEDGEDTDLDDWEPDPPRPFDPHDLWCEECNNAHASVCPKHGPLHPIPNRPVLTRARASLPLVLYIDRFLGGVFSKRRIPKRTQFGPVEGPLVRGSELKDCYIHLKVSLDKGDRKERDLHEDLWFELSDETLCNWMMFVRPAQNHLEQNLVAYQYGHHVYYTTIKNVEPKQELKVWYAASYAEFVNQKIHDISEEERKVLREQEKNWPCYECNRRFISSEQLQQHLNSHDEKLDVFSRTRGRGRGRGKRRFGPGRRPGRPPKFIRLEITSENGEKSDDGTQDLLHFPTKEQFDEAEPATLNGLDQPEQTTIPIPQLPQETQSSLEHEPETHTLHLQPQHEESVVPTQSTLTADDMRRAKRIRLELQNAALQHLFIRKSFRPFKCLQCGKAFREKDKLDQHLRFHGREGNCPLTCDLCNKGFISSTSLESHMKLHSDQKTYSCIFCPESFDRLDLLKDHVAIHINDGYFTCPTCKKRFPDFIQVKKHVRSFHSEKIYQCTECDKAFCRPDKLRLHMLRHSDRKDFLCSTCGKQFKRKDKLREHMQRMHNPEREAKKADRISRSKTFKPRITSTDYDSFTFKCRLCMMGFRRRGMLVNHLSKRHPDMKIEEVPELTLPIIKPNRDYFCQYCDKVYKSASKRKAHILKNHPGAELPPSIRKLRPAGPGEPDPMLSTHTQLTGTIATPPVCCPHCSKQYSSKTKMVQHIRKKHPEFAQLSNTIHTPLTTAVISATPAVLTTDSATGETVVTTDLLTQAMTELSQTLTTDYRTPQGDYQRIQYIPVSQSASGLQQPQHIQLQVVQVASATSPHQSQQSTVDVGQLHDPQPYPQHAIQVQHIQVSGQPLSPSAQQAQQGLSPSHIQGSSSTQGQALQQQQQQQQNSSVQHTYLPSAWNSFRGYSSEIQMMTLPPGQFVITDSGVATPVTTGQVKAVTSGHYVLSESQSELEEKQTSALSGGVQVEPPAHSDSLDPQTNSQQQTTQYIITTTTNGNGSSEVHITKP

SEQ ID NO: 32900 - protein, 1023 aa, Homo sapiens
MSAYSVPSTFAQASLPVHNQVLPSIESVDGSDPLATLQTPLGRLEAKEEEDEDEDEDTEEDEEEDGEDTDLDDWEPDPPRPFDPHDLWCEECNNAHASVCPKHGPLHPIPNRPVLTRARASLPLVLYIDRFLGGVFSKRRIPKRTQFGPVEGPLVRGSELKDCYIHLKVSLDKGDRKERDLHEDLWFELSDETLCNWMMFVRPAQNHLEQNLVAYQYGHHVYYTTIKNVEPKQELKVWYAASYAEFVNQKIHDISEEERKVLREQEKNWPCYECNRRFISSEQLQQHLNSHDEKLDVFSRTRGRGRGRGKRRFGPGRRPGRPPKFIRLEITSENGEKSDDGTQDLLHFPTKEQFDEAEPATLNGLDQPEQTTIPIPQLPQETQSSLEHEPETHTLHLQPQHEESVVPTQSTLTADDMRRAKRIRNAALQHLFIRKSFRPFKCLQCGKAFREKDKLDQHLRFHGREGNCPLTCDLCNKGFISSTSLESHMKLHSDQKTYSCIFCPESFDRLDLLKDHVAIHINDGYFTCPTCKKRFPDFIQVKKHVRSFHSEKIYQCTECDKAFCRPDKLRLHMLRHSDRKDFLCSTCGKQFKRKDKLREHMQRMHNPEREAKKADRISRSKTFKPRITSTDYDSFTFKCRLCMMGFRRRGMLVNHLSKRHPDMKIEEVPELTLPIIKPNRDYFCQYCDKVYKSASKRKAHILKNHPGAELPPSIRKLRPAGPGEPDPMLSTHTQLTGTIATPPVCCPHCSKQYSSKTKMVQHIRKKHPEFAQLSNTIHTPLTTAVISATPAVLTTDSATGETVVTTDLLTQAMTELSQTLTTDYRTPQGDYQRIQYIPVSQSASGLQQPQHIQLQVVQVASVSGQPLSPSAQQAQQGLSPSHIQGSSSTQGQALQQQQQQQQNSSVQHTYLPSAWNSFRGYSSEIQMMTLPPGQFVITDSGVATPVTTGQVKAVTSGHYVLSESQSELEEKQTSALSGGVQVEPPAHSDSLDPQTNSQQQTTQYIITTTTNGNGSSEVHITKP

SEQ ID NO: 32901 - protein, 1061 aa, Homo sapiens
MSAYSVPSTFAQASLPVHNQVLPSIESVDGSDPLATLQTPLGRLEAKEEEDEDEDEDTEEDEEEDGEDTDLDDWEPDPPRPFDPHDLWCEECNNAHASVCPKHGPLHPIPNRPVLTRARASLPLVLYIDRFLGGVFSKRRIPKRTQFGPVEGPLVRGSELKDCYIHLKVSLDKGDRKERDLHEDLWFELSDETLCNWMMFVRPAQNHLEQNLVAYQYGHHVYYTTIKNVEPKQELKVWYAASYAEFVNQKIHDISEEERKVLREQEKNWPCYECNRRFISSEQLQQHLNSHDEKLDVFSRTRGRGRGRGKRRFGPGRRPGRPPKFIRLEITSENGEKSDDGTQDLLHFPTKEQFDEAEPATLNGLDQPEQTTIPIPQLPQETQSSLEHEPETHTLHLQPQHEESVVPTQSTLTADDMRRAKRIRLELQNAALQHLFIRKSFRPFKCLQCGKAFREKDKLDQHLRFHGREGNCPLTCDLCNKGFISSTSLESHMKLHSDQKTYSCIFCPESFDRLDLLKDHVAIHINDGYFTCPTCKKRFPDFIQVKKHVRSFHSEKIYQCTECDKAFCRPDKLRLHMLRHSDRKDFLCSTCGKQFKRKDKLREHMQRMHNPEREAKKADRISRSKTFKPRITSTDYDSFTFKCRLCMMGFRRRGMLVNHLSKRHPDMKIEEVPELTLPIIKPNRDYFCQYCDKVYKSASKRKAHILKNHPGAELPPSIRKLRPAGPGEPDPMLSTHTQLTGTIATPPVCCPHCSKQYSSKTKMVQHIRKKHPEFAQLSNTIHTPLTTAVISATPAVLTTDSATGETVVTTDLLTQAMTELSQTLTTDYRTPQGDYQRIQYIPVSQSASGLQQPQHIQLQVVQVASATSPHQSQQSTVDVGQLHDPQPYPQHAIQVQHIQVSGQPLSPSAQQAQQGLSPSHIQGSSSTQGQALQQQQQQQQNSSVQHTYLPSAWNSFRGYSSEIQMMTLPPGQFVITDSGVATPVTTGQVKAVTSGHYVLSESQSELEEKQTSALSGGVQVEPPAHSDSLDPQTNSQQQTTQYIITTTTNGNGSSEVHITKP

SEQ ID NO: 32902 - protein, 1156 aa, Homo sapiens
MDSKDESSHVWPTSAEHEQNAAQVHFVPDTGTVAQIVYTDDQVRPPQQVVYTADGASYTSVDGPEHTLVYIHPVEAAQTLFTDPGQVAYVQQDATAQQASLPVHNQVLPSIESVDGSDPLATLQTPLGRLEAKEEEDEDEDEDTEEDEEEDGEDTDLDDWEPDPPRPFDPHDLWCEECNNAHASVCPKHGPLHPIPNRPVLTRARASLPLVLYIDRFLGGVFSKRRIPKRTQFGPVEGPLVRGSELKDCYIHLKVSLDKGDRKERDLHEDLWFELSDETLCNWMMFVRPAQNHLEQNLVAYQYGHHVYYTTIKNVEPKQELKVWYAASYAEFVNQKIHDISEEERKVLREQEKNWPCYECNRRFISSEQLQQHLNSHDEKLDVFSRTRGRGRGRGKRRFGPGRRPGRPPKFIRLEITSENGEKSDDGTQDLLHFPTKEQFDEAEPATLNGLDQPEQTTIPIPQLPQETQSSLEHEPETHTLHLQPQHEESVVPTQSTLTADDMRRAKRIRNAALQHLFIRKSFRPFKCLQCGKAFREKDKLDQHLRFHGREGNCPLTCDLCNKGFISSTSLESHMKLHSDQKTYSCIFCPESFDRLDLLKDHVAIHINDGYFTCPTCKKRFPDFIQVKKHVRSFHSEKIYQCTECDKAFCRPDKLRLHMLRHSDRKDFLCSTCGKQFKRKDKLREHMQRMHNPEREAKKADRISRSKTFKPRITSTDYDSFTFKCRLCMMGFRRRGMLVNHLSKRHPDMKIEEVPELTLPIIKPNRDYFCQYCDKVYKSASKRKAHILKNHPGAELPPSIRKLRPAGPGEPDPMLSTHTQLTGTIATPPVCCPHCSKQYSSKTKMVQHIRKKHPEFAQLSNTIHTPLTTAVISATPAVLTTDSATGETVVTTDLLTQAMTELSQTLTTDYRTPQGDYQRIQYIPVSQSASGLQQPQHIQLQVVQVASATSPHQSQQSTVDVGQLHDPQPYPQHAIQVQHIQVSEPTASAPSSAQVSGQPLSPSAQQAQQGLSPSHIQGSSSTQGQALQQQQQQQQNSSVQHTYLPSAWNSFRGYSSEIQMMTLPPGQFVITDSGVATPVTTGQVKAVTSGHYVLSESQSELEEKQTSALSGGVQVEPPAHSDSLDPQTNSQQQTTQYIITTTTNGNGSSEVHITKP

SEQ ID NO: 32903 - protein, 1074 aa, Homo sapiens
MSAYSVPSTFAQASLPVHNQVLPSIESVDGSDPLATLQTPLGRLEAKEEEDEDEDEDTEEDEEEDGEDTDLDDWEPDPPRPFDPHDLWCEECNNAHASVCPKHGPLHPIPNRPVLTRARASLPLVLYIDRFLGGVFSKRRIPKRTQFGPVEGPLVRGSELKDCYIHLKVSLDKGDRKERDLHEDLWFELSDETLCNWMMFVRPAQNHLEQNLVAYQYGHHVYYTTIKNVEPKQELKVWYAASYAEFVNQKIHDISEEERKVLREQEKNWPCYECNRRFISSEQLQQHLNSHDEKLDVFSRTRGRGRGRGKRRFGPGRRPGRPPKFIRLEITSENGEKSDDGTQDLLHFPTKEQFDEAEPATLNGLDQPEQTTIPIPQLPQETQSSLEHEPETHTLHLQPQHEESVVPTQSTLTADDMRRAKRIRLELQNAALQHLFIRKSFRPFKCLQCGKAFREKDKLDQHLRFHGREGNCPLTCDLCNKGFISSTSLESHMKLHSDQKTYSCIFCPESFDRLDLLKDHVAIHINDGYFTCPTCKKRFPDFIQVKKHVRSFHSEKIYQCTECDKAFCRPDKLRLHMLRHSDRKDFLCSTCGKQFKRKDKLREHMQRMHNPEREAKKADRISRSKTFKPRITSTDYDSFTFKCRLCMMGFRRRGMLVNHLSKRHPDMKIEEVPELTLPIIKPNRDYFCQYCDKVYKSASKRKAHILKNHPGAELPPSIRKLRPAGPGEPDPMLSTHTQLTGTIATPPVCCPHCSKQYSSKTKMVQHIRKKHPEFAQLSNTIHTPLTTAVISATPAVLTTDSATGETVVTTDLLTQAMTELSQTLTTDYRTPQGDYQRIQYIPVSQSASGLQQPQHIQLQVVQVASATSPHQSQQSTVDVGQLHDPQPYPQHAIQVQHIQVSEPTASAPSSAQVSGQPLSPSAQQAQQGLSPSHIQGSSSTQGQALQQQQQQQQNSSVQHTYLPSAWNSFRGYSSEIQMMTLPPGQFVITDSGVATPVTTGQVKAVTSGHYVLSESQSELEEKQTSALSGGVQVEPPAHSDSLDPQTNSQQQTTQYIITTTTNGNGSSEVHITKP

SEQ ID NO: 32904 - protein, 1214 aa, Homo sapiens
MDSKDESSHVWPTSAEHEQNAAQVHFVPDTGTVAQIVYTDDQVRPPQQVVYTADGASYTSVDGPEHTLVYIHPVEAAQTLFTDPGQVAYVQQDATAQQASLPVHNQVLPSIESVDGSDPLATLQTPLGRLEAKEEEDEDEDEDTEEDEEEDGEDTDLDDWEPDPPRPFDPHDLWCEECNNAHASVCPKHGPLHPIPNRPVLTRARASLPLVLYIDRFLGGVFSKRRIPKRTQFGPVEGPLVRGSELKDCYIHLKVSLDKGDRKERDLHEDLWFELSDETLCNWMMFVRPAQNHLEQNLVAYQYGHHVYYTTIKNVEPKQELKVWYAASYAEFVNQKIHDISEEERKVLREQEKNWPCYECNRRFISSEQLQQHLNSHDEKLDVFSRTRGRGRGRGKRRFGPGRRPGRPPKFIRLEITSENGEKSDDGTQDLLHFPTKEQFDEAEPATLNGLDQPEQTTIPIPQLPQETQSSLEHEPETHTLHLQPQHEESVVPTQSTLTADDMRRAKRIRNAALQHLFIRKSFRPFKCLQCGKAFREKDKLDQHLRFHGREGNCPLTCDLCNKGFISSTSLESHMKLHSDQKTYSCIFCPESFDRLDLLKDHVAIHINDGYFTCPTCKKRFPDFIQVKKHVRSFHSEKIYQCTECDKAFCRPDKLRLHMLRHSDRKDFLCSTCGKQFKRKDKLREHMQRMHNPEREAKKADRISRSKTFKPRITSTDYDSFTFKCRLCMMGFRRRGMLVNHLSKRHPDMKIEEVPELTLPIIKPNRDYFCQYCDKVYKSASKRKAHILKNHPGAELPPSIRKLRPAGPGEPDPMLSTHTQLTGTIATPPVCCPHCSKQYSSKTKMVQHIRKKHPEFAQLSNTIHTPLTTAVISATPAVLTTDSATGETVVTTDLLTQAMTELSQTLTTDYRTPQGDYQRIQYIPVSQSASGLQQPQHIQLQVVQVASATSPHQSQQSTVDVGQLHDPQPYPQHAIQVQHIQVSEPTASAPSSAQVSGQPLSPSAQQAQQGLSPSHIQGSSSTQGQALQQQQQQQQNSSVQHTYLPSAWNSFRGYSSEIQMMTLPPGQFVITDSGVATPVTTGQVKAVTSGHYVLSESQSELEEKQTSALSGGVQVEPPAHSDSLDPQTNSQQQTTQYIITAGSKVIQNEFTVGEECELETMTGEKVKTVVQLEGDNKLVTTFKNIKSVTELNGDIITNTMTLGDIVFKRISKRI

SEQ ID NO: 32905 - protein, 1160 aa, Homo sapiens
MDSKDESSHVWPTSAEHEQNAAQVHFVPDTGTVAQIVYTDDQVRPPQQVVYTADGASYTSVDGPEHTLVYIHPVEAAQTLFTDPGQVAYVQQDATAQQASLPVHNQVLPSIESVDGSDPLATLQTPLGRLEAKEEEDEDEDEDTEEDEEEDGEDTDLDDWEPDPPRPFDPHDLWCEECNNAHASVCPKHGPLHPIPNRPVLTRARASLPLVLYIDRFLGGVFSKRRIPKRTQFGPVEGPLVRGSELKDCYIHLKVSLDKGDRKERDLHEDLWFELSDETLCNWMMFVRPAQNHLEQNLVAYQYGHHVYYTTIKNVEPKQELKVWYAASYAEFVNQKIHDISEEERKVLREQEKNWPCYECNRRFISSEQLQQHLNSHDEKLDVFSRTRGRGRGRGKRRFGPGRRPGRPPKFIRLEITSENGEKSDDGTQDLLHFPTKEQFDEAEPATLNGLDQPEQTTIPIPQLPQETQSSLEHEPETHTLHLQPQHEESVVPTQSTLTADDMRRAKRIRLELQNAALQHLFIRKSFRPFKCLQCGKAFREKDKLDQHLRFHGREGNCPLTCDLCNKGFISSTSLESHMKLHSDQKTYSCIFCPESFDRLDLLKDHVAIHINDGYFTCPTCKKRFPDFIQVKKHVRSFHSEKIYQCTECDKAFCRPDKLRLHMLRHSDRKDFLCSTCGKQFKRKDKLREHMQRMHNPEREAKKADRISRSKTFKPRITSTDYDSFTFKCRLCMMGFRRRGMLVNHLSKRHPDMKIEEVPELTLPIIKPNRDYFCQYCDKVYKSASKRKAHILKNHPGAELPPSIRKLRPAGPGEPDPMLSTHTQLTGTIATPPVCCPHCSKQYSSKTKMVQHIRKKHPEFAQLSNTIHTPLTTAVISATPAVLTTDSATGETVVTTDLLTQAMTELSQTLTTDYRTPQGDYQRIQYIPVSQSASGLQQPQHIQLQVVQVASATSPHQSQQSTVDVGQLHDPQPYPQHAIQVQHIQVSEPTASAPSSAQVSGQPLSPSAQQAQQGLSPSHIQGSSSTQGQALQQQQQQQQNSSVQHTYLPSAWNSFRGYSSEIQMMTLPPGQFVITDSGVATPVTTGQVKAVTSGHYVLSESQSELEEKQTSALSGGVQVEPPAHSDSLDPQTNSQQQTTQYIITTTTNGNGSSEVHITKP

SEQ ID NO: 32906 - protein, 511 aa, Homo sapiens
MLKMAEPIASLMIVECRACLRCSPLFLYQREKDRMTENMKECLAQTNAAVGDMVTVVKTEVCSPLRDQEYGQPCSRRPDSSAMEVEPKKLKGKRDLIVPKSFQQVDFWFCESCQEYFVDECPNHGPPVFVSDTPVPVGIPDRAALTIPQGMEVVKDTSGESDVRCVNEVIPKGHIFGPYEGQISTQDKSAGFFSWLIVDKNNRYKSIDGSDETKANWMRYVVISREEREQNLLAFQHSERIYFRACRDIRPGEWLRVWYSEDYMKRLHSMSQETIHRNLARGEKRLQREKSEQVLDNPEDLRGPIHLSVLRQGKSPYKRGFDEGDVHPQAKKKKIDLIFKDVLEASLESAKVEAHQLALSTSLVIRKVPKYQDDAYSQCATTMTHGVQNIGQTQGEGDWKVPQGVSKEPGQLEDEEEEPSSFKADSPAEASLASDPHELPTTSFCPNCIRLKKKVRELQAELDMLKSGKLPEPPVLPPQVLELPEFSDPAGKLVWMRLLSEGRVRSGLCGG

SEQ ID NO: 32907 - protein, 477 aa, Homo sapiens
MTENMKECLAQTNAAVGDMVTVVKTEVCSPLRDQEYGQPCSRRPDSSAMEVEPKKLKGKRDLIVPKSFQQVDFWFCESCQEYFVDECPNHGPPVFVSDTPVPVGIPDRAALTIPQGMEVVKDTSGESDVRCVNEVIPKGHIFGPYEGQISTQDKSAGFFSWLIVDKNNRYKSIDGSDETKANWMRYVVISREEREQNLLAFQHSERIYFRACRDIRPGEWLRVWYSEDYMKRLHSMSQETIHRNLARGEKRLQREKSEQVLDNPEDLRGPIHLSVLRQGKSPYKRGFDEGDVHPQAKKKKIDLIFKDVLEASLESAKVEAHQLALSTSLVIRKVPKYQDDAYSQCATTMTHGVQNIGQTQGEGDWKVPQGVSKEPGQLEDEEEEPSSFKADSPAEASLASDPHELPTTSFCPNCIRLKKKVRELQAELDMLKSGKLPEPPVLPPQVLELPEFSDPAGKLVWMRLLSEGRVRSGLCGG

SEQ ID NO: 32908 - protein, 1278 aa, Homo sapiens
MRLLLLVPLLLAPAPGSSAPKVRRQSDTWGPWSQWSPCSRTCGGGVSFRERPCYSQRRDGGSSCVGPARSHRSCRTESCPDGARDFRAEQCAEFDGAEFQGRRYRWLPYYSAPNKCELNCIPKGENFYYKHREAVVDGTPCEPGKRDVCVDGSCRVVGCDHELDSSKQEDKCLRCGGDGTTCYPVAGTFDANDLSRGYNQILIVPMGATSILIDEAAASRNFLAVKNVRGEYYLNGHWTIEAARALPAASTILHYERGAEGDLAPERLHARGPTSEPLVIELISQEPNPGVHYEYHLPLRRPSPGFSWSHGSWSDCSAECGGGHQSRLVFCTIDHEAYPDHMCQRQPRPADRRSCNLHPCPETKRWKAGPWAPCSASCGGGSQSRSVYCISSDGAGIQEAVEEAECAGLPGKPPAIQACNLQRCAAWSPEPWGECSVSCGVGVRKRSVTCRGERGSLLHTAACSLEDRPPLTEPCVHEDCPLLSDQAWHVGTWGLCSKSCSSGTRRRQVICAIGPPSHCGSLQHSKPVDVEPCNTQPCHLPQEVPSMQDVHTPASNPWMPLGPQESPASDSRGQWWAAQEHPSARGDHRGERGDPRGDQGTHLSALGPAPSLQQPPYQQPLRSGSGPHDCRHSPHGCCPDGHTASLGPQWQGCPGAPCQQSRYGCCPDRVSVAEGPHHAGCTKSYGGDSTGGMPRSRAVASTVHNTHQPQAQQNEPSECRGSQFGCCYDNVATAAGPLGEGCVGQPSHAYPVRCLLPSAHGSCADWAARWYFVASVGQCNRFWYGGCHGNANNFASEQECMSSCQGSLHGPRRPQPGASGRSTHTDGGGSSPAGEQEPSQHRTGAAVQRKPWPSGGLWRQDQQPGPGEAPHTQAFGEWPWGQELGSRAPGLGGDAGSPAPPFHSSSYRISLAGVEPSLVQAALGQLVRLSCSDDTAPESQAAWQKDGQPISSDRHRLQFDGSLIIHPLQAEDAGTYSCGSTRPGRDSQKIQLRIIGGDMAVLSEAELSRFPQPRDPAQDFGQAGAAGPLGAIPSSHPQPANRLRLDQNQPRVVDASPGQRIRMTCRAEGFPPPAIEWQRDGQPVSSPRHQLQPDGSLVISRVAVEDGGFYTCVAFNGQDRDQRWVQLRVLGELTISGLPPTVTVPEGDTARLLCVVAGESVNIRWSRNGLPVQADGHRVHQSPDGTLLIYNLRARDEGSYTCSAYQGSQAVSRSTEVKVVSPAPTAQPRDPGRDCVDQPELANCDLILQAQLCGNEYYSSFCCASCSRFQPHAQPIWQ

SEQ ID NO: 32909 - protein, 477 aa, Homo sapiens
MGPVVPSLGLLEGAPTRMVAAAVLQASRNPASTGQGPRCRESPGLLVVSGGKTNSLGQGRPPTPRPLENGHGGRSLGPGPLDWVEMPDHQRHPSTAPPTDLTSHLSRISLAGVEPSLVQAALGQLVRLSCSDDTAPESQAAWQKDGQPISSDRHRLQFDGSLIIHPLQAEDAGTYSCGSTRPGRDSQKIQLRIIGGDMAVLSEAELSRFPQPRDPAQDFGQAGAAGPLGAIPSSHPQPANRLRLDQNQPRVVDASPGQRIRMTCRAEGFPPPAIEWQRDGQPVSSPRHQLQPDGSLVISRVAVEDGGFYTCVAFNGQDRDQRWVQLRVLGELTISGLPPTVTVPEGDTARLLCVVAGESVNIRWSRNGLPVQADGHRVHQSPDGTLLIYNLRARDEGSYTCSAYQGSQAVSRSTEVKVVSPAPTAQPRDPGRDCVDQPELANCDLILQAQLCGNEYYSSFCCASCSRFQPHAQPIWQ

SEQ ID NO: 32910 - protein, 1262 aa, Homo sapiens
MRLLLLVPLLLAPAPGSSAPKVRRQSDTWGPWSQWSPCSRTCGGGVSFRERPCYSQRRDGGSSCVGPARSHRSCRTESCPDGARDFRAEQCAEFDGAEFQGRRYRWLPYYSAPNKCELNCIPKGENFYYKHREAVVDGTPCEPGKRDVCVDGSCRVVGCDHELDSSKQEDKCLRCGGDGTTCYPVAGTFDANDLSRGYNQILIVPMGATSILIDEAAASRNFLAVKNVRGEYYLNGHWTIEAARALPAASTILHYERGAEGDLAPERLHARGPTSEPLVIELISQEPNPGVHYEYHLPLRRPSPGFSWSHGSWSDCSAECGGGHQSRLVFCTIDHEAYPDHMCQRQPRPADRRSCNLHPCPETKRWKAGPWAPCSASCGGGSQSRSVYCISSDGAGIQEAVEEAECAGLPGKPPAIQACNLQRCAAWSPEPWGECSVSCGVGVRKRSVTCRGERGSLLHTAACSLEDRPPLTEPCVHEDCPLLSDQAWHVGTWGLCSKSCSSGTRRRQVICAIGPPSHCGSLQHSKPVDVEPCNTQPCHLPQEVPSMQDVHTPASNPWMPLGPQESPASDSRGQWWAAQEHPSARGDHRGERGDPRGDQGTHLSALGPAPSLQQPPYQQPLRSGSGPHDCRHSPHGCCPDGHTASLGPQWQGCPGAPCQQSRYGCCPDRVSVAEGPHHAGCTKSYGGDSTGGMPRSRAVASTVHNTHQPQAQQNEPSECRGSQFGCCYDNVATAAGPLGEGCVGQPSHDWAARWYFVASVGQCNRFWYGGCHGNANNFASEQECMSSCQGSLHGPRRPQPGASGRSTHTDGGGSSPAGEQEPSQHRTGAAVQRKPWPSGGLWRQDQQPGPGEAPHTQAFGEWPWGQELGSRAPGLGGDAGSPAPPFHSSSYRISLAGVEPSLVQAALGQLVRLSCSDDTAPESQAAWQKDGQPISSDRHRLQFDGSLIIHPLQAEDAGTYSCGSTRPGRDSQKIQLRIIGGDMAVLSEAELSRFPQPRDPAQDFGQAGAAGPLGAIPSSHPQPANRLRLDQNQPRVVDASPGQRIRMTCRAEGFPPPAIEWQRDGQPVSSPRHQLQPDGSLVISRVAVEDGGFYTCVAFNGQDRDQRWVQLRVLGELTISGLPPTVTVPEGDTARLLCVVAGESVNIRWSRNGLPVQADGHRVHQSPDGTLLIYNLRARDEGSYTCSAYQGSQAVSRSTEVKVVSPAPTAQPRDPGRDCVDQPELANCDLILQAQLCGNEYYSSFCCASCSRFQPHAQPIWQ

SEQ ID NO: 32911 - protein, 1251 aa, Homo sapiens
MRLLLLVPLLLAPAPGSSAPKVRRQSDTWGPWSQWSPCSRTCGGGVSFRERPCYSQRRDGGSSCVGPARSHRSCRTESCPDGARDFRAEQCAEFDGAEFQGRRYRWLPYYSAPNKCELNCIPKGENFYYKHREAVVDGTPCEPGKRDVCVDGSCRVVGCDHELDSSKQEDKCLRCGGDGTTCYPVAGTFDANDLSRAVKNVRGEYYLNGHWTIEAARALPAASTILHYERGAEGDLAPERLHARGPTSEPLVIELISQEPNPGVHYEYHLPLRRPSPGFSWSHGSWSDCSAECGGGHQSRLVFCTIDHEAYPDHMCQRQPRPADRRSCNLHPCPETKRWKAGPWAPCSASCGGGSQSRSVYCISSDGAGIQEAVEEAECAGLPGKPPAIQACNLQRCAAWSPEPWGECSVSCGVGVRKRSVTCRGERGSLLHTAACSLEDRPPLTEPCVHEDCPLLSDQAWHVGTWGLCSKSCSSGTRRRQVICAIGPPSHCGSLQHSKPVDVEPCNTQPCHLPQEVPSMQDVHTPASNPWMPLGPQESPASDSRGQWWAAQEHPSARGDHRGERGDPRGDQGTHLSALGPAPSLQQPPYQQPLRSGSGPHDCRHSPHGCCPDGHTASLGPQWQGCPGAPCQQSRYGCCPDRVSVAEGPHHAGCTKSYGGDSTGGMPRSRAVASTVHNTHQPQAQQNEPSECRGSQFGCCYDNVATAAGPLGEGCVGQPSHAYPVRCLLPSAHGSCADWAARWYFVASVGQCNRFWYGGCHGNANNFASEQECMSSCQGSLHGPRRPQPGASGRSTHTDGGGSSPAGEQEPSQHRTGAAVQRKPWPSGGLWRQDQQPGPGEAPHTQAFGEWPWGQELGSRAPGLGGDAGSPAPPFHSSSYRISLAGVEPSLVQAALGQLVRLSCSDDTAPESQAAWQKDGQPISSDRHRLQFDGSLIIHPLQAEDAGTYSCGSTRPGRDSQKIQLRIIGGDMAVLSEAELSRFPQPRDPAQDFGQAGAAGPLGAIPSSHPQPANRLRLDQNQPRVVDASPGQRIRMTCRAEGFPPPAIEWQRDGQPVSSPRHQLQPDGSLVISRVAVEDGGFYTCVAFNGQDRDQRWVQLRVLGELTISGLPPTVTVPEGDTARLLCVVAGESVNIRWSRNGLPVQADGHRVHQSPDGTLLIYNLRARDEGSYTCSAYQGSQAVSRSTEVKVVSPAPTAQPRDPGRDCVDQPELANCDLILQAQLCGNEYYSSFCCASCSRFQPHAQPIWQ

SEQ ID NO: 32912 - protein, 129 aa, Homo sapiens
MRLLLLVPLLLAPAPGSSAPKVRRQSDTWGPWSQWSPCSRTCGGGVSFRERPCYSQRRDGGSSCVGPARSHRSCRTESCPDGARDFRAEQCAEFDGAEFQGRRYRWLPYYSAPNKCELNCIPKVLGLQA

SEQ ID NO: 32913 - protein, 1109 aa, Homo sapiens
MRLLLLVPLLLAPAPGSSAPKVRRQSDTWGPWSQWSPCSRTCGGGVSFRERPCYSQRRDGGSSCVGPARSHRSCRTESCPDGARDFRAEQCAEFDGAEFQGRRYRWLPYYSAPNKCELNCIPKGENFYYKHREAVVDGTPCEPGKRDVCVDGSCRVVGCDHELDSSKQEDKCLRCGGDGTTCYPVAGTFDANDLSRGYNQILIVPMGATSILIDEAAASRNFLAVKNVRGEYYLNGHWTIEAARALPAASTILHYERGAEGDLAPERLHARGPTSEPLVIELISQEPNPGVHYEYHLPLRRPSPGFSWSHGSWSDCSAECGGGHQSRLVFCTIDHEAYPDHMCQRQPRPADRRSCNLHPCPETKRWKAGPWAPCSASCGGGSQSRSVYCISSDGAGIQEAVEEAECAGLPGKPPAIQACNLQRCAAWSPEPWGECSVSCGVGVRKRSVTCRGERGSLLHTAACSLEDRPPLTEPCVHEDCPLLSDQAWHVGTWGLCSKSCSSGTRRRQVICAIGPPSHCGSLQHSKPVDVEPCNTQPCHLPQEVPSMQDVHTPASNPWMPLGPQESPASDSRGQWWAAQEHPSARGDHRGERGDPRGDQGTHLSALGPAPSLQQPPYQQPLRSGSGPHDCRHSPHGCCPDGHTASLGPQWQGCPGAPCQQSRYGCCPDRVSVAEGPHHAGCTKSYGGDSTGGMPRSRAVASTVHNTHQPQAQQNEPSECRGSQFGCCYDNVATAAGPLGEGCVGQPSHAYPVRCLLPSAHGSCADWAARWYFVASVGQCNRFWYGGCHGNANNFASEQECMSSCQGSLHGPRRPQPGASGRSTHTDGGGSSPAGEQEPSQHRTGAAVQRKPWPSGGLWRQDQQPGPGEAPHTQAFGEWPWGQELGSRAPGLGGDAGSPAPPFHSSSYRISLAGVEPSLVQAALGQLVRLSCSDDTAPESQAAWQKDGQPISSDRHRLQFDGSLIIHPLQAEDAGTYSCGSTRPGRDSQKIQLRIIGGDMAVLSEAELSRFPQPRDPAQDFGQAGAAGPLGAIPSSHPQPANRLRLDQNQPRVVDASPGQRIRMTCRAEGFPPPAIEWQRDGQPVSSPSTHRPAQGPWQGLRRPARAGQL

SEQ ID NO: 32914 - protein, 367 aa, Homo sapiens
MMGSVLPAEALVLKTGLKAPGLALAEVITSDILHSFLYGRWRNVLGEQLFEDKSHHASPKTAFTAEVLAQSFSGEVQKLSSLVLPAEVIIAQSSIPGEGLGIFSKTWIKAGTEMGPFTGRVIAPEHVDICKNNNLMWEVFNEDGTVRYFIDASQEDHRSWMTYIKCARNEQEQNLEVVQIGTSIFYKAIEMIPPDQELLVWYGNSHNTFLGIPGVPGLEEDQKKNKHEDFHPADSAAGPAGRMRCVICHRGFNSRSNLRSHMRIHTLDKPFVCRFCNRRFSQSSTLRNHVRLHTGERPYKCQVCQSAYSQLAGLRAHQKSARHRPPSTALQAHSPALPAPHAHAPALAAAAAAAAAAAAHHLPAMVL

SEQ ID NO: 32915 - protein, 707 aa, Homo sapiens
MHGAARAPATSVSADCCIPAGLRLGPVPGTFKLGKYLSDRREPGPKKKVRMVRGELVDESGGSPLEWIGLIRAARNSQEQTLEAIADLPGGQIFYRALRDVQPGEELTVWYSNSLAQWFDIPTTATPTHDEKGEERYICWYCWRTFRYPNSLKAHLRFHCVFSGGGGGAFLHHEHAARQGAVPAADGLGLSPKPPAPDFAAPSQAGTLRPHPLGPPPVQACGAREGIKREASSAPSATSPTPGKWGQPKKGKEQLDRALDMSGAARGQGHFLGIVGGSSAGVGSLAFYPGVRSAFKPAGLARAAAAAHGDPYREESSSKQGAGLALGRLLGGGRACGRPGSGENSAAGGAGHHHHHHAHHHHHPKCLLAGDPPPPPPPGLPCSGALRGFPLLSVPPEEASAFKHVERAPPAAAALPGARYAQLPPAPGLPLERCALPPLDPGGLKAYPGGECSHLPAVMPAFTVYNGELLYGSPATTAYYPLKLHFGGLLKYPESISYFSGPAAAALSPAELGSLASIDREIAMHNQQLSEMAAGKGRGRLDSGTLPPAVAAAGGTGGGGSGGSGAGKPKTGHLCLYCGKLYSRKYGLKIHMRTHTGYKPLKCKVCLRPFGDPSNLNKHIRLHAEGNTPYRCEFCGKVLVRRRDLERHVKSRHPGQSLLAKAGDGPGAEPGYPPEPGDPKSDDSDVDVCFTDDQSDPEVGGGGERDL

SEQ ID NO: 32916 - protein, 571 aa, Homo sapiens
MALPRPSEAVPQDKVCYPPESSPQNLAAYYTPFPSYGHYRNSLATVEEDFQPFRQLEAAASAAPAMPPFPFRMAPPLLSPGLGLQREPLYDLPWYSKLPPWYPIPHVPREVPPFLSSSHEYAGASSEDLGHQIIGGDNESGPCCGPDTLIPPPPADASLLPEGLRTSQLLPCSPSKQSEDGPKPSNQEGKSPARFQFTEEDLHFVLYGVTPSLEHPASLHHAISGLLVPPDSSGSDSLPQTLDKDSLQLPEGLCLMQTVFGEVPHFGVFCSSFIAKGVRFGPFQGKVVNASEVKTYGDNSVMWEIFEDGHLSHFIDGKGGTGNWMSYVNCARFPKEQNLVAVQCQGHIFYESCKEIHQNQELLVWYGDCYEKFLDIPVSLQVTEPGKQPSGPSEESAEGYRCERCGKVFTYKYYRDKHLKYTPCVDKGDRKFPCSLCKRSFEKRDRLRIHILHVHEKHRPHKCSTCGKCFSQSSSLNKHMRVHSGDRPYQCVYCTKRFTASSILRTHIRQHSGEKPFKCKYCGKSFASHAAHDSHVRRSHKEDDGCSCSICGKIFSDQETFYSHMKFHEDY

SEQ ID NO: 32917 - protein, 166 aa, Homo sapiens
MLLILLSVALLAFSSAQDLDEDVSQEDVPLVISDGGDSEQFIDEERQGPPLGGQQSQPSAGDGNQDDGPQQGPPQQGGQQQQGPPPPQGKPQGPPQQGGHPPPPQGRPQGPPQQGGHPRPPRGRPQGPPQQGGHQQGPPPPPPGKPQGPPPQGGRPQGPPQGQSPQ

SEQ ID NO: 32918 - protein, 318 aa, Homo sapiens
MPNIKIFSGSSHQDLSQKIADRLGLELGKVVTKKFSNQETCVEIGESVRGEDVYIVQSGCGEINDNLMELLIMINACKIASASRVTAVIPCFPYARQDKKDKSRAPISAKLVANMLSVAGADHIITMDLHASQIQGFFDIPVDNLYAEPAVLKWIRENISEWRNCTIVSPDAGGAKRVTSIADRLNVDFALIHKERKKANEVDRMVLVGDVKDRVAILVDDMADTCGTICHAADKLLSAGATRVYAILTHGIFSGPAISRINNACFEAVVVTNTIPQEDKMKHCSKIQVIDISMILAEAIRRTHNGESVSYLFSHVPL

SEQ ID NO: 32919 - protein, 251 aa, Homo sapiens
MELLIMINACKIASASRVTAVIPCFPYARQDKKDKSRAPISAKLVANMLSVAGADHIITMDLHASQIQGFFDIPVDNLYAEPAVLKWIRENISEWRNCTIVSPDAGGAKRVTSIADRLNVDFALIHKERKKANEVDRMVLVGDVKDRVAILVDDMADTCGTICHAADKLLSAGATRVYAILTHGIFSGPAISRINNACFEAVVVTNTIPQEDKMKHCSKIQVIDISMILAEAIRRTHNGESVSYLFSHVPL

SEQ ID NO: 32920 - protein, 199 aa, Homo sapiens
MSSGNAKIGHPAPNFKATAVMPDGQFKDISLSDYKGKYVVFFFYPLDFTFVCPTEIIAFSDRAEEFKKLNCQVIGASVDSHFCHLAWVNTPKKQGGLGPMNIPLVSDPKRTIAQDYGVLKADEGISFRGLFIIDDKGILRQITVNDLPVGRSVDETLRLVQAFQFTDKHGEVCPAGWKPGSDTIKPDVQKSKEYFSKQK

SEQ ID NO: 32921 - protein, 318 aa, Homo sapiens
MPNIVLFSGSSHQDLSQRVADRLGLELGKVVTKKFSNQETSVEIGESVRGEDVYIIQSGCGEINDNLMELLIMINACKIASSSRVTAVIPCFPYARQDKKDKSRAPISAKLVANMLSVAGADHIITMDLHASQIQGFFDIPVDNLYAEPAVLQWIRENIAEWKNCIIVSPDAGGAKRVTSIADRLNVEFALIHKERKKANEVDRMVLVGDVKDRVAILVDDMADTCGTICHAADKLLSAGATKVYAILTHGIFSGPAISRINNAAFEAVVVTNTIPQEDKMKHCTKIQVIDISMILAEAIRRTHNGESVSYLFSHVPL

SEQ ID NO: 32922 - protein, 321 aa, Homo sapiens
MPNIVLFSGSSHQDLSQRVADRLGLELGKVVTKKFSNQETSVEIGESVRGEDVYIIQSGCGEINDNLMELLIMINACKIASSSRVTAVIPCFPYARQDKKDKVGESRAPISAKLVANMLSVAGADHIITMDLHASQIQGFFDIPVDNLYAEPAVLQWIRENIAEWKNCIIVSPDAGGAKRVTSIADRLNVEFALIHKERKKANEVDRMVLVGDVKDRVAILVDDMADTCGTICHAADKLLSAGATKVYAILTHGIFSGPAISRINNAAFEAVVVTNTIPQEDKMKHCTKIQVIDISMILAEAIRRTHNGESVSYLFSHVPL

SEQ ID NO: 32923 - protein, 464 aa, Homo sapiens
METLSFPRYNVAEIVIHIRNKILTGADGKNLTKNDLYPNPKPEVLHMIYMRALQIVYGIRLEHFYMMPVNSEVMYPHLMEGFLPFSNLVTHLDSFLPICRVNDFETADILCPKAKRTSRFLSGIINFIHFREACRETYMEFLWQYKSSADKMQQLNAAHQEALMKLERLDSVPVEEQEEFKQLSDGIQELQQSLNQDFHQKTIVLQEGNSQKKSNISEKTKRLNELKLSVVSLKEIQESLKTKIVDSPEKLKNYKEKMKDTVQKLKNARQEVVEKYEIYGDSVDCLPSCQLEVQLYQKKIQDLSDNREKLASILKESLNLEDQIESDESELKKLKTEENSFKRLMIVKKEKLATAQFKINKKHEDVKQYKRTVIEDCNKVQEKRGAVYERVTTINQEIQKIKLGIQQLKDAAEREKLKSQEIFLNLKTALEKYHDGIEKAAEDSYAKIDEKTAELKRKMFKMST

SEQ ID NO: 32924 - protein, 1437 aa, Homo sapiens
MDFSFSFMQGIMGNTIQQPPQLIDSANIRQEDAFDNNSDIAEDGGQTPYEATLQQGFQYPATTEDLPPLTNGYPSSISVYETQTKYQSYNQYPNGSANGFGAVRNFSPTDYYHSEIPNTRPHEILEKPSPPQPPPPPSVPQTVIPKKTGSPEIKLKITKTIQNGRELFESSLCGDLLNEVQASEHTKSKHESRKEKRKKSNKHDSSRSEERKSHKIPKLEPEEQNRPNERVDTVSEKPREEPVLKEEAPVQPILSSVPTTEVSTGVKFQVGDLVWSKVGTYPWWPCMVSSDPQLEVHTKINTRGAREYHVQFFSNQPERAWVHEKRVREYKGHKQYEELLAEATKQASNHSEKQKIRKPRPQRERAQWDIGIAHAEKALKMTREERIEQYTFIYIDKQPEEALSQAKKSVASKTEVKKTRRPRSVLNTQPEQTNAGEVASSLSSTEIRRHSQRRHTSAEEEEPPPVKIAWKTAAARKSLPASITMHKGSLDLQKCNMSPVVKIEQVFALQNATGDGKFIDQFVYSTKGIGNKTEISVRGQDRLIISTPNQRNEKPTQSVSSPEATSGSTGSVEKKQQRRSIRTRSESEKSTEVVPKKKIKKEQVETVPQATVKTGLQKGASEISDSCKPLKKRSRASTDVEMTSSAYRDTSDSDSRGLSDLQVGFGKQVDSPSATADADVSDVQSMDSSLSRRGTGMSKKDTVCQICESSGDSLIPCEGECCKHFHLECLGLASLPDSKFICMECKTGQHPCFSCKVSGKDVKRCSVGACGKFYHEACVRKFPTAIFESKGFRCPQHCCSACSMEKDIHKASKGRMMRCLRCPVAYHSGDACIAAGSMLVSSYILICSNHSKRSSNSSAVNVGFCFVCARGLIVQDHSDPMFSSYAYKSHYLLNESNRAELMKLPMIPSSSASKKKCEKGGRLLCCESCPASFHPECLSIEMPEGCWNCNDCKAGKKLHYKQIVWVKLGNYRWWPAEICNPRSVPLNIQGLKHDLGDFPVFFFGSHDYYWVHQGRVFPYVEGDKSFAEGQTSINKTFKKALEEAAKRFQELKAQRESKEALEIEKNSRKPPPYKHIKANKVIGKVQIQVADLSEIPRCNCKPADENPCGLESECLNRMLQYECHPQVCPAGDRCQNQCFTKRLYPDAEIIKTERRGWGLRTKRSIKKGEFVNEYVGELIDEEECRLRIKRAHENSVTNFYMLTVTKDRIIDAGPKGNYSRFMNHSCNPNCETQKWTVNGDVRVGLFALCDIPAGMELTFNYNLDCLGNGRTECHCGADNCSGFLGVRPKSACASTNEEKAKNAKLKQKRRKIKTEPKQMHEDYCFQCGDGGELVMCDKKDCPKAYHLLCLNLTQPPYGKWECPWHQCDECSSAAVSFCEFCPHSFCKDHEKGALVPSALEGRLCCSEHDPMAPVSPEYWSKIKCKWESQDHGEEVKE

SEQ ID NO: 32925 - protein, 1388 aa, Homo sapiens
MDFSFSFMQGIMGNTIQQPPQLIDSANIRQEDAFDNNSDIAEDGGQTPYEATLQQGFQYPATTEDLPPLTNGYPSSISVYETQTKYQSYNQYPNGSANGFGAVRNFSPTDYYHSEIPNTRPHEILEKPSPPQPPPPPSVPQTVIPKKTGSPEIKLKITKTIQNGRELFESSLCGDLLNEVQASEHTKSKHESRKEKRKKSNKHDSSRSEERKSHKIPKLEPEEQNRPNERVDTVSEKPREEPVLKEEAPVQPILSSVPTTEVSTGVKFQVGDLVWSKVGTYPWWPCMVSSDPQLEVHTKINTRGAREYHVQFFSNQPERAWVHEKRVREYKGHKQYEELLAEATKQASNHSEKQKIRKPRPQRERAQWDIGIAHAEKALKMTREERIEQYTFIYIDKQPEEALSQAKKSVASKTEVKKTRRPRSVLNTQPEQTNAGEVASSLSSTEIRRHSQRRHTSAEEEEPPPVKIAWKTAAARKSLPASITMHKGSLDLQKCNMSPVVKIEQVFALQNATGDGKFIDQFVYSTKGIGNKTEISVRGQDRLIISTPNQRNEKPTQSVSSPEATSGSTGSVEKKQQRRSIRTRSESEKSTEVVPKKKIKKEQVETVPQATVKTGLQKGASEISDSCKPLKKRSRASTDVEMTSSAYRDTSDSDSRGLSDLQVGFGKQVDSPSATADADVSDVQSMDSSLSRRGTGMSKKDTVCQICESSGDSLIPCEGECCKHFHLECLGLASLPDSKFICMECKTGQHPCFSCKVSGKDVKRCSVGACGKFYHEACVRKFPTAIFESKGFRCPQHCCSACSMEKDIHKASKGRMMRCLRCPVAYHSGDACIAAGSMLVSSYILICSNHSKRSSNSSAVNVGFCFVCARGGRLLCCESCPASFHPECLSIEMPEGCWNCNDCKAGKKLHYKQIVWVKLGNYRWWPAEICNPRSVPLNIQGLKHDLGDFPVFFFGSHDYYWVHQGRVFPYVEGDKSFAEGQTSINKTFKKALEEAAKRFQELKAQRESKEALEIEKNSRKPPPYKHIKANKVIGKVQIQVADLSEIPRCNCKPADENPCGLESECLNRMLQYECHPQVCPAGDRCQNQCFTKRLYPDAEIIKTERRGWGLRTKRSIKKGEFVNEYVGELIDEEECRLRIKRAHENSVTNFYMLTVTKDRIIDAGPKGNYSRFMNHSCNPNCETQKWTVNGDVRVGLFALCDIPAGMELTFNYNLDCLGNGRTECHCGADNCSGFLGVRPKSACASTNEEKAKNAKLKQKRRKIKTEPKQMHEDYCFQCGDGGELVMCDKKDCPKAYHLLCLNLTQPPYGKWECPWHQCDECSSAAVSFCEFCPHSFCKDHEKGALVPSALEGRLCCSEHDPMAPVSPEYWSKIKCKWESQDHGEEVKE

SEQ ID NO: 32926 - protein, 645 aa, Homo sapiens
MDFSFSFMQGIMGNTIQQPPQLIDSANIRQEDAFDNNSDIAEDGGQTPYEATLQQGFQYPATTEDLPPLTNGYPSSISVYETQTKYQSYNQYPNGSANGFGAVRNFSPTDYYHSEIPNTRPHEILEKPSPPQPPPPPSVPQTVIPKKTGSPEIKLKITKTIQNGRELFESSLCGDLLNEVQASEHTKSKHESRKEKRKKSNKHDSSRSEERKSHKIPKLEPEEQNRPNERVDTVSEKPREEPVLKEEAPVQPILSSVPTTEVSTGVKFQVGDLVWSKVGTYPWWPCMVSSDPQLEVHTKINTRGAREYHVQFFSNQPERAWVHEKRVREYKGHKQYEELLAEATKQASNHSEKQKIRKPRPQRERAQWDIGIAHAEKALKMTREERIEQYTFIYIDKQPEEALSQAKKSVASKTEVKKTRRPRSVLNTQPEQTNAGEVASSLSSTEIRRHSQRRHTSAEEEEPPPVKIAWKTAAARKSLPASITMHKGSLDLQKCNMSPVVKIEQVFALQNATGDGKFIDQFVYSTKGIGNKTEISVRGQDRLIISTPNQRNEKPTQSVSSPEATSGSTGSVEKKQQRRSIRTRSESEKSTEVVPKKKIKKEQVETVPQATVKTGLQKGSADRGVQGSVRFSDSSVSAAIEETVD

SEQ ID NO: 32927 - protein, 1374 aa, Homo sapiens
MDFSFSFMQGIMGNTIQQPPQLIDSANIRQEDAFDNNSDIAEDGGQTPYEATLQQGFQYPATTEDLPPQPPPPPSVPQTVIPKKTGSPEIKLKITKTIQNGRELFESSLCGDLLNEVQASEHTKSKHESRKEKRKKSNKHDSSRSEERKSHKIPKLEPEEQNRPNERVDTVSEKPREEPVLKEEAPVQPILSSVPTTEVSTGVKFQVGDLVWSKVGTYPWWPCMVSSDPQLEVHTKINTRGAREYHVQFFSNQPERAWVHEKRVREYKGHKQYEELLAEATKQASNHSEKQKIRKPRPQRERAQWDIGIAHAEKALKMTREERIEQYTFIYIDKQPEEALSQAKKSVASKTEVKKTRRPRSVLNTQPEQTNAGEVASSLSSTEIRRHSQRRHTSAEEEEPPPVKIAWKTAAARKSLPASITMHKGSLDLQKCNMSPVVKIEQVFALQNATGDGKFIDQFVYSTKGIGNKTEISVRGQDRLIISTPNQRNEKPTQSVSSPEATSGSTGSVEKKQQRRSIRTRSESEKSTEVVPKKKIKKEQVETVPQATVKTGLQKGASEISDSCKPLKKRSRASTDVEMTSSAYRDTSDSDSRGLSDLQVGFGKQVDSPSATADADVSDVQSMDSSLSRRGTGMSKKDTVCQICESSGDSLIPCEGECCKHFHLECLGLASLPDSKFICMECKTGQHPCFSCKVSGKDVKRCSVGACGKFYHEACVRKFPTAIFESKGFRCPQHCCSACSMEKDIHKASKGRMMRCLRCPVAYHSGDACIAAGSMLVSSYILICSNHSKRSSNSSAVNVGFCFVCARGLIVQDHSDPMFSSYAYKSHYLLNESNRAELMKLPMIPSSSASKKKCEKGGRLLCCESCPASFHPECLSIEMPEGCWNCNDCKAGKKLHYKQIVWVKLGNYRWWPAEICNPRSVPLNIQGLKHDLGDFPVFFFGSHDYYWVHQGRVFPYVEGDKSFAEGQTSINKTFKKALEEAAKRFQELKAQRESKEALEIEKNSRKPPPYKHIKANKVIGKVQIQVADLSEIPRCNCKPADENPCGLESECLNRMLQYECHPQVCPAGDRCQNQCFTKRLYPDAEIIKTERRGWGLRTKRSIKKGEFVNEYVGELIDEEECRLRIKRAHENSVTNFYMLTVTKDRIIDAGPKGNYSRFMNHSCNPNCETQKWTVNGDVRVGLFALCDIPAGMELTFNYNLDCLGNGRTECHCGADNCSGFLGVRPKSACASTNEEKAKNAKLKQKRRKIKTEPKQMHEDYCFQCGDGGELVMCDKKDCPKAYHLLCLNLTQPPYGKWECPWHQCDECSSAAVSFCEFCPHSFCKDHEKGALVPSALEGRLCCSEHDPMAPVSPEYWSKIKCKWESQDHGEEVKE

SEQ ID NO: 32928 - protein, 1426 aa, Homo sapiens
MDFSFSFMQGIMGNTIQQPPQLIDSANIRQEDAFDNNSDIAEDGGQTPYEATLQQGFQYPATTEDLPPLTNGYPSSISVYETQTKYQSYNQYPNGSANGFGAVRNFSPTDYYHSEIPNTRPHEILEKPSPPQPPPPPSVPQTVIPKKTGSPEIKLKITKTIQNGRELFESSLCGDLLNEVQASEHTKSKHESRKEKRKKSNKHDSSRSEERKSHKIPKLEPEEQNRPNERVDTVSEKPREEPVLKEEAPVQPILSSVPTTEVSTGVKFQVGDLVWSKVGTYPWWPCMVSSDPQLEVHTKINTRGAREYHVQFFSNQPERAWVHEKRVREYKGHKQYEELLAEATKQASNHSEKQKIRKPRPQRERAQWDIGIAHAEKALKMTREERIEQYTFIYIDKQPEEALSQAKKSVASKTEVKKTRRPRSVLNTQPEQTNAGEVASSLSSTEIRRHSQRRHTSAEEEEPPPVKIAWKTAAARKSLPASITMHKGSLDLQKCNMSPVVKIEQVFALQNATGDGKFIDQFVYSTKGIGNKTEISVRGQDRLIISTPNQRNEKPTQSVSSPEATSGSTGSVEKKQQRRSIRTRSESEKSTEVVPKKKIKKEQVETVPQATVKTGLQKGASEISDSCKPLKKRSRASTDVEMTSSAYRDTSDSDSRGLSDLQVGFGKQVDSPSATADADVSDVQSMDSSLSRRGTGMSKKDTVCQICESSGDSLIPCEGECCKHFHLECLGLASLPDSKFICMECKTGQHPCFSCKVSGKDVKRCSVGACGKFYHEACVRKFPTAIFESKGFRCPQHCCSACSMEKDIHKASKGRMMRCLRCPVAYHSGDACIAAGSMLVSSYILICSNHSKRSSNSSAVNVGFCFVCARGLIVQDHSDPMFSSYAYKSHYLLNESNRAELMKLPMIPSSSASKKKCEKGGRLLCCESCPASFHPECLSIEMPEGCWNCNDCKAGKKLHYKQIVWVKLGNYRWWPAEICNPRSVPLNIQGLKHDLGDFPVFFFGSHDYYWVHQGRVFPYVEGDKSFAEGQTSINKTFKKALEEAAKRFQELKAQRESKEALEIEKNSRKPPPYKHIKANKVIGKVQIQVADLSEIPRCNCKPADENPCGLESECLNRMLQYECHPQVCPAGDRCQNQCFTKRLYPDAEIIKTERRGWGLRTKRSIKKGEFVNEYVGELIDEEECRLRIKRAHENSDRIIDAGPKGNYSRFMNHSCNPNCETQKWTVNGDVRVGLFALCDIPAGMELTFNYNLDCLGNGRTECHCGADNCSGFLGVRPKSACASTNEEKAKNAKLKQKRRKIKTEPKQMHEDYCFQCGDGGELVMCDKKDCPKAYHLLCLNLTQPPYGKWECPWHQCDECSSAAVSFCEFCPHSFCKDHEKGALVPSALEGRLCCSEHDPMAPVSPEYWSKIKCKWESQDHGEEVKE

SEQ ID NO: 32929 - protein, 585 aa, Homo sapiens
MDLPGDSSPPGQPRLCRQPLTRALWGARSPKRPRLQLPGAPSPLEKASRRVLAVVLEDVMAVHMVPVVPSKQTSIPQHHSYHQDPVHRQPPASPPRQAGWSSQARPPDPLCLCREPLSRIHRTSSTLRRRSRTTPGPEEGPSQKVDRAPQPTLVVMLEDIASPRPPAEGFIDETPNFIIPAQRAEPMRIVRQPTPPPGDLEPPFQPSALPADPLESPPTAPDPALELPSTPPPSSLLRPRLSPWGLAPLFRSVRSKLESFADIFLTPNKTPQPPPPSPPMKLELKIAISEAEQSGAAEGTASVSPRPPIRQWRTQDHNTPALLPKPSLGRSYSCPDLGPPGPGTCTWPPAPPQPSRPRPRRHTVGGGEMARAPPPPRPCLRKEVFPLGGVGASPSLTTSCSSTASTSFSEPAEPRLGSTKGKEPRASKDQVLSEPETKTMGKVSRFRIRRTPARPQLNLTPMGLPRPIRLNKKEFSLEEIYTNKNYQSPTTRRTFETIFEEPRERNGTLIFTSSRKLRRAVEFRDSSLPRSRRPSRGVRAAGGRTVPPNVAPSPDVGPLLQQRLEELDALLLEEETVDREQPHWT

SEQ ID NO: 32930 - protein, 157 aa, Homo sapiens
MSAPFEERSGVVPCGTPWGQWYQTLEEVFIEVQVPPGTRAQDIQCGLQSRHVALSVGGREILKGKLFDSTIADEGTWTLEDRKMVRIVLTKTKRDAANCWTSLLESEYAADPWVQDQMQRKLTLERFQKENPGFDFSGAEISGNYTKGGPDFSNLEK

SEQ ID NO: 32931 - protein, 214 aa, Homo sapiens
MGLAGVCALRRSAGYILVGGAGGQSAAAAARRYSEGEWASGGVRSFSRAAAAMAPIKVGDAIPAVEVFEGEPGNKVNLAELFKGKKGVLFGVPGAFTPGCSKTHLPGFVEQAEALKAKGVQVVACLSVNDAFVTGEWGRAHKAEGKVRLLADPTGAFGKETDLLLDDSLVSIFGNRRLKRFSMVVQDGIVKALNVEPDGTGLTCSLAPNIISQL

SEQ ID NO: 32932 - protein, 162 aa, Homo sapiens
MAPIKVGDAIPAVEVFEGEPGNKVNLAELFKGKKGVLFGVPGAFTPGCSKTHLPGFVEQAEALKAKGVQVVACLSVNDAFVTGEWGRAHKAEGKVRLLADPTGAFGKETDLLLDDSLVSIFGNRRLKRFSMVVQDGIVKALNVEPDGTGLTCSLAPNIISQL

SEQ ID NO: 32933 - protein, 170 aa, Homo sapiens
MGLAGVCALRRSAGYILVGGAGGQSAAAAARRYSEGEWASGGVRSFSRAAAAMAPIKVGDAIPAVEVFEGEPGNKVNLAELFKGKKGVLFGVPGAFTPGCSKVRLLADPTGAFGKETDLLLDDSLVSIFGNRRLKRFSMVVQDGIVKALNVEPDGTGLTCSLAPNIISQL

SEQ ID NO: 32934 - protein, 125 aa, Homo sapiens
MGLAGVCALRRSAGYILVGGAGGQSAAAAARRYSEGEWASGGVRSFSRAAAAMAPIKVRLLADPTGAFGKETDLLLDDSLVSIFGNRRLKRFSMVVQDGIVKALNVEPDGTGLTCSLAPNIISQL

SEQ ID NO: 32935 - protein, 2115 aa, Homo sapiens
MTLHATRGAALLSWVNSLHVADPVEAVLQLQDCSIFIKIIDRIHGTEEGQQILKQPVSERLDFVCSFLQKNRKHPSSPECLVSAQKVLEGSELELAKMTMLLLYHSTMSSKSPRDWEQFEYKIQAELAVILKFVLDHEDGLNLNEDLENFLQKAPVPSTCSSTFPEELSPPSHQAKREIRFLELQKVASSSSGNNFLSGSPASPMGDILQTPQFQMRRLKKQLADERSNRDELELELAENRKLLTEKDAQIAMMQQRIDRLALLNEKQAASPLEPKELEELRDKNESLTMRLHETLKQCQDLKTEKSQMDRKINQLSEENGDLSFKLREFASHLQQLQDALNELTEEHSKATQEWLEKQAQLEKELSAALQDKKCLEEKNEILQGKLSQLEEHLSQLQDNPPQEKGEVLGDVLQLETLKQEAATLAANNTQLQARVEMLETERGQQEAKLLAERGHFEEEKQQLSSLITDLQSSISNLSQAKEELEQASQAHGARLTAQVASLTSELTTLNATIQQQDQELAGLKQQAKEKQAQLAQTLQQQEQASQGLRHQVEQLSSSLKQKEQQLKEVAEKQEATRQDHAQQLATAAEEREASLRERDAALKQLEALEKEKAAKLEILQQQLQVANEARDSAQTSVTQAQREKAELSRKVEELQACVETARQEQHEAQAQVAELELQLRSEQQKATEKERVAQEKDQLQEQLQALKESLKVTKGSLEEEKRRAADALEEQQRCISELKAETRSLVEQHKRERKELEEERAGRKGLEARLQQLGEAHQAETEVLRRELAEAMAAQHTAESECEQLVKEVAAWRERYEDSQQEEAQYGAMFQEQLMTLKEECEKARQELQEAKEKVAGIESHSELQISRQQNELAELHANLARALQQVQEKEVRAQKLADDLSTLQEKMAATSKEVARLETLVRKAGEQQETASRELVKEPARAGDRQPEWLEEQQGRQFCSTQAALQAMEREAEQMGNELERLRAALMESQGQQQEERGQQEREVARLTQERGRAQADLALEKAARAELEMRLQNALNEQRVEFATLQEALAHALTEKEGKDQELAKLRGLEAAQIKELEELRQTVKQLKEQLAKKEKEHASGSGAQSEAAGRTEPTGPKLEALRAEVSKLEQQCQKQQEQADSLERSLEAERASRAERDSALETLQGQLEEKAQELGHSQSALASAQRELAAFRTKVQDHSKAEDEWKAQVARGRQEAERKNSLISSLEEEVSILNRQVLEKEGESKELKRLVMAESEKSQKLEERLRLLQAETASNSARAAERSSALREEVQSLREEAEKQRVASENLRQELTSQAERAEELGQELKAWQEKFFQKEQALSTLQLEHTSTQALVSELLPAKHLCQQLQAEQAAAEKRHREELEQSKQAAGGLRAELLRAQRELGELIPLRQKVAEQERTAQQLRAEKASYAEQLSMLKKAHGLLAEENRGLGERANLGRQFLEVELDQAREKYVQELAAVRADAETRLAEVQREAQSTARELEVMTAKYEGAKVKVLEERQRFQEERQKLTAQVEQLEVFQREQTKQVEELSKKLADSDQASKVQQQKLKAVQAQGGESQQEAQRLQAQLNELQAQLSQKEQAAEHYKLQMEKAKTHYDAKKQQNQELQEQLRSLEQLQKENKELRAEAERLGHELQQAGLKTKEAEQTCRHLTAQVRSLEAQVAHADQQLRDLGKFQVATDALKSREPQAKPQLDLSIDSLDLSCEEGTPLSITSKLPRTQPDGTSVPGEPASPISQRLPPKVESLESLYFTPIPARSQAPLESSLDSLGDVFLDSGRKTRSARRRTTQIINITMTKKLDVEEPDSANSSFYSTRSAPASQASLRATSSTQSLARLGSPDYGNSALLSLPGYRPTTRSSARRSQAGVSSGAPPGRNSFYMGTCQDEPEQLDDWNRIAELQQRNRVCPPHLKTCYPLESRPSLSLGTITDEEMKTGDPQETLRRASMQPIQIAEGTGITTRQQRKRVSLEPHQGPGTPESKKATSCFPRPMTPRDRHEGRKQSTTEAQKKAAPASTKQADRRQSMAFSILNTPKKLGNSLLRRGASKKALSKASPNTRSGTRRSPRIATTTASAATAAAIGATPRAKGKAKH

SEQ ID NO: 32936 - protein, 2101 aa, Homo sapiens
MTLHATRGAALLSWVNSLHVADPVEAVLQLQDCSIFIKIIDRIHGTEEGQQILKQPVSERLDFVCSFLQKNRKHPSSPECLVSAQKVLEGSELELAKMTMLLLYHSTMSSKSPRDWEQFEYKIQAELAVILKFVLDHEDGLNLNEDLENFLQKAPVPSTCSSTFPEELSPPSHQAKREIRFLELQKVASSSSGNNFLSGSPASPMGDILQTPQFQMRRLKKQLADERSNRDELELELAENRKLLTEKDAQIAMMQQRIDRLALLNEKQAASPLEPKELEELRDKNESLTMRLHETLKQCQDLKTEKSQMDRKINQLSEENGDLSFKLREFASHLQQLQDALNELTEEHSKATQEWLEKQAQLEKELSAALQDKKCLEEKNEILQGKLSQLEEHLSQLQDNPPQEKGEVLGDVLQLETLKQEAATLAANNTQLQARVEMLETERGQQEAKLLAERGHFEEEKQQLSSLITDLQSSISNLSQAKEELEQASQAHGARLTAQVASLTSELTTLNATIQQQDQELAGLKQQAKEKQAQLAQTLQQQEQASQGLRHQVEQLSSSLKQKEQQLKEVAEKQEATRQDHAQQLATAAEEREASLRERDAALKQLEALEKEKAAKLEILQQQLQVANEARDSAQTSVTQAQREKAELSRKVEELQACVETARQEQHEAQAQVAELELQLRSEQQKATEKERVAQEKDQLQEQLQALKESLKVTKGSLEEEKRRAADALEEQQRCISELKAETRSLVEQHKRERKELEEERAGRKGLEARLQQLGEAHQAETEVLRRELAEAMAAQHTAESECEQLVKEVAAWRERYEDSQQEEAQYGAMFQEQLMTLKEECEKARQELQEAKEKVAGIESHSELQISRQQNELAELHANLARALQQVQEKEVRAQKLADDLSTLQEKMAATSKEVARLETLVRKAGEQQETASRELVKEPARAGDRQPEWLEEQQGRQFCSTQAALQAMEREAEQMGNELERLRAALMESQGQQQEERGQQEREVARLTQERGRAQADLALEKAARAELEMRLQNALNEQRVEFATLQEALAHALTEKEGKDQELAKLRGLEAAQIKELEELRQTVKQLKEQLAKKEKEHASGSGAQSEAAGRTEPTGPKLEALRAEVSKLEQQCQKQQEQADSLERSLEAERASRAERDSALETLQGQLEEKAQELGHSQSALASAQRELAAFRTKVQDHSKAEDEWKAQVARGRQEAERKNSLISSLEEEVSILNRQVLEKEGESKELKRLVMAESEKSQKLEERLRLLQAETASNSARAAERSSALREEVQSLREEAEKQRVASENLRQELTSQAERAEELGQELKAWQEKFFQKEQALSTLQLEHTSTQALVSELLPAKHLCQQLQAEQAAAEKRHREELEQSKQAAGGLRAELLRAQRELGELIPLRQKVAEQERTAQQLRAEKASYAEQLSMLKKAHGLLAEENRGLGERANLGRQFLEVELDQAREKYVQELAAVRADAETRLAEVQREAQSTARELEVMTAKYEGAKVKVLEERQRFQEERQKLTAQVEELSKKLADSDQASKVQQQKLKAVQAQGGESQQEAQRLQAQLNELQAQLSQKEQAAEHYKLQMEKAKTHYDAKKQQNQELQEQLRSLEQLQKENKELRAEAERLGHELQQAGLKTKEAEQTCRHLTAQVRSLEAQVAHADQQLRDLGKFQVATDALKSREPQAKPQLDLSIDSLDLSCEEGTPLSITSKLPRTQPDGTSVPGEPASPISQRLPPKVESLESLYFTPIPARSQAPLESSLDSLGDVFLDSGRKTRSARRRTTQIINITMTKKLDVEEPDSANSSFYSTRSAPASQASLRATSSTQSLARLGSPDYGNSALLSLPGYRPTTRSSARRSQAGVSSGAPPGRNSFYMGTCQDEPEQLDDWNRIAELQQRNRVCPPHLKTCYPLESRPSLSLGTITDEEMKTGDPQETLRRASMQPIQIAEGTGITTRQQRKRVSLEPHQGPGTPESKKATSCFPRPMTPRDRHEGRKQSTTEAQKKAAPASTKQADRRQSMAFSILNTPKKLGNSLLRRGASKKALSKASPNTRSGTRRSPRIATTTASAATAAAIGATPRAKGKAKH

SEQ ID NO: 32937 - protein, 1776 aa, Homo sapiens
MTLHATRGAALLSWVNSLHVADPVEAVLQLQDCSIFIKIIDRIHGTEEGQQILKQPVSERLDFVCSFLQKNRKHPSSPECLVSAQKVLEGSELELAKMTMLLLYHSTMSSKSPRDWEQFEYKIQAELAVILKFVLDHEDGLNLNEDLENFLQKAPVPSTCSSTFPEELSPPSHQAKREIRFLELQKVASSSSGNNFLSGSPASPMGDILQTPQFQMRRLKKQLADERSNRDELELELAENRKLLTEKDAQIAMMQQRIDRLALLNEKQAASPLEPKELEELRDKNESLTMRLHETLKQCQDLKTEKSQMDRKINQLSEENGDLSFKLREFASHLQQLQDALNELTEEHSKATQEWLEKQAQLEKELSAALQDKKCLEEKNEILQGKLSQLEEHLSQLQDNPPQEKGEVLGDVLQLETLKQEAATLAANNTQLQARVEMLETERGQQEAKLLAERGHFEEEKQQLSSLITDLQSSISNLSQAKEELEQASQAHGARLTAQVASLTSELTTLNATIQQQDQELAGLKQQAKEKQAQLAQTLQQQEQASQGLRHQVEQLSSSLKQKEQQLKEVAEKQEATRQDHAQQLATAAEEREASLRERDAALKQLEALEKEKAAKLEILQQQLQVANEARDSAQTSVTQAQREKAELSRKVEELQACVETARQEQHEAQAQVAELELQLRSEQQKATEKERVAQEKDQLQEQLQALKESLKVTKGSLEEEKRRAADALEEQQRCISELKAETRSLVEQHKRERKELEEERAGRKGLEARLQQLGEAHQAETEVLRRELAEAMAAQHTAESECEQLVKEVAAWRERYEDSQQEEAQYGAMFQEQLMTLKEECEKARQELQEAKEKVAGIESHSELQISRQQNELAELHANLARALQQVQEKEVRAQKLADDLSTLQEKMAATSKEVARLETLVRKAGEQQETASRELVKEPARAGDRQPEWLEEQQGRQFCSTQAALQAMEREAEQMGNELERLRAALMESQGQQQEERGQQEREVARLTQERGRAQADLALEKAARAELEMRLQNALNEQRVEFATLQEALAHALTEKEGKDQELAKLRGLEAAQIKELEELRQTVKQLKEQLAKKEKEHASGSGAQSEAAGRTEPTGPKLEALRAEVSKLEQQCQKQQEQADSLERSLEAERASRAERDSALETLQGQLEEKAQELGHSQSALASAQRELAAFRTKVQDHSKAEDEWKAQVARGRQEAERKNSLISSLEEEVSILNRQVLEKEGESKELKRLVMAESEKSQKLEERLRLLQAETASNSARAAERSSALREEVQSLREEAEKQRVASENLRQELTSQAERAEELGQELKAWQEKFFQKEQALSTLQLEHTSTQALVSELLPAKHLCQQLQAEQAAAEKRHREELEQSKQAAGGLRAELLRAQRELGELIPLRQKVAEQERTAQQLRAEKASYAEQLSMLKKAHGLLAEENRGLGERANLGRQFLEVELDQAREKYVQELAAVRADAETRLAEVQREAQSTARELEVMTAKYEGAKVKVLEERQRFQEERQKLTAQVEQLEVFQREQTKQVEELSKKLADSDQASKVQQQKLKAVQAQGGESQQEAQRLQAQLNELQAQLSQKEQAAEHYKLQMEKAKTHYDAKKQQNQELQEQLRSLEQLQKENKELRAEAERLGHELQQAGLKTKEAEQTCRHLTAQVRSLEAQVAHADQQLRDLGKFQVATDALKSREPQAKPQLDLSIDSSQANSSQTPRDSDACPHPGLVPGPSLAPSRSWPRGPGAWTVWALSLPCLLFS

SEQ ID NO: 32938 - protein, 1763 aa, Homo sapiens
MTLHATRGAALLSWVNSLHVADPVEAVLQLQDCSIFIKIIDRIHGTEEGQQILKQPVSERLDFVCSFLQKNRKHPSSPECLVSAQKVLEGSELELAKMTMLLLYHSTMSSKSPRDWEQFEYKIQAELAVILKFVLDHEDGLNLNEDLENFLQKAPVPSTCSSTFPEELSPPSHQAKREIRFLELQKVASSSSGNNFLSGSPASPMGDILQTPQFQMRRLKKQLADERSNRDELELELAENRKLLTEKDAQIAMMQQRIDRLALLNEKQAASPLEPKELEELRDKNESLTMRLHETLKQCQDLKTEKSQMDRKINQLSEENGDLSFKLREFASHLQQLQDALNELTEEHSKATQEWLEKQAQLEKELSAALQDKKCLEEKNEILQGKLSQLEEHLSQLQDNPPQEKGEVLGDVLQLETLKQEAATLAANNTQLQARVEMLETERGQQEAKLLAERGHFEEEKQQLSSLITDLQSSISNLSQAKEELEQASQAHGARLTAQVASLTSELTTLNATIQQQDQELAGLKQQAKEKQAQLAQTLQQQEQASQGLRHQVEQLSSSLKQKEQQLKEVAEKQEATRQDHAQQLATAAEEREASLRERDAALKQLEALEKEKAAKLEILQQQLQVANEARDSAQTSVTQAQREKAELSRKVEELQACVETARQEQHEAQAQVAELELQLRSEQQKATEKERVAQEKDQLQEQLQALKESLKVTKGSLEEEKRRAADALEEQQRCISELKAETRSLVEQHKRERKELEEERAGRKGLEARLQQLGEAHQAETEVLRRELAEAMAAQHTAESECEQLVKEVAAWRERYEDSQQEEAQYGAMFQEQLMTLKEECEKARQELQEAKEKVAGIESHSELQISRQQNELAELHANLARALQQVQEKEVRAQKLADDLSTLQEKMAATSKEVARLETLVRKAGEQQETASRELVKEPARAGDRQPEWLEEQQGRQFCSTQAALQAMEREAEQMGNELERLRAALMESQGQQQEERGQQEREVARLTQERGRAQADLALEKAARAELEMRLQNALNEQRVEFATLQEALAHALTEKEGKDQELAKLRGLEAAQIKELEELRQTVKQLKEQLAKKEKEHASGSGAQSEAAGRTEPTGPKLEALRAEVSKLEQQCQKQQEQADSLERSLEAERASRAERDSALETLQGQLEEKAQELGHSQSALASAQRELAAFRTKVQDHSKAEDEWKAQVARGRQEAERKNSLISSLEEEVSILNRQVLEKEGESKELKRLVMAESEKSQKLEERLRLLQAETASNSARAAERSSALREEVQSLREEAEKQRVASENLRQELTSQAERAEELGQELKAWQEKFFQKEQALSTLQLEHTSTQALVSELLPAKHLCQQLQAEQAAAEKRHREELEQSKQAAGGLRAELLRAQRELGELIPLRQKVAEQERTAQQLRAEKASYAEQLSMLKKAHGLLAEENRGLGERANLGRQFLEVELDQAREKYVQELAAVRADAETRLAEVQREAQSTARELEVMTAKYEGAKVKVLEERQRFQEERQKLTAQVEQLEVFQREQTKQVEELSKKLADSDQASKVQQQKLKAVQAQGGESQQEAQRLQAQLNELQAQLSQKEQAAEHYKLQMEKAKTHYDAKKQQNQELQEQLRSLEQLQKENKELRAEAERLGHELQQAGLKTKEAEQTCRHLTAQVRSLEAQVAHADQQLRDLGKFQVATDALKSREPQAKPQLDLSIDSLDLSCEEGTPLSITRSGGSLPPYVCLWSACCLSGCILVR

SEQ ID NO: 32939 - protein, 979 aa, Homo sapiens
MTLHATRGAALLSWVNSLHVADPVEAVLQLQDCSIFIKIIDRIHGTEEGQQILKQPVSERLDFVCSFLQKNRKHPSSPECLVSAQKVLEGSELELAKMTMLLLYHSTMSSKSPRDWEQFEYKIQAELAVILKFVLDHEDGLNLNEDLENFLQKAPVPSTCSSTFPEELSPPSHQAKREIRFLELQKVASSSSGNNFLSGSPASPMGDILQTPQFQMRRLKKQLADERSNRDELELELAENRKLLTEKDAQIAMMQQRIDRLALLNEKQAASPLEPKELEELRDKNESLTMRLHETLKQCQDLKTEKSQMDRKINQLSEENGDLSFKLREFASHLQQLQDALNELTEEHSKATQEWLEKQAQLEKELSAALQDKKCLEEKNEILQGKLSQLEEHLSQLQDNPPQEKGEVLGDVLQVEELSKKLADSDQASKVQQQKLKAVQAQGGESQQEAQRLQAQLNELQAQLSQKEQAAEHYKLQMEKAKTHYDAKKQQNQELQEQLRSLEQLQKENKELRAEAERLGHELQQAGLKTKEAEQTCRHLTAQVRSLEAQVAHADQQLRDLGKFQVATDALKSREPQAKPQLDLSIDSLDLSCEEGTPLSITSKLPRTQPDGTSVPGEPASPISQRLPPKVESLESLYFTPIPARSQAPLESSLDSLGDVFLDSGRKTRSARRRTTQIINITMTKKLDVEEPDSANSSFYSTRSAPASQASLRATSSTQSLARLGSPDYGNSALLSLPGYRPTTRSSARRSQAGVSSGAPPGRNSFYMGTCQDEPEQLDDWNRIAELQQRNRVCPPHLKTCYPLESRPSLSLGTITDEEMKTGDPQETLRRASMQPIQIAEGTGITTRQQRKRVSLEPHQGPGTPESKKATSCFPRPMTPRDRHEGRKQSTTEAQKKAAPASTKQADRRQSMAFSILNTPKKLGNSLLRRGASKKALSKASPNTRSGTRRSPRIATTTASAATAAAIGATPRAKGKAKH

SEQ ID NO: 32940 - protein, 541 aa, Homo sapiens
MSSNSDTGDLQESLKHGLTPIGAGLPDRHGSPIPARGRLVMLPKVETEALGLARSHGEQGQMPENMQVSQFKMVNYSYDEDLEELCPVCGDKVSGYHYGLLTCESCKGFFKRTVQNNKRYTCIENQNCQIDKTQRKRCPYCRFQKCLSVGMKLEAVRADRMRGGRNKFGPMYKRDRALKQQKKALIRANGLKLEAMSQVIQAMPSDLTISSAIQNIHSASKGLPLNHAALPPTDYDRSPFVTSPISMTMPPHGSLQGYQTYGHFPSRAIKSEYPDPYTSSPESIMGYSYMDSYQTSSPASIPHLILELLKCEPDEPQVQAKIMAYLQQEQANRSKHEKLSTFGLMCKMADQTLFSIVEWARSSIFFRELKVDDQMKLLQNCWSELLILDHIYRQVVHGKEGSIFLVTGQQVDYSIIASQAGATLNNLMSHAQELVAKLRSLQFDQREFVCLKFLVLFSLDVKNLENFQLVEGVQEQVNAALLDYTMCNYPQQTEKFGQLLLRLPEIRAISMQAEEYLYYKHLNGDVPYNNLLIEMLHAKRA

SEQ ID NO: 32941 - protein, 495 aa, Homo sapiens
MSSNSDTGDLQESLKHGLTPIVSQFKMVNYSYDEDLEELCPVCGDKVSGYHYGLLTCESCKGFFKRTVQNNKRYTCIENQNCQIDKTQRKRCPYCRFQKCLSVGMKLEAVRADRMRGGRNKFGPMYKRDRALKQQKKALIRANGLKLEAMSQVIQAMPSDLTISSAIQNIHSASKGLPLNHAALPPTDYDRSPFVTSPISMTMPPHGSLQGYQTYGHFPSRAIKSEYPDPYTSSPESIMGYSYMDSYQTSSPASIPHLILELLKCEPDEPQVQAKIMAYLQQEQANRSKHEKLSTFGLMCKMADQTLFSIVEWARSSIFFRELKVDDQMKLLQNCWSELLILDHIYRQVVHGKEGSIFLVTGQQVDYSIIASQAGATLNNLMSHAQELVAKLRSLQFDQREFVCLKFLVLFSLDVKNLENFQLVEGVQEQVNAALLDYTMCNYPQQTEKFGQLLLRLPEIRAISMQAEEYLYYKHLNGDVPYNNLLIEMLHAKRA

SEQ ID NO: 32942 - protein, 369 aa, Homo sapiens
MSSNSDTGDLQESLKHGLTPIGAGLPDRHGSPIPARGRLVMLPKVETEALGLARSHGEQGQMPENMQVSQFKMVNYSYDEDLEELCPVCGDKVSGYHYGLLTCESCKGFFKRTVQNNKRYTCIENQNCQIDKTQRKRCPYCRFQKCLSVGMKLEAVRADRMRGGRNKFGPMYKRDRALKQQKKALIRANGLKLEAMSQVDDQMKLLQNCWSELLILDHIYRQVVHGKEGSIFLVTGQQVDYSIIASQAGATLNNLMSHAQELVAKLRSLQFDQREFVCLKFLVLFSLDVKNLENFQLVEGVQEQVNAALLDYTMCNYPQQTEKFGQLLLRLPEIRAISMQAEEYLYYKHLNGDVPYNNLLIEMLHAKRA

SEQ ID NO: 32943 - protein, 469 aa, Homo sapiens
MVNYSYDEDLEELCPVCGDKVSGYHYGLLTCESCKGFFKRTVQNNKRYTCIENQNCQIDKTQRKRCPYCRFQKCLSVGMKLEAVRADRMRGGRNKFGPMYKRDRALKQQKKALIRANGLKLEAMSQVIQAMPSDLTISSAIQNIHSASKGLPLNHAALPPTDYDRSPFVTSPISMTMPPHGSLQGYQTYGHFPSRAIKSEYPDPYTSSPESIMGYSYMDSYQTSSPASIPHLILELLKCEPDEPQVQAKIMAYLQQEQANRSKHEKLSTFGLMCKMADQTLFSIVEWARSSIFFRELKVDDQMKLLQNCWSELLILDHIYRQVVHGKEGSIFLVTGQQVDYSIIASQAGATLNNLMSHAQELVAKLRSLQFDQREFVCLKFLVLFSLDVKNLENFQLVEGVQEQVNAALLDYTMCNYPQQTEKFGQLLLRLPEIRAISMQAEEYLYYKHLNGDVPYNNLLIEMLHAKRA

SEQ ID NO: 32944 - protein, 831 aa, Homo sapiens
MPLEMEPKMSKLAFGCQRSSTSDDDSGCALEEYAWVPPGLRPEQIQLYFACLPEEKVPYVNSPGEKHRIKQLLYQLPPHDNEVRYCQSLSEEEKKELQVFSAQRKKEALGRGTIKLLSRAVMHAVCEQCGLKINGGEVAVFASRAGPGVCWHPSCFVCFTCNELLVDLIYFYQDGKIHCGRHHAELLKPRCSACDEIIFADECTEAEGRHWHMKHFCCLECETVLGGQRYIMKDGRPFCCGCFESLYAEYCETCGEHIGVDHAQMTYDGQHWHATEACFSCAQCKASLLGCPFLPKQGQIYCSKTCSLGEDVHASDSSDSAFQSARSRDSRRSVRMGKSSRSADQCRQSLLLSPALNYKFPGLSGNADDTLSRKLDDLSLSRQGTSFASEEFWKGRVEQETPEDPEEWADHEDYMTQLLLKFGDKSLFQPQPNEMDIRASEHWISDNMVKSKTELKQNNQSLASKKYQSDMYWAQSQDGLGDSAYGSHPGPASSRRLQELELDHGASGYNHDETQWYEDSLECLSDLKPEQSVRDSMDSLALSNITGASVDGENKPRPSLYSLQNFEEMETEDCEKMSNMGTLNSSMLHRSAESLKSLSSELCPEKILPEEKPVHLPVLRRSKSQSRPQQVKFSDDVIDNGNYDIEIRQPPMSERTRRRVYNFEERGSRSHHHRRRRSRKSRSDNALNLVTERKYSPKDRLRLYTPDNYEKFIQNKSAREIQAYIQNADLYGQYAHATSDYGLQNPGMNRFLGLYGEDDDSWCSSSSSSSDSEEEGYFLGQPIPQPRPQRFAYYTDDLSSPPSALPTPQFGQRTTKSKKKKGHKGKNCIIS

SEQ ID NO: 32945 - protein, 221 aa, Homo sapiens
MESSRWDKDPPGERRPQQSQHWRARDHGARGCGPRQPTATASPRPGLWITPAHGSHTPQTNTRRTQADNIFIYESWLIHHGTQMSSVLPQPPLVRGPWHNTNSPWDSWASRGKLRVCPCRTPRLHSSGCFSSKAGTALSPSLPVPGLRPQPPFLQKPLSILAPATPPALVSPTPPKLSPGQLSPHSVNVHWGPQGHLHLPRSGTTVLHAYLQTLSSPASHQ

SEQ ID NO: 32946 - protein, 410 aa, Homo sapiens
METSSPRPPRPSSNPGLSLDARLGVDTRLWAKVLFTALYALIWALGAAGNALSAHVVLKARAGRAGRLRHHVLSLALAGLLLLLVGVPVELYSFVWFHYPWVFGDLGCRGYYFVHELCAYATVLSVAGLSAERCLAVCQPLRARSLLTPRRTRWLVALSWAASLGLALPMAVIMGQKHELETADGEPEPASRVCTVLVSRTALQVFIQVNVLVSFVLPLALTAFLNGVTVSHLLALCSQVPSTSTPGSSTPSRLELLSEEGLLSFIVWKKTFIQGGQVSLVRHKDVRRIRSLQRSVQVLRAIVVMYVICWLPYHARRLMYCYVPDDAWTDPLYNFYHYFYMVTNTLFYVSSAVTPLLYNAVSSSFRKLFLEAVSSLCGEHHPMKRLPPKPQSPTLMDTASGFGDPPETRT

SEQ ID NO: 32947 - protein, 129 aa, Homo sapiens
MRSLCCAPLLLLLLLPPLLLTPRAGDAAVITGACDKDSQCGGGMCCAVSIWVKSIRICTPMGKLGDSCHPLTRKNNFGNGRQERRKRKRSKRKKEVPFFGRRMHHTCPCLPGLACLRTSFNRFICLAQK

SEQ ID NO: 32948 - protein, 108 aa, Homo sapiens
MRSLCCAPLLLLLLLPPLLLTPRAGDAAVITGACDKDSQCGGGMCCAVSIWVKSIRICTPMGKLGDSCHPLTRKVPFFGRRMHHTCPCLPGLACLRTSFNRFICLAQK

SEQ ID NO: 32949 - protein, 189 aa, Homo sapiens
MASGAGGSWGRSPPQSAVPTPWVTFLQPLSWAVPPAPPQPGRVKEDLLELMMLQNAQMHQLLLSRLVAGALQPRPASPCPQVYLEVPQEEPEEEEEEMDVREKGPLVFHHHYLPYLMPSPGALLPWPAPFFPTPACQPYLQDVPRIQHCPASREREVRAVPPPPPPSATGTVGADVPPASDYYDAESLL

SEQ ID NO: 32950 - protein, 236 aa, Homo sapiens
MASGAGGSWGRSPPQSAVPTPWVTFLQPLSWAVPPAPPQPGRVKEDLLELMMLQNAQMHQLLLSRLVAGALQPRPASPCPQVYLEVPQEEPEEEEEEMDVREKGPLVFHHHYLPYLMPSPGALLPWPAPFFPTPACQPYLQDVPRIQHCPASRERETTMMPRASYEDRPRPWELHQLPALDTAPEPPPAPLLSTPRCPWLAVLLTPSTSARPSSPGEISPCPTPMSSWTGRICAVV

SEQ ID NO: 32951 - protein, 98 aa, Homo sapiens
MASGAGGSWGRSPPQSAVPTPWVTFLQPLSWAVPPAPPQPGRVKEDLLELMMLQNAQMHQLLLSRLVAGALQPRPASPCPQESCAPTPTPQCHRDCGC

SEQ ID NO: 32952 - protein, 182 aa, Homo sapiens
MASGAGGSWGRSPPQSAVPTPLSWAVPPAPPQPGRVKEDLLELMMLQNAQMHQLLLSRLVAGALQPRPASPCPQVYLEVPQEEPEEEEEEMDVREKGPLVFHHHYLPYLMPSPGALLPWPAPFFPTPACQPYLQDVPRIQHCPASREREVRAVPPPPPPSATGTVGADVPPASDYYDAESLL

SEQ ID NO: 32953 - protein, 550 aa, Homo sapiens
MTGDKGPQRLSGSSYGSISSPTSPTSPGPQQAPPRETYLSEKIPIPDTKPGTFSLRKLWAFTGPGFLMSIAFLDPGNIESDLQAGAVAGFKLLWVLLWATVLGLLCQRLAARLGVVTGKDLGEVCHLYYPKVPRTVLWLTIELAIVGSDMQEVIGTAIAFNLLSAGRIPLWGGVLITIVDTFFFLFLDNYGLRKLEAFFGLLITIMALTFGYEYVVARPEQGALLRGLFLPSCPGCGHPELLQAVGIVGAIIMPHNIYLHSALVKSREIDRARRADIREANMYFLIEATIALSVSFIINLFVMAVFGQAFYQKTNQAAFNICANSSLHDYAKIFPMNNATVAVDIYQGGVILGCLFGPAALYIWAIGLLAAGQSSTMTGTYAGQFVMEGFLRLRWSRFARVLLTRSCAILPTVLVAVFRDLRDLSGLNDLLNVLQSLLLPFAVLPILTFTSMPTLMQEFANGLLNKVVTSSIMVLVCAINLYFVVSYLPSLPHPAYFGLAALLAAAYLGLSTYLVWTCCLAHGATFLAHSSHHHFLYGLLEEDQKGETSG

SEQ ID NO: 32954 - protein, 432 aa, Homo sapiens
MVRCQLTATSTSQVPRTVLWLTIELAIVGSDMQEVIGTAIAFNLLSAGRIPLWGGVLITIVDTFFFLFLDNYGLRKLEAFFGLLITIMALTFGYEYVVARPEQGALLRGLFLPSCPGCGHPELLQAVGIVGAIIMPHNIYLHSALVKSREIDRARRADIREANMYFLIEATIALSVSFIINLFVMAVFGQAFYQKTNQAAFNICANSSLHDYAKIFPMNNATVAVDIYQGGVILGCLFGPAALYIWAIGLLAAGQSSTMTGTYAGQFVMEGFLRLRWSRFARVLLTRSCAILPTVLVAVFRDLRDLSGLNDLLNVLQSLLLPFAVLPILTFTSMPTLMQEFANGLLNKVVTSSIMVLVCAINLYFVVSYLPSLPHPAYFGLAALLAAAYLGLSTYLVWTCCLAHGATFLAHSSHHHFLYGLLEEDQKGETSG

SEQ ID NO: 32955 - protein, 651 aa, Homo sapiens
MNKLRQSFRRKKDVYVPEASRPHQWQTDEEGVRTGKCSFPVKYLGHVEVDESRGMHICEDAVKRLKAERKFFKGFFGKTGKKAVKAVLWVSADGLRVVDEKTKDLIVDQTIEKVSFCAPDRNFDRAFSYICRDGTTRRWICHCFMAVKDTGERLSHAVGCAFAACLERKQKREKECGVTATFDASRTTFTREGSFRVTTATEQAEREEIMKQMQDAKKAETDKIVVGSSVAPGNTAPSPSSPTSPTSDATTSLEMNNPHAIPRRHAPIEQLARQGSFRGFPALSQKMSPFKRQLSLRINELPSTMQRKTDFPIKNAVPEVEGEAESISSLCSQITNAFSTPEDPFSSAPMTKPVTVVAPQSPTFQANGTDSAFHVLAKPAHTALAPVAMPVRETNPWAHAPDAANKEIAATCSGTEWGQSSGAASPGLFQAGHRRTPSEADRWLEEVSKSVRAQQPQASAAPLQPVLQPPPPTAISQPASPFQGNAFLTSQPVPVGVVPALQPAFVPAQSYPVANGMPYPAPNVPVVGITPSQMVANVFGTAGHPQAAHPHQSPSLVRQQTFPHYEASSATTSPFFKPPAQHLNGSAAFNGVDDGRLASADRHTEVPTGTCPVDPFEAQWAALENKSKQRTNPSPTNPFSSDLQKTFEIEL

SEQ ID NO: 32956 - protein, 603 aa, Homo sapiens
MNKLRQSFRRKKDVYVPEASRPHQWQTDEEGVRTGKCSFPVKYLGHVEVDESRGMHICEDAVKRLKAERKFFKGFFGKTGKKAVKAVLWVSADGLRVVDEKTKDLIVDQTIEKVSFCAPDRNFDRAFSYICRDGTTRRWICHCFMAVKDTGERLSHAVGCAFAACLERKQKREKECGVTATFDASRTTFTREGSFRVTTATEQAEREEIMKQMQDAKKAETDKIVVGSSVAPGNTAPSPSSPTSPTSDATTSLEMNNPHAIPRRHAPIEQLARQGSFRGFPALSQKMSPFKRQLSLRINELPSTMQRKTDFPIKNAVPEVEGEAESISSLCSQITNAFSTPEDPFSSAPMTKPVTVVAPQSPTFQGTEWGQSSGAASPGLFQAGHRRTPSEADRWLEEVSKSVRAQQPQASAAPLQPVLQPPPPTAISQPASPFQGNAFLTSQPVPVGVVPALQPAFVPAQSYPVANGMPYPAPNVPVVGITPSQMVANVFGTAGHPQAAHPHQSPSLVRQQTFPHYEASSATTSPFFKPPAQHLNGSAAFNGVDDGRLASADRHTEVPTGTCPVDPFEAQWAALENKSKQRTNPSPTNPFSSDLQKTFEIEL

SEQ ID NO: 32957 - protein, 640 aa, Homo sapiens
MNKLRQSFRRKKDVYVPEASRPHQWQTDEEGVRTGKCSFPVKYLGHVEVDESRGMHICEDAVKRLKATGKKAVKAVLWVSADGLRVVDEKTKDLIVDQTIEKVSFCAPDRNFDRAFSYICRDGTTRRWICHCFMAVKDTGERLSHAVGCAFAACLERKQKREKECGVTATFDASRTTFTREGSFRVTTATEQAEREEIMKQMQDAKKAETDKIVVGSSVAPGNTAPSPSSPTSPTSDATTSLEMNNPHAIPRRHAPIEQLARQGSFRGFPALSQKMSPFKRQLSLRINELPSTMQRKTDFPIKNAVPEVEGEAESISSLCSQITNAFSTPEDPFSSAPMTKPVTVVAPQSPTFQANGTDSAFHVLAKPAHTALAPVAMPVRETNPWAHAPDAANKEIAATCSGTEWGQSSGAASPGLFQAGHRRTPSEADRWLEEVSKSVRAQQPQASAAPLQPVLQPPPPTAISQPASPFQGNAFLTSQPVPVGVVPALQPAFVPAQSYPVANGMPYPAPNVPVVGITPSQMVANVFGTAGHPQAAHPHQSPSLVRQQTFPHYEASSATTSPFFKPPAQHLNGSAAFNGVDDGRLASADRHTEVPTGTCPVDPFEAQWAALENKSKQRTNPSPTNPFSSDLQKTFEIEL

SEQ ID NO: 32958 - protein, 592 aa, Homo sapiens
MNKLRQSFRRKKDVYVPEASRPHQWQTDEEGVRTGKCSFPVKYLGHVEVDESRGMHICEDAVKRLKATGKKAVKAVLWVSADGLRVVDEKTKDLIVDQTIEKVSFCAPDRNFDRAFSYICRDGTTRRWICHCFMAVKDTGERLSHAVGCAFAACLERKQKREKECGVTATFDASRTTFTREGSFRVTTATEQAEREEIMKQMQDAKKAETDKIVVGSSVAPGNTAPSPSSPTSPTSDATTSLEMNNPHAIPRRHAPIEQLARQGSFRGFPALSQKMSPFKRQLSLRINELPSTMQRKTDFPIKNAVPEVEGEAESISSLCSQITNAFSTPEDPFSSAPMTKPVTVVAPQSPTFQGTEWGQSSGAASPGLFQAGHRRTPSEADRWLEEVSKSVRAQQPQASAAPLQPVLQPPPPTAISQPASPFQGNAFLTSQPVPVGVVPALQPAFVPAQSYPVANGMPYPAPNVPVVGITPSQMVANVFGTAGHPQAAHPHQSPSLVRQQTFPHYEASSATTSPFFKPPAQHLNGSAAFNGVDDGRLASADRHTEVPTGTCPVDPFEAQWAALENKSKQRTNPSPTNPFSSDLQKTFEIEL

SEQ ID NO: 32959 - protein, 505 aa, Homo sapiens
MNKLRQSFRRKKDVYVPEASRPHQWQTDEEGVRTGKCSFPVKYLGHVEVDESRGMHICEDAVKRLKAERKFFKGFFGKTGKKAVKAVLWVSADGLRVVDEKTKDLIVDQTIEKVSFCAPDRNFDRAFSYICRDGTTRRWICHCFMAVKDTGERLSHAVGCAFAACLERKQKREKECGVTATFDASRTTFTREGSFRVTTATEQAEREEIMKQMQDAKKVPEVEGEAESISSLCSQITNAFSTPEDPFSSAPMTKPVTVVAPQSPTFQGTEWGQSSGAASPGLFQAGHRRTPSEADRWLEEVSKSVRAQQPQASAAPLQPVLQPPPPTAISQPASPFQGNAFLTSQPVPVGVVPALQPAFVPAQSYPVANGMPYPAPNVPVVGITPSQMVANVFGTAGHPQAAHPHQSPSLVRQQTFPHYEASSATTSPFFKPPAQHLNGSAAFNGVDDGRLASADRHTEVPTGTCPVDPFEAQWAALENKSKQRTNPSPTNPFSSDLQKTFEIEL

SEQ ID NO: 32960 - protein, 494 aa, Homo sapiens
MNKLRQSFRRKKDVYVPEASRPHQWQTDEEGVRTGKCSFPVKYLGHVEVDESRGMHICEDAVKRLKATGKKAVKAVLWVSADGLRVVDEKTKDLIVDQTIEKVSFCAPDRNFDRAFSYICRDGTTRRWICHCFMAVKDTGERLSHAVGCAFAACLERKQKREKECGVTATFDASRTTFTREGSFRVTTATEQAEREEIMKQMQDAKKVPEVEGEAESISSLCSQITNAFSTPEDPFSSAPMTKPVTVVAPQSPTFQGTEWGQSSGAASPGLFQAGHRRTPSEADRWLEEVSKSVRAQQPQASAAPLQPVLQPPPPTAISQPASPFQGNAFLTSQPVPVGVVPALQPAFVPAQSYPVANGMPYPAPNVPVVGITPSQMVANVFGTAGHPQAAHPHQSPSLVRQQTFPHYEASSATTSPFFKPPAQHLNGSAAFNGVDDGRLASADRHTEVPTGTCPVDPFEAQWAALENKSKQRTNPSPTNPFSSDLQKTFEIEL

SEQ ID NO: 32961 - protein, 456 aa, Homo sapiens
MNKLRQSFRRKKDVYVPEASRPHQWQTDEEGVRTGKCSFPVKYLGHVEVDESRGMHICEDAVKRLKAERKFFKGFFGKTGKKAVKAVLWVSADGLRVVDEKTKDLIVDQTIEKVSFCAPDRNFDRAFSYICRDGTTRRWICHCFMAVKDTGERLSHAVGCAFAACLERKQKREKECGVTATFDASRTTFTREGSFRVTTATEQAEREEIMKQMQDAKKGTEWGQSSGAASPGLFQAGHRRTPSEADRWLEEVSKSVRAQQPQASAAPLQPVLQPPPPTAISQPASPFQGNAFLTSQPVPVGVVPALQPAFVPAQSYPVANGMPYPAPNVPVVGITPSQMVANVFGTAGHPQAAHPHQSPSLVRQQTFPHYEASSATTSPFFKPPAQHLNGSAAFNGVDDGRLASADRHTEVPTGTCPVDPFEAQWAALENKSKQRTNPSPTNPFSSDLQKTFEIEL

SEQ ID NO: 32962 - protein, 445 aa, Homo sapiens
MNKLRQSFRRKKDVYVPEASRPHQWQTDEEGVRTGKCSFPVKYLGHVEVDESRGMHICEDAVKRLKATGKKAVKAVLWVSADGLRVVDEKTKDLIVDQTIEKVSFCAPDRNFDRAFSYICRDGTTRRWICHCFMAVKDTGERLSHAVGCAFAACLERKQKREKECGVTATFDASRTTFTREGSFRVTTATEQAEREEIMKQMQDAKKGTEWGQSSGAASPGLFQAGHRRTPSEADRWLEEVSKSVRAQQPQASAAPLQPVLQPPPPTAISQPASPFQGNAFLTSQPVPVGVVPALQPAFVPAQSYPVANGMPYPAPNVPVVGITPSQMVANVFGTAGHPQAAHPHQSPSLVRQQTFPHYEASSATTSPFFKPPAQHLNGSAAFNGVDDGRLASADRHTEVPTGTCPVDPFEAQWAALENKSKQRTNPSPTNPFSSDLQKTFEIEL

SEQ ID NO: 32963 - protein, 349 aa, Homo sapiens
MNNPHAIPRRHAPIEQLARQGSFRGFPALSQKMSPFKRQLSLRINELPSTMQRKTDFPIKNAVPEVEGEAESISSLCSQITNAFSTPEDPFSSAPMTKPVTVVAPQSPTFQGTEWGQSSGAASPGLFQAGHRRTPSEADRWLEEVSKSVRAQQPQASAAPLQPVLQPPPPTAISQPASPFQGNAFLTSQPVPVGVVPALQPAFVPAQSYPVANGMPYPAPNVPVVGITPSQMVANVFGTAGHPQAAHPHQSPSLVRQQTFPHYEASSATTSPFFKPPAQHLNGSAAFNGVDDGRLASADRHTEVPTGTCPVDPFEAQWAALENKSKQRTNPSPTNPFSSDLQKTFEIEL

SEQ ID NO: 32964 - protein, 923 aa, Homo sapiens
MERGLPLLCAVLALVLAPAGAFRNDKCGDTIKIESPGYLTSPGYPHSYHPSEKCEWLIQAPDPYQRIMINFNPHFDLEDRDCKYDYVEVFDGENENGHFRGKFCGKIAPPPVVSSGPFLFIKFVSDYETHGAGFSIRYEIFKRGPECSQNYTTPSGVIKSPGFPEKYPNSLECTYIVFVPKMSEIILEFESFDLEPDSNPPGGMFCRYDRLEIWDGFPDVGPHIGRYCGQKTPGRIRSSSGILSMVFYTDSAIAKEGFSANYSVLQSSVSEDFKCMEALGMESGEIHSDQITASSQYSTNWSAERSRLNYPENGWTPGEDSYREWIQVDLGLLRFVTAVGTQGAISKETKKKYYVKTYKIDVSSNGEDWITIKEGNKPVLFQGNTNPTDVVVAVFPKPLITRFVRIKPATWETGISMRFEVYGCKITDYPCSGMLGMVSGLISDSQITSSNQGDRNWMPENIRLVTSRSGWALPPAPHSYINEWLQIDLGEEKIVRGIIIQGGKHRENKVFMRKFKIGYSNNGSDWKMIMDDSKRKAKSFEGNNNYDTPELRTFPALSTRFIRIYPERATHGGLGLRMELLGCEVEAPTAGPTTPNGNLVDECDDDQANCHSGTGDDFQLTGGTTVLATEKPTVIDSTIQSEFPTYGFNCEFGWGSHKTFCHWEHDNHVQLKWSVLTSKTGPIQDHTGDGNFIYSQADENQKGKVARLVSPVVYSQNSAHCMTFWYHMSGSHVGTLRVKLRYQKPEEYDQLVWMAIGHQGDHWKEGRVLLHKSLKLYQVIFEGEIGKGNLGGIAVDDISINNHISQEDCAKPADLDKKNPEIKIDETGSTPGYEGEGEGDKNISRKPGNVLKTLDPILITIIAMSALGVLLGAVCGVVLYCACWHNGMSERNLSALENYNFELVDGVKLKKDKLNTQSTYSEA

SEQ ID NO: 32965 - protein, 644 aa, Homo sapiens
MERGLPLLCAVLALVLAPAGAFRNDKCGDTIKIESPGYLTSPGYPHSYHPSEKCEWLIQAPDPYQRIMINFNPHFDLEDRDCKYDYVEVFDGENENGHFRGKFCGKIAPPPVVSSGPFLFIKFVSDYETHGAGFSIRYEIFKRGPECSQNYTTPSGVIKSPGFPEKYPNSLECTYIVFVPKMSEIILEFESFDLEPDSNPPGGMFCRYDRLEIWDGFPDVGPHIGRYCGQKTPGRIRSSSGILSMVFYTDSAIAKEGFSANYSVLQSSVSEDFKCMEALGMESGEIHSDQITASSQYSTNWSAERSRLNYPENGWTPGEDSYREWIQVDLGLLRFVTAVGTQGAISKETKKKYYVKTYKIDVSSNGEDWITIKEGNKPVLFQGNTNPTDVVVAVFPKPLITRFVRIKPATWETGISMRFEVYGCKITDYPCSGMLGMVSGLISDSQITSSNQGDRNWMPENIRLVTSRSGWALPPAPHSYINEWLQIDLGEEKIVRGIIIQGGKHRENKVFMRKFKIGYSNNGSDWKMIMDDSKRKAKSFEGNNNYDTPELRTFPALSTRFIRIYPERATHGGLGLRMELLGCEVEAPTAGPTTPNGNLVDECDDDQANCHSGTGDDFQLTGGTTVLATEKPTVIDSTIQSGIK

SEQ ID NO: 32966 - protein, 609 aa, Homo sapiens
MERGLPLLCAVLALVLAPAGAFRNDKCGDTIKIESPGYLTSPGYPHSYHPSEKCEWLIQAPDPYQRIMINFNPHFDLEDRDCKYDYVEVFDGENENGHFRGKFCGKIAPPPVVSSGPFLFIKFVSDYETHGAGFSIRYEIFKRGPECSQNYTTPSGVIKSPGFPEKYPNSLECTYIVFVPKMSEIILEFESFDLEPDSNPPGGMFCRYDRLEIWDGFPDVGPHIGRYCGQKTPGRIRSSSGILSMVFYTDSAIAKEGFSANYSVLQSSVSEDFKCMEALGMESGEIHSDQITASSQYSTNWSAERSRLNYPENGWTPGEDSYREWIQVDLGLLRFVTAVGTQGAISKETKKKYYVKTYKIDVSSNGEDWITIKEGNKPVLFQGNTNPTDVVVAVFPKPLITRFVRIKPATWETGISMRFEVYGCKITDYPCSGMLGMVSGLISDSQITSSNQGDRNWMPENIRLVTSRSGWALPPAPHSYINEWLQIDLGEEKIVRGIIIQGGKHRENKVFMRKFKIGYSNNGSDWKMIMDDSKRKAKSFEGNNNYDTPELRTFPALSTRFIRIYPERATHGGLGLRMELLGCEVEGGTTVLATEKPTVIDSTIQSGIK

SEQ ID NO: 32967 - protein, 931 aa, Homo sapiens
MDMFPLTWVFLALYFSRHQVRGQPDPPCGGRLNSKDAGYITSPGYPQDYPSHQNCEWIVYAPEPNQKIVLNFNPHFEIEKHDCKYDFIEIRDGDSESADLLGKHCGNIAPPTIISSGSMLYIKFTSDYARQGAGFSLRYEIFKTGSEDCSKNFTSPNGTIESPGFPEKYPHNLDCTFTILAKPKMEIILQFLIFDLEHDPLQVGEGDCKYDWLDIWDGIPHVGPLIGKYCGTKTPSELRSSTGILSLTFHTDMAVAKDGFSARYYLVHQEPLENFQCNVPLGMESGRIANEQISASSTYSDGRWTPQQSRLHGDDNGWTPNLDSNKEYLQVDLRFLTMLTAIATQGAISRETQNGYYVKSYKLEVSTNGEDWMVYRHGKNHKVFQANNDATEVVLNKLHAPLLTRFVRIRPQTWHSGIALRLELFGCRVTDAPCSNMLGMLSGLIADSQISASSTQEYLWSPSAARLVSSRSGWFPRIPQAQPGEEWLQVDLGTPKTVKGVIIQGARGGDSITAVEARAFVRKFKVSYSLNGKDWEYIQDPRTQQPKLFEGNMHYDTPDIRRFDPIPAQYVRVYPERWSPAGIGMRLEVLGCDWTDSKPTVETLGPTVKSEETTTPYPTEEEATECGENCSFEDDKDLQLPSGFNCNFDFLEEPCGWMYDHAKWLRTTWASSSSPNDRTFPDDRNFLRLQSDSQREGQYARLISPPVHLPRSPVCMEFQYQATGGRGVALQVVREASQESKLLWVIREDQGGEWKHGRIILPSYDMEYQIVFEGVIGKGRSGEIAIDDIRISTDVPLENCMEPISAFAGENFKVDIPEIHEREGYEDEIDDEYEVDWSNSSSATSGSGAPSTDKEKSWLYTLDPILITIIAMSSLGVLLGATCAGLLLYCTCSYSGLSSRSCTTLENYNFELYDGLKHKVKMNHQKCCSEA

SEQ ID NO: 32968 - protein, 909 aa, Homo sapiens
MDMFPLTWVFLALYFSRHQVRGQPDPPCGGRLNSKDAGYITSPGYPQDYPSHQNCEWIVYAPEPNQKIVLNFNPHFEIEKHDCKYDFIEIRDGDSESADLLGKHCGNIAPPTIISSGSMLYIKFTSDYARQGAGFSLRYEIFKTGSEDCSKNFTSPNGTIESPGFPEKYPHNLDCTFTILAKPKMEIILQFLIFDLEHDPLQVGEGDCKYDWLDIWDGIPHVGPLIGKYCGTKTPSELRSSTGILSLTFHTDMAVAKDGFSARYYLVHQEPLENFQCNVPLGMESGRIANEQISASSTYSDGRWTPQQSRLHGDDNGWTPNLDSNKEYLQVDLRFLTMLTAIATQGAISRETQNGYYVKSYKLEVSTNGEDWMVYRHGKNHKVFQANNDATEVVLNKLHAPLLTRFVRIRPQTWHSGIALRLELFGCRVTDAPCSNMLGMLSGLIADSQISASSTQEYLWSPSAARLVSSRSGWFPRIPQAQPGEEWLQVDLGTPKTVKGVIIQGARGGDSITAVEARAFVRKFKVSYSLNGKDWEYIQDPRTQQPKLFEGNMHYDTPDIRRFDPIPAQYVRVYPERWSPAGIGMRLEVLGCDWTDSKPTVETLGPTVKSEETTTPYPTEEEATECGENCSFEDDKDLQLPSGFNCNFDFLEEPCGWMYDHAKWLRTTWASSSSPNDRTFPDDRNFLRLQSDSQREGQYARLISPPVHLPRSPVCMEFQYQATGGRGVALQVVREASQESKLLWVIREDQGGEWKHGRIILPSYDMEYQIVFEGVIGKGRSGEIAIDDIRISTDVPLENCMEPISAFADEYEVDWSNSSSATSGSGAPSTDKEKSWLYTLDPILITIIAMSSLGVLLGATCAGLLLYCTCSYSGLSSRSCTTLENYNFELYDGLKHKVKMNHQKCCSEA

SEQ ID NO: 32969 - protein, 926 aa, Homo sapiens
MDMFPLTWVFLALYFSRHQVRGQPDPPCGGRLNSKDAGYITSPGYPQDYPSHQNCEWIVYAPEPNQKIVLNFNPHFEIEKHDCKYDFIEIRDGDSESADLLGKHCGNIAPPTIISSGSMLYIKFTSDYARQGAGFSLRYEIFKTGSEDCSKNFTSPNGTIESPGFPEKYPHNLDCTFTILAKPKMEIILQFLIFDLEHDPLQVGEGDCKYDWLDIWDGIPHVGPLIGKYCGTKTPSELRSSTGILSLTFHTDMAVAKDGFSARYYLVHQEPLENFQCNVPLGMESGRIANEQISASSTYSDGRWTPQQSRLHGDDNGWTPNLDSNKEYLQVDLRFLTMLTAIATQGAISRETQNGYYVKSYKLEVSTNGEDWMVYRHGKNHKVFQANNDATEVVLNKLHAPLLTRFVRIRPQTWHSGIALRLELFGCRVTDAPCSNMLGMLSGLIADSQISASSTQEYLWSPSAARLVSSRSGWFPRIPQAQPGEEWLQVDLGTPKTVKGVIIQGARGGDSITAVEARAFVRKFKVSYSLNGKDWEYIQDPRTQQPKLFEGNMHYDTPDIRRFDPIPAQYVRVYPERWSPAGIGMRLEVLGCDWTDSKPTVETLGPTVKSEETTTPYPTEEEATECGENCSFEDDKDLQLPSGFNCNFDFLEEPCGWMYDHAKWLRTTWASSSSPNDRTFPDDRNFLRLQSDSQREGQYARLISPPVHLPRSPVCMEFQYQATGGRGVALQVVREASQESKLLWVIREDQGGEWKHGRIILPSYDMEYQIVFEGVIGKGRSGEIAIDDIRISTDVPLENCMEPISAFAVDIPEIHEREGYEDEIDDEYEVDWSNSSSATSGSGAPSTDKEKSWLYTLDPILITIIAMSSLGVLLGATCAGLLLYCTCSYSGLSSRSCTTLENYNFELYDGLKHKVKMNHQKCCSEA

SEQ ID NO: 32970 - protein, 901 aa, Homo sapiens
MDMFPLTWVFLALYFSRHQVRGQPDPPCGGRLNSKDAGYITSPGYPQDYPSHQNCEWIVYAPEPNQKIVLNFNPHFEIEKHDCKYDFIEIRDGDSESADLLGKHCGNIAPPTIISSGSMLYIKFTSDYARQGAGFSLRYEIFKTGSEDCSKNFTSPNGTIESPGFPEKYPHNLDCTFTILAKPKMEIILQFLIFDLEHDPLQVGEGDCKYDWLDIWDGIPHVGPLIGKYCGTKTPSELRSSTGILSLTFHTDMAVAKDGFSARYYLVHQEPLENFQCNVPLGMESGRIANEQISASSTYSDGRWTPQQSRLHGDDNGWTPNLDSNKEYLQVDLRFLTMLTAIATQGAISRETQNGYYVKSYKLEVSTNGEDWMVYRHGKNHKVFQANNDATEVVLNKLHAPLLTRFVRIRPQTWHSGIALRLELFGCRVTDAPCSNMLGMLSGLIADSQISASSTQEYLWSPSAARLVSSRSGWFPRIPQAQPGEEWLQVDLGTPKTVKGVIIQGARGGDSITAVEARAFVRKFKVSYSLNGKDWEYIQDPRTQQPKLFEGNMHYDTPDIRRFDPIPAQYVRVYPERWSPAGIGMRLEVLGCDWTDSKPTVETLGPTVKSEETTTPYPTEEEATECGENCSFEDDKDLQLPSGFNCNFDFLEEPCGWMYDHAKWLRTTWASSSSPNDRTFPDDRNFLRLQSDSQREGQYARLISPPVHLPRSPVCMEFQYQATGGRGVALQVVREASQESKLLWVIREDQGGEWKHGRIILPSYDMEYQIVFEGVIGKGRSGEIAIDDIRISTDVPLENCMEPISAFAGGTLLPGTEPTVDTVPMQPIPAYWYYVMAAGGAVLVLVSVALALVLHYHRFRYAAKKTDHSITYKTSHYTNGAPLAVEPTLTIKLEQDRGSHC

SEQ ID NO: 32971 - protein, 906 aa, Homo sapiens
MDMFPLTWVFLALYFSRHQVRGQPDPPCGGRLNSKDAGYITSPGYPQDYPSHQNCEWIVYAPEPNQKIVLNFNPHFEIEKHDCKYDFIEIRDGDSESADLLGKHCGNIAPPTIISSGSMLYIKFTSDYARQGAGFSLRYEIFKTGSEDCSKNFTSPNGTIESPGFPEKYPHNLDCTFTILAKPKMEIILQFLIFDLEHDPLQVGEGDCKYDWLDIWDGIPHVGPLIGKYCGTKTPSELRSSTGILSLTFHTDMAVAKDGFSARYYLVHQEPLENFQCNVPLGMESGRIANEQISASSTYSDGRWTPQQSRLHGDDNGWTPNLDSNKEYLQVDLRFLTMLTAIATQGAISRETQNGYYVKSYKLEVSTNGEDWMVYRHGKNHKVFQANNDATEVVLNKLHAPLLTRFVRIRPQTWHSGIALRLELFGCRVTDAPCSNMLGMLSGLIADSQISASSTQEYLWSPSAARLVSSRSGWFPRIPQAQPGEEWLQVDLGTPKTVKGVIIQGARGGDSITAVEARAFVRKFKVSYSLNGKDWEYIQDPRTQQPKLFEGNMHYDTPDIRRFDPIPAQYVRVYPERWSPAGIGMRLEVLGCDWTDSKPTVETLGPTVKSEETTTPYPTEEEATECGENCSFEDDKDLQLPSGFNCNFDFLEEPCGWMYDHAKWLRTTWASSSSPNDRTFPDDRNFLRLQSDSQREGQYARLISPPVHLPRSPVCMEFQYQATGGRGVALQVVREASQESKLLWVIREDQGGEWKHGRIILPSYDMEYQIVFEGVIGKGRSGEIAIDDIRISTDVPLENCMEPISAFAGENFKGGTLLPGTEPTVDTVPMQPIPAYWYYVMAAGGAVLVLVSVALALVLHYHRFRYAAKKTDHSITYKTSHYTNGAPLAVEPTLTIKLEQDRGSHC

SEQ ID NO: 32972 - protein, 555 aa, Homo sapiens
MDMFPLTWVFLALYFSRHQVRGQPDPPCGGRLNSKDAGYITSPGYPQDYPSHQNCEWIVYAPEPNQKIVLNFNPHFEIEKHDCKYDFIEIRDGDSESADLLGKHCGNIAPPTIISSGSMLYIKFTSDYARQGAGFSLRYEIFKTGSEDCSKNFTSPNGTIESPGFPEKYPHNLDCTFTILAKPKMEIILQFLIFDLEHDPLQVGEGDCKYDWLDIWDGIPHVGPLIGKYCGTKTPSELRSSTGILSLTFHTDMAVAKDGFSARYYLVHQEPLENFQCNVPLGMESGRIANEQISASSTYSDGRWTPQQSRLHGDDNGWTPNLDSNKEYLQVDLRFLTMLTAIATQGAISRETQNGYYVKSYKLEVSTNGEDWMVYRHGKNHKVFQANNDATEVVLNKLHAPLLTRFVRIRPQTWHSGIALRLELFGCRVTDAPCSNMLGMLSGLIADSQISASSTQEYLWSPSAARLVSSRSGWFPRIPQAQPGEEWLQVDLGTPKTVKGVIIQGARGGDSITAVEARAFVRKFKVSYSLNGKDWEYIQDPRTQQPKVGCSWRPL

SEQ ID NO: 32973 - protein, 469 aa, Homo sapiens
MITEGAQAPRLLLPPLLLLLTLPATGSDPVLCFTQYEESSGKCKGLLGGGVSVEDCCLNTAFAYQKRSGGLCQPCRSPRWSLWSTWAPCSVTCSEGSQLRYRRCVGWNGQCSGKVAPGTLEWQLQACEDQQCCPEMGGWSGWGPWEPCSVTCSKGTRTRRRACNHPAPKCGGHCPGQAQESEACDTQQVCPTHGAWATWGPWTPCSASCHGGPHEPKETRSRKCSAPEPSQKPPGKPCPGLAYEQRRCTGLPPCPVAGGWGPWGPVSPCPVTCGLGQTMEQRTCNHPVPQHGGPFCAGDATRTHICNTAVPCPVDGEWDSWGEWSPCIRRNMKSISCQEIPGQQSRGRTCRGRKFDGHRCAGQQQDIRHCYSIQHCPLKGSWSEWSTWGLCMPPCGPNPTRARQRLCTPLLPKYPPTVSMVEGQGEKNVTFWGRPLPRCEELQGQKLVVEEKRPCLHVPACKDPEEEEL

SEQ ID NO: 32974 - protein, 236 aa, Homo sapiens
MCVTYHNGTGYCKCPEGFLGEYCQHRDPCEKNRCQNGGTCVAQAMLGKATCRCASGFTGEDCQYSTSHPCFVSRPCLNGGTCHMLSRDTYECTCQVGFTGKECQWTDACLSHPCANGSTCTTVANQFSCKCLTGFTGQKCETDVNECDIPGHCQHGGTCLNLPGSYQCQCLQGFTGQYCDSLYVPCAPSPCVNGGTCRQTGDFTFECNCLPETVRRGTELWERDREVWNGKEHDEN

SEQ ID NO: 32975 - protein, 281 aa, Homo sapiens
MAGSPELVVLDPPWDKELAAGTESQALVSATPREDFRVRCTSKRAVTEMLQLCGRFVQKLGDALPEEIREPALRDAQWTFESAVQENISINGQAWQEASDNCFMDSDIKVLEDQFDEIIVDIATKRKQYPRKILECVIKTIKAKQEILKQYHPVVHPLDLKYDPDPAPHMENLKCRGETVAKEISEAMKSLPALIEQGEGFSQVLRMQPVIHLQRIHQEVFSSCHRKPDAKPENFITQIETTPTETASRKTSDMVLKRKQTKDCPQRKWYPLRPKKINLDT

SEQ ID NO: 32976 - protein, 213 aa, Homo sapiens
MAGSPELVVLDPPWDKELAAGTESQALVSATPREDFRVRCTSKRAVTEMLQLCGRFVQKLGDALPEEIREPALRDAQWTFESAVQENISINGQAWQEASDNCFMDSDIKVLEDQFDEIIVDIATKRKQYPRKILECVIKTIKAKQEILKQYHPVVHPLDLKYDPDPVLNGNAFNFSPFNMMLAVDLSYMVFITSSPSYGKFEMQRGNSSKGDQ

SEQ ID NO: 32977 - protein, 637 aa, Homo sapiens
MHLRIHARRSPPRRPAWTLGIWFLFWGCIVSSVWSSSNVASSSSTSSSPGSHSQHEHHFHGSKHHSVPISIYRSPVSLRGGHAGATYIFGKSGGLILYTWPANDRPSTRSDRLAVGFSTTVKDGILVRIDSAPGLGDFLQLHIEQGKIGVVFNIGTVDISIKEERTPVNDGKYHVVRFTRNGGNATLQVDNWPVNEHYPTGRQLTIFNTQAQIAIGGKDKGRLFQGQLSGLYYDGLKVLNMAAENNPNIKINGSVRLVGEVPSILGTTQTTSMPPEMSTTVMETTTTMATTTTRKNRSTASIQPTSDDLVSSAECSSDDEDFVECEPSTGGELVIPLLVEDPLATPPIATRAPSITLPPTFRPLLTIIETTKDSLSMTSEAGLPCLSDQGSDGCDDDGLVISGYGSGETFDSNLPPTDDEDFYTTFSLVTDKSLSTSIFEGGYKAHAPKWESKDFRPNKVSETSRTTTTSLSPELIRFTASSSSGMVPKLPAGKMNNRDLKPQPDIVLLPLPTAYELDSTKLKSPLITSPMFRNVPTANPTEPGIRRVPGASEVIRESSSTTGMVVGIVAAAALCILILLYAMYKYRNRDEGSYQVDETRNYISNSAQSNGTLMKEKQQSSKSGHKKQKNKDREYYV

SEQ ID NO: 32978 - protein, 432 aa, Homo sapiens
MHLRIHARRSPPRRPAWTLGIWFLFWGCIVSSVWSSSNVASSSSTSSSPGSHSQHEHHFHGSKHHSVPISIYRSPVSLRGGHAGATYIFGKSGGLILYTWPANDRPSTRSDRLAVGFSTTVKDGILVRIDSAPGLGDFLQLHIEQGKIGVVFNIGTVDISIKEERTPVNDGKYHVVRFTRNGGNATLQVDNWPVNEHYPTGRQLTIFNTQAQIAIGGKDKGRLFQGQLSGLYYDGLKVLNMAAENNPNIKINGSVRLVGEVPSILGTTQTTSMPPEMSTTVMETTTTMATTTTRKNRSTASIQPTSDDLVSSAECSSDDEDFVECEPSTGRSANPTEPGIRRVPGASEVIRESSSTTGMVVGIVAAAALCILILLYAMYKYRNRDEGSYQVDETRNYISNSAQSNGTLMKEKQQSSKSGHKKQKNKDREYYV

SEQ ID NO: 32979 - protein, 396 aa, Homo sapiens
MHLRIHARRSPPRRPAWTLGIWFLFWGCIVSSVWSSSNVASSSSTSSSPGSHSQHEHHFHGSKHHSVPISIYRSPVSLRGGHAGATYIFGKSGGLILYTWPANDRPSTRSDRLAVGFSTTVKDGILVRIDSAPGLGDFLQLHIEQGKIGVVFNIGTVDISIKEERTPVNDGKYHVVRFTRNGGNATLQVDNWPVNEHYPTGNTDNERFQMVKQKIPFKYNRPVEEWLQEKGRQLTIFNTQAQIAIGGKDKGRLFQGQLSGLYYDGLKVLNMAAENNPNIKINGSVRLVGEVPSILGTTQTTSMPPEMSTTVMETTTTMATTTTRKNRSTASIQPTSDDLVSSAECSSDDEDFVECEPSGRSARSSNAARSLRAALTWTWRLTYTFTPIIFISCVVH

SEQ ID NO: 32980 - protein, 459 aa, Homo sapiens
MHLRIHARRSPPRRPAWTLGIWFLFWGCIVSSVWSSSNVASSSSTSSSPGSHSQHEHHFHGSKHHSVPISIYRSPVSLRGGHAGATYIFGKSGGLILYTWPANDRPSTRSDRLAVGFSTTVKDGILVRIDSAPGLGDFLQLHIEQGKIGVVFNIGTVDISIKEERTPVNDGKYHVVRFTRNGGNATLQVDNWPVNEHYPTGNTDNERFQMVKQKIPFKYNRPVEEWLQEKGRQLTIFNTQAQIAIGGKDKGRLFQGQLSGLYYDGLKVLNMAAENNPNIKINGSVRLVGEVPSILGTTQTTSMPPEMSTTVMETTTTMATTTTRKNRSTASIQPTSDDLVSSAECSSDDEDFVECEPSTANPTEPGIRRVPGASEVIRESSSTTGMVVGIVAAAALCILILLYAMYKYRNRDEGSYQVDETRNYISNSAQSNGTLMKEKQQSSKSGHKKQKNKDREYYV

SEQ ID NO: 32981 - protein, 866 aa, Homo sapiens
MTTFGAVAEWRLPSLRRATLWIPQWFAKKAIFNSPLEAAMAFPHLQQPSFLLASLKADSINKPFAQQCQDLVKVIEDFPAKELHTIFPWLVESIFGSLDGVLVGWNLRCLQGRVNPVEYSIVMEFLDPGGPMMKLVYKLQAEDYKFDFPVSYLPGPVKASIQECILPDSPLYHNKVQFTPTGGLGLNLALNPFEYYIFFFALSLITQKPLPVSLHVRTSDCAYFILVDRYLSWFLPTEGSVPPPLSSSPGGTSPSPPPRTPAIPFASYGLHHTSLLKRHISHQTSVNADPASHEIWRSETLLQVFVEMWLHHYSLEMYQKMQSPHAKLEVLHYRLSVSSALYSPAQPSLQALHAYQESFTPTEEHVLVVRLLLKHLHAFANSLKPEQASPSAHSHATSPLEEFKRAAVPRFVQQKLYLFLQHCFGHWPLDASFRAVLEMWLSYLQPWRYAPDKQAPGSDSQPRCVSEKWAPFVQENLLMYTKLFVGFLNRALRTDLVSPKHALMVFRVAKVFAQPNLAEMIQKGEQLFLEPELVIPHRQHRLFTAPTFTGSFLSPWPPAVTDASFKVKSHVYSLEGQDCKYTPMFGPEARTLVLRLAQLITQAKHTAKSISDQCAESPAGHSFLSWLGFSSMDTNGSYTANDLDEMGQDSVRKTDEYLEKALEYLRQIFRLSEAQLRQFTLALGTTQDENGKKQLPDCIVGEDGLILTPLGRYQIINGLRRFEIEYQGDPELQPIRSYEIASLVRTLFRLSSAINHRFAGQMAALCSRDDFLGSFCRYHLTEPGLASRHLLSPVGRRQVAGHTRGPRLSLRFLGSYRTLVSLLLAFFVASLFCVGPLPCTLLLTLGYVLYASAMTLLTERGKLHQP

SEQ ID NO: 32982 - protein, 837 aa, Homo sapiens
MTTFGAVAEWRLPSLRRATLWIPQWFAKKAIFNSPLEAAMAFPHLQQPSFLLASLKADSINKPFAQQCQDLVKVIEDFPAKELHTIFPWLVESIFGSLDGVLVGWNLRCLQGRVNPVEYSIVMEFLDPGGPMMKLVYKLQAEDYKFDFPVSYLPGPVKASIQECILPDSPLYHNKVQFTPTGGLGLNLALNPFEYYIFFFALSLITQKPLPVSLHVRTSDCAYFILVDRYLSWFLPTEGSVPPPLSSSPGGTSPSPPPRTPAIPFASYGLHHTSLLKRHISHQTSVNADPASHEIWRSETLLQVFVEMWLHHYSLEMYQKMQSPHAKESFTPTEEHVLVVRLLLKHLHAFANSLKPEQASPSAHSHATSPLEEFKRAAVPRFVQQKLYLFLQHCFGHWPLDASFRAVLEMWLSYLQPWRYAPDKQAPGSDSQPRCVSEKWAPFVQENLLMYTKLFVGFLNRALRTDLVSPKHALMVFRVAKVFAQPNLAEMIQKGEQLFLEPELVIPHRQHRLFTAPTFTGSFLSPWPPAVTDASFKVKSHVYSLEGQDCKYTPMFGPEARTLVLRLAQLITQAKHTAKSISDQCAESPAGHSFLSWLGFSSMDTNGSYTANDLDEMGQDSVRKTDEYLEKALEYLRQIFRLSEAQLRQFTLALGTTQDENGKKQLPDCIVGEDGLILTPLGRYQIINGLRRFEIEYQGDPELQPIRSYEIASLVRTLFRLSSAINHRFAGQMAALCSRDDFLGSFCRYHLTEPGLASRHLLSPVGRRQVAGHTRGPRLSLRFLGSYRTLVSLLLAFFVASLFCVGPLPCTLLLTLGYVLYASAMTLLTERGKLHQP

SEQ ID NO: 32983 - protein, 735 aa, Homo sapiens
MMKLVYKLQAEDYKFDFPVSYLPGPVKASIQECILPDSPLYHNKVQFTPTGGLGLNLALNPFEYYIFFFALSLITQKPLPVSLHVRTSDCAYFILVDRYLSWFLPTEGSVPPPLSSSPGGTSPSPPPRTPAIPFASYGLHHTSLLKRHISHQTSVNADPASHEIWRSETLLQVFVEMWLHHYSLEMYQKMQSPHAKLEVLHYRLSVSSALYSPAQPSLQALHAYQESFTPTEEHVLVVRLLLKHLHAFANSLKPEQASPSAHSHATSPLEEFKRAAVPRFVQQKLYLFLQHCFGHWPLDASFRAVLEMWLSYLQPWRYAPDKQAPGSDSQPRCVSEKWAPFVQENLLMYTKLFVGFLNRALRTDLVSPKHALMVFRVAKVFAQPNLAEMIQKGEQLFLEPELVIPHRQHRLFTAPTFTGSFLSPWPPAVTDASFKVKSHVYSLEGQDCKYTPMFGPEARTLVLRLAQLITQAKHTAKSISDQCAESPAGHSFLSWLGFSSMDTNGSYTANDLDEMGQDSVRKTDEYLEKALEYLRQIFRLSEAQLRQFTLALGTTQDENGKKQLPDCIVGEDGLILTPLGRYQIINGLRRFEIEYQGDPELQPIRSYEIASLVRTLFRLSSAINHRFAGQMAALCSRDDFLGSFCRYHLTEPGLASRHLLSPVGRRQVAGHTRGPRLSLRFLGSYRTLVSLLLAFFVASLFCVGPLPCTLLLTLGYVLYASAMTLLTERGKLHQP

SEQ ID NO: 32984 - protein, 912 aa, Homo sapiens
MTTFGAVAEWRLPSLRRATLWIPQWFAKKAIFNSPLEAAMAFPHLQQPSFLLASLKADSINKPFAQQCQDLVKVIEDFPAKELHTIFPWLVESIFGSLDGVLVGWNLRCLQGRVNPVEYSIVMEFLDPGGPMMKLVYKLQAEDYKFDFPVSYLPGPVKASIQECILPDSPLYHNKVQFTPTGGLGLNLALNPFEYYIFFFALSLITQKPLPVSLHVRTSDCAYFILVDRYLSWFLPTEGSVPPPLSSSPGGTSPSPPPRTPAIPFASYGLHHTSLLKRHISHQTSVNADPASHEIWRSETLLQVFVEMWLHHYSLEMYQKMQSPHAKLEVLHYRLSVSSALYSPAQPSLQALHAYQESFTPTEEHVLVVRLLLKHLHAFANSLKPEQASPSAHSHATSPLEEFKRMGLNLPEVPSALPRRSQPSLMGALGSSVSRASLLGKQQVTLPIPCRAAVPRFVQQKLYLFLQHCFGHWPLDASFRAVLEMWLSYLQPWRYAPDKQAPGSDSQPRCVSEKWAPFVQENLLMYTKLFVGFLNRALRTDLVSPKHALMVFRVAKVFAQPNLAEMIQKGEQLFLEPELVIPHRQHRLFTAPTFTGSFLSPWPPAVTDASFKVKSHVYSLEGQDCKYTPMFGPEARTLVLRLAQLITQAKHTAKSISDQCAESPAGHSFLSWLGFSSMDTNGSYTANDLDEMGQDSVRKTDEYLEKALEYLRQIFRLSEAQLRQFTLALGTTQDENGKKQLPDCIVGEDGLILTPLGRYQIINGLRRFEIEYQGDPELQPIRSYEIASLVRTLFRLSSAINHRFAGQMAALCSRDDFLGSFCRYHLTEPGLASRHLLSPVGRRQVAGHTRGPRLSLRFLGSYRTLVSLLLAFFVASLFCVGPLPCTLLLTLGYVLYASAMTLLTERGKLHQP

SEQ ID NO: 32985 - protein, 437 aa, Homo sapiens
MTTFGAVAEWRLPSLRRATLWIPQWFAKKAIFNSPLEAAMSATYCVGDAARQGLRRTPLGHGSPDTSETPQNPKGSSRVLCLREVGARFVSCLLGEQLFLEPELVIPHRQHRLFTAPTFTGSFLSPWPPAVTDASFKVKSHVYSLEGQDCKYTPMFGPEARTLVLRLAQLITQAKHTAKSISDQCAESPAGHSFLSWLGFSSMDTNGSYTANDLDEMGQDSVRKTDEYLEKALEYLRQIFRLSEAQLRQFTLALGTTQDENGKKQLPDCIVGEDGLILTPLGRYQIINGLRRFEIEYQGDPELQPIRSYEIASLVRTLFRLSSAINHRFAGQMAALCSRDDFLGSFCRYHLTEPGLASRHLLSPVGRRQVAGHTRGPRLSLRFLGSYRTLVSLLLAFFVASLFCVGPLPCTLLLTLGYVLYASAMTLLTERGKLHQP

SEQ ID NO: 32986 - protein, 764 aa, Homo sapiens
MTTFGAVAEWRLPSLRRATLWIPQWFAKKAIFNSPLEAAMAFPHLQQPSFLLASLKADSINKPFAQQCQDLVKVIEDFPAKGPVKASIQECILPDSPLYHNKVQFTPTGGLGLNLALNPFEYYIFFFALSLITQKPLPVSLHVRTSDCAYFILVDRYLSWFLPTEGSVPPPLSSSPGGTSPSPPPRTPAIPFASYGLHHTSLLKRHISHQTSVNADPASHEIWRSETLLQVFVEMWLHHYSLEMYQKMQSPHAKESFTPTEEHVLVVRLLLKHLHAFANSLKPEQASPSAHSHATSPLEEFKRAAVPRFVQQKLYLFLQHCFGHWPLDASFRAVLEMWLSYLQPWRYAPDKQAPGSDSQPRCVSEKWAPFVQENLLMYTKLFVGFLNRALRTDLVSPKHALMVFRVAKVFAQPNLAEMIQKGEQLFLEPELVIPHRQHRLFTAPTFTGSFLSPWPPAVTDASFKVKSHVYSLEGQDCKYTPMFGPEARTLVLRLAQLITQAKHTAKSISDQCAESPAGHSFLSWLGFSSMDTNGSYTANDLDEMGQDSVRKTDEYLEKALEYLRQIFRLSEAQLRQFTLALGTTQDENGKKQLPDCIVGEDGLILTPLGRYQIINGLRRFEIEYQGDPELQPIRSYEIASLVRTLFRLSSAINHRFAGQMAALCSRDDFLGSFCRYHLTEPGLASRHLLSPVGRRQVAGHTRGPRLSLRFLGSYRTLVSLLLAFFVASLFCVGPLPCTLLLTLGYVLYASAMTLLTERGKLHQP

SEQ ID NO: 32987 - protein, 607 aa, Homo sapiens
MQTPPPTRSGGQKLCSRFLLKCGFITIPWRCIKKCSPLMPSWRFCTTDSVSPAPSTAPPNPASRPSTPTKSLGNRGSDARGFYWAEFSSGCVQDEEQESFTPTEEHVLVVRLLLKHLHAFANSLKPEQASPSAHSHATSPLEEFKRAAVPRFVQQKLYLFLQHCFGHWPLDASFRAVLEMWLSYLQPWRYAPDKQAPGSDSQPRCVSEKWAPFVQENLLMYTKLFVGFLNRALRTDLVSPKHALMVFRVAKVFAQPNLAEMIQKGEQLFLEPELVIPHRQHRLFTAPTFTGSFLSPWPPAVTDASFKVKSHVYSLEGQDCKYTPMFGPEARTLVLRLAQLITQAKHTAKSISDQCAESPAGHSFLSWLGFSSMDTNGSYTANDLDEMGQDSVRKTDEYLEKALEYLRQIFRLSEAQLRQFTLALGTTQDENGKKQLPDCIVGEDGLILTPLGRYQIINGLRRFEIEYQGDPELQPIRSYEIASLVRTLFRLSSAINHRFAGQMAALCSRDDFLGSFCRYHLTEPGLASRHLLSPVGRRQVAGHTRGPRLSLRFLGSYRTLVSLLLAFFVASLFCVGPLPCTLLLTLGYVLYASAMTLLTERGKLHQP

SEQ ID NO: 32988 - protein, 615 aa, Homo sapiens
MTTFGAVAEWRLPSLRRATLWIPQWFAKKAIFNSPLEAAMAFPHLQQPSFLLASLKADSINKPFAQQCQDLVKVIEDFPAKVFVEMWLHHYSLEMYQKMQSPHAKESFTPTEEHVLVVRLLLKHLHAFANSLKPEQASPSAHSHATSPLEEFKRAAVPRFVQQKLYLFLQHCFGHWPLDASFRAVLEMWLSYLQPWRYAPDKQAPGSDSQPRCVSEKWAPFVQENLLMYTKLFVGFLNRALRTDLVSPKHALMVFRVAKVFAQPNLAEMIQKGEQLFLEPELVIPHRQHRLFTAPTFTGSFLSPWPPAVTDASFKVKSHVYSLEGQDCKYTPMFGPEARTLVLRLAQLITQAKHTAKSISDQCAESPAGHSFLSWLGFSSMDTNGSYTANDLDEMGQDSVRKTDEYLEKALEYLRQIFRLSEAQLRQFTLALGTTQDENGKKQLPDCIVGEDGLILTPLGRYQIINGLRRFEIEYQGDPELQPIRSYEIASLVRTLFRLSSAINHRFAGQMAALCSRDDFLGSFCRYHLTEPGLASRHLLSPVGRRQVAGHTRGPRLSLRFLGSYRTLVSLLLAFFVASLFCVGPLPCTLLLTLGYVLYASAMTLLTERGKLHQP

SEQ ID NO: 32989 - protein, 502 aa, Homo sapiens
MQTPPPTRSGGQKLCSRFLLKCGFITIPWRCIKKCSPLMPRAAVPRFVQQKLYLFLQHCFGHWPLDASFRAVLEMWLSYLQPWRYAPDKQAPGSDSQPRCVSEKWAPFVQENLLMYTKLFVGFLNRALRTDLVSPKHALMVFRVAKVFAQPNLAEMIQKGEQLFLEPELVIPHRQHRLFTAPTFTGSFLSPWPPAVTDASFKVKSHVYSLEGQDCKYTPMFGPEARTLVLRLAQLITQAKHTAKSISDQCAESPAGHSFLSWLGFSSMDTNGSYTANDLDEMGQDSVRKTDEYLEKALEYLRQIFRLSEAQLRQFTLALGTTQDENGKKQLPDCIVGEDGLILTPLGRYQIINGLRRFEIEYQGDPELQPIRSYEIASLVRTLFRLSSAINHRFAGQMAALCSRDDFLGSFCRYHLTEPGLASRHLLSPVGRRQVAGHTRGPRLSLRFLGSYRTLVSLLLAFFVASLFCVGPLPCTLLLTLGYVLYASAMTLLTERGKLHQP

SEQ ID NO: 32990 - protein, 530 aa, Homo sapiens
MWLHHYSLEMYQKMQSPHAKESFTPTEEHVLVVRLLLKHLHAFANSLKPEQASPSAHSHATSPLEEFKRAAVPRFVQQKLYLFLQHCFGHWPLDASFRAVLEMWLSYLQPWRYAPDKQAPGSDSQPRCVSEKWAPFVQENLLMYTKLFVGFLNRALRTDLVSPKHALMVFRVAKVFAQPNLAEMIQKGEQLFLEPELVIPHRQHRLFTAPTFTGSFLSPWPPAVTDASFKVKSHVYSLEGQDCKYTPMFGPEARTLVLRLAQLITQAKHTAKSISDQCAESPAGHSFLSWLGFSSMDTNGSYTANDLDEMGQDSVRKTDEYLEKALEYLRQIFRLSEAQLRQFTLALGTTQDENGKKQLPDCIVGEDGLILTPLGRYQIINGLRRFEIEYQGDPELQPIRSYEIASLVRTLFRLSSAINHRFAGQMAALCSRDDFLGSFCRYHLTEPGLASRHLLSPVGRRQVAGHTRGPRLSLRFLGSYRTLVSLLLAFFVASLFCVGPLPCTLLLTLGYVLYASAMTLLTERGKLHQP

SEQ ID NO: 32991 - protein, 87 aa, Homo sapiens
MKVLRAWLLCLLMLGLALRGAASRTHRHSMEIRTPDINPAWYASRGIRPVGRFGRRRATLGDVPKPGLRPRLTCFPLEGGAMSSQDG

SEQ ID NO: 32992 - protein, 655 aa, Homo sapiens
MVLYTTPFPNSCLSALHCVSWALIFPCYWLVDRLAASFIPTTYEKRQRADDPCCLQLLCTALFTPIYLALLVASLPFAFLGFLFWSPLQSARRPYIYSRLEDKGLAGGAALLSEWKGTGPGKSFCFATANVCLLPDSLARVNNLFNTQARAKEIGQRIRNGAARPQIKIYIDSPTNTSISAASFSSLVSPQGGDGVARAVPGSIKRTASVEYKGDGGRHPGDEAANGPASGDPVDSSSPEDACIVRIGGEEGGRPPEADDPVPGGQARNGAGGGPRGQTPNHNQQDGDSGSLGSPSASRESLVKGRAGPDTSASGEPGANSKLLYKASVVKKAAARRRRHPDEAFDHEVSAFFPANLDFLCLQEVFDKRAATKLKEQLHGYFEYILYDVGVYGCQGCCSFKCLNSGLLFASRYPIMDVAYHCYPNKCNDDALASKGALFLKVQVGSTPQDQRIVGYIACTHLHAPQEDSAIRCGQLDLLQDWLADFRKSTSSSSAANPEELVAFDVVCGDFNFDNCSSDDKLEQQHSLFTHYRDPCRLGPGEEKPWAIGTLLDTNGLYDEDVCTPDNLQKVLESEEGRREYLAFPTSKSSGQKGRKELLKGNGRRIDYMLHAEEGLCPDWKAEVEEFSFITQLSGLTDHLPVAMRLMVSSGEEEA

SEQ ID NO: 32993 - protein, 647 aa, Homo sapiens
MVLYTTPFPNSCLSALHCVSWALIFPCYWLVDRLAASFIPTTYEKRQRADDPCCLQLLCTALFTPIYLALLVASLPFAFLGFLFWSPLQSARRPYIYSRLEDKGLAGGAALLSEWKGTGPGKSFCFATANVCLLPDSLARVNNLFNTQARAKEIGQRIRNGAARPQIKIYIDSPTNTSISAASFSSLVSPQGGDGVARAVPGSIKRTASVEYKGDGGRHPGDEAANGPASGDPVDSSSPEDACIVRIGGEEGGRPPEADDPVPGGQARNGAGGGPRGQTPNHNQQDGDSGSLGSPSASRESLVKGRAGPDTSASGEPGANSKLLYKASVVKKAAARRRRHPDEAFDHEVSAFFPANLDFLCLQEVFDKRAATKLKEQLHGYFEYILYDVGVYGCQGCCSFKCLNSGLLFASRYPIMDVAYHCYPNKCNDDALASKGALFLKVQVGSTPQDQRIVGYIACTHLHAPQEDSAIRCGQLDLLQDWLADFRKSTSSSSAANPEELVAFDVVCGDFNFDNCSSDDKLEQQHSLFTHYRDPCRLGPGTLLDTNGLYDEDVCTPDNLQKVLESEEGRREYLAFPTSKSSGQKGRKELLKGNGRRIDYMLHAEEGLCPDWKAEVEEFSFITQLSGLTDHLPVAMRLMVSSGEEEA

SEQ ID NO: 32994 - protein, 514 aa, Homo sapiens
MLTRVKSAVANFMGGIMAGSSGSEHGGGSCGGSDLPLRFPYGRPEFLGLSQDEVECSADHIARPILILKETRRLPWATGYAEVINAGKSTHNEDQASCEVLTVKKKAGAVTSTPNRNSSKRRSSLPNGEGLQLKENSESEGVSCHYWSLFDGHAGSGAAVVASRLLQHHITEQLQDIVDILKNSAVLPPTCLGEEPENTPANSRTLTRAASLRGGVGAPGSPSTPPTRFFTEKKIPHECLVIGALESAFKEMDLQIERERSSYNISGGCTALIVICLLGKLYVANAGDSRAIIIRNGEIIPMSSEFTPETERQRLQYLAFMQPHLLGNEFTHLEFPRRVQRKELGKKMLYRDFNMTGWAYKTIEDEDLKFPLIYGEGKKARVMATIGVTRGLGDHDLKVHDSNIYIKPFLSSAPEVRIYDLSKYDHGSDDVLILATDGLWDVLSNEEVAEAITQFLPNCDPDDPHRYTLAAQDLVMRARGVLKDRGWRISNDRLGSGDDISVYVIPLIHGNKLS

SEQ ID NO: 32995 - protein, 530 aa, Homo sapiens
MGAAASRRRALRSEAMSSVAAKVRAARAFGEYLSQSHPENRNGADHLLADAYSGHDGSPEMQPAPQNKRRLSLVSNGCYEGSLSEEPSIRKPAGEGPQPRVYTISGEPALLPSPEAEAIELAVVKGRRQRHPHHHSQPLRASPGGSREDVSRPCQSWAGSRQGSKECPGCAQLAPGPTPRAFGLDQPPLPETSGRRKKLERMYSVDRVSDDIPIRTWFPKENLFSFQTATTTMQAISVFRGYAERKRRKRENDSASVIQRNFRKHLRMVGSRRVKAQTFAERRERSFSRSWSDPTPMKADTSHDSRDSSDLQSSHCTLDEAFEDLDWDTEKGLEAVACDTEGFVPPKVMLISSKVPKAEYIPTIIRRDDPSIIPILYDHEHATFEDILEEIERKLNVYHKGAKIWKMLIFCQGGPGHLYLLKNKVATFAKVEKEEDMIHFWKRLSRLMSKVNPEPNVIHIMGCYILGNPNGEKLFQNLRTLMTPYRVTFESPLELSAQGKQMIETYFDFRLYRLWKSRQHSKLLDFDDVL

SEQ ID NO: 32996 - protein, 528 aa, Homo sapiens
MGAAASRRRALRSEAMSSVAAKVRAARAFGEYLSQSHPENRNGADHLLADAYSGHDGSPEMQPAPQNKRRLSLVSNGCYEGSLSEEPSIRKPAGEGPQPRVYTISGEPALLPSPEAEAIELAVVKGRRQRHPHHHSQPLRASPGGSREDVSRPCQSWAGSRQGSKECPGCAQLAPGPTPRAFGLDQPPLPETSGRRKKLERMYSVDRVSDDIPIRTWFPKENLFSFQTATTTMQAVFRGYAERKRRKRENDSASVIQRNFRKHLRMVGSRRVKAQTFAERRERSFSRSWSDPTPMKADTSHDSRDSSDLQSSHCTLDEAFEDLDWDTEKGLEAVACDTEGFVPPKVMLISSKVPKAEYIPTIIRRDDPSIIPILYDHEHATFEDILEEIERKLNVYHKGAKIWKMLIFCQGGPGHLYLLKNKVATFAKVEKEEDMIHFWKRLSRLMSKVNPEPNVIHIMGCYILGNPNGEKLFQNLRTLMTPYRVTFESPLELSAQGKQMIETYFDFRLYRLWKSRQHSKLLDFDDVL

SEQ ID NO: 32997 - protein, 507 aa, Homo sapiens
MGAAASRRRALRSEAMSSVAAKVRAARAFGEYLSQSHPENRNGADHLLADAYSGHDGSPEMQPAPQNKRRLSLVSNGCYEGSLSEEPSIRKPAGEGPQPRVYTISGEPALLPSPEAEAIELAVVKGRRQRHPHHHSQPLRASPGGSREDVSRPCQSWAGSRQGSKECPGCAQLAPGPTPRAFGLDQPPLPETSGRRKKLERMYSVDRVSDDIPIRTWFPKENLFSFQTATTTMQAISNFRKHLRMVGSRRVKAQTFAERRERSFSRSWSDPTPMKADTSHDSRDSSDLQSSHCTLDEAFEDLDWDTEKGLEAVACDTEGFVPPKVMLISSKVPKAEYIPTIIRRDDPSIIPILYDHEHATFEDILEEIERKLNVYHKGAKIWKMLIFCQGGPGHLYLLKNKVATFAKVEKEEDMIHFWKRLSRLMSKVNPEPNVIHIMGCYILGNPNGEKLFQNLRTLMTPYRVTFESPLELSAQGKQMIETYFDFRLYRLWKSRQHSKLLDFDDVL

SEQ ID NO: 32998 - protein, 500 aa, Homo sapiens
MGAAASRRRALRSEAMSSVAAKVRAARAFGEYLSQSHPENRNGADHLLADAYSGHDGSPEMQPAPQNKRRLSLVSNGCYEGSLSEEPSIRKPAGEGPQPRVYTISGEPALLPSPEAEAIELAVVKGRRQRHPHHHSQPLRASPGGSREDVSRPCQSWAGSRQGSKECPGCAQLAPGPTPRAFGLDQPPLPETSGRRKKLERMYSVDRVSDDIPIRTWFPKENLFSFQTATTTMQAISVFRGYAERKRRKRENDSASVIQRNFRKHLRMVGSRRVKAQSSDLQSSHCTLDEAFEDLDWDTEKGLEAVACDTEGFVPPKVMLISSKVPKAEYIPTIIRRDDPSIIPILYDHEHATFEDILEEIERKLNVYHKGAKIWKMLIFCQGGPGHLYLLKNKVATFAKVEKEEDMIHFWKRLSRLMSKVNPEPNVIHIMGCYILGNPNGEKLFQNLRTLMTPYRVTFESPLELSAQGKQMIETYFDFRLYRLWKSRQHSKLLDFDDVL

SEQ ID NO: 32999 - protein, 402 aa, Homo sapiens
MGAAASRRRALRSEAMSSVAAKVRAARAFGEYLSQSHPENRNGADHLLADAYSGHDGSPEMQPAPQNKRRLSLVSNGCYEGSLSEEPSIRKPAGEGPQPRVYTISGEPALLPSPEAEAIELAVVKGRRQRHPHHHSQPLRASPGGSREDVSRPCQSWAGSRQGSKECPGCAQLAPGPTPRAFGLDQPPLPETSGRRKKLERMYSVDRVSDDIPIRTWFPKENLFSFQTATTTMQAISVFRGYAERKRRKRENDSASVIQRNFRKHLRMVGSRRVKAQTFAERRERSFSRSWSDPTPMKADTSHDSRDSSDLQSSHCTLDEAFEDLDWDTEKGLEAVACDTEGFVPPKVMVRPSPGSAPLHPEQDSAPTRVQPALPGTTQPSPAAWGRVSHRAIPLGCLAARR

SEQ ID NO: 33000 - protein, 505 aa, Homo sapiens
MGAAASRRRALRSEAMSSVAAKVRAARAFGEYLSQSHPENRNGADHLLADAYSGHDGSPEMQPAPQNKRRLSLVSNGCYEGSLSEEPSIRKPAGEGPQPRVYTISGEPALLPSPEAEAIELAVVKGRRQRHPHHHSQPLRASPGGSREDVSRPCQSWAGSRQGSKECPGCAQLAPGPTPRAFGLDQPPLPETSGRRKKLERMYSVDRVSDDIPIRTWFPKENLFSFQTATTTMQANFRKHLRMVGSRRVKAQTFAERRERSFSRSWSDPTPMKADTSHDSRDSSDLQSSHCTLDEAFEDLDWDTEKGLEAVACDTEGFVPPKVMLISSKVPKAEYIPTIIRRDDPSIIPILYDHEHATFEDILEEIERKLNVYHKGAKIWKMLIFCQGGPGHLYLLKNKVATFAKVEKEEDMIHFWKRLSRLMSKVNPEPNVIHIMGCYILGNPNGEKLFQNLRTLMTPYRVTFESPLELSAQGKQMIETYFDFRLYRLWKSRQHSKLLDFDDVL

SEQ ID NO: 33001 - protein, 505 aa, Homo sapiens
MLNRVRSAVAHLVSSGGAPPPRPKSPDLPNAASAPPAAAPEAPRSPPAKAGSGSATPAKAVEARASFSRPTFLQLSPGGLRRADDHAGRAVQSPPDTGRRLPWSTGYAEVINAGKSRHNEDQACCEVVYVEGRRSVTGVPREPSRGQGLCFYYWGLFDGHAGGGAAEMASRLLHRHIREQLKDLVEILQDPSPPPLCLPTTPGTPDSSDPSHLLGPQSCWSSQKEVSHESLVVGAVENAFQLMDEQMARERRGHQVEGGCCALVVIYLLGKVYVANAGDSRAIIVRNGEIIPMSREFTPETERQRLQLLGFLKPELLGSEFTHLEFPRRVLPKELGQRMLYRDQNMTGWAYKKIELEDLRFPLVCGEGKKARVMATIGVTRGLGDHSLKVCSSTLPIKPFLSCFPEVRVYDLTQYEHCPDDVLVLGTDGLWDVTTDCEVAATVDRVLSAYEPNDHSRYTALAQALVLGARGTPRDRGWRLPNNKLGSGDDISVFVIPLGGPGSYS

SEQ ID NO: 33002 - protein, 299 aa, Homo sapiens
MASRLLHRHIREQLKDLKEVSHESLVVGAVENAFQLMDEQMARERRGHQVEGGCCALVVIYLLGKVYVANAGDSRAIIVRNGEIIPMSREFTPETERQRLQLLGFLKPELLGSEFTHLEFPRRVLPKELGQRMLYRDQNMTGWAYKKIELEDLRFPLVCGEGKKARVMATIGVTRGLGDHSLKVCSSTLPIKPFLSCFPEVRVYDLTQYEHCPDDVLVLGTDGLWDVTTDCEVAATVDRVLSAYEPNDHSRYTALAQALVLGARGTPRDRGWRLPNNKLGSGDDISVFVIPLGGPGSYS

SEQ ID NO: 33003 - protein, 253 aa, Homo sapiens
MDSAAAAFALDKPALGPGPPPPPPALGPGDCAQARKNFSVSHLLDLEEVAAAGRLAARPGARAEAREGAAREPSGGSSGSEAAPQDGECPSPGRGSAAKRKKKQRRNRTTFNSSQLQALERVFERTHYPDAFVREELARRVNLSEARVQVWFQNRRAKFRRNERAMLASRSASLLKSYSQEAAIEQPVAPRPTALSPDYLSWTASSPYSTVPPYSPGSSGPATPGVNMANSIASLRLKAKEFSLHHSQVPTVN

SEQ ID NO: 33004 - protein, 676 aa, Homo sapiens
MRVLGGRCGALLACLLLVLPVSEANFLSKQQASQVLVRKRRANSLLEETKQGNLERECIEELCNKEEAREVFENDPETDYFYPKYLVCLRSFQTGLFTAARQSTNAYPDLRSCVNAIPDQCSPLPCNEDGYMSCKDGKASFTCTCKPGWQGEKCEFDINECKDPSNINGGCSQICDNTPGSYHCSCKNGFVMLSNKKDCKDVDECSLKPSICGTAVCKNIPGDFECECPEGYRYNLKSKSCEDIDECSENMCAQLCVNYPGGYTCYCDGKKGFKLAQDQKSCEVVSVCLPLNLDTKYELLYLAEQFAGVVLYLKFRLPEISRFSAEFDFRTYDSEGVILYAESIDHSAWLLIALRGGKIEVQLKNEHTSKITTGGDVINNGLWNMVSVEELEHSISIKIAKEAVMDINKPGPLFKPENGLLETKVYFAGFPRKVESELIKPINPRLDGCIRSWNLMKQGASGIKEIIQEKQNKHCLVTVEKGSYYPGSGIAQFHIDYNNVSSAEGWHVNVTLNIRPSTGTGVMLALVSGNNTVPFAVSLVDSTSEKSQDILLSVENTVIYRIQALSLCSDQQSHLEFRVNRNNLELSTPLKIETISHEDLQRQLAVLDKAMKAKVATYLGGLPDVPFSATPVNAFYNGCMEVNINGVQLDLDEAISKHNDIRAHSCPSVWKKTKNS

SEQ ID NO: 33005 - protein, 313 aa, Homo sapiens
MPTTPDPGSEPPARTPRPPPLTPGLSPQPALHALSPQLLLLLFLAVSSLGSCSTGSPVPVPENDLVGIVGGHNAPPGKWPWQVSLRVYSYHWASWAHICGGSLIHPQWVLTAAHCIFWKDTDPSIYRIHAGDVYLYGGRGLLNVSRIIVHPNYVTAGLGADVALLQLEPHDLSNVRTVKLSPVSLELTPKDQCWVTGWGAIIRKESLPPPYRLQQASVQVLENAVCEQPYRNASGHTGDRQLILDDMLCAGSEGRDSCYGDSGGPLVCRLRGSWRLVGVVSWGYGCTLRDFPGVYTHVQIYVPWILQQVGELP

SEQ ID NO: 33006 - protein, 674 aa, Homo sapiens
MAPGQAPHQATPWRDAHPFFLLSPVMGLLSRAWSRLRGLGPLEPWLVEAVKGAALVEAGLEGEARTPLAIPHTPWGRRPEEEAEDSGGPGEDRETLGLKTSSSLPEAWGLLDDDDGMYGEREATSVPRGQGSQFADGQRAPLSPSLLIRTLQGSDKNPGEEKAEEEGVAEEEGVNKFSYPPSHRECCPAVEEEDDEEAVKKEAHRTSTSALSPGSKPSTWVSCPGEEENQATEDKRTERSKGARKTSVSPRSSGSDPRSWEYRSGEASEEKEEKAHKETGKGEAAPGPQSSAPAQRPQLKSWWCQPSDEEEGEVKALGAAEKDGEAECPPCIPPPSAFLKAWVYWPGEDTEEEEDEEEDEDSDSGSDEEEGEAEASSSTPATGVFLKSWVYQPGEDTEEEEDEDSDTGSAEDEREAETSASTPPASAFLKAWVYRPGEDTEEEEDEDVDSEDKEDDSEAALGEAESDPHPSHPDQRAHFRGWGYRPGKETEEEEAAEDWGEAEPCPFRVAIYVPGEKPPPPWAPPRLPLRLQRRLKRPETPTHDPDPETPLKARKVRFSEKVTVHFLAVWAGPAQAARQGPWEQLARDRSRFARRITQAQEELSPCLTPAARARAWARLRNPPLAPIPALTQTLPSSSVPSSPVQTTPLSQAVATPSRSSAAAAAALDLSGRRG

SEQ ID NO: 33007 - protein, 515 aa, Homo sapiens
MAPGQAPHQATPWRDDKFSYPPSHRECCPAVEEEDDEEAVKKEAHRTSTSALSPGSKPSTWVSCPGEEENQATEDKRTERSKGARKTSVSPRSSGSDPRSWEYRSGEASEEKEEKAHKETGKGEAAPGPQSSAPAQRPQLKSWWCQPSDEEEGEVKALGAAEKDGEAECPPCIPPPSAFLKAWVYWPGEDTEEEEDEEEDEDSDSGSDEEEGEAEASSSTPATGVFLKSWVYQPGEDTEEEEDEDSDTGSAEDEREAETSASTPPASAFLKAWVYRPGEDTEEEEDEDVDSEDKEDDSEAALGEAESDPHPSHPDQRAHFRGWGYRPGKETEEEEAAEDWGEAEPCPFRVAIYVPGEKPPPPWAPPRLPLRLQRRLKRPETPTHDPDPETPLKARKVRFSEKVTVHFLAVWAGPAQAARQGPWEQLARDRSRFARRITQAQEELSPCLTPAARARAWARLRNPPLAPIPALTQTLPSSSVPSSPVQTTPLSQAVATPSRSSAAAAAALDLSGRRG

SEQ ID NO: 33008 - protein, 737 aa, Homo sapiens
MPDHDSTALLSRQTKRRRVDIGVKRTVGTASAFFAKARATFFSAMNPQGSEQDVEYSVVQHADGEKSNVLRKLLKRANSYEDAMMPFPGATIISQLLKNNMNKNGGTEPSFQASGLSSTGSEVHQEDICSNSSRDSPPECLSPFGRPTMSQFDMDRLCDEHLRAKRARVENIIRGMSHSPSVALRGNENEREMAPQSVSPRESYRENKRKQKLPQQQQQSFQQLVSARKEQKREERRQLKQQLEDMQKQLRQLQEKFYQIYDSTDSENDEDGNLSEDSMRSEILDARAQDSVGRSDNEMCELDPGQFIDRARALIREQEMAENKPKREGNNKERDHGPNSLQPEGKHLAETLKQELNTAMSQVVDTVVKVFSAKPSRQVPQVFPPLQIPQARFAVNGENHNFHTANQRLQCFGDVIIPNPLDTFGNVQMASSTDQTEALPLVVRKNSSDQSASGPAAGGHHQPLHQSPLSATTGFTTSTFRHPFPLPLMAYPFQSPLGAPSGSFSGKDRASPESLDLTRDTTSLRTKMSSHHLSHHPCSPAHPPSTAEGLSLSLIKSECGDLQDMSEISPYSGSAMQEGLSPNHLKKAKLMFFYTRYPSSNMLKTYFSDVKFNRCITSQLIKWFSNFREFYYIQMEKYARQAINDGVTSTEELSITRDCELYRALNMHYNKANDFEVPERFLEVAQITLREFFNAIIAGKDVDPSWKKAIYKVICKLDSEVPEIFKSPNCLQELLHE

SEQ ID NO: 33009 - protein, 592 aa, Homo sapiens
MDPNSILLSPQPQICSHLAEACTEGERSSSPPELDRDSPFPWSQVPSSSPTDPEWFGDEHIQAKRARVETIVRGMCLSPNPLVPGNAQAGVSPRCPKKARERKRKQNLPTPQGLLMPAPAWDQGNRKGGPRVREQLHLLKQQLRHLQEHILQAAKPRDTAQGPGGCGTGKGPLSAKQGNGCGPRPWVVDGDHQQGTSKDLSGAEKHQESEKPSFLPSGAPASLEILRKELTRAVSQAVDSVLQKVLLDPPGHLTQLGRSFQGQVAEGRSEPSPPVGGACKDPLALAALPRRVQLQAGVPVGNLSLAKRLDSPRYPIPPRMTPKPCQDPPANFPLTAPSHIQENQILSQLLGHRYNNGHWSSSPPQDSSSQRHPSSEPALRPWRTTKPQPLVLSQQQCPLPFTSAHLESLPLLPSVKMEQRGLHAVMEALPFSLLHIQEGLNPGHLKKAKLMFFFTRYPSSNLLKVYFPDVQFNRCITSQMIKWFSNFREFYYIQMEKSARQAISDGVTNPKMLVVLRNSELFQALNMHYNKGNDFEVPDCFLEIASLTLQEFFRAVSAGRDSDPSWKKPIYKIISKLDSDIPEIFKSSSYPQ

SEQ ID NO: 33010 - protein, 365 aa, Homo sapiens
MDPNSILLSPQPQICSHLAEACTEGERSSSPPELDRDSPFPWSQVPSSSPTDPEWFGDEHIQAKRARVETIVRGMCLSPNPLVPGNAQAGVSPRCPKKARERKRKQNLPTPQGLLMPAPAWDQGNRKGGPRVREQLHLLKQQLRHLQEHILQAAKPRDTAQGPGGCGTGKGPLSAKQGNGCGPRPWVVDGDHQQGTSKDLSGAEKHQESEKPSFLPSGAPASLEILRKELTRAVSQAVDSVLQKFNRCITSQMIKWFSNFREFYYIQMEKSARQAISDGVTNPKMLVVLRNSELFQALNMHYNKGNDFEVPDCFLEIASLTLQEFFRAVSAGRDSDPSWKKPIYKIISKLDSDIPEIFKSSSYPQ

SEQ ID NO: 33011 - protein, 713 aa, Homo sapiens
MEPGTGGSRKRLGPRAGFRFWPPFFPRRSQAGSSKFPTPLGPENSGNPTLLSSAQPETRVSYWTKLLSQLLAPLPGLLQKVLIWSQLFGGMFPTRWLDFAGVYSALRALKGREKPAAPTAQKSLSSLQLDSSDPSVTSPLDWLEEGIHWQYSPPDLKLELKAKGSALDPAAQAFLLEQQLWGVELLPSSLQSRLYSNRELGSSPSGPLNIQRIDNFSVVSYLLNPSYLDCFPRLEVSYQNSDGNSEVVGFQTLTPESSCLREDHCHPQPLSAELIPASWQGCPPLSTEGLPEIHHLRMKRLEFLQQANKGQDLPTPDQDNGYHSLEEEHSLLRMDPKHCRDNPTQFVPAAGDIPGNTQESTEEKIELLTTEVPLALEEESPSEGCPSSEIPMEKEPGEGRISVVDYSYLEGDLPISARPACSNKLIDYILGGASSDLETSSDPEGEDWDEEAEDDGFDSDSSLSDSDLEQDPEGLHLWNSFCSVDPYNPQNFTATIQTAARIVPEEPSDSEKDLSGKSDLENSSQSGSLPETPEHSSGEEDDWESSADEAESLKLWNSFCNSDDPYNPLNFKAPFQTSGENEKGCRDSKTPSESIVAISECHTLLSCKVQLLGSQESECPDSVQRDVLSGGRHTHVKRKKVTFLEEVTEYYISGDEDRKGPWEEFARDGCRFQKRIQETEDAIGYCLTFEHRERMFNRLQGTCFKGLNVLKQC

SEQ ID NO: 33012 - protein, 280 aa, Homo sapiens
MRGVSCLQVLLLLVLGAAGTQGRKSAACGQPRMSSRIVGGRDGRDGEWPWQASIQHRGAHVCGGSLIAPQWVLTAAHCFPRRALPAEYRVRLGALRLGSTSPRTLSVPVRRVLLPPDYSEDGARGDLALLQLRRPVPLSARVQPVCLPVPGARPPPGTPCRVTGWGSLRPGVPLPEWRPLQGVRVPLLDSRTCDGLYHVGADVPQAERIVLPGSLCAGYPQGHKDACQGDSGGPLTCLQSGSWVLVGVVSWGKGCALPNRPGVYTSVATYSPWIQARVSF

SEQ ID NO: 33013 - protein, 103 aa, Homo sapiens
MTTEIGWWKLTFLRKKKSTPKVLYEIPDTYAQTEGDAEPPRPDAGGPNSDFNTRLEKIVDKSTKGKHVKVSNSGRFKEKKKVRATLAENPNLFDDHEEGRSSK

SEQ ID NO: 33014 - protein, 306 aa, Homo sapiens
MASPGCLWLLAVALLPWTCASRALQHLDPPAPLPLVIWHGMGDSCCNPLSMGAIKKMVEKKIPGIYVLSLEIGKTLMEDVENSFFLNVNSQVTTVCQALAKDPKLQQGYNAMGFSQGGQFLRAVAQRCPSPPMINLISVGGQHQGVFGLPRCPGESSHICDFIRKTLNAGAYSKVVQERLVQAEYWHDPIKEDVYRNHSIFLADINQERGINESYKKNLMALKKFVMVKFLNDSIVDPVDSEWFGFYRSGQAKETIPLQETSLYTQDRLGLKEMDNAGQLVFLATEGDHLQLSEEWFYAHIIPFLG

SEQ ID NO: 33015 - protein, 203 aa, Homo sapiens
MASPGCLWLLAVALLPWTCASRALQHLDPPAPLPLVIWHGMGVFGLPRCPGESSHICDFIRKTLNAGAYSKVVQERLVQAEYWHDPIKEDVYRNHSIFLADINQERGINESYKKNLMALKKFVMVKFLNDSIVDPVDSEWFGFYRSGQAKETIPLQETSLYTQDRLGLKEMDNAGQLVFLATEGDHLQLSEEWFYAHIIPFLG

SEQ ID NO: 33016 - protein, 384 aa, Homo sapiens
MAALTLRGVRELLKRVDLATVPRRHRYKKKWAATEPKFPAVRLALQNFDMTYSVQFGDLWPSIRVSLLSEQKYGALVNNFAAWDHVSAKLEQLSAKDFVNEAISHWELQSEGGQSAAPSPASWACSPNLRCFTFDRGDISRFPPARPGSLGVMEYYLMDAASLLPVLALGLQPGDIVLDLCAAPGGKTLALLQTGCCRNLAANDLSPSRIARLQKILHSYVPEEIRDGNQVRVTSWDGRKWGELEGDTYDRVLVDVPCTTDRHSLHEEENNIFKRSRKKERQILPVLQVQLLAAGLLATKPGGHVVYSTCSLSHLQNEYVVQGAIELLANQYSIQVQVEDLTHFRRVFMDTFCFFSSCQVGELVIPNLMANFGPMYFCKMRRLT

SEQ ID NO: 33017 - protein, 146 aa, Homo sapiens
MAALTLRGVRELLKRVDLATVPRRHRYKKKWAATEPKFPAVRLALQNFDMTYSVQFGDLWPSIRVSLLSEQKYGALVNNFAAWDHVSAKLEQLSAKDFVNEAISHWELQSEGGQSAAPSPASWACSPNLRCFTFDRGDISRFPPAR

SEQ ID NO: 33018 - protein, 186 aa, Homo sapiens
MLPPCCLFWPSACSLGTSCLTYVPEEIRDGNQVRVTSWDGRKWGELEGDTYDRVLVDVPCTTDRHSLHEEENNIFKRSRKKERQILPVLQVQLLAAGLLATKPGGHVVYSTCSLSHLQNEYVVQGAIELLANQYSIQVQVEDLTHFRRVFMDTFCFFSSCQVGELVIPNLMANFGPMYFCKMRRLT

SEQ ID NO: 33019 - protein, 335 aa, Homo sapiens
MTYSVQFGDLWPSIRVSLLSEQKYGALVNNFAAWDHVSAKLEQLSAKDFVNEAISHWELQSEGGQSAAPSPASWACSPNLRCFTFDRGDISRFPPARPGSLGVMEYYLMDAASLLPVLALGLQPGDIVLDLCAAPGGKTLALLQTGCCRNLAANDLSPSRIARLQKILHSYVPEEIRDGNQVRVTSWDGRKWGELEGDTYDRVLVDVPCTTDRHSLHEEENNIFKRSRKKERQILPVLQVQLLAAGLLATKPGGHVVYSTCSLSHLQNEYVVQGAIELLANQYSIQVQVEDLTHFRRVFMDTFCFFSSCQVGELVIPNLMANFGPMYFCKMRRLT

SEQ ID NO: 33020 - protein, 400 aa, Homo sapiens
MAGCVPLLQGLVLVLALHRVEPSVFLPASKANDVLVRWKRAGSYLLEELFEGNLEKECYEEICVYEEAREVFENEVVTDEFWRRYKGGSPCISQPCLHNGSCQDSIWGYTCTCSPGYEGSNCELAKNECHPERTDGCQHFCLPGQESYTCSCAQGYRLGEDHKQCVPHDQCACGVLTSEKRAPDLQDLPWQVKLTNSEGKDFCGGVIIRENFVLTTAKCSLLHRNITVKTYFNRTSQDPLMIKITHVHVHMRYDADAGENDLSLLELEWPIQCPGAGLPVCTPEKDFAEHLLIPRTRGLLSGWARNGTDLGNSLTTRPVTLVEGEECGQVLNVTVTTRTYCERSSVAAMHWMDGSVVTREHRGSWFLTGVLGSQPVGGQAHMVLVTKVSRYSLWFKQIMN

SEQ ID NO: 33021 - protein, 422 aa, Homo sapiens
MAGCVPLLQGLVLVLALHRVEPSATSLKERHGLHSDSACTGVQESLFLPASKANDVLVRWKRAGSYLLEELFEGNLEKECYEEICVYEEAREVFENEVVTDEFWRRYKGGSPCISQPCLHNGSCQDSIWGYTCTCSPGYEGSNCELAKNECHPERTDGCQHFCLPGQESYTCSCAQGYRLGEDHKQCVPHDQCACGVLTSEKRAPDLQDLPWQVKLTNSEGKDFCGGVIIRENFVLTTAKCSLLHRNITVKTYFNRTSQDPLMIKITHVHVHMRYDADAGENDLSLLELEWPIQCPGAGLPVCTPEKDFAEHLLIPRTRGLLSGWARNGTDLGNSLTTRPVTLVEGEECGQVLNVTVTTRTYCERSSVAAMHWMDGSVVTREHRGSWFLTGVLGSQPVGGQAHMVLVTKVSRYSLWFKQIMN

SEQ ID NO: 33022 - protein, 235 aa, Homo sapiens
MKYVFYLGVLAGTFFFADSSVQKEDPAPYLVYLKSHFNPCVGVLIKPSWVLAPAHCYLPNLKVMLGNFKSRVRDGTEQTINPIQIVRYWNYSHSAPQDDLMLIKLAKPAMLNPKVQPLTLATTNVRPGTVCLLSGLDWSQENSGRHPDLRQNLEAPVMSDRECQKTEQGKSHRNSLCVKFVKVFSRIFGEVAVATVICKDKLQGIEVGHFMGGDVGIYTNVYKYVSWIENTAKDK

SEQ ID NO: 33023 - protein, 1015 aa, Homo sapiens
MLTALAPPALPGIPRQLPTAPARRQDSSGSSGSYYTAPGSPEPPDVGPDAKGPANWPWVAPGRGAGAQPRLSVSAQNSRQRHGPGSGFPRGPGSGPRPPQPQLRTLPSGEMEVIFGVGPLFGCSGADDREAQQQFTEPAFISPLPPGPASPAAVPRQSQVPDGGSRWATYLELRPRGPSPAAPAQFECVEVALEEGAAPARPRTVPKRQIELRPRPQSPPRAAGAPRPRLLLRTGSLDESLGPLQAAAGFVQTALARKLSPEAPAPSSATFGSTGRSEPETRETARSTHVVLEKAKSRPLRVRDNSAPAKAPRPWPSLRERAIRRDKPAPGTEPLGPVSSSIFLQSEEKIQEARKTRFPREAPDRTVQRARSPPFECRIPSEVPSRAVRPRSPSPPRQTPNGAVRGPRCPSPQNLSPWDRTTRRVSSPLFPEASSEWENQNPAVEETVSRRSPSPPILSQWNQCVAGERSPSLEAPSLWEIPHSAVADAVEPRSSPSPPAFFPWEAPDRPIGTWGPSPQETWDPMGPGSSIAFTQEAQNGLTQEELAPPTPSAPGTPEPTEMQSPSTREISDLAFGGSQQSPEVAAPEPPGSHPVGTLDADKCPEVLGPGEAASGRPRMAIPRPRDVRKLVKTTYAPGFPAGAQGSGLPAPPADPCGEEGGESKTQEPPALGPPAPAHYTSVFIKDFLPVVPHPYEPPEPSFDTVARDASQPNGVLRRRAENSTAKPFKRTEIRLPGALALGRRPEVTSRVRARGPGGENRDVEAQRLVPDGDGRTSPLGGARSSSQRSPVGPAGVRSPRPGSPQMQASPSPGIAPKPKTPPTAPEPAAAVQAPLPREPLALAGRTAPAQPRAASAPPTDRSPQSPSQGARRQPGAAPLGKVLVDPESGRYYFVEAPRQPRLRVLFDPESGQYVEVLLPPSSPGPPHRVYTPLALGLGLYPPAYGPIPSLSLPPSPGPQALGSPQLPWVSEAGPLDGTYYLPVSGTPNPAPPLLLCAPPSSSGPTQPGKGSLFPL

SEQ ID NO: 33024 - protein, 326 aa, Homo sapiens
MAAPASVMGPLGPSALGLLLLLLVVAPPRVAALVHRQPENQGISLTGSVACGRPSMEGKILGGVPAPERKWPWQVSVHYAGLHVCGGSILNEYWVLSAAHCFHRDKNIKIYDMYVGLVNLRVAGNHTQWYEVNRVILHPTYEMYHPIGGDVALVQLKTRIVFSESVLPVCLATPEVNLTSANCWATGWGLVSKQGETSDELQEMQLPLILEPWCHLLYGHMSYIMPDMLCAGDILNAKTVCEGDSGGPLVCEFNRSWLQIGIVSWGRGCSNPLYPGVYASVSYFSKWICDNIEITPTPAQPAPALSPALGPTLSVLMAMLAGWSVL

SEQ ID NO: 33025 - protein, 318 aa, Homo sapiens
MGARGALLLALLLARAGLGKPGELGALQAGPGAARRPGGGGREEACGHREIHALVAGGVESARGRWPWQASLRLRRRHRCGGSLLSRRWVLSAAHCFQKHYYPSEWTVQLGELTSRPTPWNLRAYSSRYKVQDIIVNPDALGVLRNDIALLRLASSVTYNAYIQPICIESSTFNFVHRPDCWVTGWGLISPSGTPLPPPYNLREAQVTILNNTRCNYLFEQPSSRSMIWDSMFCAGAEDGSVDTCKGDSGGPLVCDKDGLWYQVGIVSWGMDCGQPNRPGVYTNISVYFHWIRRVMSHSTPRPNPSQLLLLLALLWAP

SEQ ID NO: 33026 - protein, 302 aa, Homo sapiens
MLGLCGQRLPAAWVLLLLPFLPLLLLAAPAPHRASYKPVIVVHGLFDSSYSFRHLLEYINETHPGTVVTVLDLFDGRESLRPLWEQVQGFREAVVPIMAKAPQGVHLICYSQGGLVCRALLSVMDDHNVDSFISLSSPQMGQYGDTDYLKWLFPTSMRSNLYRICYSPWGQEFSICNYWHDPHHDDLYLNASSFLALINGERDHPNATVWRKNFLRVGHLVLIGGPDDGVITPWQSSFFGFYDANETVLEMEEQLVYLRDSFGLKTLLARGAIVRCPMAGISHTAWHSNRTLYETCIEPWLS

SEQ ID NO: 33027 - protein, 301 aa, Homo sapiens
MLGLCGQRLPAAWVLLLLPFLPLLLLAAPAPHRASYKPVIVVHGLFDSSYSFRHLLEYINETHPGTVVTVLDLFDGRESLRPLWEQVQGFREAVVPIMAKAPQGVHLICYSQGGLVCRALLSVMDDHNVDSFISLSSPQMGQYGDTDYLKWLFPTSMRSNLYRICYSPWGQEFSICNYWHDPHHDDLYLNASSFLALINGERDHPNATVWRKNFLRVGHLVLIGGPDDGVITPWQSSFFGFYDANETVLEMEEQLPARPTHQSELLLLRLVCLKPPRRKKPACRVQRQSESWGPGLSCALS

SEQ ID NO: 33028 - protein, 308 aa, Homo sapiens
MKSCGSMLGLCGQRLPAAWVLLLLPFLPLLLLAAPAPHRASYKPVIVVHGLFDSSYSFRHLLEYINETHPGTVVTVLDLFDGRESLRPLWEQVQGFREAVVPIMAKAPQGVHLICYSQGGLVCRALLSVMDDHNVDSFISLSSPQMGQYGDTDYLKWLFPTSMRSNLYRICYSPWGQEFSICNYWHDPHHDDLYLNASSFLALINGERDHPNATVWRKNFLRVGHLVLIGGPDDGVITPWQSSFFGFYDANETVLEMEEQLVYLRDSFGLKTLLARGAIVRCPMAGISHTAWHSNRTLYETCIEPWLS

SEQ ID NO: 33029 - protein, 293 aa, Homo sapiens
MSSGGGSRGLLAWLLLLQPWPGQNWAGMAAPRLPSPLLSEEGGENPEASPAPGPEAGPPLNLFTSFPGDSLLCGRTPLRIVGGVDAEEGRWPWQVSVRTKGRHICGGTLVTATWVLTAGHCISSRFHYSVKMGDRSVYNENTSVVVSVQRAFVHPKFSTVTTIRNDLALLQLQHPVNFTSNIQPICIPQENFQVEGRTRCWVTGWGKTPEREKLASEILQDVDQYIMCYEECNKIIQKALSSTKDVIIKGMVCGYKEQGKDSCQGDSGGRLACEYNDTWVQVGIVSWGIGCGR

SEQ ID NO: 33030 - protein, 560 aa, Homo sapiens
MNRKWEAKLKQIEERASHYERKPLSSVYRPRLSKPEEPPSIWRLFHRQAQAFNFVKSCKEDVHVFALECKVGDGQRIYLVTTYAEFWFYYKSRKNLLHCYEVIPENAVCKLYFDLEFNKPANPGADGKKMVALLIEYVCKALQELYGVNCSAEDVLNLDSSTDEKFSRHLIFQLHDVAFKDNIHVGNFLRKILQPALDLLGSEDDDSAPETTGHGFPHFSEAPARQGFSFNKMFTEKATEESWTSNSKKLERLGSAEQSSPDLSFLVVKNNMGEKHLFVDLGVYTRNRNFRLYKSSKIGKRVALEVTEDNKFFPIQSKDVSDEYQYFLSSLVSNVRFSDTLRILTCEPSQNKQKGVGYFNSIGTSVETIEGFQCSPYPEVDHFVLSLVNKDGIKGGIRRWNYFFPEELLVYDICKYRWCENIGRAHKSNNIMILVDLKNEVWYQKCHDPVCKAENFKSDCFPLPAEVCLLFLFKEEEEFTTDEADETRSNETQNPHKPSPSRLSTGASADAVWDNGIDDAYFLEATEDAELAEAAENSLLSYNSEVDEIPDELIIEVLQE

SEQ ID NO: 33031 - protein, 559 aa, Homo sapiens
MNRKWEAKLKQIEERASHYERKPLSSVYRPRLSKPEEPPSIWRLFHRQAQAFNFVKSCKEDVHVFALECKVGDGQRIYLVTTYAEFWFYYKSRKNLLHCYEVIPENAVCKLYFDLEFNKPANPGADGKKMVALLIEYVCKALQELYGVNCSAEDVLNLDSSTDEKFSRHLIFQLHDVAFKDNIHVGNFLRKILQPALDLLGSEDDDSAPETTGHGFPHFSEAPARQGFSFNKMFTEKATEESWTSNSKKLERLGSAEQSSPDLSFLVVKNNMGEKHLFVDLGVYTRNRNFRLYKSSKIGKRVALEVTEDNKFFPIQSKDVSDEYQYFLSSLVSNVRFSDTLRILTCEPSQNKQKGVGYFNSIGTSETIEGFQCSPYPEVDHFVLSLVNKDGIKGGIRRWNYFFPEELLVYDICKYRWCENIGRAHKSNNIMILVDLKNEVWYQKCHDPVCKAENFKSDCFPLPAEVCLLFLFKEEEEFTTDEADETRSNETQNPHKPSPSRLSTGASADAVWDNGIDDAYFLEATEDAELAEAAENSLLSYNSEVDEIPDELIIEVLQE

SEQ ID NO: 33032 - protein, 174 aa, Homo sapiens
MACGPGDLQSLTSPLSSARLDYQPSIEGPWLRACGQTNVSCRVVKGKLVEVGKWPWQVSILFLGTYICSGSLIHHQWVLTAAHCLQRFKDLSLYSVMVGVHQRPENSTQLPLTRMVIHKDFSNLMSQDIALLKLRDSISWSPFVQPVCLPNIKFKPSIGSMCWVIGWGTTGKKG

SEQ ID NO: 33033 - protein, 221 aa, Homo sapiens
MEEPRPSKRLRSMAPNQASGGPPPEPGCCVADPEGSVEADGPAQPAQPAKPIAYVKPFRRQPPARPESPPPAERGRRRGGSRRPGRGRGRRAGPRGDAGQRQGAEGLMAPDVHIQLDHHGEPGHQGEPEITETAAFSLSETGPPPGTVQEGPGPDVAQPELGFQEPPAAPGPQAVDWQPVLTLYPCIGFRALGDSAVLQVIQTPQGTYVQGVPVFLTDIAY

SEQ ID NO: 33034 - protein, 221 aa, Homo sapiens; identical to SEQ ID NO: 33033

SEQ ID NO: 33035 - protein, 221 aa, Homo sapiens; identical to SEQ ID NO: 33033

SEQ ID NO: 33036 - protein, 375 aa, Homo sapiens
MGYCQGVSQVAVVLLMFPKEKEAFLALAQLLTSKNLPDTVDGQLPMGPHSRASQVAPETTSSKVDRGVSTVCGKPKVVGKIYGGRDAAAGQWPWQASLLYWGSHLCGAVLIDSCWLVSTTHCFLNKSQAPKNYQVLLGNIQLYHQTQHTQKMSVHRIITHPDFEKLHPFGSDIAMLQLHLPMNFTSYIVPVCLPSRDMQLPSNVSCWITGWGMLTEDHKRGPVHTAVPSRLQAVCCSGCRGQRVGSRVGRFRSMIVHSEGQLRSLMPGDFHLGDSGGPLVCYLPSAWVLVGLASWGLDCRHPAYPSIFTRVTYFINWIDEIMRLTPLSDPALAPHTCSPPKPLRAAGLPGPCAALVLPQTWLLLPLTLRAPWQTL

SEQ ID NO: 33037 - protein, 221 aa, Homo sapiens; identical to SEQ ID NO: 33033

SEQ ID NO: 33038 - protein, 328 aa, Homo sapiens
MGPAGCAFTLLLLLGISVCGQPVYSSRVVGGQDAAAGRWPWQVSLHFDHNFICGGSLVSERLILTAAHCIQPTWTTFSYTVWLGSITVGDSRKRVKYYVSKIVIHPKYQDTTADVALLKLSSQVTFTSAILPICLPSVTKQLAIPPFCWVTGWGKVKESSDRDYHSALQEAEVPIIDRQACEQLYNPIGIFLPALEPVIKEDKICAGDTQNMKDSCKGDSGGPLSCHIDGVWIQTGVVSWGLECGKSLPGVYTNVIYYQKWINATISRANNLDFSDFLFPIVLLSLALLRPSCAFGPNTIHRVGTVAEAVACIQGWEENAWRFSPRGR

SEQ ID NO: 33039 - protein, 185 aa, Homo sapiens
MGPAGCAFTLLLLLGISDRDYHSALQEAEVPIIDRQACEQLYNPIGIFLPALEPVIKEDKICAGDTQNMKDSCKGDSGGPLSCHIDGVWIQTGVVSWGLECGKSLPGVYTNVIYYQKWINATISRANNLDFSDFLFPIVLLSLALLRPSCAFGPNTIHRVGTVAEAVACIQGWEENAWRFSPRGR

SEQ ID NO: 33040 - protein, 221 aa, Homo sapiens; identical to SEQ ID NO: 33033

SEQ ID NO: 33041 - protein, 210 aa, Homo sapiens
MEEPRHSKRPRFLAPNQASGGPPTEPGCSGVDREDPVDPVQPAKPTAYVKPMRREPPARAQPAPPAGRGQRGGGSWRAGRGRGSGAGLLRALGERVGPGMYLVHLNDHGELGYQGQLEARQTPAFSFTEAALMPGIVQEGPGPHAAQPEVGLQEPPPAPGPVAVARQTMLAPSPSLSFRPPGGSSTLCIVQTSNSTIVQSVPVFPAHSAH

SEQ ID NO: 33042 - protein, 266 aa, Homo sapiens
MGSRPRSPSAFPAPWWGQQPGGPGPAKRLRLEEPAGPEPRVAPSLEDPAGTPAVGALTSIVVLAAGCALRVPLDDVDLVLELPPTSILRVSLDGHTLILIPEVLLSSVDERSGAQDDSSAGLEVDVFLGALREDVVVEQEVFCASVPEIAAQEEAYEEDADPEFPELQMDSAAGSAAGLYSSARSMFSPYREGPIPEPCALAPNPSSEGHSPGPFFDPEFRLLEPVPSSPLQPLPPSPRVGSPGPHAHPPLPKRPPCKARRRLFQE

SEQ ID NO: 33043 - protein, 265 aa, Homo sapiens
MVSRPRSPSAFPAPWWGQQPGGPGPAKRLRLEEPAGPEPRAAPSLEDPAGDPAVDALTSIVVLAAGCALRVPLDDVDLVLEPAPTSILRVSLGGHTLILIPEVLLSSVDERSGAQHDSSAGLEVDVFLGAVREDVVVELEFCASVPEIAAQEEAYEEDADPEFPELRMDSPTGSAAGLYPSSRSMFIPYREGPIPEPCALAPNPSSERRSPRPIFDLEFRLLEPVPSSPLQPLPPSPCVGSPGPHARSPLPERPPCKARRRLFQA

SEQ ID NO: 33044 - protein, 262 aa, Homo sapiens
MGSRPCSPSACLAPWWGQQPGGPGPAKRSRLEEPAGPESRAAPSPEDPAGTPAVDALTSMVVLDAGCALRVPLEDVDLVLELAPMSVLRVSLGGHTLIVIPEVLLSSVDECSGAQGDWSAGLEVDVFLGAHGEDVVVEQEVCASVPEIAAEEEAYEEDADSEFPELWMDSAAGSAAGLYPSARSMFSPYREGPIRGPCALAPNPSSERRSPRPIFDLEFHLLEPVPSSPLQPLPPSPSPGPHARPELPERPPCKVRRRLFQE

SEQ ID NO: 33045 - protein, 304 aa, Homo sapiens
MFSVLSYGRLVARAVLGGLSQTDPRAGGGGGGDYGLVTAGCGFGKDFRKGLLKKGACYGDDACFVARHRSADVLGVADGVGGWRDYGVDPSQFSGTLMRTCERLVKEGRFVPSNPIGILTTSYCELLQNKVPLLGSSTACIVVLDRTSHRLHTANLGDSGFLVVRGGEVVHRSDEQQHYFNTPFQLSIAPPEAEGVVLSDSPDAADSTSFDVQLGDIILTATDGLFDNMPDYMILQELKKLKNSNYESIQQTARSIAEQAHELAYDPNYMSPFAQFACDNGLNVRGGKPDDITVLLSIVAEYTD

SEQ ID NO: 33046 - protein, 370 aa, Homo sapiens
MASSTTRGPRVSDLFSGLPPAVTTPANQSAEASAGNGSVAGADAPAVTPFQSLQLVHQLKGLIVLLYSVVVVVGLVGNCLLVLVIARVRRLHNVTNFLIGNLALSDVLMCTACVPLTLAYAFEPRGWVFGGGLCHLVFFLQPVTVYVSVFTLTTIAVDRYVVLVHPLRRRISLRLSAYAVLAIWALSAVLALPAAVHTYHVELKPHDVRLCEEFWGSQERQRQLYAWGLLLVTYLLPLLVILLSYVRVSVKLRNRVVPGCVTQSQADWDRARRRRTFCLLVVIVVVFAVCWLPLHVFNLLRDLDPHAIDPYAFGLVQLLCHWLAMSSACYNPFIYAWLHDSFREELRKLLVAWPRKIAPHGQNMTVSVVI

SEQ ID NO: 33047 - protein, 102 aa, Homo sapiens
MVRYRVRSLSERSHEVYRQQLHGQEQGHHGQEEQGLSPEHVEVYERTHGQSHYRRRHCSRRRLHRIHRRQHRSCRRRKRRSCRHRRRHRRGCRTRKRTCRRH

SEQ ID NO: 33048 - protein, 140 aa, Homo sapiens
MVRYRVRSLSERSHEVYRQQLHGQEQGHHGQEEQGLSPEHVEVYERTHGQSHYRRRHCSRRRLHRIHRRQHRSCRRRKRRSCRHRRRHRRESLGDPLNQNFLSQKAAEPGREHAEGTKLPGPLTPSWKLRKSRPKHQVRP

SEQ ID NO: 33049 - protein, 178 aa, Homo sapiens
MAAGTAAALAFLSQESRTRAGGVGGLRVPAPVTMDSFFFGCELSGHTRSFTFKVEEEDDAEHVLALTMLCLTEGAKDECNVVEVVARNHDHQEIAVPVANLKLSCQPMLSLDDFQLQPPVTFRLKSGSGPVRITGRHQIVTMSNDVSEEESEEEEEDSDEEEVELCPILPAKKQGGRP

SEQ ID NO: 33050 - protein, 219 aa, Homo sapiens
MVKYFLGQSVLRSSWDQVFAAFWQRYPNPYSKHVLTEDIVHREVTPDQKLLSRRLLTKTNRMPRWAERLFPANVAHSVYVLEDSIVDPQNQTMTTFTWNINHARLMVVEERCVYCVNSDNSGWTEIRREAWVSSSLFGVSRAVQEFGLARFKSNVTKTMKGFEYILAKLQGEAPSKTLVETAKEAKEKAKETALAATEKAKDLASKAATKKQQQQQQFV

SEQ ID NO: 33051 - protein, 208 aa, Homo sapiens
MVKYFLGQSVLRSSWDQVFAAFWQRYPNPYSKHVLTEDIVHREVTPDQKLLSRRLLTKTNRMPRWAERLFPANVAHSVYVLEDSIVDPQNQTMTTFTWNINHARLMVVEERCVYCVNSDNSGWTEIRREAWVSSSLFGVSRAVQEFGLARFKSNVTKTMKGFEYILAKLQAKEAKEKAKETALAATEKAKDLASKAATKKQQQQQQFV

SEQ ID NO: 33052 - protein, 189 aa, Homo sapiens
MGVSVDVHQVYKYPFEQVVASFLRKYPNPMDKNVISVKIMEEKRDESTGVIYRKRIAICQNVVPEILRKSLSTLVILCWKKVSILKVPNIQLEEESWLNPRERNMAIRSHCLTWTQYASMKEESVFRESMENPNWTEFIQRGRISITGVGFLNCVLETFASTFLRQGAQKGIRIMEMLLKEQCGAPLAE

SEQ ID NO: 33053 - protein, 148 aa, Homo sapiens
MDKNVISVKIMEEKRDESTGVIYRKRIAICQNVVPEILRKVSILKVPNIQLEEESWLNPRERNMAIRSHCLTWTQYASMKEESVFRESMENPNWTEFIQRGRISITGVGFLNCVLETFASTFLRQGAQKGIRIMEMLLKEQCGAPLAE

SEQ ID NO: 33054 - protein, 177 aa, Homo sapiens
MGVSVDVHQVYKYPFEQVVASFLRKYPNPMDKNVISVKIMEEKRDESTGVIYRKRIAICQNVVPEILRKVSILKVPNIQLEEESWLNPRERNMAIRSHCLTWTQYASMKEESVFRESMENPNWTEFIQRGRISITGVGFLNCVLETFASTFLRQGAQKGIRIMEMLLKEQCGAPLAE

SEQ ID NO: 33055 - protein, 499 aa, Homo sapiens
MAMAEGERTECAEPPRDEPPADGALKRAEELKTQANDYFKAKDYENAIKFYSQAIELNPSNAIYYGNRSLAYLRTECYGYALGDATRAIELDKKYIKGYYRRAASNMALGKFRAALRDYETVVKVKPHDKDAKMKYQECNKIVKQKAFERAIAGDEHKRSVVDSLDIESMTIEDEYSGPKLEDGKVTISFMKELMQWYKDQKKLHRKCAYQILVQVKEVLSKLSTLVETTLKETEKITVCGDTHGQFYDLLNIFELNGLPSETNPYIFNGDFVDRGSFSVEVILTLFGFKLLYPDHFHLLRGNHETDNMNQIYGFEGEVKAKYTAQMYELFSEVFEWLPLAQCINGKVLIMHGGLFSEDGVTLDDIRKIERNRQPPDSGPMCDLLWSDPQPQNGRSISKRGVSCQFGPDVTKAFLEENNLDYIIRSHEVKAEGYEVAHGGRCVTVFSAPNYCDQMGNKASYIHLQGSDLRPQFHQFTAVPHPNVKPMAYANTLLQLGMM

SEQ ID NO: 33056 - protein, 710 aa, Homo sapiens
MLSLQYPDVYRDETAVQDYHGHKICDPYAWLEDPDSEQTKAFVEAQNKITVPFLEQCPIRGLYKERMTELYDYPKYSCHFKKGKRYFYFYNTGLQNQRVLYVQDSLEGEARVFLDPNILSDDGTVALRGYAFSEDGEYFAYGLSASGSDWVTIKFMKVDGAKELPDVLERVKFSCMAWTHDGKGMFYNSYPQQDGKSDGTETSTNLHQKLYYHVLGTDQSEDILCAEFPDEPKWMGGAELSDDGRYVLLSIREGCDPVNRLWYCDLQQESSGIAGILKWVKLIDNFEGEYDYVTNEGTVFTFKTNRQSPNYRVINIDFRDPEESKWKVLVPEHEKDVLEWIACVRSNFLVLCYLHDVKNILQLHDLTTGALLKTFPLDVGSIVGYSGQKKDTEIFYQFTSFLSPGIIYHCDLTKEELEPRVFREVTVKGIDASDYQTVQIFYPSKDGTKIPMFIVHKKGIKLDGSHPAFLYGYGGFNISITPNYSVSRLIFVRHMGGILAVANIRGGGEYGETWHKGGILANKQNCFDDFQCAAEYLIKEGYTSPKRLTINGGSNGGLLVAACANQRPDLFGCVIAQVGVMDMLKFHKYTIGHAWTTDYGCSDSKQHFEWLVKYSPLHNVKLPEADDIQYPSMLLLTADHDDRVVPLHSLKFIATLQYIVGRSRKQSNPLLIHVDTKAGHGAGKPTAKVIEEVSDMFAFIARCLNVDWIP

SEQ ID NO: 33057 - protein, 305 aa, Homo sapiens
MAPLDLDKYVEIARLCKYLPENDLKRLCDYVCDLLLEESNVQPVSTPVTVCGDIHGQFYDLCELFRTGGQVPDTNYIFMGDFVDRGYYSLETFTYLLALKAKWPDRITLLRGNHESRQITQVYGFYDECQTKYGNANAWRYCTKVFDMLTVAALIDEQILCVHGGLSPDIKTLDQIRTIERNQEIPHKGAFCDLVWSDPEDVDTWAISPRGAGWLFGAKVTNEFVHINNLKLICRAHQLVHEGYKFMFDEKLVTVWSAPNYCYRCGNIASIMVFKDVNTREPKLFRAVPDSERVIPPRTTTPYFL

SEQ ID NO: 33058 - protein, 283 aa, Homo sapiens
MAPLDLDKYVEIARLCKYLPENDLKRLCDYVCDLLLEESNVQPVSTPVTVCGDIHGQGDFVDRGYYSLETFTYLLALKAKWPDRITLLRGNHESRQITQVYGFYDECQTKYGNANAWRYCTKVFDMLTVAALIDEQILCVHGGLSPDIKTLDQIRTIERNQEIPHKGAFCDLVWSDPEDVDTWAISPRGAGWLFGAKVTNEFVHINNLKLICRAHQLVHEGYKFMFDEKLVTVWSAPNYCYRCGNIASIMVFKDVNTREPKLFRAVPDSERVIPPRTTTPYFL

SEQ ID NO: 33059 - protein, 342 aa, Homo sapiens
MAPLDLDKYVEIARLCKYLPENDLKVSPICGLAPSGCGAPAGRPFLSPGPPPVFHFLRFLKERLCDYVCDLLLEESNVQPVSTPVTVCGDIHGQFYDLCELFRTGGQVPDTNYIFMGDFVDRGYYSLETFTYLLALKAKWPDRITLLRGNHESRQITQVYGFYDECQTKYGNANAWRYCTKVFDMLTVAALIDEQILCVHGGLSPDIKTLDQIRTIERNQEIPHKGAFCDLVWSDPEDVDTWAISPRGAGWLFGAKVTNEFVHINNLKLICRAHQLVHEGYKFMFDEKLVTVWSAPNYCYRCGNIASIMVFKDVNTREPKLFRAVPDSERVIPPRTTTPYFL

SEQ ID NO: 33060 - protein, 311 aa, Homo sapiens
MAEMDPVAEFPQPPGAARWAEVMARFAARLGAQGRRVVLVTSGGTKVPLEARPVRFLDNFSSGRRGATSAEAFLAAGYGVLFLYRARSAFPYAHRFPPQTWLSALRPSGPALSGLLSLEAEENALPGFAEALRSYQEAAAAGTFLAVEFTTLADYLHLLQAAAQALNPLGPSAMFYLAAAVSDFYVPVSEMPEHKIQSSGGPLQITMKMVPKLLSPLVKDWAPKAFIISFKLETDPAIVINRARKALEIYQHQVVVANILESRQSFVFIVTKDSETKLLLSEEEIEKGVEIEEKIVDNLQSRHTAFIGDRN

SEQ ID NO: 33061 - protein, 138 aa, Homo sapiens
MFYLAAAVSDFYVPVSEMPEHKIQSSGGPLQITMKMVPKLLSPLVKDWAPKAFIISFKLETDPAIVINRARKALEIYQHQVVVANILESRQSFVFIVTKDSETKLLLSEEEIEKGVEIEEKIVDNLQSRHTAFIGDRN

SEQ ID NO: 33062 - protein, 241 aa, Homo sapiens
MFLTRSEYDRGVNTFSPEGRLFQVEYAIEAIKLGSTAIGIQTSEGVCLAVEKRITSPLMEPSSIEKIVEIDAHIGCAMSGLIADAKTLIDKARVETQNHWFTYNETMTVESVTQAVSNLALQFGEEDADPGAMSRPFGVALLFGGVDEKGPQLFHMDPSGTFVQCDARAIGSASEGAQSSLQEVYHKSMTLKEAIKSSLIILKQVMEEKLNATNIELATVQPGQNFHMFTKEELEEVIKDI

SEQ ID NO: 33063 - protein, 183 aa, Homo sapiens
MEPSSIEKIVEIDAHIGCAMSGLIADAKTLIDKARVETQNHWFTYNETMTVESVTQAVSNLALQFGEEDADPGAMSRPFGVALLFGGVDEKGPQLFHMDPSGTFVQCDARAIGSASEGAQSSLQEVYHKSMTLKEAIKSSLIILKQVMEEKLNATNIELATVQPGQNFHMFTKEELEEVIKDI

SEQ ID NO: 33064 - protein, 214 aa, Homo sapiens
MELAAGSFSEEQFWEACAELQQPALAGADWQLLVETSGISIYRLLDKKTGLYEYKVFGVLEDCSPTLLADIYMDSDYRKQWDQYVKELYEQECNGETVVYWEVKYPFPMSNRDYVYLRQRRDLDMEGRKIHVILARSTSMPQLGERSGVIRVKQYKQSLAIESDGKKGSKVFMYYFDNPGGQIPSWLINWAAKNGVPNFLKDMARACQNYLKKT

SEQ ID NO: 33065 - protein, 142 aa, Homo sapiens
MDSDYRKQWDQYVKELYEQECNGETVVYWEVKYPFPMSNRDYVYLRQRRDLDMEGRKIHVILARSTSMPQLGERSGVIRVKQYKQSLAIESDGKKGSKVFMYYFDNPGGQIPSWLINWAAKNGVPNFLKDMARACQNYLKKT

SEQ ID NO: 33066 - protein, 201 aa, Homo sapiens
MEYLIGIQGPDYVLVASDRVAASNIVQMKDDHDKMFKMSEKILLLCVGEAGDTVQFAEYIQKNVQLYKMRNGYELSPTAAANFTRRNLADCLRSRTPYHVNLLLAGYDEHEGPALYYMDYLAALAKAPFAAHGYGAFLTLSILDRYYTPTISRERAVELLRKCLEELQKRFILNLPTFSVRIIDKNGIHDLDNISFPKQGS

SEQ ID NO: 33067 - protein, 780 aa, Homo sapiens
MASAELQGKYQKLAQEYSKLRAQNQVLKKGVVDEQANSAALKEQLKMKDQSLRKLQQEMDSLTFRNLQLAKRVELLQDELALSEPRGKKNKKSGESSSQLSQEQKSVFDEDLQKKIEENERLHIQFFEADEQHKHVEAELRSRLATLETEAAQHQAVVDGLTRKYMETIEKLQNDKAKLEVKSQTLEKEAKECRLRTEECQLQLKTLHEDLSGRLEESLSIINEKVPFNDTKYSQYNALNVPLHNRRHQLKMRDIAGQALAFVQDLVTALLNFHTYTEQRIQIFPVDSAIDTISPLNQKFSQYLHENASYVRPLEEGMLHLFESITEDTVTVLETTVKLKTFSEHLTSYICFLRKILPYQLKSLEEECESSLCTSALRARNLELSQDMKKMTAVFEKLQTYIALLALPSTEPDGLLRTNYSSVLTNVGAALHGFHDVMKDISKHYSQKAAIEHELPTATQKLITTNDCILSSVVALTNGAGKIASFFSNNLDYFIASLSYGPKAASGFISPLSAECMLQYKKKAAAYMKSLRKPLLESVPYEEALANRRILLSSTESREGLAQQVQQSLEKISKLEQEKEHWMLEAQLAKIKLEKENQRIADKLKNTGSAQLVGLAQENAAVSNTAGQDEATAKAVLEPIQSTSLIGTLTRTSDSEVPDVESREDLIKNHYMARIVELTSQLQLADSKSVHFYAECRALSKRLALAEKSKEALTEEMKLASQNISRLQDELTTTKRSYEDQLSMMSDHLCSMNETLSKQREEIDTLKMSSKGNSKKNKSR

SEQ ID NO: 33068 - protein, 769 aa, Homo sapiens
MASAELQGKYQKLAQEYSKLRAQNQVLKKGVVDEQANSAALKEQLKMKDQSLRKLQQEMDSLTFRNLQLAKRVELLQDELALSEPRGKKNKKSGESSSQLSQEQKSVFDEDLQKKIEENERLHIQFFEADEQHKHVEAELRSRLATLETEAAQHQAVVDGLTRKYMETIEKLQNDKAKLEVKSQTLEKEAKECRLRTEECQLQLKTLHEDLSGRLEESLSIINEKVPFNDTKYSQYNALNVPLHNRRHQLKMRDIAGQALAFVQDLVTALLNFHTYTEQRIQIFPVDSAIDTISPLNQKFSQYLHENASYVRPLEEGMLHLFESITEDTVTVLETTVKLKTFSEHLTSYICFLRKILPYQLKSLEEECESSLCTSALRARNLELSQDMKKMTAVFEKLQTYIALLALPSTEPDGLLRTNYSSVLTNVGAALHGFHDVMKDISKHYSQKAAIEHELPTATQKLITTNDCILSSVVALTNGAGKIASFFSNNLDYFIASLSYGPKAASGFISPLSAECMLQYKKKAAAYMKSLRKPLLESVPYEEALANRRILLSSTESREGLAQQVQQSLEKISKLEQEKEHWMLEAQLAKIKLEKENQRIADKLKNTGSAQLVGLAQENAAVSNTAGQDEATAKAVLEPIQSTSLVPDVESREDLIKNHYMARIVELTSQLQLADSKSVHFYAECRALSKRLALAEKSKEALTEEMKLASQNISRLQDELTTTKRSYEDQLSMMSDHLCSMNETLSKQREEIDTLKMSSKGNSKKNKSR

SEQ ID NO: 33069 - protein, 738 aa, Homo sapiens
MASAELQGKYQKLAQEYSKLRAQNQVLKKGVVDEQANSAALKEQLKMKDQSLRKLQQEMDSLTFRNLQLAKRVELLQDELALSEPRGKKNKKSGESSSQLSQEQKSVFDEDLQKKIEENERLHIQFFEADEQHKHVEAELRSRLATLETEAAQHQAVVDGLTRKYMETIEKLQNDKAKLEVKSQTLEKEAKECRLRTEECQLQLKTLHEDLSGRLEESLSIINEKVPFNDTKYSQYNALNVPLHNRRHQLKMRDIAGQALAFVQDLVTALLNFHTYTEQRIQIFPVDSAIDTISPLNQKFSQYLHENASYVRPLEEGMLHLFESITEDTVTVLETTVKLKTFSEHLTSYICFLRKILPYQLKSLEEECESSLCTSALRARNLELSQDMKKMTAVFEKLQTYIALLALPSTEPDGLLRTNYSSVLTNVGAALHGFHDVMKDISKHYSQKAAIEHELPTATQKLITTNDCILSSVVALTNGAGKIASFFSNNLDYFIASLSYGPKAASGFISPLSAECMLQYKKKAAAYMKSLRKVQQSLEKISKLEQEKEHWMLEAQLAKIKLEKENQRIADKLKNTGSAQLVGLAQENAAVSNTAGQDEATAKAVLEPIQSTSLVPDVESREDLIKNHYMARIVELTSQLQLADSKSVHFYAECRALSKRLALAEKSKEALTEEMKLASQNISRLQDELTTTKRSYEDQLSMMSDHLCSMNETLSKQREEIDTLKMSSKGNSKKNKSR

SEQ ID NO: 33070 - protein, 574 aa, Homo sapiens
MASAELQGKYQKLAQEYSKLRAQNQVLKKGVVDEQANSAALKEQLKMKDQSLRKLQQEMDSLTFRNLQLAKRVELLQDELALSEPRGKKNKKSGESSSQLSQEQKSVFDEDLQKKIEENERLHIQFFEADEQHKHVEAELRSRLATLETEAAQHQAVVDGLTRKYMETIEKLQNDKAKLEVKSQTLEKEAKECRLRTEECQLQLKTLHEDLSGRLEESLSIINEKVPFNDTKYSQYNALNVPLHNRRHQLKMRDIAGQALAFVQDLVTALLNFHTYTEQRIQIFPVDSAIDTISPLNQKFSQYLHENASYVRPLEEGMLHLFESITEDTVTVLETTVKLKTFSEHLTSYICFLRKILPYQLKSLEEECESSLCTSALRARNLELSQDMKKMTAVFEKLQTYIALLALPSTEPDGLLRTNYSSVLTNVGAALHGFHDVMKDISKHYSQKAAIEHELPTATQKLITTNDCILSSVVALTNGAGKIASFFSNNLDYFIASLSYGPKAASGFISPLSAECMLQYKKKAAAYMKSLRKPLLESVPYEEALANRRILLSSTESREGLAQQVWHWENYGNC

SEQ ID NO: 33071 - protein, 363 aa, Homo sapiens
MASAELQGKYQKLAQEYSKLRAQNQVLKKGVVDEQANSAALKEQLKMKDQSLRKLQQEMDSLTFRNLQLAKRVELLQDELALSEPRGKKNKKSGESSSQLSQEQKSVFDEDLQKKIEENERLHIQFFEADEQHKHVEAELRSRLATLETEAAQHQAVVDGLTRKYMETIEKLQNDKAKLEVKSQTLEKEAKECRLRTEECQLQLKTLHEDLSGRLEESLSIINEKVPFNDTKYSQYNALNVPLHNRRHQLKMRDIAGQALAFVQDLVTALLNFHTYTEQRIQIFPVDSAIDTISPLNQKFSQYLHENASYVRPLEEGMLHLFESITEDTVTVLETTVKLKTFSEHLTSYICFLRKILPYQLKR

SEQ ID NO: 33072 - protein, 1122 aa, Homo sapiens
MEPSEVPSQISKDNFLEVPNLSDSLCEDEEVTFQPGFSPQPSRRGSDSSEDIYLDTPSSGTRRVSFADSFGFNLVSVKEFDCWELPSASTTFDLGTDIFHTEEYVLAPLFDLPSSKEDLMQQLQIQKAILESTESLLGSTSIKGIIRVLNVSFEKLVYVRMSLDDWQTHYDILAEYVPNSCDGETDQFSFKIVLVPPYQKDGSKVEFCIRYETSVGTFWSNNNGTNYTFICQKKEQEPEPVKPWKEVPNRQIKGCLKVKSSKEESSVTSEENNFENPKNTDTYIPTIICSHEDKEDLEASNRNVKDVNREHDEHNEKELELMINQHLIRTRSTASRDERNTFSTDPVNFPNKAEGLEKKQIHGEICTDLFQRSLSPSSSAESSVKGDFYCNEKYSSGDDCTHQPSEETTSNMGEIKPSLGDTSSDELVQLHTGSKEVLDDNANPAHGNGTVQIPCPSSDQLMAGNLNKKHEGGAKNIEVKDLGCLRRDFHSDTSACLKESTEEGSSKEDYYGNGKDDEEQRIYLGVNEKQRKNFQTILHDQERKMGNPKISVAGIGASNRDLATLLSEHTAIPTRAITADVSHSPRTNLSWEEAVLTPEHHHLTSEGSALGGITGQVCSSRTGNVLRNDYLFQVEEKSGGINSEDQDNSPQHKQSWNVLESQGKSRENKTNITEHIKGQTDCEDVWGKRDNTRSLKATTEELFTCQETVCCELSSLADHGITEKAEAGTAYIIKTTSESTPESMSAREKAIIAKLPQETARSDRPIEVKETAFDPHEGRNDDSHYTLCQRDTVGVIYDNDFEKESRLGICNVRVDEMEKEETMSMYNPRKTHDREKCGTGNITSVEESSWVITEYQKATSKLDLQLGMLPTDKTVFSENRDLRQVQELSKKTDSDAIVHSAFNSDTNRAPQNSSPFSKHHTEISVSTNEQAIAVENAVTTMASQPISTKSENICNSTREIQGIEKHPYPESKPEEVSRSSGIVTSGSRKERCIGQIFQTEEYSVEKSLGPMILINKPLENMEEARHENEGLVSSGQSLYTSGEKESDSSASTSLPVEESQAQGNESLFSKYTNSKIPYFLLFLIFLITVYHYDLMIGLTFYVLSLSWLSWEEGRQKESVKKK

SEQ ID NO: 33073 - protein, 74 aa, Homo sapiens
MEPSEVPSQISKDNFLEVPNLSDSLCEDEEVTFQPGFSPQPSRRGSDSSEDIYLDTPSSERTRAGACKTMERSS

SEQ ID NO: 33074 - protein, 371 aa, Homo sapiens
MPANFTEGSFDSSGTGQTLDSSPVACTETVTFTEVVEGKEWGSFYYSFKTEQLITLWVLFVFTIVGNSVVLFSTWRRKKKSRMTFFVTQLAITDSFTGLVNILTDINWRFTGDFTAPDLVCRVVRYLQVVLLYASTYVLVSLSIDRYHAIVYPMKFLQGEKQARVLIVIAWSLSFLFSIPTLIIFGKRTLSNGEVQCWALWPDDSYWTPYMTIVAFLVYFIPLTIISIMYGIVIRTIWIKSKTYETVISNCSDGKLCSSYNRGLISKAKIKAIKYSIIIILAFICCWSPYFLFDILDNFNLLPDTQERFYASVIIQNLPALNSAINPLIYCVFSSSISFPCREQRSQDSRMTFRERTERHEMQILSKPEFI

SEQ ID NO: 33075 - protein, 305 aa, Homo sapiens
MPANFTEGSFDSSGTGQTLDSSPVACTETVTFTEVVEGKEWGSFYYSFKTEQLITLWVLFVFTIVGNSVVLFSTWRRKKKSRMTFFVTQLAITEKQARVLIVIAWSLSFLFSIPTLIIFGKRTLSNGEVQCWALWPDDSYWTPYMTIVAFLVYFIPLTIISIMYGIVIRTIWIKSKTYETVISNCSDGKLCSSYNRGLISKAKIKAIKYSIIIILAFICCWSPYFLFDILDNFNLLPDTQERFYASVIIQNLPALNSAINPLIYCVFSSSISFPCREQRSQDSRMTFRERTERHEMQILSKPEFI

SEQ ID NO: 33076 - protein, 390 aa, Homo sapiens
MPANFTEGSFDSSGTGQTLDSSPVACTETVTFTEVVEGKEWGSFYYSFKTEQLITLWVLFVFTIVGNSVVLFSTWRRKKKSRMTFFVTQLAITDSFTGLVNILTDINWRFTGDFTAPDLVCRVVRYLQVVLLYASTYVLVSLSIDRYHAIVYPMKFLQGEKQARVLIVIAWSLSFLFSIPTLIIFGKRTLSNGEVQCWALWPDDSYWTPYMTIVAFLVYFIPLTIISIMYGIVIRTIWIKSKTYETVISNCSDGKLCSSYNRGLISKAKIKAIKYSIIIILAFICCWSPYFLFDILDNFNLLPDTQERFYASVIIQNLPALNSAINPLIYCVFSSSISFPCRANSSVYLLACDVSVLWALVLTSEKESCESWRRKGAKITGFQNDVPGEN

SEQ ID NO: 33077 - protein, 377 aa, Homo sapiens
MPANFTEGSFDSSGTGQTLDSSPVACTETVTFTEVVEGKEWGSFYYSFKTEQLITLWVLFVFTIVGNSVVLFSTWRRKKKSRMTFFVTQLAITDSFTGLVNILTDINWRFTGDFTAPDLVCRVVRYLQVVLLYASTYVLVSLSIDRYHAIVYPMKFLQGEKQARVLIVIAWSLSFLFSIPTLIIFGKRTLSNGEVQCWALWPDDSYWTPYMTIVAFLVYFIPLTIISIMYGIVIRTIWIKSKTYETVISNCSDGKLCSSYNRGLISKAKIKAIKYSIIIILAFICCWSPYFLFDILDNFNLLPDTQERFYASVIIQNLPALNSAINPLIYCVFSSSISFPCRVIRLRQLQEAALMLCPQRENWKGTWPGVPSWALPR

SEQ ID NO: 33078 - protein, 366 aa, Homo sapiens
MPANFTEGSFDSSGTGQTLDSSPVACTETVTFTEVVEGKEWGSFYYSFKTEQLITLWVLFVFTIVGNSVVLFSTWRRKKKSRMTFFVTQLAITDINWRFTGDFTAPDLVCRVVRYLQVVLLYASTYVLVSLSIDRYHAIVYPMKFLQGEKQARVLIVIAWSLSFLFSIPTLIIFGKRTLSNGEVQCWALWPDDSYWTPYMTIVAFLVYFIPLTIISIMYGIVIRTIWIKSKTYETVISNCSDGKLCSSYNRGLISKAKIKAIKYSIIIILAFICCWSPYFLFDILDNFNLLPDTQERFYASVIIQNLPALNSAINPLIYCVFSSSISFPCRVIRLRQLQEAALMLCPQRENWKGTWPGVPSWALPR

SEQ ID NO: 33079 - protein, 158 aa, Homo sapiens
MPANFTEGSFDSSGTGQTLDSSPVACTETVTFTEVVEGKEWGSFYYSFKTEQLITLWVLFVFTIVGNSVVLFSTWRRKKKSRMTFFVTQLAITGCAALRLYLRPGVPQHRQIPCHRLPHEVPSRRKASQGPHCDRLEPVFSVLHSHPDHIWEEDTVQR

SEQ ID NO: 33080 - protein, 136 aa, Homo sapiens
MPANFTEGSFDSSGTGQTLDSSPVACTETVTFTEVVEGKEWGSFYYSFKTEQLITLWVLFVFTIVGNSVVLFSTWRRKKKSRMTFFVTQLAITDSFTGLVNILTDINWRFTGDFTAPDLVCRVVRYLQKSKPGSSL

SEQ ID NO: 33081 - protein, 143 aa, Homo sapiens
MPANFTEGSFDSSGTGQTLDSSPVACTETVTFTEVVEGKEWGSFYYSFKTEQLITLWVLFVFTIVGNSVVLFSTWRRKKKSRMTFFVTQLAITDSFTGLVNILTDINWRFTGDFTAPDLVCRVVRYLQVMVMKLFHIQKMNME

SEQ ID NO: 33082 - protein, 94 aa, Homo sapiens
MPANFTEGSFDSSGTGQTLDSSPVACTETVTFTEVVEGKEWGSFYYSFKTEQLITLWVLFVFTIVGNSVVLFSTWRRKKKSRMTFFVTQLAITV

SEQ ID NO: 33083 - protein, 430 aa, Homo sapiens
MEGEPSQPPNSSWPLSQNGTNTEATPATNLTFSSYYQHTSPVAAMFIVAYALIFLLCMVGNTLVCFIVLKNRHMHTVTNMFILNLAVSDLLVGIFCMPTTLVDNLITGWPFDNATCKMSGLVQGMSVSASVFTLVAIAVERFRCIVHPFREKLTLRKALVTIAVIWALALLIMCPSAVTLTVTREEHHFMVDARNRSYPLYSCWEAWPEKGMRRVYTTVLFSHIYLAPLALIVVMYARIARKLCQAPGPAPGGEEAADPRASRRRARVVHMLVMVALFFTLSWLPLWALLLLIDYGQLSAPQLHLVTVYAFPFAHWLAFFNSSANPIIYGYFNENFRRGFQAAFRARLCPRPSGSHKEAYSERPGGLLHRRVFVVVRPSDSGLPSESGPSSGAPRPGRLPLRNGRVAHHGLPREGPGCSHLPLTIPAWDI

SEQ ID NO: 33084 - protein, 397 aa, Homo sapiens
MFCCLGYEWLSGGCKTWHSAWVINTLADHHHRGTDFGGSPWLRIIIAFPRSYKVVLTLWTVYLWLSFLKTIFQSENGHDVSTDVQQRARRSNRRRQEGLRSICMHTKKRVSSFPGNKIGLKDVITLRRHVETKGRAKIRKMKVTTKINHHDKINGKRKTAKKQKLSVKECEHAEKERQVSEAEENGKLDMKEIHTYMKMFQRAQELRRRAEDYHKCKIPPSARKALCNWVRMAAAEHRHSSGLPYWPYLTAETLKNRMGHQPPPPTQQHSITDNSLSLKTPPECLLTPLPPSADDNLKTPPECLLTPLPPSAPPSADDNLKTPPLATQEAEAEKPPKPKRWRAAEMESPPEPKRRRAAEVESPPEPKRRRAAEVEPSSPEPKRRRLSKLRTGHCTQA

SEQ ID NO: 33085 - protein, 677 aa, Homo sapiens
MDDPDCDSTWEEDEEDAEDAEDEDCEDGEAAGARDADAGDEDEESEEPRAARPSSFQSRMTGSRNWRATRDMCRYRHNYPDLVERDCNGDTPNLSFYRNEIRFLPNGCFIEDILQNWTDNYDLLEDNHSYIQWLFPLREPGVNWHAKPLTLREVEVFKSSQEIQERLVRAYELMLGFYGIRLEDRGTGTVGRAQNYQKRFQNLNWRSHNNLRITRILKSLGELGLEHFQAPLVRFFLEETLVRRELPGVRQSALDYFMFAVRCRHQRRQLVHFAWEHFRPRCKFVWGPQDKLRRFKPSSLPHPLEGSRKVEEEGSPGDPDHEASTQGRTCGPEHSKGGGRVDEGPQPRSVEPQDAGPLERSQGDEAGGHGEDRPEPLSPKESKKRKLELSRREQPPTEPGPQSASEVEKIALNLEGCALSQGSLRTGTQEVGGQDPGEAVQPCRQPLGARVADKVRKRRKVDEGAGDSAAVASGGAQTLALAGSPAPSGHPKAGHSENGVEEDTEGRTGPKEGTPGSPSETPGPSPAGPAGDEPAESPSETPGPRPAGPAGDEPAESPSETPGPRPAGPAGDEPAESPSETPGPSPAGPTRDEPAESPSETPGPRPAGPAGDEPAESPSETPGPRPAGPAGDEPAESPSETPGPSPAGPTRDEPAKAGEAAELQDAEVESSAKSGKP

SEQ ID NO: 33086 - protein, 657 aa, Homo sapiens
MDDPDCDSTWEEDEEDAEDAEDEDCEDGEAAGARDADAGDEDEESEEPRAARPSSFQSRMTGSRNWRATRDMCRYRHNYPDLVERDCNGDTPNLSFYRNEIRFLPNGCFIEDILQNWTDNYDLLEDNHSYIQWLFPLREPGVNWHAKPLTLREVEVFKSSQEIQERLVRAYELMLGFYGIRLEDRGTGTVGRAQNYQKRFQNLNWRSHNNLRITRILKSLGELGLEHFQAPLVRFFLEETLVRRELPGVRQSALDYFMFAVRCRHQRRQLVHFAWEHFRPRCKFVWGPQDKLRRFKPSSLPHPLEGSRKVEEEGSPGDPDHEASTQGRTCGPEHSKGGGRVDEGPQPRSVEPQDAGPLERSQGDEAGGHGEDRPEPLSPKESKKRKLELSRREQPPTEPGPQSASEVEKIALNLEGCALSQGSLRTGTQEVGGQDPGEAVQPCRQPLGARVADKVRKRRKVDEGAGDSAAVASGGAQTLALAGSPAPSGHPKAGHSENGVEEDTEGRTGPKEGTPGSPSETPGPSPAGPAGDEPAESPSETPGPRPAGPAGDEPAESPSETPGPSPAGPTRDEPAESPSETPGPRPAGPAGDEPAESPSETPGPRPAGPAGDEPAESPSETPGPSPAGPTRDEPAKAGEAAELQDAEVESSAKSGKP

SEQ ID NO: 33087 - protein, 429 aa, Homo sapiens
MATLSFVFLLLGAVSWPPASASGQEFWPGQSAADILSGAASRRRYLLYDVNPPEGFNLRRDVYIRIASLLKTLLKTEEWVLVLPPWGRLYHWQSPDIHQVRIPWSEFFDLPSLNKNIPVIEYEQFIAESGGPFIDQVYVLQSYAEGWKEGTWEEKVDERPCIDQLLYSQDKHEYYRGWFWGYEETRGLNVSCLSVQGSASIVAPLLLRNTSARSVMLDRAENLLHDHYGGKEYWDTRRSMVFARHLREVGDEFRSRHLNSTDDADRIPFQEDWMKMKVKLGSALGGPYLGVHLRRKDFIWGHRQDVPSLEGAVRKIRSLMKTHRLDKVFVATDAVRKEYEELKKLLPEMVRFEPTWEELELYKDGGVAIIDQWICAHARFFIGTSVSTFSFRIHEEREILGLDPKTTYNRFCGDQEKACEQPTHWKITY

SEQ ID NO: 33088 - protein, 424 aa, Homo sapiens
MATLSFVFLLLGAVSWPPASASGQEFWPGQSAADILSGAASRRRYLLYDVNPPEGFNLRRDVYIRIASLLKTLLKTEEWVLVLPPWGRLYHWQSPDIHQVRIPWSEFFDLPSLNKNIPVIEYEQFIAESGGPFIDQVYVLQSYAEGWKEGTWEEKVDERPCIDQLLYSQDKHEYYRGWFWGYEETRGLNVSCLSVQGSASIVAPLLLRNTSARSVMLDRAENLLHDHYGGKEYWDTRRSMVFARHLREVGDEFRSRHLNSTDDADRIPFQEDWMKMKVKLGSALGGPYLGVHLRRKDFIWGHRQDVPSLEGAVRKIRSLMKTHRLDKVFVATDAVRKEYEELKKLLPEMVRFEPTWEELELYKDGGVAIIDQWICAHARCLPTSLSAESGSGGFQRFFCPKYSVSEQMVACVHSGHFHTVCLLV

SEQ ID NO: 33089 - protein, 380 aa, Homo sapiens
MATLSFVFLLLGAVSWPPASASGQEFWPGQSAADILSGAASRRRYLLYDVNPPEGFNLRRDVYIRIASLLKTLLKTEEWVLVLPPWGRLYHWQSPDIHQVRIPWSEFFDLPSLNKNIPVIEYEQFIAESGGPFIDQVYVLQSYAEGWKEGTWEEKVDERPCIDQLLYSQDKHEYYRGWFWGYEETRGLNVSCLSVQGSASIVAPLLLRNTSARSVMLDRAENLLHDHYGGKEYWDTRRSMVFARHLREVGDEFRSRHLNSTDDADRIPFQEDWMKMKVKLGSALGGPYLGVHLRRKDFIWGHRQDVPSLEGAVRKIRSLMKTHRLDKVFVATDAVRKEYEELKKLLPEMVRFEPTWEELELYKDGGVAIIDQWICAHASS

SEQ ID NO: 33090 - protein, 345 aa, Homo sapiens
MPARALLPRRMGHRTLASTPALWASIPCPRSELRLDLVLPSGQSFRWREQSPAHWSGVLADQVWTLTQTEEQLHCTVYRGDKSQASRPTPDELEAVRKYFQLDVTLAQLYHHWGSVDSHFQEVAQKFQGVRLLRQDPIECLFSFICSSNNNIARITGMVERLCQAFGPRLIQLDDVTYHGFPSLQALAGPEVEAHLRKLGLGYRARYVSASARAILEEQGGLAWLQQLRESSYEEAHKALCILPGVGTKVADCICLMALDKPQAVPVDVHMWHIAQRDYSWHPTTSQAKGPSPQTNKELGNFFRSLWGPYAGWAQAVLFSADLRQSRHAQEPPAKRRKGSKGPEG

SEQ ID NO: 33091 - protein, 324 aa, Homo sapiens
MPARALLPRRMGHRTLASTPALWASIPCPRSELRLDLVLPSGQSFRWREQSPAHWSGVLADQVWTLTQTEEQLHCTVYRGDKSQASRPTPDELEAVRKYFQLDVTLAQLYHHWGSVDSHFQEVAQKFQGVRLLRQDPIECLFSFICSSNNNIARITGMVERLCQAFGPRLIQLDDVTYHGFPSLQALAGPEVEAHLRKLGLGYRARYVSASARAILEEQGGLAWLQQLRESSYEEAHKALCILPGVGTKVADCICLMALDKPQAVPVDVHMWHIAQRDYSWHPTTSQAKGPSPQTNKELGNFFRSLWGPYAGWAQAVSVPRCPP

SEQ ID NO: 33092 - protein, 410 aa, Homo sapiens
MPARALLPRRMGHRTLASTPALWASIPCPRSELRLDLVLPSGQSFRWREQSPAHWSGVLADQVWTLTQTEEQLHCTVYRGDKSQASRPTPDELEAVRKYFQLDVTLAQLYHHWGSVDSHFQEVAQKFQGVRLLRQDPIECLFSFICSSNNNIARITGMVERLCQAFGPRLIQLDDVTYHGFPSLQALAGPEVEAHLRKLGLGYRARYVSASARAILEEQGGLAWLQQLRESSYEEAHKALCILPGVGTKVADCICLMALDKPQAVPVDVHMWHIAQRDYSWHPTTSQAKGPSPQTNKELGNFFRSLWGPYAGWAQATPPSYRCCSVPTCANPAMLRSHQQSAERVPKGRKARWGTLDKEIPQAPSPPFPTSLSPSPPSLMLGRGLPVTTSKARHPQIKQSVCTTRWGGGY

SEQ ID NO: 33093 - protein, 424 aa, Homo sapiens
MPARALLPRRMGHRTLASTPALWASIPCPRSELRLDLVLPSGQSFRWREQSPAHWSGVLADQVWTLTQTEEQLHCTVYRGDKSQASRPTPDELEAVRKYFQLDVTLAQLYHHWGSVDSHFQEVAQKFQGVRLLRQDPIECLFSFICSSNNNIARITGMVERLCQAFGPRLIQLDDVTYHGFPSLQALAGPEVEAHLRKLGLGYRARYVSASARAILEEQGGLAWLQQLRESSYEEAHKALCILPGVGTKVADCICLMALDKPQAVPVDVHMWHIAQRDYSWHPTTSQAKGPSPQTNKELGNFFRSLWGPYAGWAQAGLLGNAFDGHQLLRPLIFCQDHLREGPPIGRGDSQGEELEPQLPSSLSSIPYGFCDHCWTKDVDDPPLVTHPSPGSRDGHMTQAWPVKVVSPLATVIGHVMQASLLAL

SEQ ID NO: 33094 - protein, 357 aa, Homo sapiens
MPARALLPRRMGHRTLASTPALWASIPCPRSELRLDLVLPSGQSFRWREQSPAHWSGVLADQVWTLTQTEEQLHCTVYRGDKSQASRPTPDELEAVRKYFQLDVTLAQLYHHWGSVDSHFQEVAQKFQGVRLLRQDPIECLFSFICSSNNNIARITGMVERLCQAFGPRLIQLDDVTYHGFPSLQALAGPEVEAHLRKLGLGYRARYVSASARAILEEQGGLAWLQQLRESSYEEAHKALCILPGVGTKGLLGNAFDGHQLLRPLIFCQDHLREGPPIGRGDSQGEELEPQLPSSLSSIPYGFCDHCWTKDVDDPPLVTHPSPGSRDGHMTQAWPVKVVSPLATVIGHVMQASLLAL

SEQ ID NO: 33095 - protein, 195 aa, Homo sapiens
MPARALLPRRMGHRTLASTPALWASIPCPRSELRLDLVLPSGQSFRWREQSPAHWSGVLADQVWTLTQTEEQLHCTVYRGDKSQASRPTPDELEAVRKYFQLDVTLAQLYHHWGSVDSHFQEVAQKFQGVRLLRQDPIECLFSFICSSNNNIARITGMVERLCQAFGPRLIQLDDVTYHGFPSLQALAGPPWQCI

SEQ ID NO: 33096 - protein, 356 aa, Homo sapiens
MPARALLPRRMGHRTLASTPALWASIPCPRSELRLDLVLPSGQSFRWREQSPAHWSGVLADQVWTLTQTEEQLHCTVYRGDKSQASRPTPDELEAVRKYFQLDVTLAQLYHHWGSVDSHFQEVAQKFQGVRLLRQDPIECLFSFICSSNNNIARITGMVERLCQAFGPRLIQLDDVTYHGFPSLQALAGPEVEAHLRKLGLGYRARYVSASARAILEEQGGLAWLQQLRESSYEEAHKALCILPGVGTKVADCICLMALDKPQAVPVDVHMWHIAQRDYSWHPTTSQAKGPSPQTNKELGNFFRSLWGPYAGWAQALCQVITTFMTFLGPHRLDQMPPEELQTSSSRLGGPPWQCI

SEQ ID NO: 33097 - protein, 322 aa, Homo sapiens
MPARALLPRRMGHRTLASTPALWASIPCPRSELRLDLVLPSGQSFRWREQSPAHWSGVLADQVWTLTQTEEQLHCTVYRGDKSQASRPTPDELEAVRKYFQLDVTLAQLYHHWGSVDSHFQEVAQKFQGVRLLRQDPIECLFSFICSSNNNIARITGMVERLCQAFGPRLIQLDDVTYHGFPSLQALAGPEVEAHLRKLGLGYRARYVSASARAILEEQGGLAWLQQLRESSYEEAHKALCILPGVGTKVADCICLMALDKPQAVPVDVHMWHIAQRDYSWHPTTSQAKGPSPQTNKELGNFFRSLWGPYAGWAQAAGSDAS

SEQ ID NO: 33098 - protein, 901 aa, Homo sapiens
MEPPLPVGAQPLATVEGMEMKGPLREPCALTLAQRNGQYELIIQLHEKEQHVQDIIPINSHFRCVQEAEETLLIDIASNSGCKIRVQGDWIRERRFEIPDEEHCLKFLSAVLAAQKAQSQLLVPEQKDSSSWYQKLDTKDKPSVFSGLLGFEDNFSSMNLDKKINSQNQPTGIHREPPPPPFSVNKMLPREKEASNKEQPKVTNTMRKLFVPNTQSGQREGLIKHILAKREKEYVNIQTFRFFVGTWNVNGQSPDSGLEPWLNCDPNPPDIYCIGFQELDLSTEAFFYFESVKEQEWSMAVERGLHSKAKYKKVQLVRLVGMMLLIFARKDQCRYIRDIATETVGTGIMGKMGNKGGVAVRFVFHNTTFCIVNSHLAAHVEDFERRNQDYKDICARMSFVVPNQTLPQLNIMKHEVVIWLGDLNYRLCMPDANEVKSLINKKDLQRLLKFDQLNIQRTQKKAFVDFNEGEIKFIPTYKYDSKTDRWDSSGKCRVPAWCDRILWRGTNVNQLNYRSHMELKTSDHKPVSALFHIGVKVVDERRYRKVFEDSVRIMDRMENDFLPSLELSRREFVFENVKFRQLQKEKFQISNNGQVPCHFSFIPKLNDSQYCKPWLRAEPFEGYLEPNETVDISLDVYVSKDSVTILNSGEDKIEDILVLHLDRGKDYFLTISGNYLPSCFGTSLEALCRMKRPIREVPVTKLIDLEEDSFLEKEKSLLQMVPLDEGASERPLQVPKEIWLLVDHLFKYACHQEDLFQTPGMQEELQQIIDCLDTSIPETIPGSNHSVAEALLIFLEALPEPVICYELYQRCLDSAYDPRICRQVISQLPRCHRNVFRYLMAFLRELLKFSEYNSVNANMIATLFTSLLLRPPPNLMARQTPSDRQRAIQFLLGFLLGSEED

SEQ ID NO: 33099 - protein, 893 aa, Homo sapiens
MEPPLPVGAQPLATVEGMEMKGPLREPCALTLAQRNGQYELIIQLHEKEQHVQDIIPINSHFRCVQEAEETLLIDIASNSGCKIRVQGDWIRERRFEIPDEEHCLKFLSAVLAAQKAQSQLLVPEQKDSSSWYQKLDTKDKPSVFSGLLGFEDNFSSMNLDKKINSQNQPTGIHREPPPPPFSVNKMLPREKEASNKEQPKVTNTMRKLFVPNTQSGQREGLIKHILAKREKEYVNIQTFRFFVGTWNVNGQSPDSGLEPWLNCDPNPPDIYCIGFQELDLSTEAFFYFESVKEQEWSMAVERGLHSKAKYKKVQLVRLVGMMLLIFARKDQCRYIRDIATETVGTGIMGKMGNKGGVAVRFVFHNTTFCIVNSHLAAHVEDFERRNQDYKDICARMSFVVPNQTLPQLNIMKHEVVIWLGDLNYRLCMPDANEVKSLINKKDLQRLLKFDQLNIQRTQKKAFVDFNEGEIKFIPTYKYDSKTDRWDSSGKCRVPAWCDRILWRGTNVNQLNYRSHMELKTSDHKPVSALFHIGVKVVDERRYRKVFEDSVRIMDRMENDFLPSLELSRREFVFENVKFRQLQKEKFQISNNGQVPCHFSFIPKLNDSQYCKPWLRAEPFEGYLEPNETVDISLDVYVSKDSVTILNSGEDKIEDILVLHLDRGKDYFLTISGNYLPSCFGTSLEALCRMKRPIREVPVTKLIDLEKSLLQMVPLDEGASERPLQVPKEIWLLVDHLFKYACHQEDLFQTPGMQEELQQIIDCLDTSIPETIPGSNHSVAEALLIFLEALPEPVICYELYQRCLDSAYDPRICRQVISQLPRCHRNVFRYLMAFLRELLKFSEYNSVNANMIATLFTSLLLRPPPNLMARQTPSDRQRAIQFLLGFLLGSEED

SEQ ID NO: 33100 - protein, 289 aa, Homo sapiens
MGTLSCDSTPRLATAPLGRRVTEGQIPETGLRKSCGTATLENGSGPGLYVLPSTVGFINHDCTRVASPAYSLVRRPSEAPPQDTSPGPIYFLDPKVTRFGRSCTPAYSMQGRAKSRGPEVTPGPGAYSPEKVPPVRHRTPPAFTLGCRLPLKPLDTSAPAPNAYTMPPLWGSQIFTKPSSPSYTVVGRTPPARPPQDPAEIPGPGQYDSPDANTYRQRLPAFTMLGRPRAPRPLEETPGPGAHCPEQVTVNKARAPAFSMGIRHSKRASTMAATTPSRPAGHRLPGRCC

SEQ ID NO: 33101 - protein, 253 aa, Homo sapiens
MGTLSCDSTPRLATAPLGRRVTEGQIPETGLRKSCGTATLENAPPQDTSPGPIYFLDPKVTRFGRSCTPAYSMQGRAKSRGPEVTPGPGAYSPEKVPPVRHRTPPAFTLGCRLPLKPLDTSAPAPNAYTMPPLWGSQIFTKPSSPSYTVVGRTPPARPPQDPAEIPGPGQYDSPDANTYRQRLPAFTMLGRPRAPRPLEETPGPGAHCPEQVTVNKARAPAFSMGIRHSKRASTMAATTPSRPAGHRLPGRCC

SEQ ID NO: 33102 - protein, 510 aa, Homo sapiens
MRPGLSFLLALLFFLGQAAGDLGDVGPPIPSPGFSSFPGVDSSSSFSSSSRSGSSSSRSLGSGGSVSQLFSNFTGSVDDRGTCQCSVSLPDTTFPVDRVERLEFTAHVLSQKFEKELSKVREYVQLISVYEKKLLNLTVRIDIMEKDTISYTELDFELIKVEVKEMEKLVIQLKESFGGSSEIVDQLEVEIRNMTLLVEKLETLDKNNVLAIRREIVALKTKLKECEASKDQNTPVVHPPPTPGSCGHGGVVNISKPSVVQLNWRGFSYLYGAWGRDYSPQHPNKGLYWVAPLNTDGRLLEYYRLYNTLDDLLLYINARELRITYGQGSGTAVYNNNMYVNMYNTGNIARVNLTTNTIAVTQTLPNAAYNNRFSYANVAWQDIDFAVDENGLWVIYSTEASTGNMVISKLNDTTLQVLNTWYTKQYKPSASNAFMVCGVLYATRTMNTRTEEIFYYYDTNTGKEGKLDIVMHKMQEKVQSINYNPFDQKLYVYNDGYLLNYDLSVLQKPQ

SEQ ID NO: 33103 - protein, 309 aa, Homo sapiens
MAHINCTQATEFILVGLTDHQELKMPLFVLFLSIYLFTVVGNLGLILLIRADTSLNTPMYFFLSNLAFVDFCYSSVITPKMLGNFLYKQNVISFDACATQLGCFLTFMISESLLLASMAYDRYVAICNPLLYMVVMTPGICIQLVAVPYSYSFLMALFHTILTFRLSYCHSNIVNHFYCDDMPLLRLTCSDTRFKQLWIFACAGIMFISSLLIVFVSYMFIISAILRMHSAEGRQKAFSTCGSHMLAVTIFYGTLIFMYLQPSSSHALDTDKMASVFYTVIIPMLNPLIYSLQNKEVKEALKKIIINKN

SEQ ID NO: 33104 - protein, 316 aa, Homo sapiens
MPGQNYRTISEFILSGFSAFPQQLLPVLFLLYLLMFLFTLLGNLLIMATVWIERRLHTPMYLFLCALSISEILFTVAITPRMLADLLFTHRSITFVACAIQMFFSFMFGFTHSFLLMVMGYDHYVTICHPLHYNMLMSPRGCAHLVAWTWAGGSVMGMMVTMMVFHLTFCGSNVIHHFLCHVLSLLKLACGSKTSSVIMGVMLVCVTALIGCLFLIILSFVFIVAAILRIPSAEGRHKTFSTCVSHLTVVVMHYSFASLIYLKPKGLHSMYSDALMATTYTVFTPFLSPIIFSLRNKELKNAINKNFCRRFCPLSS

SEQ ID NO: 33105 - protein, 271 aa, Homo sapiens
MQAACWYVLFLLQPTVYLVTCANLTNGGKSELLKSGSSKSTLKHIWTESSKDLSISRLLSQTFRGKENDTDLDLRYDTPEPYSEQDLWDWLRNSTDLQEPRPRAKRRPIVKTGKFKKMFGWGDFHSNIKTVKLNLLITGKIVDHGNGTFSVYFRHNSTGQGNVSVSLVPPTKIVEFDLAQQTVIDAKDSKSFNCRIEYEKVDKATKNTLCNYDPSKTCYQEQTQSHVSWLCSKPFKVICIYISFYSTDYKLVQKVCPDYNYHSDTPYFPSG

SEQ ID NO: 33106 - protein, 301 aa, Homo sapiens
MEFVLLGFSDIPNLHWMLFSIFLLMYLMILMCNGIIILLIKIHPALQTPMYFFLSNFSLLEICYVTIIIPRMLMDIWTQKGNISLFACATQMCFFLMLGGTECLLLTVMAYDRYVAICKPLQYPLVMNHKVCIQLIIASWTITIPVVIGETCQIFLLPFCGTNTINHFFCDIPPILKLACGNIFVNEITVHVVAVVFITVPFLLIVVSYGKIISNILKLSSARGKAKAFSTCSSHLIVVILFFGAGTITYLQPKPHQFQRMGKLISLFYTILIPTLNPIIYTLRNKDIMVALRKLLAKLLT

SEQ ID NO: 33107 - protein, 292 aa, Homo sapiens
MKSEAKDGEEESLQTAFKKLRVDASGSVASLSVGEGTGVRAPVRTATDDTKPKTTCASKDSWHGSTRKSSRGAVRTQRRRRSKSPVLHPPKFIHCSTIASSSSSQLKHKSQTDSPDGSSGLGISSPKEFSAGESSTSLDANHTGAVVEPLRTSVPRLPSESKKEDSSDATQVPQASLKASDLSDFQSVSKLNQGKPCTCIGKECQCKRWHDMEVYSFSGLQSVPPLAPERRSTLEDYSQSLHARTLSGSPRSCSEQARVFVDDVTIEDLSGYMEYYLYIPKKMSHMAEMMYT

SEQ ID NO: 33108 - protein, 305 aa, Homo sapiens
MQRSNHTVTEFILLGFTTDPGMQLGLFVVFLGVYSLTVVGNSTLIVLICNDSHLHTPMYFVVGNLSFLDLWYSSVYTPKILVICISEDKSISFAGCLCQFFFSAGLAYSECCLLAAMAYDRYVAISKPLLYAQAMSIKLCALLVAVSYCGGFINSSIITKKTFSFNFCCENIIDDFFCDLLPLVKLACGEKGCYKFLMYFLLASNVICPAVLILASYLFIITSVLRISSSQGRLKAFSTCSSHLTSVTLYYGSILYIYALPRSSYSFDMDKIVSTFYTEVLPMLNPMIYSLRNKDVKEALKKLLP

SEQ ID NO: 33109 - protein, 309 aa, Homo sapiens
MRENNQSSTLEFILLGVTGQQEQEDFFYILFLFIYPITLIGNLLIVLAICSDVRLHNPMYFLLANLSLVDIFFSSVTIPKMLANHLLGSKSISFGGCLTQMYFMIALGNTDSYILAAMAYDRAVAISRPLHYTTIMSPRSCIWLIAGSWVIGNANALPHTLLTASLSFCGNQEVANFYCDITPLLKLSCSDIHFHVKMMYLGVGIFSVPLLCIIVSYIRVFSTVFQVPSTKGVLKAFSTCGSHLTVVSLYYGTVMGTYFRPLTNYSLKDAVITVMYTAVTPMLNPFIYSLRNRDMKAALRKLFNKRISS

SEQ ID NO: 33110 - protein, 322 aa, Homo sapiens
MSPENQSSVSEFLLLGLPIRPEQQAVFFALFLGMYLTTVLGNLLIMLLIQLDSHLHTPMYFFLSHLALTDISFSSVTVPKMLMNMQTQHLAVFYKGCISQTYFFIFFADLDSFLITSMAYDRYVAICHPLHYATIMTQSQCVMLVAGSWVIACACALLHTLLLAQLSFCADHIIPHYFCDLGALLKLSCSDTSLNQLAIFTAALTAIMLPFLCILVSYGHIGVTILQIPSTKGICKALSTCGSHLSVVTIYYRTIIGLYFLPPSSNTNDKNIIASVIYTAVTPMLNPFIYSLRNKDIKGALRKLLSRSGAVAHACNLNTLGG

SEQ ID NO: 33111 - protein, 2332 aa, Homo sapiens
MKKVPIKPEQPEKLRAFNISTHSFSLHWSLPSGHVERYQVDLVPDSGFVTIRDLGGGEYQVDVSNVVPGTRYDITISSISTTYTSPVTRIVTTNVTKPGPPVFLAGERVGSAGILLSWNTPPNPNGRIISYIVKYKEVCPWMQTVYTQVRSKPDSLEVLLTNLNPGTTYEIKVAAENSAGIGVFSDPFLFQTAESAPGKVVNLTVEAYNASAVKLIWYLPRQPNGKITSFKISVKHARSGIVVKDVSIRVEDILTGKLPECNENSESFLWSTASPSPTLGRVTPPSRTTHSSSTLTQNEISSVWKEPISFVVTHLRPYTTYLFEVSAVTTEAGYIDSTIVRTPESVPEGPPQNCVTGNITGKSFSILWDPPTIVTGKFSYRVELYGPSGRILDNSTKDLKFAFTNLTPFTMYDVYIAAETSAGTGPKSNISVFTPPDVPGAVFDLQLAEVESTQVRITWKKPRQPNGIINQYRVKVLVPETGIILENTLLTGNNEYINDPMAPEIVNIVEPMVGLYEGSAEMSSDLHSLATFIYNSHPDKNFPARNRAEDQTSPVVTTRNQYITDIAAEQLSYVIRRLVPFTEHMISVSAFTIMGEGPPTVLSVRTRQQVPSSIKIINYKNISSSSILLYWDPPEYPNGKITHYTIYAMELDTNRAFQITTIDNSFLITGLKKYTKYKMRVAASTHVGESSLSEENDIFVRTSEDEPESSPQDVEVIDVTADEIRLKWSPPEKPNGIIIAYEVLYKNIDTLYMKNTSTTDIILRNLRPHTLYNISVRSYTRFGHGNQVSSLLSVRTSETVPDSAPENITYKNISSGEIELSFLPPSSPNGIIKKYTIYLKRSNGNEERTINTTSLTQNIKVLKKYTQYIIEVSASTLKGEGVRSAPISILTEEDAPDSPPQDFSVKQLSGVTVKLSWQPPLEPNGIILYYTVYVWNRSSLKTINVTETSLELSDLDYNVEYSAYVTASTRFGDGKTRSNIISFQTPEGAPSDPPKDVYYANLSSSSIILFWTPPSKPNGIIQYYSVYYRNTSGTFMQNFTLHEVTNDFDNMTVSTIIDKLTIFSYYTFWLTASTSVGNGNKSSDIIEVYTDQDIPEGFVGNLTYESISSTAINVSWVPPAQPNGLVFYYVSLILQQTPRHVRPPLVTYERSIYFDNLEKYTDYILKITPSTEKGFSDTYTAQLYIKTEEDVPETSPIINTFKNLSSTSVLLSWDPPVKPNGAIISYDLTLQGPNENYSFITSDNYIILEELSPFTLYSFFAAARTRKGLGPSSILFFYTDESVPLAPPQNLTLINCTSDFVWLKWSPSPLPGGIVKVYSFKIHEHETDTIYYKNISGFKTEAKLVGLEPVSTYSIRVSAFTKVGNGNQFSNVVKFTTQESVPDVVQNMQCMATSWQSVLVKWDPPKKANGIITQYMVTVERNSTKVSPQDHMYTFIKLLANTSYVFKVRASTSAGEGDESTCHVSTLPETVPSVPTNIAFSDVQSTSATLTWIRPDTILGYFQNYKITTQLRAQKCKEWESEECVEYQKIQYLYEAHLTEETVYGLKKFRWYRFQVAASTNAGYGNASNWISTKTLPGPPDGPPENVHVVATSPFSISISWSEPAVITGPTCYLIDVKSVDNDEFNISFIKSNEENKTIEIKDLEIFTRYSVVITAFTGNISAAYVEGKSSAEMIVTTLESAPKDPPNNMTFQKIPDEVTKFQLTFLPPSQPNGNIQVYQALVYREDDPTAVQIHNLSIIQKTNTFVIAMLEGLKGGHTYNISVYAVNSAGAGPKVPMRITMDIKAPARPKTKPTPIYDATGKLLVTSTTITIRMPICYYSDDHGPIKNVQVLVTETGAQHDGNVTKWYDAYFNKARPYFTNEGFPNPPCTEGKTKFSGNEEIYIIGADNACMIPGNEDKICNGPLKPKKQYLFKFRATNIMGQFTDSDYSDPVKTLGEGLSERTVEIILSVTLCILSIILLGTAIFAFARIRQKQKEGGTYSPQDAEIIDTKLKLDQLITVADLELKDERLTRPISKKSFLQHVEELCTNNNLKFQEEFSELPKFLQDLSSTDADLPWNRAKNRFPNIKPYNNNRVKLIADASVPGSDYINASYISGYLCPNEFIATQGPLPGTVGDFWRMVWETRAKTLVMLTQCFEKGRIRCHQYWPEDNKPVTVFGDIVITKLMEDVQIDWTIRDLKIERHGDCMTVRQCNFTAWPEHGVPENSAPLIHFVKLVRASRAHDTTPMIVHCSAGVGRTGVFIALDHLTQHINDHDFVDIYGLVAELRSERMCMVQNLAQYIFLHQCILDLLSNKGSNQPICFVNYSALQKMDSLDAMEGDVELEWEETTM

SEQ ID NO: 33112 - protein, 131 aa, Homo sapiens
MNLPSTKVSWAAVTLLLLLLLLPPALLSSGAAAQPLPDCCRQKTCSCRLYELLHGAGNHAAGILTLGKRRSGPPGLQGRLQRLLQASGNHAAGILTMGRRAGAEPAPRPCLGRRCSAPAAASVAPGGQSGI

SEQ ID NO: 33113 - protein, 311 aa, Homo sapiens
MNHTMVTEFVLLGLSDDPDLQIVIFLFLFITYILSVTGNLTIITLTFVDSHLQTPMYFFLRNFSFLEISFTTVCIPRFLGAIITRNKTISYNNCAAQLFFFIFMGVTEFYILTAMSYDRYVAICKPLHYTSIMNRKLCTLLVLCAWLSGFLTIFPPLMLLLQLDYCASNVIDHFACDYFPLLQLSCSDTWLLEVIGFYFALVTLLFTLALVILSYMYIIRTILRIPSASQRKKAFSTCSSHMIVISISYGSCIFMYANPSAKEKASLTKGIAILNTSVAPMLNPFIYTLRNQQVKQAFKNVVHKVVFYANQ

SEQ ID NO: 33114 - protein, 309 aa, Homo sapiens
MKKENQSFNLDFILLGVTSQQEQNNVFFVIFLCIYPITLTGNLLIILAICADIRLHNPMYFLLANLSLVDIIFSSVTIPKVLANHLLGSKFISFGGCLMQMYFMIALAKADSYTLAAMAYDRAVAISCPLHYTTIMSPRSCILLIAGSWVIGNTSALPHTLLTASLSFCGNQEVANFYCDIMPLLKLSCSDVHFNVKMMYLGVGVFSLPLLCIIVSYVQVFSTVFQVPSTKSLFKAFCTCGSHLTVVFLYYGTTMGMYFRPLTSYSPKDAVITVMYVAVTPALNPFIYSLRNWDMKAALQKLFSKRISS

SEQ ID NO: 33115 - protein, 307 aa, Homo sapiens
MDKNQTEVMREFFLSGFSQTPSIEAGLFVLFLFFYMSIWVGNVLIMVTVASDKYLNSSPMYFLLGNLSFLDLCYSTVTTPKLLADFFNHEKLISYDQCIVQLFFLHFVGAAEMFLLTVMAYDRYVAICRPLHYTTVMSRGLCCVLVAASWMGGFVHSTVQTILTVHLPFCGPNQVTFFCDVPPVIKLACADTFVIELLMVSNSGLISTISFVVLISSYTTILVKIRSKEGRRKALSTCASHLMVVTLFFGPCIFIYARPFSTFSVDKMVSVLYNVITPMLNPLIYTLRNKEVKSAMQKLWVKIITFQ

SEQ ID NO: 33116 - protein, 324 aa, Homo sapiens
MLGPAYNHTMETPASFLLVGIPGLQSSHLWLAISLSAMYITALLGNTLIVTAIWMDSTRHEPMYCFLCVLAAVDIVMASSVVPKMVSIFCSGDSSISFSACFTQMFFVHLATAVETGLLLTMAFDRYVAICKPLHYKRILTPQVMLGMSMAVTIRAVTFMTPLSWMMNHLPFCGSNVVVHSYCKHIALARLACADPVPSSLYSLIGSSLMVGSDVAFIAASYILILRAVFDLSSKTAQLKALSTCGSHVGVMALYYLPGMASIYAAWLGQDIVPLHTQVLLADLYVIIPATLNPIIYGMRTKQLLEGIWSYLMHFLFDHSNLGS

SEQ ID NO: 33117 - protein, 314 aa, Homo sapiens
MDQINHTNVKEFFFLELTRSRELEFFLFVVFFAVYVATVLGNALIVVTITCESRLHTPMYFLLRNKSVLDIVFSSITVPKFLVDLLSDRKTISYNDCMAQIFFFHFAGGADIFFLSVMAYDRYLAIAKPLHYVTMMRKEVWVALVVASWVSGGLHSIIQVILMLPFPFCGPNTLDAFYCYVLQVVKLACTDTFALELFMISNNGLVTLLWFLLLLGSYTVILVMLRSHSGEGRNKALSTCTSHMLVVTLHFVPCVYIYCRPFMTLPMDTTISINNTVITPMLNPIIYSLRNQEMKSAMQRLQRRLGPSESRKWG

SEQ ID NO: 33118 - protein, 369 aa, Homo sapiens
MWQEYYFLNVFFPLLKVCCLTINSHVVILLPWECYHLIWKILPYIGTTVGSMEEYNTSSTDFTFMGLFNRKETSGLIFAIISIIFFTALMANGVMIFLIQTDLRLHTPMYFLLSHLSLIDMMYISTIVPKMLVNYLLDQRTISFVGCTAQHFLYLTLVGAEFFLLGLMAYDRYVAICNPLRYPVLMSRRVCWMIIAGSWFGGSLDGFLLTPITMSFPFCNSREINHFFCEAPAVLKLACADTALYETVMYVCCVLMLLIPFSVVLASYARILTTVQCMSSVEGRKKAFATCSSHMTVVSLFYGAAMYTYMLPHSYHKPAQDKVLSVFYTILTPMLNPLIYSLRNKDVTGALKRALGRFKGPQRVSGGVF

SEQ ID NO: 33119 - protein, 315 aa, Homo sapiens
MANITRMANHTGKLDFILMGLFRRSKHPALLSVVIFVVFLKALSGNAVLILLIHCDAHLHSPMYFFISQLSLMDMAYISVTVPKMLLDQVMGVNKVSAPECGMQMFLYLTLAGSEFFLLATMAYDRYVAICHPLRYPVLMNHRVCLFLASGCWFLGSVDGFMLTPITMSFPFCRSWEIHHFFCEVPAVTILSCSDTSLYETLMYLCCVLMLLIPVTIISSSYLLILLTVHRMNSAEGRKKAFATCSSHLTVVILFYGAAVYTYMLPSSYHTPEKDMMVSVFYTILTPVLNPLIYSLRNKDVMGALKKMLTVRFVL

SEQ ID NO: 33120 - protein, 315 aa, Homo sapiens
MRQNNNITEFVLLGFSQDPGVQKALFVMFLLTYLVTVVGNLLIVVDIIASPSLGSPMYFFLACLSFIDAAYSTTISPKLIVGLFCDKKTISFQGCMGQLFIDHFFGGAEVFLLVVMACDRYVAICKPLHYLTIMNRQVCFLLLVVAMIGGFVHSAFQIVVYSLPFCGPNVIVHFSCDMHPLLELACTDTYFIGLTVVVNSGAICMVIFNLLLISYGVILSSLKTYSQEKRGKALSTCSSGSTVVVLFFVPCIFIYVRPVSNFPTDKFMTVFYTIITHMLSPLIYTLRNSEMRNAIEKLLGKKLTIFIIGGVSVLM

SEQ ID NO: 33121 - protein, 308 aa, Homo sapiens
MNENNETLTRGFTLMGLFTHNKCSGFFFGVICAVFFMAMIANGVMIFLINIDPHLHTPMYFLLSHLSVIDTLYISTIVPKMLVDYLMGEGTISFIACTAQCFLYMGFMGAEFFLLGLMAYDRYVAICNPLRYPVLISWRVCWMILASSWFGGALDSFLLTPITMSLPFCASHQINHFFCEAPTMLRLACGDKTTYETVMYVCCVAMLLIPFSVVTASYTRILITVHQMTSAEGRKKAFATCSSHMMVVTLFYGAALYTYTLPQSYHTPIKDKVFSAFYTILTPLLNPLIYSLRNRDVMGALKRVVARC

SEQ ID NO: 33122 - protein, 741 aa, Homo sapiens
MAAAEGPVGDGELWQTWLPNHVVFLRLREGLKNQSPTEAEKPASSSLPSSPPPQLLTRNVVFGLGGELFLWDGEDSSFLVVRLRGPSGGGEEPALSQYQRLLCINPPLFEIYQVLLSPTQHHVALIGIKGLMVLELPKRWGKNSEFEGGKSTVNCSTTPVAERFFTSSTSLTLKHAAWYPSEILDPHVVLLTSDNVIRIYSLREPQTPTNVIILSEAEEESLVLNKGRAYTASLGETAVAFDFGPLAAVPKTLFGQNGKDEVVAYPLYILYENGETFLTYISLLHSPGNIGKLLGPLPMHPAAEDNYGYDACAVLCLPCVPNILVIATESGMLYHCVVLEGEEEDDHTSEKSWDSRIDLIPSLYVFECVELELALKLASGEDDPFDSDFSCPVKLHRDPKCPSRYHCTHEAGVHSVGLTWIHKLHKFLGSDEEDKDSLQELSTEQKCFVEHILCTKPLPCRQPAPIRGFWIVPDILGPTMICITSTYECLIWPLLSTVHPASPPLLCTREDVEVAESPLRVLAETPDSFEKHIRSILQRSVANPAFLKASEKDIAPPPEECLQLLSRATQVFREQYILKQDLAKEEIQRRVKLLCDQKKKQLEDLSYCREERKSLREMAERLADKYEEAKEKQEDIMNRMKKLLHSFHSELPVLSDSERDMKKELQLIPDQLRHLGNAIKQVTMKKDYQQQKMEKVLSLPKPTIILSAYQRKCIQSILKEEGEHIREMVKQINDIRNHVNF

SEQ ID NO: 33123 - protein, 838 aa, Homo sapiens
MHLEGRDGRRYPGAPAVELLQTSVPSGLAELVAGKRRLPRGAGGADPSHSCPRGAAGQSSWAPAGQEFASFLTKGRSHSSLPQMSSSRSKDSCFTENTPLLRNSLQEKGSRCIPVYHPEFITAEESWEDSSADWERRYLLSREVSGLSASASSEKGDLLDSPHIRLRLSKLRRCVQWLKVMGLFAFVVLCSILFSLYPDQGKLWQLLALSPLENYSVNLSSHVDSTLLQVDLAGALVASGPSRPGREEHIVVELTQADALGSRWRRPQQVTHNWTVYLNPRRSEHSVMSRTFEVLTRETVSISIRASLQQTQAVPLLMAHQYLRGSVETQVTIATAILAGVYALIIFEIVHRTLAAMLGSLAALAALAVIGDRPSLTHVVEWIDFETLALLFGMMILVAIFSETGFFDYCAVKAYRLSRGRVWAMIIMLCLIAAVLSAFLDNVTTMLLFTPVTIRLCEVLNLDPRQVLIAEVIFTNIGGAATAIGDPPNVIIVSNQELRKMGLDFAGFTAHMFIGICLVLLVCFPLLRLLYWNRKLYNKEPSEIVELKHEIHVWRLTAQRISPASREETAVRRLLLGKVLALEHLLARRLHTFHRQISQEDKNWETNIQELQKKHRISDGILLAKCLTVLGFVIFMFFLNSFVPGIHLDLGWIAILGAIWLLILADIHDFEIILHRVEWATLLFFAALFVLMEALAHLHLIEYVGEQTALLIKMVPEEQRLIAAIVLVVWVSALASSLIDNIPFTATMIPVLLNLSHDPEVGLPAPPLMYALAFGACLGGNGTLIGASANVVCAGIAEQHGYGFSFMEFFRLGFPMMVVSCTVGMCYLLVAHVVVGWN

SEQ ID NO: 33124 - protein, 814 aa, Homo sapiens
MHLEGRDGRRYPGAPAVELLQTSVPSGLAELVAGKRRLPRGAGGADPSHSCPRGAAGQSSWAPAGQEFASFLTKGRSHSSLPQMSSSRSKDSCFTENTPLLRNSLQEKGSRCIPVYHPEFITAEESWEDSSADWERRYLLSREVSGLSASASSEKGDLLDSPHIRLRLSKLRRCVQWLKVMGLFAFVVLCSILFSLYPDQGKLWQLLALSPLENYSVNLSSHVDSTLLQVDLAGALVASGPSRPGREEHIVVELTQADALGSRWRRPQQVTHNWTVYLNPRRSEHSVMSRTFEVLTRETVSISIRASLQQTQAVPLLMAHQYLRGSVETQVTIATAILAGVYALIIFERPSLTHVVEWIDFETLALLFGMMILVAIFSETGFFDYCAVKAYRLSRGRVWAMIIMLCLIAAVLSAFLDNVTTMLLFTPVTIRLCEVLNLDPRQVLIAEVIFTNIGGAATAIGDPPNVIIVSNQELRKMGLDFAGFTAHMFIGICLVLLVCFPLLRLLYWNRKLYNKEPSEIVELKHEIHVWRLTAQRISPASREETAVRRLLLGKVLALEHLLARRLHTFHRQISQEDKNWETNIQELQKKHRISDGILLAKCLTVLGFVIFMFFLNSFVPGIHLDLGWIAILGAIWLLILADIHDFEIILHRVEWATLLFFAALFVLMEALAHLHLIEYVGEQTALLIKMVPEEQRLIAAIVLVVWVSALASSLIDNIPFTATMIPVLLNLSHDPEVGLPAPPLMYALAFGACLGGNGTLIGASANVVCAGIAEQHGYGFSFMEFFRLGFPMMVVSCTVGMCYLLVAHVVVGWN

SEQ ID NO: 33125 - protein, 668 aa, Homo sapiens
MHLEGRDGRRYPGAPAVELLQTSVPSGLAELVAGKRRLPRGAGGADPSHSCPRGAAGQSSWAPAGQEFASFLTKGRSHSSLPQMSSSRSKDSCFTENTPLLRNSLQEKGSRCIPVYHPEFITAEESWEDSSADWERRYLLSREVSGLSASASSEKGDLLDSPHIRLRLSKLRRCVQWLKVMGLFAFVVLCSILFSLYPDQGKLWQLLALSPLENYSVNLSSHVDSTLLQVDLAGALVASGPSRPGREEHIVVELTQADALGSRWRRPQQVTHNWTVYLNPRRSEHSVMSRTFEVLTRETVSISIRASLQQTQAVPLLMAHQYLRGSVETQVTIATAILAGVYALIIFEIVHRTLAAMLGSLAALAALAVIGDRPSLTHVVEWIDFETLALLFGMMILVAIFSETGFFDYCAVKAYRLSRGRVWAMIIMLCLIAAVLSAFLDNVTTMLLFTPVTIRLCEVLNLDPRQVLIAEVIFTNIGGAATAIGDPPNVIIVSNQELRKMGLDFAGFTAHMFIGICLVLLVCFPLLRLLYWNRKLYNKEPSEIVELKHEIHVWRLTAQRISPASREETAVRRLLLGKVLALEHLLARRLHTFHRQISQEDKNWETNIQELQKKHRISDGILLAKCLTVLGFVIFMFFLNSFVPGIHLDLGGLGLVQAGRYYLSTPES

SEQ ID NO: 33126 - protein, 249 aa, Homo sapiens
MAMLRVQPEAQAKVDVFREDLCTKTENLLGSYFPKKISELDAFLKEPALNEANLSNLKAPLDIPVPDPVKEKEKEERKKQQEKEDKDEKKKGEDEDKGPPCGPVNCNEKIVVLLQRLKPEIKDVIEQLNLVTTWLQLQIPRIEDGNNFGVAVQEKVFELMTSLHTKLEGFHTQISKYFSERGDAVTKAAKQPHVGDYRQLVHELDEAEYRDIRLMVMEIRNAYAVLYDIILKNFEKLKKPRGETKGMIY

SEQ ID NO: 33127 - protein, 250 aa, Homo sapiens
MAMLRVQPEAQAKVDVFREDLCTKTENLLGSYFPKKISELDAFLKEPALNEANLSNLKAPLDIPVPDPVKEKEKEERKKQQEKEDKDEKKKGEDEDKGPPCGPVNCNEKIVVLLQRLKPEIKDVIEQLNLVTTWLQLQIPRIEDGNNFGVAVQEKVFELMTSLHTKLEGFHTQISKYFSERGDAVTKAAKQPHVGDYRQLVHELDEAEYRDIRLMVMEIRNAYVRRQGQGRGGQRQLSQATHSLTLQARG

SEQ ID NO: 33128 - protein, 233 aa, Homo sapiens
MAMLRVQPEAQAKVDVFREDLCTKTENLLGSYFPKKISELDAFLKEPALNEANLSNLKAPLDIPVPDPVKEKEKEERKKQQEKEDKDEKKKGEDEDKGPPCGPVNCNEKIVVLLQRLKPEIKDVIEQLNLVTTWLQLQIPRIEDGNNFGVAVQEKVFELMTSLHTKLEGFHTQISKYFSERGDAVTKAAKQPHVGDYRQLVHELDEAEYRDIRLMVMEIRNAYVRRLCYMTSS

SEQ ID NO: 33129 - protein, 271 aa, Homo sapiens
MAGLEVLFASAAPAITCRQDALVCFLHWEVVTHGYFGLGVGDQPGPNDKKSELLPAGWNNNKDLYVLRYEYKDGSRKLLVKAITVESSMILNVLEYGSQQVADLTLNLDDYIDAEHLGDFHRTYKNSEELRSRIVSGIITPIHEQWEKANVSSPHREFPPATAREVDPLRIPPHHPHTSRQPPWCDPLGPFVVGGEDLDPFGPRRGGMIVDPLRSGFPRALIDPSSGLPNRLPPGAVPPGARFDPFGPIGTSPPGPNPDHLPPPGYDDMYL

SEQ ID NO: 33130 - protein, 134 aa, Homo sapiens
MKKKHDGIVYETKEVLNPSPKVTHCCKSLWLKYSFQKAYMTQLVSSQPVPAMSRNPDHNLLSQPKEHSIVQKHHQEEIIHKLAMQLRHIGDNIDHRMVREDLQQDGRDALDHFVFFFFRRVQVLLHFFWNNHLL

SEQ ID NO: 33131 - protein, 204 aa, Homo sapiens
MRAHVAQHVSGELGAVGLQVEADQLVGEVQGVHGQQRAPRDAPVALAQRHRQQLQLELLELLGGQVLQRIQDGVARAPHGSRIPGRCRRSPRCSRRPGGSRLRGGTWTPRLPPTLVSRLPAPVRCPPAKGASLLHPWSPPTQASGLGPQAVGGRQDRALQLACEVGPGRGPQRGSWVAPACLWACTSGYRPETWAGSHWVYWST

SEQ ID NO: 33132 - protein, 229 aa, Homo sapiens
MSFLQDPSFFTMGMWSIGAGALGAAALALLLANTDVFLSKPQKAALEYLEDIDLKTLEKEPRTFKAKELWEKNGAVIMAVRRPGCFLCREEAADLSSLKSMLDQLGVPLYAVVKEHIRTEVKDFQPYFKGEIFLDEKKKFYGPQRRKMMFMGFIRLGVWYNFFRAWNGGFSGNLEGEGFILGGVFVVGSGKQGILLEHREKEFGDKVNLLSVLEAAKMIKPQTLASEKK

SEQ ID NO: 33133 - protein, 218 aa, Homo sapiens
MGMWSIGAGALGAAALALLLANTDVFLSKPQKAALEYLEDIDLKTLEKEPRTFKAKELWEKNGAVIMAVRRPGCFLCREEAADLSSLKSMLDQLGVPLYAVVKEHIRTEVKDFQPYFKGEIFLDEKKKFYGPQRRKMMFMGFIRLGVWYNFFRAWNGGFSGNLEGEGFILGGVFVVGSGKQGILLEHREKEFGDKVNLLSVLEAAKMIKPQTLASEKK

SEQ ID NO: 33134 - protein, 578 aa, Homo sapiens
MAFMEKPPAGKVLLDDTVPLTAAIEASQSLQSHTEYIIRVQRGISVENSWQIVRRYSDFDLLNNSLQIAGLSLPLPPKKLIGNMDREFIAERQKGLQNYLNVITTNHILSNCELVKKFLDPNNYSANYTEIALQQVSMFFRSEPKWEVVEPLKDIGWRIRKKYFLMKIKNQPKERLVLSWADLGPDKYLSDKDFQCLIKLLPSCLHPYIYRVTFATANESSALLIRMFNEKGTLKDLIYKAKPKDPFLKKYCNPKKIQGLELQQIKTYGRQILEVLKFLHDKGFPYGHLHASNVMLDGDTCRLLDLENSLLGLPSFYRSYFSQFRKINTLESVDVHCFGHLLYEMTYGRPPDSVPVDSFPPAPSMAVVAVLESTLSCEACKNGMPTISRLLQMPLFSDVLLTTSEKPQFKIPTKLKEALRIAKECIEKRLIEEQKQIHQHRRLTRAQSHHGSEEERKKRKILARKKSKRSALENSEEHSAKYSNSNNSAGSGASSPLTSPSSPTPPSTSGISALPPPPPPPPPPAAPLPPASTEAPAQLSSQAVNGMSRGALLSSIQNFQKGTLRKAKTCDHSAPKIG

SEQ ID NO: 33135 - protein, 515 aa, Homo sapiens
MAFMEKPPAGKVLLDDTVPLTAAIEASQSLQSHTEYIIRVQRGISVENSWQIVRRYSDFDLLNNSLQIAGLSLPLPPKKLIGNMDREFIAERQKGLQNYLNVITTNHILSNCELVKKFLDPNNYSANYTEIALQQVSMFFRSEPKWEVVEPLKDIGWRIRKKYFLMKIKNQPKERLVLSWADLGPDKYLSDKDFQCLIKLLPSCLHPYIYRVTFATANESSALLIRMFNEKGTLKDLIYKAKPKDPFLKKYCNPKKIQGLELQQIKTYGRQILEVLKFLHDKGFPYGHLHASNVMLDGDTCRLLDLENSLLGLPSFYRSYFSQFRKINTLESVDVHCFGHLLYEMTYGRPPDSVPVDSFPPAPSMAVVAVLESTLSCEACKNGMPTISRLLQMPLFSDVLLTTSEKPQFKIPTKLKEALRIAKECIEKRLIEEQKQIHQHRRLTRAQSHHGSEEERKKRKILARKKSKRSALENSEEHSAKYSNSNNSAGSGASSPLTSPSSPTPPSTSVEHAPF

SEQ ID NO: 33136 - protein, 352 aa, Homo sapiens
MFNEKGTLKDLIYKAKPKDPFLKKYCNPKKIQGLELQQIKTYGRQILEVLKFLHDKGFPYGHLHASNVMLDGDTCRLLDLENSLLGLPSFYRSYFSQFRKINTLESVDVHCFGHLLYEMTYGRPPDSVPVDSFPPAPSMAVVAVLESTLSCEACKNGMPTISRLLQMPLFSDVLLTTSEKPQFKIPTKLKEALRIAKECIEKRLIEEQKQIHQHRRLTRAQSHHGSEEERKKRKILARKKSKRSALENSEEHSAKYSNSNNSAGSGASSPLTSPSSPTPPSTSGISALPPPPPPPPPPAAPLPPASTEAPAQLSSQAVNGMSRGALLSSIQNFQKGTLRKAKTCDHSAPKIG

SEQ ID NO: 33137 - protein, 561 aa, Homo sapiens
MAFMEKPPAGKVLLDDTVPLTAAIEASQSLQSHTIVRRYSDFDLLNNSLQIAGLSLPLPPKKLIGNMDREFIAERQKGLQNYLNVITTNHILSNCELVKKFLDPNNYSANYTEIALQQVSMFFRSEPKWEVVEPLKDIGWRIRKKYFLMKIKNQPKERLVLSWADLGPDKYLSDKDFQCLIKLLPSCLHPYIYRVTFATANESSALLIRMFNEKGTLKDLIYKAKPKDPFLKKYCNPKKIQGLELQQIKTYGRQILEVLKFLHDKGFPYGHLHASNVMLDGDTCRLLDLENSLLGLPSFYRSYFSQFRKINTLESVDVHCFGHLLYEMTYGRPPDSVPVDSFPPAPSMAVVAVLESTLSCEACKNGMPTISRLLQMPLFSDVLLTTSEKPQFKIPTKLKEALRIAKECIEKRLIEEQKQIHQHRRLTRAQSHHGSEEERKKRKILARKKSKRSALENSEEHSAKYSNSNNSAGSGASSPLTSPSSPTPPSTSGISALPPPPPPPPPPAAPLPPASTEAPAQLSSQAVNGMSRGALLSSIQNFQKGTLRKAKTCDHSAPKIG

SEQ ID NO: 33138 - protein, 441 aa, Homo sapiens
MFFRSEPKWEVVEPLKDIGWRIRKKYFLMKIKNQPKERLVLSWADLGPDKYLSDKDFQCLIKLLPSCLHPYIYRVTFATANESSALLIRMFNEKGTLKDLIYKAKPKDPFLKKYCNPKKIQGLELQQIKTYGRQILEVLKFLHDKGFPYGHLHASNVMLDGDTCRLLDLENSLLGLPSFYRSYFSQFRKINTLESVDVHCFGHLLYEMTYGRPPDSVPVDSFPPAPSMAVVAVLESTLSCEACKNGMPTISRLLQMPLFSDVLLTTSEKPQFKIPTKLKEALRIAKECIEKRLIEEQKQIHQHRRLTRAQSHHGSEEERKKRKILARKKSKRSALENSEEHSAKYSNSNNSAGSGASSPLTSPSSPTPPSTSGISALPPPPPPPPPPAAPLPPASTEAPAQLSSQAVNGMSRGALLSSIQNFQKGTLRKAKTCDHSAPKIG

SEQ ID NO: 33139 - protein, 545 aa, Homo sapiens
MAFMEKPPAGKVLLDDTVPLTAAIEASQSLQSHTIAGLSLPLPPKKLIGNMDREFIAERQKGLQNYLNVITTNHILSNCELVKKFLDPNNYSANYTEIALQQVSMFFRSEPKWEVVEPLKDIGWRIRKKYFLMKIKNQPKERLVLSWADLGPDKYLSDKDFQCLIKLLPSCLHPYIYRVTFATANESSALLIRMFNEKGTLKDLIYKAKPKDPFLKKYCNPKKIQGLELQQIKTYGRQILEVLKFLHDKGFPYGHLHASNVMLDGDTCRLLDLENSLLGLPSFYRSYFSQFRKINTLESVDVHCFGHLLYEMTYGRPPDSVPVDSFPPAPSMAVVAVLESTLSCEACKNGMPTISRLLQMPLFSDVLLTTSEKPQFKIPTKLKEALRIAKECIEKRLIEEQKQIHQHRRLTRAQSHHGSEEERKKRKILARKKSKRSALENSEEHSAKYSNSNNSAGSGASSPLTSPSSPTPPSTSGISALPPPPPPPPPPAAPLPPASTEAPAQLSSQAVNGMSRGALLSSIQNFQKGTLRKAKTCDHSAPKIG

SEQ ID NO: 33140 - protein, 495 aa, Homo sapiens
MDREFIAERQKGLQNYLNVITTNHILSNCELVKKFLDPNNYSANYTEIALQQVSMFFRSEPKWEVVEPLKDIGWRIRKKYFLMKIKNQPKERLVLSWADLGPDKYLSDKDFQCLIKLLPSCLHPYIYRVTFATANESSALLIRMFNEKGTLKDLIYKAKPKDPFLKKYCNPKKIQGLELQQIKTYGRQILEVLKFLHDKGFPYGHLHASNVMLDGDTCRLLDLENSLLGLPSFYRSYFSQFRKINTLESVDVHCFGHLLYEMTYGRPPDSVPVDSFPPAPSMAVVAVLESTLSCEACKNGMPTISRLLQMPLFSDVLLTTSEKPQFKIPTKLKEALRIAKECIEKRLIEEQKQIHQHRRLTRAQSHHGSEEERKKRKILARKKSKRSALENSEEHSAKYSNSNNSAGSGASSPLTSPSSPTPPSTSGISALPPPPPPPPPPAAPLPPASTEAPAQLSSQAVNGMSRGALLSSIQNFQKGTLRKAKTCDHSAPKIG

SEQ ID NO: 33141 - protein, 259 aa, Homo sapiens
MDAWVRFSAQSQARERLCRAAQYACSLLGHALQRHGASPELQKQIRQLESHLSLGRKLLRLGNSADALESAKRAVHLSDVVLRFCITVSHLNRALYFACDNVLWAGKSGLAPRVDQEKWAQRSFRYYLFSLIMNLSRDAYEIRLLMEQESSACSRRLKGSGGGVPGGSETGGLGGPGTPGGGLPQLALKLRLQVLLLARVLRGHPPLLLDVVRNACDLFIPLDKLGLWRCGPGIVGLCGLVSSILSILTLIYPWLRLKP

SEQ ID NO: 33142 - protein, 245 aa, Homo sapiens
MGKLRAAQYACSLLGHALQRHGASPELQKQIRQLESHLSLGRKLLRLGNSADALESAKRAVHLSDVVLRFCITVSHLNRALYFACDNVLWAGKSGLAPRVDQEKWAQRSFRYYLFSLIMNLSRDAYEIRLLMEQESSACSRRLKGSGGGVPGGSETGGLGGPGTPGGGLPQLALKLRLQVLLLARVLRGHPPLLLDVVRNACDLFIPLDKLGLWRCGPGIVGLCGLVSSILSILTLIYPWLRLKP

SEQ ID NO: 33143 - protein, 374 aa, Homo sapiens
MPTLNTSASPPTFFWANASGGSVLSADDAPMPVKFLALRLMVALAYGLVGAIGLLGNLAVLWVLSNCARRAPGPPSDTFVFNLALADLGLALTLPFWAAESALDFHWPFGGALCKMVLTATVLNVYASIFLITALSVARYWVVAMAAGPGTHLSLFWARIATLAVWAAAALVTVPTAVFGVEGEVCGVRLCLLRFPSRYWLGAYQLQRVVLAFMVPLGVITTSYLLLLAFLQRRQRRRQDSRVVARSVRILVASFFLCWFPNHVVTLWGVLVKFDLVPWNSTFYTIQTYVFPVTTCLAHSNSCLNPVLYCLLRREPRQALAGTFRDLRLRLWPQGGGWVQQVALKQVGRRWVASNPRESRPSTLLTNLDRGTPG

SEQ ID NO: 33144 - protein, 134 aa, Homo sapiens
MEEDFSSQMKKMALAMGTSLSDKDIELLPTDMRHHGSFNYLKFFKHIRKLHASGQLDDAIHTAFQSLDKDKSGFIEWNEIKYILSIIPSSGPTTPLTDEEAEAMIQAADTHGDGRINYEEFSELIKKEKIPKKK

SEQ ID NO: 33145 - protein, 361 aa, Homo sapiens
MAGGRHRRVVGTLHLLLLVAALPWASRGVSPSASAWPEEKNYHQPAILNSSALRQIAEGTSISEMWQNDLQPLLIERYPGSPGSYAARQHIMQRIQRLQADWVLEIDTFLSQTPYGYRSFSNIISTLNPTAKRHLVLACHYDSKYFSHWNNRVFVGATDSAVPCAMMLELARALDKKLLSLKTVSDSKPDLSLQLIFFDGEEAFLHWSPQDSLYGSRHLAAKMASTPHPPGARGTSQLHGMDLLVLLDLIGAPNPTFPNFFPNSARWFERLQAIEHELHELGLLKDHSLEGRYFQNYSYGGVIQDDHIPFLRRGVPVLHLIPSPFPEVWHTMDDNEENLDESTIDNLNKILQVFVLEYLHL

SEQ ID NO: 33146 - protein, 312 aa, Homo sapiens
MAGGRHRRVVGTLHLLLLVAALPWASRGVSPSASAWPEEKHIMQRIQRLQADWVLEIDTFLSQTPYGYRSFSNIISTLNPTAKRHLVLACHYDSKYFSHWNNRVFVGATDSAVPCAMMLELARALDKKLLSLKTVSDSKPDLSLQLIFFDGEEAFLHWSPQDSLYGSRHLAAKMASTPHPPGARGTSQLHGMDLLVLLDLIGAPNPTFPNFFPNSARWFERLQAIEHELHELGLLKDHSLEGRYFQNYSYGGVIQDDHIPFLRRGVPVLHLIPSPFPEVWHTMDDNEENLDESTIDNLNKILQVFVLEYLHL

SEQ ID NO: 33147 - protein, 184 aa, Homo sapiens
MREYKLVVLGSGGVGKSALTVQFVQGIFVEKYDPTIEDSYRKQVEVDCQQCMLEILDTAGTEQFTAMRDLYMKNGQGFALVYSITAQSTFNDLQDLREQILRVKDTEDVPMILVGNKCDLEDERVVGKEQGQNLARQWCNCAFLESSAKSKINVNEIFYDLVRQINRKTPVEKKKPKKKSCLLL

SEQ ID NO: 33148 - protein, 681 aa, Homo sapiens
MSKTFLRPKVSSTKVTDWVDPSFDDFLECSGVSTITATSLGVNNSSHRRKNGPSTLESSRFPARKRGNLSSLEQIYGLENSKEYLSENEPWVDKYKPETQHELAVHKKKIEEVETWLKAQVLERQPKQGGSILLITGPPGCGKTTTLKILSKEHGIQVQEWINPVLPDFQKDDFKGMFNTESSFHMFPYQSQIAVFKEFLLRATKYNKLQMLGDDLRTDKKIILVEDLPNQFYRDSHTLHEVLRKYVRIGRCPLIFIISDSLSGDNNQRLLFPKEIQEECSISNISFNPVAPTIMMKFLNRIVTIEANKNGGKITVPDKTSLELLCQGCSGDIRSAINSLQFSSSKGENNLRPRKKGMSLKSDAVLSKSKRRKKPDRVFENQEVQAIGGKDVSLFLFRALGKILYCKRASLTELDSPRLPSHLSEYERDTLLVEPEEVVEMSHMPGDLFNLYLHQNYIDFFMEIDDIVRASEFLSFADILSGDWNTRSLLREYSTSIATRGVMHSNKARGYAHCQGGGSSFRPLHKPQWFLINKKYRENCLAAKALFPDFCLPALCLQTQLLPYLALLTIPMRNQAQISFIQDIGRLPLKRHFGRLKMEALTDREHGMIDPDSGDEAQLNGGHSAEESLGEPTQATVPETWSLPLSQNSASELPASQPQPFSAQGDMEENIIIEDYESDGT

SEQ ID NO: 33149 - protein, 670 aa, Homo sapiens
MNQVTDWVDPSFDDFLECSGVSTITATSLGVNNSSHRRKNGPSTLESSRFPARKRGNLSSLEQIYGLENSKEYLSENEPWVDKYKPETQHELAVHKKKIEEVETWLKAQVLERQPKQGGSILLITGPPGCGKTTTLKILSKEHGIQVQEWINPVLPDFQKDDFKGMFNTESSFHMFPYQSQIAVFKEFLLRATKYNKLQMLGDDLRTDKKIILVEDLPNQFYRDSHTLHEVLRKYVRIGRCPLIFIISDSLSGDNNQRLLFPKEIQEECSISNISFNPVAPTIMMKFLNRIVTIEANKNGGKITVPDKTSLELLCQGCSGDIRSAINSLQFSSSKGENNLRPRKKGMSLKSDAVLSKSKRRKKPDRVFENQEVQAIGGKDVSLFLFRALGKILYCKRASLTELDSPRLPSHLSEYERDTLLVEPEEVVEMSHMPGDLFNLYLHQNYIDFFMEIDDIVRASEFLSFADILSGDWNTRSLLREYSTSIATRGVMHSNKARGYAHCQGGGSSFRPLHKPQWFLINKKYRENCLAAKALFPDFCLPALCLQTQLLPYLALLTIPMRNQAQISFIQDIGRLPLKRHFGRLKMEALTDREHGMIDPDSGDEAQLNGGHSAEESLGEPTQATVPETWSLPLSQNSASELPASQPQPFSAQGDMEENIIIEDYESDGT

SEQ ID NO: 33150 - protein, 505 aa, Homo sapiens
MFNTESSFHMFPYQSQIAVFKEFLLRATKYNKLQMLGDDLRTDKKIILVEDLPNQFYRDSHTLHEVLRKYVRIGRCPLIFIISDSLSGDNNQRLLFPKEIQEECSISNISFNPVAPTIMMKFLNRIVTIEANKNGGKITVPDKTSLELLCQGCSGDIRSAINSLQFSSSKGENNLRPRKKGMSLKSDAVLSKSKRRKKPDRVFENQEVQAIGGKDVSLFLFRALGKILYCKRASLTELDSPRLPSHLSEYERDTLLVEPEEVVEMSHMPGDLFNLYLHQNYIDFFMEIDDIVRASEFLSFADILSGDWNTRSLLREYSTSIATRGVMHSNKARGYAHCQGGGSSFRPLHKPQWFLINKKYRENCLAAKALFPDFCLPALCLQTQLLPYLALLTIPMRNQAQISFIQDIGRLPLKRHFGRLKMEALTDREHGMIDPDSGDEAQLNGGHSAEESLGEPTQATVPETWSLPLSQNSASELPASQPQPFSAQGDMEENIIIEDYESDGT

SEQ ID NO: 33151 - protein, 584 aa, Homo sapiens
MNQHELAVHKKKIEEVETWLKAQVLERQPKQGGSILLITGPPGCGKTTTLKILSKEHGIQVQEWINPVLPDFQKDDFKGMFNTESSFHMFPYQSQIAVFKEFLLRATKYNKLQMLGDDLRTDKKIILVEDLPNQFYRDSHTLHEVLRKYVRIGRCPLIFIISDSLSGDNNQRLLFPKEIQEECSISNISFNPVAPTIMMKFLNRIVTIEANKNGGKITVPDKTSLELLCQGCSGDIRSAINSLQFSSSKGENNLRPRKKGMSLKSDAVLSKSKRRKKPDRVFENQEVQAIGGKDVSLFLFRALGKILYCKRASLTELDSPRLPSHLSEYERDTLLVEPEEVVEMSHMPGDLFNLYLHQNYIDFFMEIDDIVRASEFLSFADILSGDWNTRSLLREYSTSIATRGVMHSNKARGYAHCQGGGSSFRPLHKPQWFLINKKYRENCLAAKALFPDFCLPALCLQTQLLPYLALLTIPMRNQAQISFIQDIGRLPLKRHFGRLKMEALTDREHGMIDPDSGDEAQLNGGHSAEESLGEPTQATVPETWSLPLSQNSASELPASQPQPFSAQGDMEENIIIEDYESDGT

SEQ ID NO: 33152 - protein, 233 aa, Homo sapiens
MELPTKPGTFDLGLATWSPSFQGETHRAQARRRDVGRQLPEYKAVVVGASGVGKSALTIQLNHQCFVEDHDPTIQDSYWKELTLDSGDCILNVLDTAGQAIHRALRDQCLAVCDGVLGVFALDDPSSLIQLQQIWATWGPHPAQPLVLVGNKCDLVTTAGDAHAAAAALAHSWGAHFVETSAKTRQGVEEAFSLLVHEIQRVQEAMAKEPMARSCREKTRHQKATCHCGCSVA

SEQ ID NO: 33153 - protein, 437 aa, Homo sapiens
MGKRLDQPQMYPQYTYYYPHYLQTKQSYAPAPHPMAPPSPSTNSSSNNSSNNSSGEQLSKTNLYIRGLPPGTTDQDLIKLCQPYGKIVSTKAILDKNTNQCKGYGFVDFDSPAAAQKAVASLKANGVQAQMAKQQEQDPTNLYISNLPISMDEQELENMLKPFGHVISTRILRDANGVSRGVGFARMESTEKCEVVIQHFNGKYLKTPPGIPAPSEPLLCKFADGGQKKRQNQSKYTQNGRPWPREGEAGMALTYDPTAAIQNGFYSSPYSIATNRMIPQTSITPFIAASPVSTYQVQSTSWMPHPPYVMQPTGAVITPTMDHPMSMQPANMMGPLTQQMNHLSLGTTGTIQSQDRIMILHQLLCQYMTAAAPMQGTYIPQYTPVPPTAVSIEGVVADTSPQTVAPSSQDTSGQQQQIAVDTSNEHAPAYSYQQSKP

SEQ ID NO: 33154 - protein, 433 aa, Homo sapiens
MGKRLDQPQMYPQYTYYYPHYLQTKQSYAPAPHPMAPPSPSTNSSSNNSSNNSSGEQLSKTNLYIRGLPPGTTDQDLIKLCQPYGKIVSTKAILDKNTNQCKGYGFVDFDSPAAAQKAVASLKANGVQAQMAKQQEQDPTNLYISNLPISMDEQELENMLKPFGHVISTRILRDANGVSRGVGFARMESTEKCEVVIQHFNGKYLKTPPGIPAPSEPLLCKFADGGQKKRQNQSKYTQNGRPWPREGEVLRGRTVPRQNREAGMALTYDPTAAIQNGFYSSPYSIATNRMIPQTSITPFIAASPVSTYQVQSTSWMPHPPYVMQPTGAVITPTMDHPMSMQPANMMGPLTQQMNHLSLGTTGTYMTAAAPMQGTYIPQYTPVPPTAVSIEGVVADTSPQTVAPSSQDTSGQQQQIAVDTSNEHAPAYSYQQSK

SEQ ID NO: 33155 - protein, 419 aa, Homo sapiens
MGKRLDQPQMYPQYTYYYPHYLQTKSYAPAPHPMAPPSPSTNSSSNNSSNNSSGEQLSKTNLYIRGLPPGTTDQDLIKLCQPYGKIVSTKAILDKNTNQCKGYGFVDFDSPAAAQKAVASLKANGVQAQMAKQQEQDPTNLYISNLPISMDEQELENMLKPFGHVISTRILRDANGVSRGVGFARMESTEKCEVVIQHFNGKYLKTPPGIPAPSEPLLCKFADGGQKKRQNQSKYTQNGRPWPREGEAGMALTYDPTAAIQNGFYSSPYSIATNRMIPQTSITPFIAASPVSTYQGAVITPTMDHPMSMQPANMMGPLTQQMNHLSLGTTGTIQSQDRIMILHQLLCQYMTAAAPMQGTYIPQYTPVPPTAVSIEGVVADTSPQTVAPSSQDTSGQQQQIAVDTSNEHAPAYSYQQSKP

SEQ ID NO: 33156 - protein, 420 aa, Homo sapiens
MGKRLDQPQMYPQYTYYYPHYLQTKQSYAPAPHPMAPPSPSTNSSSNNSSNNSSGEQLSKTNLYIRGLPPGTTDQDLIKLCQPYGKIVSTKAILDKNTNQCKGYGFVDFDSPAAAQKAVASLKANGVQAQMAKQQEQDPTNLYISNLPISMDEQELENMLKPFGHVISTRILRDANGVSRGVGFARMESTEKCEVVIQHFNGKYLKTPPGIPAPSEPLLCKFADGGQKKRQNQSKYTQNGRPWPREGEAGMALTYDPTAAIQNGFYSSPYSIATNRMIPQTSITPFIAASPVSTYQVQSTSWMPHPPYVMQPTGAVITPTMDHPMSMQPANMMGPLTQQMNHLSLGTTGTYMTAAAPMQGTYIPQYTPVPPTAVSIEGVVADTSPQTVAPSSQDTSGQQQQIAVDTSNEHAPAYSYQQSK

SEQ ID NO: 33157 - protein, 421 aa, Homo sapiens
MGKRLDQPQMYPQYTYYYPHYLQTKQSYAPAPHPMAPPSPSTNSSSNNSSNNSSGEQLSKTNLYIRGLPPGTTDQDLIKLCQPYGKIVSTKAILDKNTNQCKGYGFVDFDSPAAAQKAVASLKANGVQAQMAKQQEQDPTNLYISNLPISMDEQELENMLKPFGHVISTRILRDANGVSRGVGFARMESTEKCEVVIQHFNGKYLKTPPGIPAPSEPLLCKFADGGQKKRQNQSKYTQNGRPWPREGEAGMALTYDPTAAIQNGFYSSPYSIATNRMIPQTSITPFIAASPVSTYQVQSTSWMPHPPYVMQPTGAVITPTMDHPMSMQPANMMGPLTQQMNHLSLGTTGTYMTAAAPMQGTYIPQYTPVPPTAVSIEGVVADTSPQTVAPSSQDTSGQQQQIAVDTSNEHAPAYSYQQSKP

SEQ ID NO: 33158 - protein, 157 aa, Homo sapiens
MSSEEGKLFVGGLNFNTDEQALEDHFSSFGPISEVVVVKDRETQRSRGFGFITFTNPEHASVAMRAMNGESLDGRQIRVDHAGKSARGTRGGGFGAHGRGRSYSRGGGDQGYGSGRYYDSRPGGYGYGYGRSRDYNGRNQGGYDRYSGGNYRDNYDN

SEQ ID NO: 33159 - protein, 197 aa, Homo sapiens
MSRLSRSLLWAATCLGVLCVLSADKNTTQHPNVTTLAPISNVTSAPVTSLPLVTTPAPETCEGRNSCVSCFNVSVVNTTCFWIECKDESYCSHNSTVSDCQVGNTTDFCSVSTATPVPTANSTAKPTVQPSPSTTSKTVTTSGTTNNTVTPTSQPVRKSTFDAASFIGGIVLVLGVQAVIFFLYKFCKSKERNYHTL

SEQ ID NO: 33160 - protein, 189 aa, Homo sapiens
MSRLSRSLLWAATCLGVLCVLSADKNTTQHPNVTTLAPISNVTSAPVTSLPLVTTPAPETCEGRNSCVSCFNVSVVNTTCFWIECKDESYCSHNSTVSDCQVGNTTDFCSVSTATPVPTANSTAKPTVQPSPSTTSKTVTTSGTTNNTVTPTSQPVRKSTFDAASFIGGIVLVLEIRCHTRNYIPDLKK

SEQ ID NO: 33161 - protein, 184 aa, Homo sapiens
MSRLSRSLLWAATCLGVLCVLSADKNTTQHPNVTTLAPISNVTSAPVTSLPLVTTPAPETCEGRNSCVSCFNVSVVNTTCFWIECKDESYCSHNSTVSDCQVGNTTDFCSAKPTVQPSPSTTSKTVTTSGTTNNTVTPTSQPVRKSTFDAASFIGGIVLVLGVQAVIFFLYKFCKSKERNYHTL

SEQ ID NO: 33162 - protein, 178 aa, Homo sapiens
MSRLSRSLLWAATCLGVLCVLSADKNTTQHPNVTTLAPISNVTSAPVTSLPLVTTPAPETCEGRNSCVSCFNVSVVNTTCFWIECKDESYCSHNSTVSDCQVGNTTDFCSVSTATPVPTANSTGTTNNTVTPTSQPVRKSTFDAASFIGGIVLVLGVQAVIFFLYKFCKSKERNYHTL

SEQ ID NO: 33163 - protein, 157 aa, Homo sapiens
MSRLSRSLLWAATCLGVLCVLSADKNTTQHPNVTTLAPISNVTSAPVTSLPLVTTPAPETCEGRNSCVSCFNVSVVNTTCFWIECKDESYCSHNSTVSDCQVGNTTDFCSVSTATPVPTANSTAKPTVQPSPSTTSKTVTTSEIRCHTRNYIPDLKK

SEQ ID NO: 33164 - protein, 798 aa, Homo sapiens
MEAGEGKERVPKQRQVLIFFVLLGIAQASCQPRHYSVAEETESGSFVANLLKDLGLEIGELAVRGARVVSKGKKMHLQFDRQTGDLLLNEKLDREELCGPTEPCVLPFQVLLENPLQFFQAELRIRDVNDHSPVFLDKEILLKIPESITPGTTFLIERAQDLDVGTNSLQNYTISPNFHFHLNLQDSLDGIILPQLVLNRALDREEQPEIRLTLTALDGGSPPRSGTALVRIEVVDINDNVPEFAKLLYEVQIPEDSPVGSQVAIVSARDLDIGTNGEISYAFSQASEDIRKTFRLSAKSGELLLRQKLDFESIQTYTVNIQATDGGGLSGTCVVFVQVMDLNDNPPELTMSTLINQIPENLQDTLIAVFSVSDPDSGDNGRMVCSIQDDLPFFLKPSVENFYTLVISTALDRETRSEYNITITVTDFGTPRLKTEHNITVLVSDVNDNAPAFTQTSYTLFVRENNSPALHIGSVSATDRDSGTNAQVTYSLLPPQDPHLPLASLVSINADNGHLFALQSLDYEALQAFEFRVGAADRGSPALSSEALVRVLVLDANDNSPFVLYPLQNGSAPCTELVPRAAEPGYLVTKVVAVDGDSGQNAWLSYQLLKATEPGLFGVWAHNGEVRTARLLRERDAAKQRLVVLVKDNGEPPRSATATLHVLLVDGFSQPYLLLPEAAPAQAQADLLTVYLVVALASVSSLFLFSVLLFVAVRLCRRSRAASVGRCSVPEGPFPGQMVDVSGTGTLSQSYQYEVCLTGGSGTNEFKFLKPIIPNFVAQGAERVSEANPSFRKSFEFT

SEQ ID NO: 33165 - protein, 932 aa, Homo sapiens
MAALQKLPHCRKLVLLCFLLATLWEARAGQIRYSVREEIDRGSFVGNIAKDLGLEPLALAEQGVRIVSRGRSQLFALNPRSGSLVTANRIDREELCAQSAPCLLNFNILLEDKLTIYSVEVEITDINDNAPRFGVEELELKISETTTPGFRIPLKNAHDADVGENALQKYALNPNDHFSLDVRRGADGNKYPELVLERSLDREEEAVHHLVLVASDGGDPVLSGTSRICVKVLDANDNAPVFTQPEYRISIPENTLVGTRILTVTATDADEGYYAQVVYFLEKSPGETSEVFELKSTSGELTIIKDLDYEDATFHEIDIEAQDGPGLLTRAKVIVTVLDVNDNAPEFYMTSATSSVSEDSLPGTIIGLFNVHDRDSGQNAFTTCSLPEDLPFKLEKSVDNYYRLVTTRALDREQFSFYNITLTAKDGGNPSLSTDAHILLQVADINDNAPAFSRTSYSTYIPENNPRGASVFSVTAHDPDSNDNAHVTYSFAEDTVQGAPLSSYISINSDTGVLYALRSFDYEQLRDLQVWVIARDSGNPPLSSNVSLSLFVLDQNDNAPEILYPAFPTDGSTGVELAPRSAEPGYLVTKVVAVDRDSGQNAWLSYHLLKASEPGLFSVGLHTGEVRTARALLDRDALKQSLVVAIQDHGQPPLSATVTLTVAVADRIPDILADLGSLEPSAIPNDSDLTLYLVVAVAAVSCVFLAFVIVLLAHRLRRWHKSRLLQASGGSLTGMQSSHFVGVDGVRAFLQTYSHEVSLTADSRKSHLIFPQPNYADTLISQESCEKKDFLSAPQSLLEEEREETFSQQAPPNTDWRFSQAQRPGTSGSQNGDDTGTWPNNQFDTEMLQAMILASASEAADGSSTLGGGAGTMGLSARYGPQFTLQHVPDYRQNVYIPGSNATLTNAAGKRDGKAPAGGNGNKKKSGKKEKK

SEQ ID NO: 33166 - protein, 823 aa, Homo sapiens
MAALQKLPHCRKLVLLCFLLATLWEARAGQIRYSVREEIDRGSFVGNIAKDLGLEPLALAEQGVRIVSRGRSQLFALNPRSGSLVTANRIDREELCAQSAPCLLNFNILLEDKLTIYSVEVEITDINDNAPRFGVEELELKISETTTPGFRIPLKNAHDADVGENALQKYALNPNDHFSLDVRRGADGNKYPELVLERSLDREEEAVHHLVLVASDGGDPVLSGTSRICVKVLDANDNAPVFTQPEYRISIPENTLVGTRILTVTATDADEGYYAQVVYFLEKSPGETSEVFELKSTSGELTIIKDLDYEDATFHEIDIEAQDGPGLLTRAKVIVTVLDVNDNAPEFYMTSATSSVSEDSLPGTIIGLFNVHDRDSGQNAFTTCSLPEDLPFKLEKSVDNYYRLVTTRALDREQFSFYNITLTAKDGGNPSLSTDAHILLQVADINDNAPAFSRTSYSTYIPENNPRGASVFSVTAHDPDSNDNAHVTYSFAEDTVQGAPLSSYISINSDTGVLYALRSFDYEQLRDLQVWVIARDSGNPPLSSNVSLSLFVLDQNDNAPEILYPAFPTDGSTGVELAPRSAEPGYLVTKVVAVDRDSGQNAWLSYHLLKASEPGLFSVGLHTGEVRTARALLDRDALKQSLVVAIQDHGQPPLSATVTLTVAVADRIPDILADLGSLEPSAIPNDSDLTLYLVVAVAAVSCVFLAFVIVLLAHRLRRWHKSRLLQASGGSLTGMQSSHFVGVDGVRAFLQTYSHEVSLTADSRKSHLIFPQPNYADTLISQESCEKKDFLSAPQSLLEEEREETFSQVIYLFTTYVLASLLK

SEQ ID NO: 33167 - protein, 436 aa, Homo sapiens
MRPGGERPVEGGACNGRSELELLKLRSAECIDEAAERLGALSRAIWSQPELAYEEHHAHRVLTHFFEREPPAASWAVQPHYQLPTAFRAEWEPPEARAPSATPRPLHLGFLCEYDALPGIGHACGHNLIAEVGAAAALGVRGALEGLPRPPPPVKVVVLGTPAEEDGGGKIDLIEAGAFTNLDVVFMAHPSQENAAYLPDMAEHDVTVKYYGKASHSASYPWEGLNALDAAVLAYNNLSVFRQQMKPTWRVHGIIKNGGVKPNIIPSYSELIYYFRAPSMKELQVLTKKAEDCFRAAALASGCTVEIKGGAHDYYNVLPNKSLWKAYMENGRKLGIEFISEDTMLNGPSGSTDFGNVSFVVPGIHPYFHIGSNALNHTEQYTEAAGSQEAQFYTLRTAKALAMTALDVIFKPELLEGIREDFKLKLQEEQFVNAVE

SEQ ID NO: 33168 - protein, 250 aa, Homo sapiens
MFSLPLSLPLCEDTAFLPSKCCSSHKTIKQARTLIMIFLASGTHFQTMLKSKLNVLTLKKEPLPAVIFHEPEAIELCTTTPLMKTRTHSGCKVTYLGKVSTTGMQFLSGCTEKPVIELWKKHTLAREDVFPANALLEIRPFQVWLHHLDHKGEATVHMDTFQVARIAYCTADHNVSPNIFAWVYREINDDLSYQMDCHAVECESKLEAKKLAHAMMEAFRKTFHSMKSDGRIHSNSSSEEVSQELESDDG

SEQ ID NO: 33169 - protein, 248 aa, Homo sapiens
MPRIAGNHLMLEESRTCSSPELLDGVWPCQPLHFGLPASEMHFQTMLKSKLNVLTLKKEPLPAVIFHEPEAIELCTTTPLMKTRTHSGCKVTYLGKVSTTGMQFLSGCTEKPVIELWKKHTLAREDVFPANALLEIRPFQVWLHHLDHKGEATVHMDTFQVARIAYCTADHNVSPNIFAWVYREINDDLSYQMDCHAVECESKLEAKKLAHAMMEAFRKTFHSMKSDGRIHSNSSSEEVSQELESDDG

SEQ ID NO: 33170 - protein, 168 aa, Homo sapiens
MWQPATERLQVTYLGKVSTTGMQFLSGCTEKPVIELWKKHTLAREDVFPANALLEIRPFQVWLHHLDHKGEATVHMDTFQVARIAYCTADHNVSPNIFAWVYREINDDLSYQMDCHAVECESKLEAKKLAHAMMEAFRKTFHSMKSDGRIHSNSSSEEVSQELESDDG

SEQ ID NO: 33171 - protein, 217 aa, Homo sapiens
MWQPATERLQHFQTMLKSKLNVLTLKKEPLPAVIFHEPEAIELCTTTPLMKTRTHSGCKVTYLGKVSTTGMQFLSGCTEKPVIELWKKHTLAREDVFPANALLEIRPFQVWLHHLDHKGEATVHMDTFQVARIAYCTADHNVSPNIFAWVYREINDDLSYQMDCHAVECESKLEAKKLAHAMMEAFRKTFHSMKSDGRIHSNSSSEEVSQELESDDG

SEQ ID NO: 33172 - protein, 242 aa, Homo sapiens
MLTRKIKLWDINAHITCRLCSGYLIDATTVTECLHTFCRSCLVKYLEENNTCPTCRIVIHQSHPLQYIGHDRTMQDIVYKLVPGLQEAEMRKQREFYHKLGMEVPGDIKGETCSAKQHLDSHRNGETKADDSSNKEAAEEKPEEDNDYHRSDEQVSICLECNSSKLRGLKRKWIRCSAQATVLHLKKFIAKKLNLSSFNELDILCNEEILGKDHTLKFVVVTRWRFKKAPLLLHYRPKMDLL

SEQ ID NO: 33173 - protein, 247 aa, Homo sapiens
MEFPKMLTRKIKLWDINAHITCRLCSGYLIDATTVTECLHTFCRSCLVKYLEENNTCPTCRIVIHQSHPLQYIGHDRTMQDIVYKLVPGLQEAEMRKQREFYHKLGMEVPGDIKGETCSAKQHLDSHRNGETKADDSSNKEAAEEKPEEDNDYHRSDEQVSICLECNSSKLRGLKRKWIRCSAQATVLHLKKFIAKKLNLSSFNELDILCNEEILGKDHTLKFVVVTRWRFKKAPLLLHYRPKMDLL

SEQ ID NO: 33174 - protein, 312 aa, Homo sapiens
MACAAVMIPGLLRCSVGAIRIEAASLRLTLSTLRHLTLTSIMKSKRKTDHMERTASVLRREIVSAAKVCGAASESPSVKSLRLLVADQDFSFKAGQWVDFFIPGVSVVGGFSICSSPRLLEQERVIELAVKYTNHPPALWVHNTCTLDCEVAVRVGGEFFFDPQPADASRNLVLIAGGVGINPLLSILRHAADLLREQANKRNGYEIGTIKLFYSAKNTSELLFKKNILDLVNEFPEKIACSLHVTKQTTQINAELKPYITEGRITEKEIRDHISKETLFYICGPPPMTDFFSKQLENNHVPKEHICFEKWW

SEQ ID NO: 33175 - protein, 5142 aa, Homo sapiens
MGNEASLEGEGLPEGLAAAAAAGGGASGAGSPSHTAIPAGMEADLSQLSEEERRQIAAVMSRAQGLPKGSVPPAAAESPSMHRKQELDSSHPPKQSGRPPDPGRPAQPGLSKSRTTDTFRSEQKLPGRSPSTISLKESKSRTDLKEEHKSSMMPGFLSEVNALSAVSSVVNKFNPFDLISDSEASQEETTKKQKVVQKEQGKPEGIIKPPLQQQPPKPIPKQQGPGRDPLQQDGTPKSISSQQPEKIKSQPPGTGKPIQGPTQTPQTDHAKLPLQRDASRPQTKQADIVRGESVKPSLPSPSKPPIQQPTPGKPPAQQPGHEKSQPGPAKPPAQPSGLTKPLAQQPGTVKPPVQPPGTTKPPAQPLGPAKPPAQQTGSEKPSSEQPGPKALAQPPGVGKTPAQQPGPAKPPTQQVGTPKPLAQQPGLQSPAKAPGPTKTPVQQPGPGKIPAQQAGPGKTSAQQTGPTKPPSQLPGPAKPPPQQPGPAKPPPQQPGSAKPPSQQPGSTKPPPQQPGPAKPSPQQPGSTKPPSQQPGSAKPSAQQPSPAKPSAQQSTKPVSQTGSGKPLQPPTVSPSAKQPPSQGLPKTICPLCNTTELLLHVPEKANFNTCTECQTTVCSLCGFNPNPHLTEVKEWLCLNCQMKRALGGDLAPVPSSPQPKLKTAPVTTTSAVSKSSPQPQQTSPKKDAAPKQDLSKAPEPKKPPPLVKQPTLHGSPSAKAKQPPEADSLSKPAPPKEPSVPSEQDKAPVADDKPKQPKMVKPTTDLVSSSSATTKPDIPSSKVQSQAEEKTTPPLKTDSAKPSQSFPPTGEKVSPFDSKAIPRPASDSKIISHPGPSSESKGQKQVDPVQKKEEPKKAQTKMSPKPDAKPMPKGSPTPPGPRPTAGQTVPTPQQSPKPQEQSRRFSLNLGSITDAPKSQPTTPQETVTGKLFGFGASIFSQASNLISTAGQPGPHSQSGPGAPMKQAPAPSQPPTSQGPPKSTGQAPPAPAKSIPVKKETKAPAAEKLEPKAEQAPTVKRTETEKKPPPIKDSKSLTAEPQKAVLPTKLEKSPKPESTCPLCKTELNIGSKDPPNFNTCTECKNQVCNLCGFNPTPHLTEIQEWLCLNCQTQRAISGQLGDIRKMPPAPSGPKASPMPVPTESSSQKTAVPPQVKLVKKQEQEVKTEAEKVILEKVKETLSMEKIPPMVTTDQKQEESKLEKDKASALQEKKPLPEEKKLIPEEEKIRSEEKKPLLEEKKPTPEDKKLLPEAKTSAPEEQKHDLLKSQVQIAEEKLEGRVAPKTVQEGKQPQTKMEGLPSGTPQSLPKEDDKTTKTIKEQPQPPCTAKPDQVEPGKEKTEKEDDKSDTSSSQQPKSPQGLSDTGYSSDGISSSLGEIPSLIPTDEKDILKGLKKDSFSQESSPSSPSDLAKLESTVLSILEAQASTLADEKSEKKTQPHEVSPEQPKDQEKTQSLSETLEITISEEEIKESQEERKDTFKKDSQQDIPSSKDHKEKSEFVDDITTRREPYDSVEESSESENSPVPQRKRRTSVGSSSSDEYKQEDSQGSGEEEDFIRKQIIEMSADEDASGSEDDEFIRNQLKEISSSTESQKKEETKGKGKITAGKHRRLTRKSSTSIDEDAGRRHSWHDEDDEAFDESPELKYRETKSQESEELVVTGGGGLRRFKTIELNSTIADKYSAESSQKKTSLYFDEEPELEMESLTDSPEDRSRGEGSSSLHASSFTPGTSPTSVSSLDEDSDSSPSHKKGESKQQRKARHRPHGPLLPTIEDSSEEEELREEEELLKEQEKQREIEQQQRKSSSKKSKKDKDELRAQRRRERPKTPPSNLSPIEDASPTEELRQAAEMEELHRSSCSEYSPSIESDPEGFEISPEKIIEVQKVYKLPTAVSLYSPTDEQSIMQKEGSQKALKSAEEMYEEMMHKTHKYKAFPAANERDEVFEKEPLYGGMLIEDYIYESLVEDTYNGSVDGSLLTRQEEENGFMQQKGREQKIRLSEQIYEDPMQKITDLQKEFYELESLHSVVPQEDIVSSSFIIPESHEIVDLGTMVTSTEEERKLLDADAAYEELMKRQQMQLTPGSSPTQAPIGEDMTESTMDFDRMPDASLTSSVLSGASLTDSTSSATLSIPDVKITQHFSTEEIEDEYVTDYTREIQEIIAHESLILTYSEPSESATSVPPSDTPSLTSSVSSVCTTDSSSPITTLDSITTVYTEPVDMITKFEDSEEISSSTYFPGSIIDYPEEISVSLDRTAPPDGRASADHIVISLSDMASSIIESVVPKPEGPVADTVSTDLLISEKDPVKKAKKETGNGIILEVLEAYRDKKELEAERTKSSLSETVFDHPPSSVIALPMKEQLSTTYFTSGETFGQEKPASQLPSGSPSVSSLPAKPRPFFRSSSLDISAQPPPPPPPPPPPPPPPPPPPPPPLPPPTSPKPTILPKKKLTVASPVTTATPLFDAVTTLETTAVLRSNGLPVTRICTTAPPPVPPKPSSIPSGLVFTHRPEPSKPPIAPKPVIPQLPTTTQKPTDIHPKPTGLSLTSSMTLNLVTSADYKLPSPTSPLSPHSNKSSPRFSKSLTETYVVITLPSEPGTPTDSSASQAITSWPLGSPSKDLVSVEPVFSVVPPVTAVEIPISSEQTFYISGALQTFSATPVTAPSSFQAAPTSVTQFLTTEVSKTEVSATRSTAPSVGLSSISITIPPEPLALDNIHLEKPQYKEDGKLQLVGDVIDLRTVPKVEVKTTDKCIDLSASTMDVKRQITANEVYGKQISAVQPSIINLSVTSSIVTPVSLATETVTFVTCTASASYTTGTESLVGAEHAMTTPLQLTTSKHAEPPYRIPSDQVFPIAREEAPINLSLGTPAHAVTLAITKPVTVPPVGVTNGWTDSTVSQGITDGEVVDLSTTKSHRTVVTMDESTSSVMTKIIEDEKPVDLTAGRRAVCCDVVYKLPFGRSCTAQQPATTLPEDRFGYRDDHYQYDRSGPYGYRGIGGMKPSMSDTNLAEAGHFFYKSKNAFDYSEGTDTAVDLTSGRVTTGEVMDYSSKTTGPYPETRQVISGAGISTPQYSTARMTPPPGPQYCVGSVLRSSNGVVYSSVATPTPSTFAITTQPGSIFSTTVRDLSGIHTADAVTSLPAMHHSQPMPRSYFITTGASETDIAVTGIDISASLQTITMESLTAETIDSVPTLTTASEVFPEVVGDESALLIVPEEDKQQQQLDLERELLELEKIKQQRFAEELEWERQEIQRFREQEKIMVQKKLEELQSMKQHLLFQQEEERQAQFMMRQETLAQQQLQLEQIQQLQQQLHQQLEEQKIRQIYQYNYDPSGTASPQTTTEQAILEGQYAALEGSQFWATEDATTTASAVVAIEIPQSQGWYTVQSDGVTQYIAPPGILSTVSEIPLTDVVVKEEKQPKKRSSGAKVRGQYDDMGENMTDDPRSFKKIVDSGVQTDDEDATDRSYVSRRRRTKKSVDTSVQTDDEDQDEWDMPTRSRRKARVGKYGDSMTEADKTKPLSKVSSIAVQTVAEISVQTEPVGTIRTPSIRARVDAKVEIIKHISAPEKTYKGGSLGCQTEADSDTQSPQYLSATSPPKDKKRPTPLEIGYSSHLRADSTVQLAPSPPKSPKVLYSPISPLSPGKALESAFVPYEKPLPDDISPQKVLHPDMAKVPPASPKTAKMMQRSMSDPKPLSPTADESSRAPFQYTEGYTTKGSQTMTSSGAQKKVKRTLPNPPPEEISTGTQSTFSTMGTVSRRRICRTNTMARAKILQDIDRELDLVERESAKLRKKQAELDEEEKEIDAKLRYLEMGINRRKEALLKEREKRERAYLQGVAEDRDYMSDSEVSSTRPTRIESQHGIERPRTAPQTEFSQFIPPQTQTESQLVPPTSPYTQYQYSSPALPTQAPTSYTQQSHFEQQTLYHQQVSPYQTQPTFQAVATMSFTPQVQPTPTPQPSYQLPSQMMVIQQKPRQTTLYLEPKITSNYEVIRNQPLMIAPVSTDNTFAVSHLGSKYNSLDLRIGLEERSSMASSPISSISADSFYADIDHHTPRNYVLIDDIGEITKGTAALSTAFSLHEKDLSKTDRLLRTTETRRSQEVTDFLAPLQSSSRLHSYVKAEEDPMEDPYELKLLKHQIKQEFRRGTESLDHLAGLSHYYHADTSYRHFPKSEKYSISRLTLEKQAAKQLPAAILYQKQSKHKKSLIDPKMSKFSPIQESRDLEPDYSSYMTSSTSSIGGISSRARLLQDDITFGLRKNITDQQKFMGSSLGTGLGTLGNTIRSALQDEADKPYSSGSRSRPSSRPSSVYGLDLSIKRDSSSSSLRLKAQEAEALDVSFSHASSSARTKPTSLPISQSRGRIPIVAQNSEEESPLSPVGQPMGMARAAAGPLPPISADTRDQFGSSHSLPEVQQHMREESRTRGYDRDIAFIMDDFQHAMSDSEAYHLRREETDWFDKPRESRLENGHGLDRKLPERLVHSRPLSQHQEQIIQMNGKTMHYIFPHARIKITRDSKDHTVSGNGLGIRIVGGKEIPGHSGEIGAYIAKILPGGSAEQTGKLMEGMQVLEWNGIPLTSKTYEEVQSIISQQSGEAEICVRLDLNMLSDSENSQHLELHEPPKAVDKAKSPGVDPKQLAAELQKVSLQQSPLVLSSVVEKGSHVHSGPTSAGSSSVPSPGQPGSPSVSKKKHGSSKPTDGTKVVSHPITGEIQLQINYDLGNLIIHILQARNLVPRDNNGYSDPFVKVYLLPGRGQVMVVQNASAEYKRRTKHVQKSLNPEWNQTVIYKSISMEQLKKKTLEVTVWDYDRFSSNDFLGEVLIDLSSTSHLDNTPRWYPLKEQTESIDHGKSHSSQSSQQSPKPSVIKSRSHGIFPDPSKDMQVPTIEKSHSSPGSSKSSSEGHLRSHGPSRSQSKTSVTQTHLEDAGAAIAAAEAAVQQLRIQPTKPPNHRPAESSVSTGSSGSSFGSGYSVDSEGSSSTAGETNLFPIPRIGKMGQNGQEPVKQPGVGVGLADTEAKTQVMGEIKIALKKEMKTDGEQLIVEILQCRNITYKFKSPDHLPDLYVKIYVMNISTQKKVIKKKTRVCRHDREPSFNETFRFSLSPAGHSLQILLFSNGGKFMKKTLIGEACIWLDKVDLRKRIVNWHKLLVSPTQTH

SEQ ID NO: 33176 - protein, 356 aa, Homo sapiens
MKKFRVSLVSKVGKQKYVDLNMLSDSENSQHLELHEPPKAVDKAKSPGVDPKQLAAELQKVSLQQSPLVLSSVVEKGSHVHSGPTSAGSSSVPSPGQPGSPSVSKKKHGSSKPTDGTKVVSHPITGEIQLQINYDLGNLIIHILQARNLVPRDNNGYSDPFVKVYLLPGRGAEYKRRTKHVQKSLNPEWNQTVIYKSISMEQLKKKTLEVTVWDYDRFSSNDFLGEVLIDLSSTSHLDNTPRWYPLKEQTESIDHGKSHSSQSSQQSPKPSVIKSRSHGIFPDPSKDMQVPTIEKSHSSPGSSKSSSEGHLRSHGPSRSQSKTSVTQTHLEDAGAAIAAAEAAVQQLRIQPSKRRK

SEQ ID NO: 33177 - protein, 4935 aa, Homo sapiens
MGNEASLEGEGLPEGLAAAAAAGGGASGAGSPSHTAIPAGMEADLSQLSEEERRQIAAVMSRAQGLPKGSVPPAAAESPSMHRKQELDSSHPPKQSGRPPDPGRPAQPGLSKSRTTDTFRSEQKLPGRSPSTISLKESKSRTDLKEEHKSSMMPGFLSEVNALSAVSSVVNKFNPFDLISDSEASQEETTKKQKVVQKEQGKPEGIIKPPLQQQPPKPIPKQQGPGRDPLQQDGTPKSISSQQPEKIKSQPPGTGKPIQGPTQTPQTDHAKLPLQRDASRPQTKQADIVRGESVKPSLPSPSKPPIQQPTPGKPPAQQPGHEKSQPGPAKPPAQPSGLTKPLAQQPGTVKPPVQPPGTTKPPAQPLGPAKPPAQQTGSEKPSSEQPGPKALAQPPGVGKTPAQQPGPAKPPTQQVGTPKPLAQQPGLQSPAKAPGPTKTPVQQPGPGKIPAQQAGPGKTSAQQTGPTKPPSQLPGPAKPPPQQPGPAKPPPQQPGSAKPPSQQPGSTKPPPQQPGPAKPSPQQPGSTKPPSQQPGSAKPSAQQPSPAKPSAQQSTKPVSQTGSGKPLQPPTVSPSAKQPPSQGLPKTICPLCNTTELLLHVPEKANFNTCTECQTTVCSLCGFNPNPHLTEVKEWLCLNCQMKRALGGDLAPVPSSPQPKLKTAPVTTTSAVSKSSPQPQQTSPKKDAAPKQDLSKAPEPKKPPPLVKQPTLHGSPSAKAKQPPEADSLSKPAPPKEPSVPSEQDKAPVADDKPKQPKMVKPTTDLVSSSSATTKPDIPSSKVQSQAEEKTTPPLKTDSAKPSQSFPPTGEKVSPFDSKAIPRPASDSKIISHPGPSSESKGQKQVDPVQKKEEPKKAQTKMSPKPDAKPMPKGSPTPPGPRPTAGQTVPTPQQSPKPQEQSRRFSLNLGSITDAPKSQPTTPQETVTGKLFGFGASIFSQASNLISTAGQPGPHSQSGPGAPMKQAPAPSQPPTSQGPPKSTGQAPPAPAKSIPVKKETKAPAAEKLEPKAEQAPTVKRTETEKKPPPIKDSKSLTAEPQKAVLPTKLEKSPKPESTCPLCKTELNIGSKDPPNFNTCTECKNQVCNLCGFNPTPHLTEIQEWLCLNCQTQRAISGQLGDIRKMPPAPSGPKASPMPVPTESSSQKTAVPPQVKLVKKQEQEVKTEAEKVILEKVKETLSMEKIPPMVTTDQKQEESKLEKDKASALQEKKPLPEEKKLIPEEEKIRSEEKKPLLEEKKPTPEDKKLLPEAKTSAPEEQKHDLLKSQVQIAEEKLEGRVAPKTVQEGKQPQTKMEGLPSGTPQSLPKEDDKTTKTIKEQPQPPCTAKPDQVEPGKEKTEKEDDKSDTSSSQQPKSPQGLSDTGYSSDGISSSLGEIPSLIPTDEKDILKGLKKDSFSQESSPSSPSDLAKLESTVLSILEAQASTLADEKSEKKTQPHEVSPEQPKDQEKTQSLSETLEITISEEEIKESQEERKDTFKKDSQQDIPSSKDHKEKSEFVDDITTRREPYDSVEESSESENSPVPQRKRRTSVGSSSSDEYKQEDSQGSGEEEDFIRKQIIEMSADEDASGSEDDEFIRNQLKEISSSTESQKKEETKGKGKITAGKHRRLTRKSSTSIDEDAGRRHSWHDEDDEAFDESPELKYRETKSQESEELVVTGGGGLRRFKTIELNSTIADKYSAESSQKKTSLYFDEEPELEMESLTDSPEDRSRGEGSSSLHASSFTPGTSPTSVSSLDEDSDSSPSHKKGESKQQRKARHRPHGPLLPTIEDSSEEEELREEEELLKEQEKQREIEQQQRKSSSKKSKKDKDELRAQRRRERPKTPPSNLSPIEDASPTEELRQAAEMEELHRSSCSEYSPSIESDPEGFEISPEKIIEVQKVYKLPTAVSLYSPTDEQSIMQKEGSQKALKSAEEMYEEMMHKTHKYKAFPAANERDEVFEKEPLYGGMLIEDYIYESLVEDTYNGSVDGSLLTRQEEENGFMQQKGREQKIRLSEQIYEDPMQKITDLQKEFYELESLHSVVPQEDIVSSSFIIPESHEIVDLGTMVTSTEEERKLLDADAAYEELMKRQQMQLTPGSSPTQAPIGEDMTESTMDFDRMPDASLTSSVLSGASLTDSTSSATLSIPDVKITQHFSTEEIEDEYVTDYTREIQEIIAHESLILTYSEPSESATSVPPSDTPSLTSSVSSVCTTDSSSPITTLDSITTVYTEPVDMITKFEDSEEISSSTYFPGSIIDYPEEISVSLDRTAPPDGRASADHIVISLSDMASSIIESVVPKPEGPVADTVSTDLLISEKDPVKKAKKETGNGIILEVLEAYRDKKELEAERTKSSLSETVFDHPPSSVIALPMKEQLSTTYFTSGETFGQEKPASQLPSGSPSVSSLPAKPRPFFRSSSLDISAQPPPPPPPPPPPPPPPPPPPPPPLPPPTSPKPTILPKKKLTVASPVTTATPLFDAVTTLETTAVLRSNGLPVTRICTTAPPPVPPKPSSIPSGLVFTHRPEPSKPPIAPKPVIPQLPTTTQKPTDIHPKPTGLSLTSSMTLNLVTSADYKLPSPTSPLSPHSNKSSPRFSKSLTETYVVITLPSEPGTPTDSSASQAITSWPLGSPSKDLVSVEPVFSVVPPVTAVEIPISSEQTFYISGALQTFSATPVTAPSSFQAAPTSVTQFLTTEVSKTEVSATRSTAPSVGLSSISITIPPEPLALDNIHLEKPQYKEDGKLQLVGDVIDLRTVPKVEVKTTDKCIDLSASTMDVKRQITANEVYGKQISAVQPSIINLSVTSSIVTPVSLATETVTFVTCTASASYTTGTESLVGAEHAMTTPLQLTTSKHAEPPYRIPSDQVFPIAREEAPINLSLGTPAHAVTLAITKPVTVPPVGVTNGWTDSTVSQGITDGEVVDLSTTKSHRTVVTMDESTSSVMTKIIEDEKPVDLTAGRRAVCCDVVYKLPFGRSCTAQQPATTLPEDRFGYRDDHYQYDRSGPYGYRGIGGMKPSMSDTNLAEAGHFFYKSKNAFDYSEGTDTAVDLTSGRVTTGEVMDYSSKTTGPYPETRQVISGAGISTPQYSTARMTPPPGPQYCVGSVLRSSNGVVYSSVATPTPSTFAITTQPGSIFSTTVRDLSGIHTADAVTSLPAMHHSQPMPRSYFITTGASETDIAVTGIDISASLQTITMESLTAETIDSVPTLTTASEVFPEVVGDESALLIVPEEDKQQQQLDLERELLELEKIKQQRFAEELEWERQEIQRFREQEKIMVQKKLEELQSMKQHLLFQQEEERQAQFMMRQETLAQQQLQLEQIQQLQQQLHQQLEEQKIRQIYQYNYDPSGTASPQTTTEQAILEGQYAALEGSQFWATEDATTTASAVVAIEIPQSQGWYTVQSDGVTQYIAPPGILSTVSEIPLTDVVVKEEKQPKKRSSGAKVRGQYDDMGENMTDDPRSFKKIVDSGVQTDDEDATDRSYVSRRRRTKKSVDTSVQTDDEDQDEWDMPTRSRRKARVGKYGDSMTEADKTKPLSKVSSIAVQTVAEISVQTEPVGTIRTPSIRARVDAKVEIIKHISAPEKTYKGGSLGCQTEADSDTQSPQYLSATSPPKDKKRPTPLEIGYSSHLRADSTVQLAPSPPKSPKVLYSPISPLSPGKALESAFVPYEKPLPDDISPQKVLHPDMAKVPPASPKTAKMMQRSMSDPKPLSPTADESSRAPFQYTEGYTTKGSQTMTSSGAQKKVKRTLPNPPPEEISTGTQSTFSTMGTVSRRRICRTNTMARAKILQDIDRELDLVERESAKLRKKQAELDEEEKEIDAKLRYLEMGINRRKEALLKEREKRERAYLQGVAEDRDYMSDSEVSSTRPTRIESQHGIERPRTAPQTEFSQFIPPQTQTESQLVPPTSPYTQYQYSSPALPTQAPTSYTQQSHFEQQTLYHQQVSPYQTQPTFQAVATMSFTPQVQPTPTPQPSYQLPSQMMVIQQKPRQTTLYLEPKITSNYEVIRNQPLMIAPVSTDNTFAVSHLGSKYNSLDLRIGLEERSSMASSPISSISADSFYADIDHHTPRNYVLIDDIGEITKGTAALSTAFSLHEKDLSKTDRLLRTTETRRSQEVTDFLAPLQSSSRLHSYVKAEEDPMEDPYELKLLKHQIKQEFRRGTESLDHLAGLSHYYHADTSYRHFPKSEKYSISRLTLEKQAAKQLPAAILYQKQSKHKKSLIDPKMSKFSPIQESRDLEPDYSSYMTSSTSSIGGISSRARLLQDDITFGLRKNITDQQKFMGSSLGTGLGTLGNTIRSALQDEADKPYSSGSRSRPSSRPSSVYGLDLSIKRDSSSSSLRLKAQEAEALDVSFSHASSSARTKPTSLPISQSRGRIPIVAQNSEEESPLSPVGQPMGMARAAAGPLPPISADTRDQFGSSHSLPEVQQHMREESRTRGYDRDIAFIMDDFQHAMSDSEAYHLRREETDWFDKPRESRLENGHGLDRKLPERLVHSRPLSQHQEQIIQMNGKTMHYIFPHARIKITRDSKDHTVSGNGLGIRIVGGKEIPGHSGEIGAYIAKILPGGSAEQTGKLMEGMQVLEWNGIPLTSKTYEEVQSIISQQSGEAEICVRLDLNMLSDSENSQHLELHEPPKAVDKAKSPGVDPKQLAAELQKVSLQQSPLVLSSVVEKGSHVHSGPTSAGSSSVPSPGQPGSPSVSKKKHGSSKPTDGTKVVSHPITGEIQLQINYDLGNLIIHILQARNLVPRDNNGYSDPFVKVYLLPGRGQVMVVQNASAEYKRRTKHVQKSLNPEWNQTVIYKSISMEQLKKKTLEVTVWDYDRFSSNDFLGEVLIDLSSTSHLDNTPRWYPLKEQTESIDHGKSHSSQSSQQSPKPSVIKSRSHGIFPDPSKDMQVPTIEKSHSSPGSSKSSSEGHLRSHGPSRSQSKTSVTQTHLEDAGAAIAAAEAAVQQLRIQPSKRRK

SEQ ID NO: 33178 - protein, 874 aa, Homo sapiens
MTKDKNSPGLKKKSQSVDINAPGFNPLAGAGKQTPQASKPPAPKTPIIEEEQNNAANTQKHPSRRSELKRFYTIDTGQKKTLDKKDGRRMSFQKPKGTIEYTVESRDSLNSIALKFDTTPNELVQLNKLFSRAVVTGQVLYVPDPEYVSSVESSPSLSPVSPLSPTSSEAEFDKTTNPDVHPTEATPSSTFTGIRPARVVSSTSEEEEAFTEKFLKINCKYITSGKGTVSGVLLVTPNNIMFDPHKNDPLVQENGCEEYGIMCPMEEVMSAAMYKEILDSKIKESLPIDIDQLSGRDFCHSKKMTGSNTEEIDSRIRDAGNDSASTAPRSTEESLSEDVFTESELSPIREELVSSDELRQDKSSGASSESVQTVNQAEVESLTVKSESTGTPGHLRSDTEHSTNEVGTLCHKTDLNNLEMAIKEDQIADNFQGISGPKEDSTSIKGNSDQDSFLHENSLHQEESQKENMPCGETAEFKQKQSVNKGKQGKEQNQDSQTEAEELRKLWKTHTMQQTKQQRENIQQVSQKEAKHKITSADGHIESSALLKEKQRHRLHKFLCLRVGKPMRKTFVSQASATMQQYAQRDKKHEYWFAVPQERTDHLYAFFIQWSPEIYAEDTGEYTREPGFIVVKKIEESETIEDSSNQAAAREWEVVSVAEYHRRIDALNTEELRTLCRRLQITTREDINSKQVATVKADLESESFRPNLSDPSELLLPDQIEKLTKHLPPRTIGYPWTLVYGTGKHGTSLKTLYRTMTGLDTPVLMVIKDSDGQVFGALASEPLKVSDGFYGTGETFVFTFCPEFEVFKWTGDNMFFIKGDMDSLAFGGGGGEFALWLDGDLYHGRSHSCKTFGNRTLSKKEDFFIQDIEIWAFE

SEQ ID NO: 33179 - protein, 839 aa, Homo sapiens
MDYLTTFTEKSGRLLRGTANRLLGFGGGGEARQVRFEDYLREPAQGDLGCGSPPHRPPAPSSPEGPDTGQKKTLDKKDGRRMSFQKPKGTIEYTVESRDSLNSIALKFDTTPNELVQLNKLFSRAVVTGQVLYVPDPEYVSSVESSPSLSPVSPLSPTSSEAEFDKTTNPDVHPTEATPSSTFTGIRPARVVSSTSEEEEAFTEKFLKINCKYITSGKGTVSGVLLVTPNNIMFDPHKNDPLVQENGCEEYGIMCPMEEVMSAAMYKEILDSKIKESLPIDIDQLSGRDFCHSKKMTGSNTEEIDSRIRDAGNDSASTAPRSTEESLSEDVFTESELSPIREELVSSDELRQDKSSGASSESVQTVNQAEVESLTVKSESTGTPGHLRSDTEHSTNEVGTLCHKTDLNNLEMAIKEDQIADNFQGISGPKEDSTSIKGNSDQDSFLHENSLHQEESQKENMPCGETAEFKQKQSVNKGKQGKEQNQDSQTEAEELRKLWKTHTMQQTKQQRENIQQVSQKEAKHKITSADGHIESSALLKEKQRHRLHKFLCLRVGKPMRKTFVSQASATMQQYAQRDKKHEYWFAVPQERTDHLYAFFIQWSPEIYAEDTGEYTREPGFIVVKKIEESETIEDSSNQAAAREWEITTREDINSKQVATVKADLESESFRPNLSDPSELLLPDQIEKLTKHLPPRTIGYPWTLVYGTGKHGTSLKTLYRTMTGLDTPVLMVIKDSDGQVFGALASEPLKVSDGFYGTGETFVFTFCPEFEVFKWTGDNMFFIKGDMDSLAFGGGGGEFALWLDGDLYHGRSHSCKTFGNRTLSKKEDFFIQDIEIWAFE

SEQ ID NO: 33180 - protein, 503 aa, Homo sapiens
MFCQRKDTGQKKTLDKKDGRRMSFQKPKGTIEYTVESRDSLNSIALKFDTTPNELVQLNKLFSRAVVTGQVLYVPDPEYVSSVESSPSLSPVSPLSPTSSEAEFDKTTNPDVHPTEATPSSTFTGIRPARVVSSTSEEEEAFTEKFLKINCKYITSGKGTVSGVLLVTPNNIMFDPHKNDPLVQENGCEEYGIMCPMEEVMSAAMYKEILDSKIKESLPIDIDQLSGRDFCHSKKMTGSNTEEIDSRIRDAGNDSASTAPRSTEESLSEDVFTESELSPIREELVSSDELRQDKSSGASSESVQTVNQAEVESLTVKSESTGTPGHLRSDTEHSTNEVGTLCHKTDLNNLEMAIKEDQIADNFQGISGPKEDSTSIKGNSDQDSFLHENSLHQEESQKENMPCGETAEFKQKQSVNKGKQGKEQNQDSQTEAEELRKLWKTHTMQQTKQQRENIQQVSQKEAKHKITSADGHIESKCYRVNEVSSSNCMVSPSFLTDSKAAVP

SEQ ID NO: 33181 - protein, 243 aa, Homo sapiens
MSRLWYGKKGRRHQPINHKYTLVVSVAEYHRRIDALNTEELRTLCRRLQITTREDINSKQVATVKADLESESFRPNLSDPSELLLPDQIEKLTKHLPPRTIGYPWTLVYGTGKHGTSLKTLYRTMTGLDTPVLMVIKDSDGQVFGALASEPLKVSDGFYGTGETFVFTFCPEFEVFKWTGDNMFFIKGDMDSLAFGGGGGEFALWLDGDLYHGRSHSCKTFGNRTLSKKEDFFIQDIEIWAFE

SEQ ID NO: 33182 - protein, 846 aa, Homo sapiens
MSVSNLSWLKKKSQSVDINAPGFNPLAGAGKQTPQASKPPAPKTPIIEEEQNNAANTQKHPSRRSELKRFYTIDTGQKKTLDKKDGRRMSFQKPKGTIEYTVESRDSLNSIALKFDTTPNELVQLNKLFSRAVVTGQVLYVPDPEYVSSVESSPSLSPVSPLSPTSSEAEFDKTTNPDVHPTEATPSSTFTGIRPARVVSSTSEEEEAFTEKFLKINCKYITSGKGTVSGVLLVTPNNIMFDPHKNDPLVQENGCEEYGIMCPMEEVMSAAMYKEILDSKIKESLPIDIDQLSGRDFCHSKKMTGSNTEEIDSRIRDAGNDSASTAPRSTEESLSEDVFTESELSPIREELVSSDELRQDKSSGASSESVQTVNQAEVESLTVKSESTGTPGHLRSDTEHSTNEVGTLCHKTDLNNLEMAIKEDQIADNFQGISGPKEDSTSIKGNSDQDSFLHENSLHQEESQKENMPCGETAEFKQKQSVNKGKQGKEQNQDSQTEAEELRKLWKTHTMQQTKQQRENIQQVSQKEAKHKITSADGHIESSALLKEKQRHRLHKFLCLRVGKPMRKTFVSQASATMQQYAQRDKKHEYWFAVPQERTDHLYAFFIQWSPEIYAEDTGEYTREPGFIVVKKIEESETIEDSSNQAAAREWEITTREDINSKQVATVKADLESESFRPNLSDPSELLLPDQIEKLTKHLPPRTIGYPWTLVYGTGKHGTSLKTLYRTMTGLDTPVLMVIKDSDGQVFGALASEPLKVSDGFYGTGETFVFTFCPEFEVFKWTGDNMFFIKGDMDSLAFGGGGGEFALWLDGDLYHGRSHSCKTFGNRTLSKKEDFFIQDIEIWAFE

SEQ ID NO: 33183 - protein, 294 aa, Homo sapiens
MQQTKQQRENIQQVSQKEAKHKITSADGHIESSALLKEKQRHRLHKFLCLRVGKPMRKTFVSQASATMQQYAQRDKKHEYWFAVPQERTDHLYAFFIQWSPEIYAEDTGEYTREPGFIVVKKIEESETIEDSSNQAAAREWELTKHLPPRTIGYPWTLVYGTGKHGTSLKTLYRTMTGLDTPVLMVIKDSDGQVFGALASEPLKVSDGFYGTGETFVFTFCPEFEVFKWTGDNMFFIKGDMDSLAFGGGGGEFALWLDGDLYHGRSHSCKTFGNRTLSKKEDFFIQDIEIWAFE

SEQ ID NO: 33184 - protein, 216 aa, Homo sapiens
MSRLWYGKKGRRHQPINHKYTLITTREDINSKQVATVKADLESESFRPNLSDPSELLLPDQIEKLTKHLPPRTIGYPWTLVYGTGKHGTSLKTLYRTMTGLDTPVLMVIKDSDGQVFGALASEPLKVSDGFYGTGETFVFTFCPEFEVFKWTGDNMFFIKGDMDSLAFGGGGGEFALWLDGDLYHGRSHSCKTFGNRTLSKKEDFFIQDIEIWAFE

SEQ ID NO: 33185 - protein, 873 aa, Homo sapiens
MSVSNLSWLKKKSQSVDINAPGFNPLAGAGKQTPQASKPPAPKTPIIEEEQNNAANTQKHPSRRSELKRFYTIDTGQKKTLDKKDGRRMSFQKPKGTIEYTVESRDSLNSIALKFDTTPNELVQLNKLFSRAVVTGQVLYVPDPEYVSSVESSPSLSPVSPLSPTSSEAEFDKTTNPDVHPTEATPSSTFTGIRPARVVSSTSEEEEAFTEKFLKINCKYITSGKGTVSGVLLVTPNNIMFDPHKNDPLVQENGCEEYGIMCPMEEVMSAAMYKEILDSKIKESLPIDIDQLSGRDFCHSKKMTGSNTEEIDSRIRDAGNDSASTAPRSTEESLSEDVFTESELSPIREELVSSDELRQDKSSGASSESVQTVNQAEVESLTVKSESTGTPGHLRSDTEHSTNEVGTLCHKTDLNNLEMAIKEDQIADNFQGISGPKEDSTSIKGNSDQDSFLHENSLHQEESQKENMPCGETAEFKQKQSVNKGKQGKEQNQDSQTEAEELRKLWKTHTMQQTKQQRENIQQVSQKEAKHKITSADGHIESSALLKEKQRHRLHKFLCLRVGKPMRKTFVSQASATMQQYAQRDKKHEYWFAVPQERTDHLYAFFIQWSPEIYAEDTGEYTREPGFIVVKKIEESETIEDSSNQAAAREWEVVSVAEYHRRIDALNTEELRTLCRRLQITTREDINSKQVATVKADLESESFRPNLSDPSELLLPDQIEKLTKHLPPRTIGYPWTLVYGTGKHGTSLKTLYRTMTGLDTPVLMVIKDSDGQVFGALASEPLKVSDGFYGTGETFVFTFCPEFEVFKWTGDNMFFIKGDMDSLAFGGGGGEFALWLDGDLYHGRSHSCKTFGNRTLSKKEDFFIQDIEIWAFE

SEQ ID NO: 33186 - protein, 279 aa, Homo sapiens
MYGYRRLRSPRDSQTEPQNDNEGETSLATTQMNPPKRRQVEQGPSTGAKKPSISGAPHLNSYQSLELPQNQQDSGTEELMIVLEQGTEVRLSLEEVILILAPETVLQLTLENTVLVIVPEHVLRSEDGLQSPVQIQYIIPSVDDFSLEFHAQDGDISDMRRENVPFSPAEEGKAAPLYQQPLMIPQANHMAGISPSFLVTPLCIPRCRAAFPQCYPLPPTPSPVGRPRPADSSFSLHGMELLCTSSLRPMPPSPSPGPQVYHRVHHRPPSRARRCLFRK

SEQ ID NO: 33187 - protein, 61 aa, Homo sapiens
MDPNCSCTTGGSCACAGSCKCKECKCTSCKKCCCSCCPVGCAKCAQGCVCKGSSEKCRCCA

SEQ ID NO: 33188 - protein, 49 aa, Homo sapiens
MDLSCSCATGGSCTCASSCKCKEYKCTSCKKNCCSCCPMGCAKCAQGCT

SEQ ID NO: 33189 - protein, 389 aa, Homo sapiens
MGASDPEVAPWARGGAAGMAGAGAGAGARGGAAAGVEARARDPPPAHRAHPRHPRPAAQPSARRMDGGSGGLGSGDNAPTTEALFVALGAGVTALSHPLLYVKLLIQVGHEPMPPTLGTNVLGRKVLYLPSFFTYAKYIVQVDGKIGLFRGLSPRLMSNALSTVTRGSMKKVFPPDEIEQVSNKDDMKTSLKKVVKETSYEMMMQCVSRMLAHPLHVISMRCMVQFVGREAKYSGVLSSIGKIFKEEGLLGFFVGLIPHLLGDVVFLWGCNLLAHFINAYLVDDSVSDTPGGLGNDQNPGSQFSQALAIRSYTKFVMGIAVSMLTYPFLLVGDLMAVNNCGLQAGLPPYSPVFKSWIHCWKYLSVQGQLFRGSSLLFRRVSSGSCFALE

SEQ ID NO: 33190 - protein, 372 aa, Homo sapiens
MGASDPEVAPWARGGAAGMAGAGAGAGARGGAAAGVEARARDPPPAHRAHPRHPRPAAQPSARRMDGGSGGLGSGDNAPTTEALFVALGAGVTALSHPLLYVKLLIQVGHEPMPPTLGTNVLGRKVLYLPSFFTYAKYIVQVDGKIGLFRGLSPRLMSNALSTVTRGSMKKVFPPDEIEQVSNKDDMKTSLKKVVKETSYEMMMQCVSRMLAHPLHVISMRCMVQFVGREAKYSGVLSSIGKIFKEEGLLGFFVGLIPHLLGDVVFLWGCNLLAHFINAYLVDDSFSQALAIRSYTKFVMGIAVSMLTYPFLLVGDLMAVNNCGLQAGLPPYSPVFKSWIHCWKYLSVQGQLFRGSSLLFRRVSSGSCFALE

SEQ ID NO: 33191 - protein, 171 aa, Homo sapiens
MMMQCVSRMLAHPLHVISMRCMVQFVGREAKYSGVLSSIGKIFKEEGLLGFFVGLIPHLLGDVVFLWGCNLLAHFINAYLVDDSFSQALAIRSYTKFVMGIAVSMLTYPFLLVGDLMAVNNCGLQAGLPPYSPVFKSWIHCWKYLSVQGQLFRGSSLLFRRVSSGSCFALE

SEQ ID NO: 33192 - protein, 665 aa, Homo sapiens
MDRPAAAAAAGCEGGGGPNPGPAGGRRPPRAAGGATAGSRQPSVETLDSPTGSHVEWCKQLIAATISSQISGSVTSENVSRDYKALRDGNKLAQMEEAPLFPGESIKAIVKDVMYICPFMGAVSGTLTVTDFKLYFKNVERDPHFILDVPLGVISRVEKIGAQSHGDNSCGIEIVCKDMRNLRLAYKQEEQSKLGIFENLNKHAFPLSNGQALFAFSYKEKFPINGWKVYDPVSEYKRQGLPNESWKISKINSNYEFCDTYPAIIVVPTSVKDDDLSKVAAFRAKGRVPVLSWIHPESQATITRCSQPLVGPNDKRCKEDEKYLQTIMDANAQSHKLIIFDARQNSVADTNKTKGGGYESESAYPNAELVFLEIHNIHVMRESLRKLKEIVYPSIDEARWLSNVDGTHWLEYIRMLLAGAVRIADKIESGKTSVVVHCSDGWDRTAQLTSLAMLMLDSYYRTIKGFETLVEKEWISFGHRFALRVGHGNDNHADADRSPIFLQFVDCVWQMTRQFPSAFEFNELFLITILDHLYSCLFGTFLCNCEQQRFKEDVYTKTISLWSYINSQLDEFSNPFFVNYENHVLYPVASLSHLELWVNYYVRWNPRMRPQMPIHQNLKELLAVRAELQKRVEGLQREVATRAVSSSSERGSSPSHSATSVHTSV

SEQ ID NO: 33193 - protein, 568 aa, Homo sapiens
MDRPAAAAAAGCEGGGGPNPGPAGGRRPPRAAGGATAGSRQPSVETLDSPTGSHVEWCKQLIAATISSQISGSVTSENVSRDYKALRDGNKLAQMEEAPLFPGESIKAIVKDVMYICPFMGAVSGTLTVTDFKLYFKNVERDPHFILDVPLGVISRVEKIGAQSHGDNSCGIEIVCKDMRNLRLAYKQEEQSKLGIFENLNKHAFPLSNGQALFAFSYKEKFPINGWKVYDPVSEYKRQGLPNESWKISKINSNYEFCDTYPAIIVVPTSVKDDDLSKVAAFRAKGRVPVLSWIHPESQATITRCSQPLVGPNDKRCKEDEKYLQTIMDANAQSHKLIIFDARQNSVADTNKTKGGGYESESAYPNAELVFLEIHNIHVMRESLRKLKEIVYPSIDEARWLSNVDGTHWLEYIRMLLAGAVRIADKIESGKTSVVVHCSDGWDRTAQLTSLAMLMLDSYYRTIKGFETLVEKEWISFGHRFALRVGHGNDNHADADRSPIFLQFVDCVWQMTRQFPSAFEFNELFLITILDHLYSCLFGTFLCNCEQQRFKEAWGAGTQRARGSLRSR

SEQ ID NO: 33194 - protein, 61 aa, Homo sapiens
MDPNCSCATGGSCTCAGSCKCKECKCTSCKKSCCSCCPVGCAKCAQGCVCKGASEKCSCCA

SEQ ID NO: 33195 - protein, 127 aa, Homo sapiens
MDPNCSCATGGSCTCAGSCKCKECKCTSCKKSECGAISRNLGLWLRLGGNSRLALSASFWGTGLSLPSLPVSFPLQAFCPKFRWGRTAFFSWDTNPNCTPYGFRTELCQTKKSILWVWVLSSSQACY

SEQ ID NO: 33196 - protein, 303 aa, Homo sapiens
MADAASQVLLGSGLTILSQPLMYVKVLIQVGYEPLPPTIGRNIFGRQVCQLPGLFSYAQHIASIDGRRGLFTGLTPRLCSGVLGTVVHGKVLQHYQESDKGEELGPGNVQKEVSSSFDHVIKETTREMIARSAATLITHPFHVITLRSMVQFIGRESKYCGLCDSIITIYREEGILGFFAGLVPRLLGDILSLWLCNSLAYLVNTYALDSGVSTMNEMKSYSQAVTGFFASMLTYPFVLVSNLMAVNNCGLAGGCPPYSPIYTSWIDCWCMLQKEGNMSRGNSLFFRKVPFGKTYCCDLKMLI

SEQ ID NO: 33197 - protein, 61 aa, Homo sapiens
MDPNCSCAAGVSCTCAGSCKCKECKCTSCKKSCCSCCPVGCSKCAQGCVCKGASEKCSCCD

SEQ ID NO: 33198 - protein, 770 aa, Homo sapiens
MFRYESLEDCPLDEDEDAFQGLGEEDEEIDQFNDDTFGSGAVDDDWQEAHERLAELEEKLPVAVNEQTGNGERDEMDLLGDHEENLAERLSKMVIENELEDPAIMRAVQTRPVLQPQPGSLNSSIWDGSEVLRRIRGPLLAQEMPTVSVLEYALPQRPPQGPEDDRDLSERALPRRSTSPIIGSPPVRAVPIGTPPKQMAVPSFTQQILCPKPVHVRPPMPPRYPAPYGERMSPNQLCSVPNSSLLGHPFPPSVPPVLSPLQRAQLLGGAQLQPGRMSPSQFARVPGFVGSPLAAMNPKLLQGRVGQMLPPAPGFRAFFSAPPSATPPPQQHPPGPGPHLQNLRSQAPMFRPDTTHLHPQHRRLLHQRQQQNRSQHRNLNGAGDRGSHRSSHQDHLRKDPYANLMLQREKDWVSKIQMMQLQSTDPYLDDFYYQNYFEKLEKLSAAEEIQGDGPKKERTKLITPQVAKLEHAYKPVQFEGSLGKLTVSSVNNPRKMIDAVVTSRSEDDETKEKQVRDKRRKTLVIIEKTYSLLLDVEDYERRYLLSLEEERPALMDDRKHKICSMYDNLRGKLPGQERPSDDHFVQIMCIRKGKRMVARILPFLSTEQAADILMTTARNLPFLIKKDAQDEVLPCLLSPFSLLLYHLPSVSITSLLRQLMNLPQSAATPALSNPHLTAVLQNKFGLSLLLILLSRGEDLQSSDPATESTQNNQWTEVMFMATRELLRIPQAALAKPISIPTNLVSLFSRYVDRQKLNLLETKLQLVQGIR

SEQ ID NO: 33199 - protein, 627 aa, Homo sapiens
MPTVSVLEYALPQRPPQGPEDDRDLSERALPRRSTSPIIGSPPVRAVPIGTPPKQMAVPSFTQQILCPKPVHVRPPMPPRYPAPYGERMSPNQLCSVPNSSLLGHPFPPSVPPVLSPLQRAQLLGGAQLQPGRMSPSQFARVPGFVGSPLAAMNPKLLQGRVGQMLPPAPGFRAFFSAPPSATPPPQQHPPGPGPHLQNLRSQAPMFRPDTTHLHPQHRRLLHQRQQQNRSQHRNLNGAGDRGSHRSSHQDHLRKDPYANLMLQREKDWVSKIQMMQLQSTDPYLDDFYYQNYFEKLEKLSAAEEIQGDGPKKERTKLITPQVAKLEHAYKPVQFEGSLGKLTVSSVNNPRKMIDAVVTSRSEDDETKEKQVRDKRRKTLVIIEKTYSLLLDVEDYERRYLLSLEEERPALMDDRKHKICSMYDNLRGKLPGQERPSDDHFVQIMCIRKGKRMVARILPFLSTEQAADILMTTARNLPFLIKKDAQDEVLPCLLSPFSLLLYHLPSVSITSLLRQLMNLPQSAATPALSNPHLTAVLQNKFGLSLLLILLSRGEDLQSSDPATESTQNNQWTEVMFMATRELLRIPQAALAKPISIPTNLVSLFSRYVDRQKLNLLETKLQLVQGIR

SEQ ID NO: 33200 - protein, 111 aa, Homo sapiens
MNLPQSAATPALSNPHLTAVLQNKFGLSLLLILLSRGEDLQSSDPATESTQNNQWTEVMFMATRELLRIPQAALAKPISIPTNLVSLFSRYVDRQKLNLLETKLQLVQGIR

SEQ ID NO: 33201 - protein, 703 aa, Homo sapiens
MFRYESLEDCPLDEDEDAFQGLGEEDEEIDQFNDDTFGSGAVDDDWQEAHERLAELEEKLPVAVNEQTGNGERDEMDLLGDHEENLAERLSKMVIENELEDPAIMRAVQTRPVLQPQPGSLNSSIWDGSEVLRRIRGPLLAQEMPTVSVLEYALPQRPPQGPEDDRDLSERALPRRSTSPIIGSPPVRAVPIGTPPKQMAVPSFTQQILCPKPVHVRPPMPPRYPAPYGERMSPNQLCSVPLQPGRMSPSQFARVPGFVGSPLAAMNPKLLQGRVGQMLPPAPGFRAFFSAPPSATPPPQQHPPGPGPHLQNLRSQAPMFRPDTTHLHPQHRRLLHQRQQQNRSQHRNLNGAGDRGSHRSSHQDHLRKDPYANLMLQREKDWVSKIQMMQLQSTDPYLDDFYYQNYFEKLEKLSAAEEIQGDGPKKERTKLITPQVAKLEHAYKPVQFEGSLGKLTVSSVNNPRKMIDAVVTSRSEDDETKEKQVRDKRRKTLVIIEKTYSLLLDVEDYERRYLLSLEEERPALMDDRKHKICSMYDNLRGKLPGQERPSDDHFVQIMCIRKGKRMVARILPFLSTEQAADILMTTARNLPFLIKKDAQDEVLPCLLSPFSLLLYHLPSVSITSLLRQLMNLQSSDPATESTQNNQWTEVMFMATRELLRIPQAALAKPISIPTNLVSLFSRYVDRQKLNLLETKLQLVQGIR

SEQ ID NO: 33202 - protein, 279 aa, Homo sapiens; identical to SEQ ID NO: 33186

SEQ ID NO: 33203 - protein, 2024 aa, Homo sapiens
MATGGGPFEDGMNDQDLPNWSNENVDDRLNNMDWGAQQKKANRSSEKNKKKFGVESDKRVTNDISPESSPGVGRRRTKTPHTFPHSRYMSQMSVPEQAELEKLKQRINFSDLDQRSIGSDSQGRATAANNKRQLSENRKPFNFLPMQINTNKSKDASTNPPNRETIGSAQCKELFASALSNDLLQNCQVSEEDGRGEPAMESSQIVSRLVQIRDYITKASSMREDLVEKNERSANVERLTHLIDHLKEQEKSYMKFLKKILARDPQQEPMEEIENLKKQHDLLKRMLQQQEQLRALQGRQAALLALQHKAEQAIAVMDDSVVAETAGSLSGVSITSELNEELNDLIQRFHNQLRDSQPPAVPDNRRQAESLSLTREVSQSRKPSASERLPDEKVELFSKMRVLQEKKQKMDKLLGELHTLRDQHLNNSSASPQRSVDQRSTSAPSASVGLAPVVNGESNSLTSSVPYPTASLVSQNESENEGHLNPSEKLQKLNEVRKRLNELRELVHYYEQTSDMMTDAVNENRKDEETEESEYDSEHENSEPVTNIRNPQVASTWNEVNSHSNAQCVSNNRDGRTVNSNCEINNRSAANIRALNMPPSLDCRYNREGEQEIHVAQGEDDEEEEEEAEEEGVSGASLSSHRSSLVDEHPEDAEFEQKINRLMAAKQKLRQLQDLVAMVQDDDAAQGVISASASNLDDFYPAEEDTKQNSNNTRGNANKTQKDTGVNEKAREKFYEAKLQQQQRELKQLQEERKKLIDIQEKIQALQTACPDLQLSAASVGNCPTKKYMPAVTSTPTVNQHETSTSKSVFEPEDSSIVDNELWSEMRRHEMLREELRQRRKQLEALMAEHQRRQGLAETASPVAVSLRSDGSENLCTPQQSRTEKTMATWGGSTQCALDEEGDEDGYLSEGIVRTDEEEEEEQDASSNDNFSVCPSNSVNHNSYNGKETKNRWKNNCPFSADENYRPLAKTRQQNISMQRQENLRWVSELSYVEEKEQWQEQINQLKKQLDFSVSICQTLMQDQQTLSCLLQTLLTGPYSVMPSNVASPQVHFIMHQLNQCYTQLTWQQNNVQRLKQMLNELMRQQNQHPEKPGGKERGSSASHPPSPSLFCPFSFPTQPVNLFNIPGFTNFSSFAPGMNFSPLFPSNFGDFSQNISTPSEQQQPLAQNSSGKTEYMAFPKPFESSSSIGAEKPRNKKLPEEEVESSRTPWLYEQEGEVEKPFIKTGFSVSVEKSTSSNRKNQLDTNGRRRQFDEESLESFSSMPDPVDPTTVTKTFKTRKASAQASLASKDKTPKSKSKKRNSTQLKSRVKNIRYESASMSSTCEPCKSRNRHSAQTEEPVQAKVFSRKNHEQLEKIIKCNRSTEISSETGSDFSMFEALRDTIYSEVATLISQNESRPHFLIELFHELQLLNTDYLRQRALYALQDIVSRHISESHEKGENVKSVNSGTWIASNSELTPSESLATTDDETFEKNFERETHKISEQNDADNASVLSVSSNFEPFATDDLGNTVIHLDQALARMREYERMKTEAESNSNMRCTCRIIEDGDGAGAGTTVNNLEETPVIENRSSQQPVSEVSTIPCPRIDTQQLDRQIKAIMKEVIPFLKEHMDEVCSSQLLTSVRRMVLTLTQQNDESKEFVKFFHKQLGSILQDSLAKFAGRKLKDCGEDLLVEISEVLFNELAFFKLMQDLDNNSITVKQRCKRKIEATGVIQSCAKEAKRILEDHGSPAGEIDDEDKDKDETETVKQTQTSEVYDGPKNVRSDISDQEEDEESEGCPVSINLSKAETQALTNYGSGEDENEDEEMEEFEEGPVDVQTSLQANTEATEENEHDEQVLQRDFKKTAESKNVPLEREATSKNDQNNCPVKPCYLNILEDEQPLNSAAHKESPPTVDSTQQPNPLPLRLPEMEPLVPRVKEVKSAQETPESSLAGSPDTESPVLVNDYEAESGNISQKSDEEDFVKVEDLPLKLTIYSEADLRKKMVEEEQKNHLSGEICEMQTEELAGNSETLKEPETVGAQSI

SEQ ID NO: 33204 - protein, 1969 aa, Homo sapiens
MATGGGPFEDGMNDQDLPNWSNENVDDRLNNMDWGAQQKKANRSSEKNKKKFGVESDKRVTNDISPESSPGVGRRRTKTPHTFPHSRYMSQMSVPEQAELEKLKQRINFSDLDQRSIGSDSQGRATAANNKRQLSENRKPFNFLPMQINTNKSKDASTNPPNRETIGSAQCKELFASALSNDLLQNCQVSEEDGRGEPAMESSQIVSRLVQIRDYITKASSMREDLVEKNERSANVERLTHLIDHLKEQEKSYMKFLKKILARDPQQEPMEEIENLKKQHDLLKRMLQQQEQLRALQGRQAALLALQHKAEQAIAVMDDSVVAETAGSLSGVSITSELNEELNDLIQRFHNQLRDSQPPAVPDNRRQAESLSLTREVSQSRKPSASERLPDEKVELFSKMRVLQEKKQKMDKLLGELHTLRDQHLNNSSASPQRSVDQRSTSAPSASVGLAPVVNGESNSLTSSVPYPTASLVSQNESENEGHLNPSEKLQKLNEVRKRLNELRELVHYYEQTSDMMTDAVNENRKDEETEESEYDSEHENSEPVTNIRNPQVASTWNEVNSHSNAQCVSNNRDGRTVNSNCEINNRSAANIRALNMPPSLDCRYNREGEQEIHVAQGEDDEEEEEEAEEEGVSGASLSSHRSSLVDEHPEDAEFEQKINRLMAAKQKLRQLQDLVAMVQDDDAAQGVISASASNLDDFYPAEEDTKQNSNNTRGNANKTQKDTGVNEKAREKFYEAKLQQQQRELKQLQEERKKLIDIQEKIQALQTACPDLQLSAASVGNCPTKKYMPAVTSTPTVNQHETSTSKSVFEPEDSSIVDNELWSEMRRHEMLREELRQRRKQLEALMAEHQRRQGLAETASPVAVSLRSDGSENLCTPQQSRTEKTMATWGGSTQCALDEEGDEDGYLSEGIVRTDEEEEEEQDASSNDNFSVCPSNSVNHNSYNGKETKNRWKNNCPFSADENYRPLAKTRQQNISMQRQENLRWVSELSYVEEKEQWQEQINQLKKQLDFSVSICQTLMQDQQTLSCLLQTLLTGPYSVMPSNVASPQVHFIMHQLNQCYTQLTWQQNNVQRLKQMLNELMRQQNQHPEKPGGKERGSSASHPPSPSLFCPFSFPTQPVNLFNIPGFTNFSSFAPGMNFSPLFPSNFGDFSQNISTPSEQQQPLAQNSSGKTEYMAFPKPFESSSSIGAEKPRNKKLPEEEVESSRTPWLYEQEGEVEKPFIKTGFSVSVEKSTSSNRKNQLDTNGRRRQFDEESLESFSSMPDPVDPTTVTKTFKTRKASAQASLASKDKTPKSKSKKRNSTQLKSRVKNIKTGSDFSMFEALRDTIYSEVATLISQNESRPHFLIELFHELQLLNTDYLRQRALYALQDIVSRHISESHEKGENVKSVNSGTWIASNSELTPSESLATTDDETFEKNFERETHKISEQNDADNASVLSVSSNFEPFATDDLGNTVIHLDQALARMREYERMKTEAESNSNMRCTCRIIEDGDGAGAGTTVNNLEETPVIENRSSQQPVSEVSTIPCPRIDTQQLDRQIKAIMKEVIPFLKEHMDEVCSSQLLTSVRRMVLTLTQQNDESKEFVKFFHKQLGSILQDSLAKFAGRKLKDCGEDLLVEISEVLFNELAFFKLMQDLDNNSITVKQRCKRKIEATGVIQSCAKEAKRILEDHGSPAGEIDDEDKDKDETETVKQTQTSEVYDGPKNVRSDISDQEEDEESEGCPVSINLSKAETQALTNYGSGEDENEDEEMEEFEEGPVDVQTSLQANTEATEENEHDEQVLQRDFKKTAESKNVPLEREATSKNDQNNCPVKPCYLNILEDEQPLNSAAHKESPPTVDSTQQPNPLPLRLPEMEPLVPRVKEVKSAQETPESSLAGSPDTESPVLVNDYEAESGNISQKSDEEDFVKVEDLPLKLTIYSEADLRKKMVEEEQKNHLSGEICEMQTEELAGNSETLKEPETVGAQSI

SEQ ID NO: 33205 - protein, 530 aa, Homo sapiens
MATGGGPFEDGMNDQDLPNWSNENVDDRLNNMDWGAQQKKANRSSEKNKKKFGVESDKRVTNDISPESSPGVGRRRTKTPHTFPHSRYMSQMSVPEQAELEKLKQRINFSDLDQRSIGSDSQGRATAANNKRQLSENRKPFNFLPMQINTNKSKDASTNPPNRETIGSAQCKELFASALSNDLLQNCQVSEEDGRGEPAMESSQIVSRLVQIRDYITKASSMREDLVEKNERSANVERLTHLIDHLKEQEKSYMKFLKKILARENEEEDVRTIDSAVGSGSVAESTSLNIDVQSEASDTTARDPQQEPMEEIENLKKQHDLLKRMLQQQEQLRALQGRQAALLALQHKAEQAIAVMDDSVVAETAGSLSGVSITSELNEELNDLIQRFHNQLRDSQPPAVPDNRRQAESLSLTREVSQSRKPSASERLPDEKVELFSKMRVLQEKKQKMDKLLGELHTLRDQHLNNSSASPQRSVDQRSTSAPSASVGLAPVVNGESNSLTSSVPYPTASLVSQNESENEGHLNPSEKLQ

SEQ ID NO: 33206 - protein, 1860 aa, Homo sapiens
MATGGGPFEDGMNDQDLPNWSNENVDDRLNNMDWGAQQKKANRSSEKNKKKFGVESDKRVTNDISPESSPGVGRRRTKTPHTFPHSRYMSQMSVPEQAELEKLKQRINFSDLDQRSIGSDSQGRATAANNKRQLSENRKPFNFLPMQINTNKSKDASTNPPNRETIGSAQCKELFASALSNDLLQNCQVSEEDGRGEPAMESSQIVSRLVQIRDYITKASSMREDLVEKNERSANVERLTHLIDHLKEQEKSYMKFLKKILARDPQQEPMEEIENLKKQHDLLKRMLQQQEQLRALQGRQAALLALQHKAEQAIAVMDDSVVAETAGSLSGVSITSELNEELNDLIQRFHNQLRDSQPPAVPDNRRQAESLSLTREVSQSRKPSASERLPDEKVELFSKMRVLQEKKQKMDKLLGELHTLRDQHLNNSSASPQRSVDQRSTSAPSASVGLAPVVNGESNSLTSSVPYPTASLVSQNESENEGHLNPSEKLQKLNEVRKRLNELRELVHYYEQTSDMMTDAVNENRKDEETEESEYDSEHENSEPVTNIRNPQVASTWNEVNSHSNAQCVSNNRDGRTVNSNCEINNRSAANIRALNMPPSLADCRYNREGEQEIHVAQGEDDEEEEEEAEEEGVSGASLSSHRSSLVDEHPEDAEFEQKINRLMAAKQKLRQLQDLVAMVQDDDAAQGVISASASNLDDFYPAEEDTKQNSNNTRGNANKTQKDTGVNEKAREKFYEAKLQQQQRELKQLQEERKKLIDIQEKIQALQTACPDLQLSAASVGNCPTKKYMPAVTSTPTVNQHETSTSKSVFEPEDSSIVDNELWSEMRRHEMLREELRQRRKQLEALMAEHQRRQGLAETASPVAVSLRSDGSENLCTPQQSRTEKTMATWGGSTQCALDEEGDEDGYLSEGIVRTDEEEEEEQDASSNDNFSVCPSNSVNHNSYNGKETKNRWKNNCPFSADENYRPLAKTRQQNISMQRQENLRWVSELSYVEEKEQWQEQINQLKKQLDFSVSICQTLMQDQQTLSCLLQTLLTGPYSVMPSNVASPQVHFIMHQLNQCYTQLTWQQNNVQRLKQMLNELMRQQNQHPEKPGGKERGSSASHPPSPSLFCPFSFPTQPVNLFNIPGFTNFSSFAPGMNFSPLFPSNFGDFSQNISTPSEQQQPLAQNSSGKTEYMAFPKPFESSSSIGAEKPRNKKLPEEEVESSRTPWLYEQEGEVEKPFIKTGFSVSVEKSTSSNRKNQLDTNGRRRQFDEESLESFSSMPDPVDPTTVTKTFKTRKASAQASLASKDKTPKSKSKKRNSTQLKSRVKNIKTGSDFSMFEALRDTIYSEVATLISQNESRPHFLIELFHELQLLNTDYLRQRALYALQDIVSRHISESHEKGENVKSVNSGTWIASNSELTPSESLATTDDETFEKNFERETHKISEQNDADNASVLSVSSNFEPFATDDLGNTVIHLDQALARMREYERMKTEAESNSNMRCTCRIIEDGDGAGAGTTVNNLEETPVIENRSSQQPVSEVSTIPCPRIDTQQLDRQIKAIMKEVIPFLKEHMDEVCSSQLLTSVRRMVLTLTQQNDESKEFVKFFHKQLGSILQDSLAKFAGRKLKDCGEDLLVEISEVLFNELAFFKLMQDLDNNSITVKQRCKRKIEATGVIQSCAKEAKRILEDHGSPAGEIDDEDKDKDETETVKQTQTSEVYDGPKNVRSDISDQEEDEESEGCPVSINLSKAETQALTNYGSGEDENEDEEMEEFEEGPVDVQTSLQANTEATEENEHDEQEAESGNISQKSDEEDFVKVEDLPLKLTIYSEADLRKKMVEEEQKNHLSGEICEMQTEELAGNSETLKEPETVGAQSI

SEQ ID NO: 33207 - protein, 2016 aa, Homo sapiens
MATGGGPFEDGMNDQDLPNWSNENVDDRLNNMDWGAQQKKANRSSEKNKKKFGVESDKRVTNDISPESSPGVGRRRTKTPHTFPHSRYMSQMSVPEQAELEKLKQRINFSDLDQRSIGSDSQGRATAANNKRQLSENRKPFNFLPMQINTNKSKDASTNPPNRETIGSAQCKELFASALSNDLLQNCQVSEEDGRGEPAMESSQIVSRLVQIRDYITKASSMREDLVEKNERSANVERLTHLIDHLKEQEKSYMKFLKKILARDPQQEPMEEIENLKKQHDLLKRMLQQQEQLRALQGRQAALLALQHKAEQAIAVMDDSVVAETAGSLSGVSITSELNEELNDLIQRFHNQLRDSQPPAVPDNRRQAESLSLTREVSQSRKPSASERLPDEKVELFSKMRVLQEKKQKMDKLLGELHTLRDQHLNNSSASPQRSVDQRSTSAPSASVGLAPVVNGESNSLTSSVPYPTASLVSQNESENEGHLNPSEKLQKLNEVRKRLNELRELVHYYEQTSDMMTDAVNENRKDEETEESEYDSEHENSEPVTNIRNPQVASTWNEVNSHSNAQCVSNNRDGRTVNSNCEINNRSAANIRALNMPPSLDCRYNREGEQEIHVAQGEDDEEEEEEAEEEGVSGASLSSHRSSLVDEHPEDAEFEQKINRLMAAKQKLRQLQDLVAMVQDDDAAQGVISASASNLDDFYPAEEDTKQNSNNTRGNANKTQKDTGVNEKAREKFYEAKLQQQQRELKQLQEERKKLIDIQEKIQALQTACPDLQLSAASVGNCPTKKYMPAVTSTPTVNQHETSTSKSVFEPEDSSIVDNELWSEMRRHEMLREELRQRRKQLEALMAEHQRRQGLAETASPVAVSLRSDGSENLCTPQQSRTEKTMATWGGSTQCALDEEGDEDGYLSEGIVRTDEEEEEEQDASSNDNFSVCPSNSVNHNSYNGKETKNRWKNNCPFSADENYRPLAKTRQQNISMQRQENLRWVSELSYVEEKEQWQEQINQLKKQLDFSVSICQTLMQDQQTLSCLLQTLLTGPYSVMPSNVASPQVHFIMHQLNQCYTQLTWQQNNVQRLKQMLNELMRQQNQHPEKPGGKERGSSASHPPSPSLFCPFSFPTQPVNLFNIPGFTNFSSFAPGMNFSPLFPSNFGDFSQNISTPSEQQQPLAQNSSGKTEYMAFPKPFESSSSIGAEKPRNKKLPEEEVESSRTPWLYEQEGEVEKPFIKTGFSVSVEKSTSSNRKNQLDTNGRRRQFDEESLESFSSMPDPVDPTTVTKTFKTRKASAQASLASKDKTPKSKSKKRNSTQLKSRVKNIRYESASMSSTCEPCKSRNRHSAQTEEPVQAKVFSRKNHEQLEKIIKCNRSTEISSETGSDFSMFEALRDTIYSEVATLISQNESRPHFLIELFHELQLLNTDYLRQRALYALQDIVSRHISESHEKGENVKSVNSGTWIASNSELTPSESLATTDDETFEKNFERETHKISEQNDADNASVLSVSSNFEPFATDDLGNTVIHLDQALARMREYERMKTEAESNSNMRCTCRIIEDGDGAGAETPVIENRSSQQPVSEVSTIPCPRIDTQQLDRQIKAIMKEVIPFLKEHMDEVCSSQLLTSVRRMVLTLTQQNDESKEFVKFFHKQLGSILQDSLAKFAGRKLKDCGEDLLVEISEVLFNELAFFKLMQDLDNNSITVKQRCKRKIEATGVIQSCAKEAKRILEDHGSPAGEIDDEDKDKDETETVKQTQTSEVYDGPKNVRSDISDQEEDEESEGCPVSINLSKAETQALTNYGSGEDENEDEEMEEFEEGPVDVQTSLQANTEATEENEHDEQVLQRDFKKTAESKNVPLEREATSKNDQNNCPVKPCYLNILEDEQPLNSAAHKESPPTVDSTQQPNPLPLRLPEMEPLVPRVKEVKSAQETPESSLAGSPDTESPVLVNDYEAESGNISQKSDEEDFVKVEDLPLKLTIYSEADLRKKMVEEEQKNHLSGEICEMQTEELAGNSETLKEPETVGAQSI

SEQ ID NO: 33208 - protein, 543 aa, Homo sapiens
MNCLEGPGKTCGPLASEEELVSACQLEKEEENEGEEEEEEEDEEDLDPDLDPDLEEEENDLGDPAVLGAVHNTQRALLSSPGVKAPGMLGMSLASLHFLWQTLDYLSPIPFWPTFPSTSSPAQHFGPRLPSPDPTLFCSLLTSWPPRFSHLTQLHPRHQRILQQQQHSQTPSPPAKKPWSQQPDPYANLMTRKEKDWVIKVQMVQLQSAKPRLDDYYYQEYYQKLEKKQADEELLGRRNRVESLKLVTPYIPKAEAYESVVRIEGSLGQVAVSTCFSPRRAIDAVPHGTQEQDIEAASSQRLRVLYRIEKMFLQLLEIEEGWKYRPPPPCFSEQQSNQVEKLFQTLKTQEQNNLEEAADGFLQVLSVRKGKALVARLLPFLPQDQAVTILLAITHHLPLLVRRDVADQALQMLFKPLGKCISHLTLHELLQGLQGLTLLPPGSSERPVTVVLQNQFGISLLYALLSHGEQLVSLHSSLEEPNSDHTAWTDMVVLIAWEIAQMPTASLAEPLAFPSNLLPLFCHHVDKQLVQQLEARMEFAWIY

SEQ ID NO: 33209 - protein, 459 aa, Homo sapiens
MSNCLQNFLKITSTRLLCSRLCQQLRSKRKFFGTVPISRLHRRVVITGIGLVTPLGVGTHLVWDRLIGGESGIVSLVGEEYKSIPCSVAAYVPRGSDEGQFNEQNFVSKSDIKSMSSPTIMAIGAAELAMKDSGWHPQSEADQVATGVAIGMGMIPLEVVSETALNFQTKGYNKVSPFFVPKILVNMAAGQVSIRYKLKGPNHAVSTACTTGAHAVGDSFRFIAHGDADVMVAGGTDSCISPLSLAGFSRARALSTNSDPKLACRPFHPKRDGFVMGEGAAVLVLEEYEHAVQRRARIYAEVLGYGLSGDAGHITAPDPEGEGALRCMAAALKDAGVQPEEISYINAHATSTPLGDAAENKAIKHLFKDHAYALAVSSTKGATGHLLGAAGAVEAAFTTLACYYQKLPPTLNLDCSEPEFDLNYVPLKAQEWKTEKRFIGLTNSFGFGGTNATLCIAGL

SEQ ID NO: 33210 - protein, 376 aa, Homo sapiens
MSNCLQNFLKITSTRLLCSRLCQQLRSKRKFFGTVPISRLHRRVVITGIGLVTPLGVGTHLVWDRLIGGESGIVSLVGEEYKSIPCSVAAYVPRGSDEGQFNEQNFVSKSDIKSMSSPTIMAIGAAELAMKDSGWHPQSEADQVATGVAIGMGMIPLEVVSETALNFQTKGYNKVSPFFVPKILVNMAAGQVSIRYKLKGPNHAVSTACTTGAHAVGDSFRFIAHGDAGHITAPDPEGEGALRCMAAALKDAGVQPEEISYINAHATSTPLGDAAENKAIKHLFKDHAYALAVSSTKGATGHLLGAAGAVEAAFTTLACYYQKLPPTLNLDCSEPEFDLNYVPLKAQEWKTEKRFIGLTNSFGFGGTNATLCIAGL

SEQ ID NO: 33211 - protein, 357 aa, Homo sapiens
MGGAVSAGEDNDDLIDNLKEAQYIRTERVEQAFRAIDRGDYYLEGYRDNAYKDLAWKHGNIHLSAPCIYSEVMEALKLQPGLSFLNLGSGTGYLSTMVGLILGPFGINHGIELHSDVVEYAKEKLESFIKNSDSFDKFEFCEPAFVVGNCLQIASDSHQYDRIYCGAGVQKDHENYMKILLKVGGILVMPIEDQLTQIMRTGQNTWESKNILAVSFAPLVQPSKNDNGKPDSVGLPPCAVRNLQDLARIYIRRTLRNFINDEMQAKGIPQRAPPKRKRKRVKQRINTYVFVGNQLIPQPLDSEEDEKMEEDNKEEEEKDHNEAMKPEEPPQNLLREKIMKLPLPESLKAYLTYFRDK

SEQ ID NO: 33212 - protein, 235 aa, Homo sapiens
PSPSAWPARRCPRHRFEFCEPAFVVGNCLQIASDSHQYDRIYCGAGVQKDHENYMKILLKVGGILVMPIEDQLTQIMRTGQNTWESKNILAVSFAPLVQPSKNDNGKPDSVGLPPCAVRNLQDLARIYIRRTLRNFINDEMQAKGIPQRAPPKRKRKRVKQRINTYVFVGNQLIPQPLDSEEDEKMEEDNKEEEEKDHNEAMKPEEPPQNLLREKIMKLPLPESLKAYLTYFRDK

SEQ ID NO: 33213 - protein, 527 aa, Homo sapiens
MSEDSSALPWSINRDDYELQEVIGSGATAVVQAAYCAPKKEKVAIKRINLEKCQTSMDELLKEIQAMSQCHHPNIVSYYTSFVVKDELWLVMKLLSGGSVLDIIKHIVAKGEHKSGVLDESTIATILREVLEGLEYLHKNGQIHRDVKAGNILLGEDGSVQIADFGVSAFLATGGDITRNKVRKTFVGTPCWMAPEVMEQVRGYDFKADIWSFGITAIELATGAAPYHKYPPMKVLMLTLQNDPPSLETGVQDKEMLKKYGKSFRKMISLCLQKDPEKRPTAAELLRHKFFQKAKNKEFLQEKTLQRAPTISERAKKVRRVPGSSGRLHKTEDGGWEWSDDEFDEESEEGKAAISQLRSPRVKESISNSELFPTTDPVGTLLQVPEQISAHLPQPAGQIATQPTQVSLPPTAEPAKTAQALSSGSGSQETKIPISLVLRLRNSKKELNDIRFEFTPGRDTAEGVSQELISAGLVDGRDLVIVAANLQKIVEEPQSNRSVTFKLASGVEGSDIPDDGKLIGFAQLSIS

SEQ ID NO: 33214 - protein, 399 aa, Homo sapiens
MAHITINQYLQQVYEAIDSRDGASCAELVSFKHPHVANPRLQMASPEEKCQQVLEPPYDEMFAAHLRCTYAVGNHDFIEAYKCQTVIVQSFLRAFQAHKEENWALPVMYAVALDLRVFANNADQQLVKKGKSKVGDMLEKAAELLMSCFRVCASDTRAGIEDSKKWGMLFLVNQLFKIYFKINKLHLCKPLIRAIDSSNLKDDYSTAQRVTYKYYVGRKAMFDSDFKQAEEYLSFAFEHCHRSSQKNKRMILIYLLPVKMLLGHMPTVELLKKYHLMQFAEVTRAVSEGNLLLLHEALAKHEAFFIRCGIFLILEKLKIITYRNLFKKVYLLLKTHQLSLDAFLVALKFMQVEDVDIDEVQCILANLIYMGHVKGYISHQHQKLVVSKQNPFPPLSTVC

SEQ ID NO: 33215 - protein, 397 aa, Homo sapiens
MRLTDVVQQLVYEAIDSRDGASCAELVSFKHPHVANPRLQMASPEEKCQQVLEPPYDEMFAAHLRCTYAVGNHDFIEAYKCQTVIVQSFLRAFQAHKEENWALPVMYAVALDLRVFANNADQQLVKKGKSKVGDMLEKAAELLMSCFRVCASDTRAGIEDSKKWGMLFLVNQLFKIYFKINKLHLCKPLIRAIDSSNLKDDYSTAQRVTYKYYVGRKAMFDSDFKQAEEYLSFAFEHCHRSSQKNKRMILIYLLPVKMLLGHMPTVELLKKYHLMQFAEVTRAVSEGNLLLLHEALAKHEAFFIRCGIFLILEKLKIITYRNLFKKVYLLLKTHQLSLDAFLVALKFMQVEDVDIDEVQCILANLIYMGHVKGYISHQHQKLVVSKQNPFPPLSTVC

SEQ ID NO: 33216 - protein, 376 aa, Homo sapiens
MAHITINQYLQQVYEAIDSRDGASCAELVSFKHPHVANPRLQMASPEEKCQQVLEPPYDEMFAAHLRCTYAVGNHDFIEAYKCQTVIVQSFLRVFANNADQQLVKKGKSKVGDMLEKAAELLMSCFRVCASDTRAGIEDSKKWGMLFLVNQLFKIYFKINKLHLCKPLIRAIDSSNLKDDYSTAQRVTYKYYVGRKAMFDSDFKQAEEYLSFAFEHCHRSSQKNKRMILIYLLPVKMLLGHMPTVELLKKYHLMQFAEVTRAVSEGNLLLLHEALAKHEAFFIRCGIFLILEKLKIITYRNLFKKVYLLLKTHQLSLDAFLVALKFMQVEDVDIDEVQCILANLIYMGHVKGYISHQHQKLVVSKQNPFPPLSTVC

SEQ ID NO: 33217 - protein, 453 aa, Homo sapiens
MAHITINQYLQQVYEAIDSRDGASCAELVSFKHPHVANPRLQMASPEEKCQQVLEPPYDEMFAAHLRCTYAVGNHDFIEAYKCQTVIVQYPLSFMAAVPHRTHAVDYLGLETRKHWASCSFLQLERNDSVLEQKLVSALSLGTSFLRAFQAHKEENWALPVMYAVALDLRVFANNADQQLVKKGKSKVGDMLEKAAELLMSCFRVCASDTRAGIEDSKKWGMLFLVNQLFKIYFKINKLHLCKPLIRAIDSSNLKDDYSTAQRVTYKYYVGRKAMFDSDFKQAEEYLSFAFEHCHRSSQKNKRMILIYLLPVKMLLGHMPTVELLKKYHLMQFAEVTRAVSEGNLLLLHEALAKHEAFFIRCGIFLILEKLKIITYRNLFKKVYLLLKTHQLSLDAFLVALKFMQVEDVDIDEVQCILANLIYMGHVKGYISHQHQKLVVSKQNPFPPLSTVC

SEQ ID NO: 33218 - protein, 361 aa, Homo sapiens
MGGAVSAGEDNDELIDNLKEAQYIRTELVEQAFRAIDRADYYLEEFKENAYKDLAWKHGNIHLSAPCIYSEVMEALDLQPGLSFLNLGSGTGYLSSMVGLILGPFGVNHGVELHSDVIEYAKQKLDFFIRTSDSFDKFDFCEPSFVTGNCLEISPDCSQYDRVYCGAGVQKEHEEYMKNLLKVGGILVMPLEEKLTKITRTGPSAWETKKILAVSFAPLIQPCHSESGKSRLVQLPPVAVRSLQDLARIAIRGTIKKIIHQETVSKNGNGLKNTPRFKRRRVRRRRMETIVFLDKEVFASRISNPSDDNSCEDLEEERREEEEKTPPETKPDPPVNFLRQKVLSLPLPDPLKYYLLYYREK

SEQ ID NO: 33219 - protein, 334 aa, Homo sapiens
MGGAVSAGEDNDELIDNLKEAQYIRTELVEQAFRAIDRADYYLEEFKENAYKDLAWKHGNIHLSAPCIYSEVMEALDLQPGLSFLNLGSGTGYLSSMVGLILGPFGVNHGVELHSDVIEYAKQKLDFFIRTSDSFDKFDFCEPSFVTGNCLEISPDCSQYDRVYCGAGVQKEHEEYMKNLLKVGGILVMPLEEKPCHSESGKSRLVQLPPVAVRSLQDLARIAIRGTIKKIIHQETVSKNGNGLKNTPRFKRRRVRRRRMETIVFLDKEVFASRISNPSDDNSCEDLEEERREEEEKTPPETKPDPPVNFLRQKVLSLPLPDPLKYYLLYYREK

SEQ ID NO: 33220 - protein, 137 aa, Homo sapiens
MLRFCAGLSDFAPVAVRSLQDLARIAIRGTIKKIIHQETVSKNGNGLKNTPRFKRRRVRRRRMETIVFLDKEVFASRISNPSDDNSCEDLEEERREEEEKTPPETKPDPPVNFLRQKVLSLPLPDPLKYYLLYYREK

SEQ ID NO: 33221 - protein, 412 aa, Homo sapiens
MGLHLRPYRVGLLPDGLLFLLLLLMLLADPALPAGRHPPVVLVPGDLGNQLEAKLDKPTVVHYLCSKKTESYFTIWLNLELLLPVIIDCWIDNIRLVYNKTSRATQFPDGVDVRVPGFGKTFSLEFLDPSKSSVGSYFHTMVESLVGWGYTRGEDVRGAPYDWRRAPNENGPYFLALREMIEEMYQLYGGPVVLVAHSMGNMYTLYFLQRQPQAWKDKYIRAFVSLGAPWGGVAKTLRVLASGDNNRIPVIGPLKIREQQRSAVSTSWLLPYNYTWSPEKVFVQTPTINYTLRDYRKFFQDIGFEDGWLMRQDTEGLVEATMPPGVQLHCLYGTGVPTPDSFYYESFPDRDPKICFGDGDGTVNLKSALQCQAWQSRQEHQVLLQELPGSEHIEMLANATTLAYLKRVLLGP

SEQ ID NO: 33222 - protein, 318 aa, Homo sapiens
MGLHLRPYRVGLLPDGLLFLLLLLMLLADPALPAGRHPPVVLGWFTTKHPGPPSFLMVWMYVSLALGRPSHWSSWTPAKAAWVPISTPWWRALWAGATHGVRMSEGLPMTGAEPQRQPQAWKDKYIRAFVSLGAPWGGVAKTLRVLASGDNNRIPVIGPLKIREQQRSAVSTSWLLPYNYTWSPEKVFVQTPTINYTLRDYRKFFQDIGFEDGWLMRQDTEGLVEATMPPGVQLHCLYGTGVPTPDSFYYESFPDRDPKICFGDGDGTVNLKSALQCQAWQSRQEHQVLLQELPGSEHIEMLANATTLAYLKRVLLGP

SEQ ID NO: 33223 - protein, 389 aa, Homo sapiens
MEGALAANWSAEAANASAAPPGAEGNRTAGPPRRNEALARVEVAVLCLILLLALSGNACVLLALRTTRQKHSRLFFFMKHLSIADLVVAVFQVLPQLLWDITFRFYGPDLLCRLVKYLQVVGMFASTYLLLLMSLDRCLAICQPLRSLRRRTDRLAVLATWLGCLVASAPQVHIFSLREVADGVFDCWAVFIQPWGPKAYITWITLAVYIVPVIVLAACYGLISFKIWQNLRLKTAAAAAAEAPEGAAAGDGGRVALARVSSVKLISKAKIRTVKMTFIIVLAFIVCWTPFFFVQMWSVWDANAPKEASAFIIVMLLASLNSCCNPWIYMLFTGHLFHELVQRFLCCSASYLKGRRLGETSASKKSNSSSFVLSHRSSSQRSCSQPSTA

SEQ ID NO: 33224 - protein, 146 aa, Homo sapiens
MGFLRRLIYRRRPMIYVESSEESSDEQPDEVESPTQSQDSTPAEEREDEGASAAQGQEPEADSQELVQPKTGCELGDGPDTKRVCLRNEEQMKLPAEGPEPEADSQEQVHPKTGCERGDGPDVQELGLPNPEEVKTPEEDEGQSQP

SEQ ID NO: 33225 - protein, 111 aa, Homo sapiens
MSELLRARSQSSERGNDQESSQPVGSVIVQEPTEEKRQEEEPPTDNQGIAPSGEIENQAVPAFQGPDMEAFQQELALLKIEDEPGDGPDVREGIMPTFDLTKVLEAGDAQP

SEQ ID NO: 33226 - protein, 113 aa, Homo sapiens
MSGHQRTRSRSRERRDDQDSNHPVGAVVAQELPSNDQLQQEEPPIESQDYTPGQERDEGALDFQVLGLAAYLWELTRSKTGGERGDGPNVKGEFLPNLEPVKIPEAGEGQPSV

SEQ ID NO: 33227 - protein, 102 aa, Homo sapiens
MSARVRSRSRGRGDGQEAPDVVAFVAPGESQQEEPPTDNQDIEPGQEREGTPPIEERKVEGDCQEMDLEKTRSERGDGSDVKEKTPPNPKHAKTKEAGDGQP

SEQ ID NO: 33228 - protein, 130 aa, Homo sapiens
MQAPWAGNRGWAGTREEVRDMSEHVTRSQSSERGNDQESSQPVGPVIVQQPTEEKRQEEEPPTDNQGIAPSGEIKNEGAPAVQGTDVEAFQQELALLKIEDAPGDGPDVREGTLPTFDPTKVLEAGEGQL

SEQ ID NO: 33229 - protein, 110 aa, Homo sapiens
MSEHVTRSQSSERGNDQESSQPVGPVIVQQPTEEKRQEEEPPTDNQGIAPSGEIKNEGAPAVQGTDVEAFQQELALLKIEDAPGDGPDVREGTLPTFDPTKVLEAGEGQL

SEQ ID NO: 33230 - protein, 505 aa, Homo sapiens
MGRVVAELVSSLLGLWLLLCSCGCPEGAELRAPPDKIAIIGAGIGGTSAAYYLRQKFGKDVKIDLFEREEVGGRLATMMVQGQEYEAGGSVIHPLNLHMKRFVKDLGLSAVQASGGLLGIYNGETLVFEESNWFIINVIKLVWRYGFQSLRMHMWVEDVLDKFMRIYRYQSHDYAFSSVEKLLHALGGDDFLGMLNRTLLETLQKAGFSEKFLNEMIAPVMRVNYGQSTDINAFVGAVSLSCSDSGLWAVEGGNKLVCSGLLQASKSNLISGSVMYIEEKTKTKYTGNPTKMYEVVYQIGTETRSDFYDIVLVATPLNRKMSNITFLNFDPPIEEFHQYYQHIVTTLVKGELNTSIFSSRPIDKFGLNTVLTTDNSDLFINSIGIVPSVREKEDPEPSTDGTYVWKIFSQETLTKAQILKLFLSYDYAVKKPWLAYPHYKPPEKCPSIILHDRLYYLNGIECAASAMEMSAIAAHNAALLAYHRWNGHTDMIDQDGLYEKLKTEL

SEQ ID NO: 33231 - protein, 428 aa, Homo sapiens
MMVQGQEYEAGGSVIHPLNLHMKRFVKDLGLSAVQASGGLLGIYNGETLVFEESNWFIINVIKLVWRYGFQSLRMHMWVEDVLDKFMRIYRYQSHDYAFSSVEKLLHALGGDDFLGMLNRTLLETLQKAGFSEKFLNEMIAPVMRVNYGQSTDINAFVGAVSLSCSDSGLWAVEGGNKLVCSGLLQASKSNLISGSVMYIEEKTKTKYTGNPTKMYEVVYQIGTETRSDFYDIVLVATPLNRKMSNITFLNFDPPIEEFHQYYQHIVTTLVKGELNTSIFSSRPIDKFGLNTVLTTDNSDLFINSIGIVPSVREKEDPEPSTDGTYVWKIFSQETLTKAQILKLFLSYDYAVKKPWLAYPHYKPPEKCPSIILHDRLYYLNGIECAASAMEMSAIAAHNAALLAYHRWNGHTDMIDQDGLYEKLKTEL

SEQ ID NO: 33232 - protein, 102 aa, Homo sapiens
MRYGFVRKKHRGLFLTTVAALPIWNPISEFVKWYKSHKLSQHCIRICGHLCQKHLDMFLSVIGQRWPIDVFSSVFDHQVSAIGSDIIWWFLKLFLVSFFFFF

SEQ ID NO: 33233 - protein, 494 aa, Homo sapiens
MARAAPLLAALTALLAAAAAGGDAPPGKIAVVGAGIGGSAVAHFLQQHFGPRVQIDVYEKGTVGGRLATISVNKQHYESGAASFHSLSLHMQDFVKLLGLRHRREVVGRSAIFGGEHFMLEETDWYLLNLFRLWWHYGISFLRLQMWVEEVMEKFMRIYKYQAHGYAFSGVEELLYSLGESTFVNMTQHSVAESLLQVGVTQRFIDDVVSAVLRASYGQSAAMPAFAGAMSLAGAQGSLWSVEGGNKLVCSGLLKLTKANVIHATVTSVTLHSTEGKALYQVAYENEVGNSSDFYDIVVIATPLHLDNSSSNLTFAGFHPPIDDVQGSFQPTVVSLVHGYLNSSYFGFPDPKLFPFANILTTDFPSFFCTLDNICPVNISASFRRKQPQEAAVWRVQSPKPLFRTQLKTLFRSYYSVQTAEWQAHPLYGSRPTLPRFALHDQLFYLNALEWAASSVEVMAVAAKNVALLAYNRWYQDLDKIDQKDLMHKVKTEL

SEQ ID NO: 33234 - protein, 82 aa, Homo sapiens
MARAAPLLAALTALLAAAAAGGDAPPGKIGAGRTRGGWGWDWGLCCGPFSPAALWTSGADRRVREGNRGWPLGHHLSQQAAL

SEQ ID NO: 33235 - protein, 292 aa, Homo sapiens
MSHLSQQRIYSGENPFACKVCGKVFSHKSNLTEHEHFHTREKPFECNECGKAFSQKQYVIKHQNTHTGEKLFECNECGKSFSQKENLLTHQKIHTGEKPFECKDCGKAFIQKSNLIRHQRTHTGEKPFVCKECGKTFSGKSNLTEHEKIHIGEKPFKCSECGTAFGQKKYLIKHQNIHTGEKPYECNECGKAFSQRTSLIVHVRIHSGDKPYECNVCGKAFSQSSSLTVHVRSHTGEKPYGCNECGKAFSQFSTLALHLRIHTGKKPYQCSECGKAFSQKSHHIRHQKIHTH

SEQ ID NO: 33236 - protein, 687 aa, Homo sapiens
MERVNDASCGPSGCYTYQVSRHSTEMLHNLNQQRKNGGRFCDVLLRVGDESFPAHRAVLAACSEYFESVFSAQLGDGGAADGGPADVGGATAAPGGGAGGSRELEMHTISSKVFGDILDFAYTSRIVVRLESFPELMTAAKFLLMRSVIEICQEVIKQSNVQILVPPARADIMLFRPPGTSDLGFPLDMTNGAALAANSNGIAGSMQPEEEAARAAGAAIAGQASLPVLPGVDRLPMVAGPLSPQLLTSPFPSVASSAPPLTGKRGRGRPRKANLLDSMFGSPGGLREAGILPCGLCGKVFTDANRLRQHEAQHGVTSLQLGYIDLPPPRLGENGLPISEDPDGPRKRSRTRKQVACEICGKIFRDVYHLNRHKLSHSGEKPYSCPVCGLRFKRKDRMSYHVRSHDGSVGKPYICQSCGKGFSRPDHLNGHIKQVHTSERPHKCQTCNASFATRDRLRSHLACHEDKVPCQVCGKYLRAAYMADHLKKHSEGPSNFCSICNRGFSSASYLKVHVKTHHGVPLPQVSRHQEPILNGGAAFHCARTYGNKEGQKCSHQDPIESSDSYGDLSDASDLKTPEKQSANGSFSCDMAVPKNKMESDGEKKYPCPECGSFFRSKSYLNKHIQKVHVRALGGPLGDLGPALGSPFSPQQNMSLLESFGFQIVQSAFASSLVDPEVDQQPMGPEGK

SEQ ID NO: 33237 - protein, 537 aa, Homo sapiens
MERVNDASCGPSGCYTYQVSRHSTEMLHNLNQQRKNGGRFCDVLLRVGDESFPAHRAVLAACSEYFESVFSAQLGDGGAADGGPADVGGATAAPGGGAGGSRELEMHTISSKVFGDILDFAYTSRIVVRLESFPELMTAAKFLLMRSVIEICQEVIKQSNVQILVPPARADIMLFRPPGTSDLGFPLDMTNGAALAANSNGIAGSMQPEEEAARAAGAAIAGQASLPVLPGVDRLPMVAGPLSPQLLTSPFPSVASSAPPLTGKRGRGRPRKANLLDSMFGSPGGLREAGILPCGLCGKVFTDANRLRQHEAQHGVTSLQLGYIDLPPPRLGENGLPISEDPDGPRKRSRTRKQVACEICGKIFRDVYHLNRHKLSHSGEKPYSCPVCGLRFKRKDRMSYHVRSHDGSVGKPYICQSCGKGFSRPDHLNGHIKQVHTSERPHKCQTCNASFATRDRLRSHLACHEDKVPCQVCGKYLRAAYMADHLKKHSEGPSNFCSICNRGLQAPGAHPEWGSSVPLRQDLWQQRRPEMLTSGSD

SEQ ID NO: 33238 - protein, 641 aa, Homo sapiens
MERVNDASCGPSGCYTYQVSRHSTEMLHNLNQQRKNGGRFCDVLLRVGDESFPAHRAVLAACSEYFESVFSAQLGDGGAADGGPADVGGATAAPGGGAGGSRELEMHTISSKVFGDILDFAYTSRIVVRLESFPELMTAAKFLLMRSVIEICQEVIKQSNVQILVPPARADIMLFRPPGTSDLGFPLDMTNGAALAANSNGIAGSMQPEEEAARAAGAAIAGQASLPVLPGVDRLPMVAGPLSPQLLTSPFPSVASSAPPLTGKRGRGRPRKANLLDSMFGSPGGLREAGILPCGLCGKVFTDANRLRQHEAQHGVTSLQLGYIDLPPPRLGENGLPISEDPDGPRKRSRTRKQVACEICGKIFRDVYHLNRHKLSHSGEKPYSCPVCGLRFKRKDRMSYHVRSHDGSVGKPYICQSCGKGFSRPDHLNGHIKQVHTSERPHKCQTCNASFATRDRLRSHLACHEDKVPCQVCGKYLRAAYMADHLKKHSEGPSNFCSICNREGQKCSHQDPIESSDSYGDLSDASDLKTPEKQSANGSFSCDMAVPKNKMESDGEKKYPCPECGSFFRSKSYLNKHIQKVHVRALGGPLGDLGPALGSPFSPQQNMSLLESFGFQIVQSAFASSLVDPEVDQQPMGPEGK

SEQ ID NO: 33239 - protein, 537 aa, Homo sapiens
MERVNDASCGPSGCYTYQVSRHSTEMLHNLNQQRKNGGRFCDVLLRVGDESFPAHRAVLAACSEYFESVFSAQLGDGGAADGGPADVGGATAAPGGGAGGSRELEMHTISSKVFGDILDFAYTSRIVVRLESFPELMTAAKFLLMRSVIEICQEVIKQSNVQILVPPARADIMLFRPPGTSDLGFPLDMTNGAALAANSNGIAGSMQPEEEAARAAGAAIAGQASLPVLPGVDRLPMVAGPLSPQLLTSPFPSVASSAPPLTGKRGRGRPRKANLLDSMFGSPGGLREAGILPCGLCGKVFTDANRLRQHEAQHGVTSLQLGYIDLPPPRLGENGLPISEDPDGPRKRSRTRKQVACEICGKIFRDVYHLNRHKLSHSGEKPYSCPVCGLRFKRKDRMSYHVRSHDGSVGKPYICQSCGKGFSRPDHLNGHIKQVHTSERPHKCQVWVGSSSGLPPLEPLPSDLPSWDFAQPALWRSSHSVPDTAFSLSLKKSFPALENLGPAHSSNTLFCPAPPGYLRQGWTTPEGSRAFTQWPVG

SEQ ID NO: 33240 - protein, 350 aa, Homo sapiens
MAATSLMSALAARLLQPAHSCSLRLRPFHLAAVRNEAVVISGRKLAQQIKQEVRQEVEEWVASGNKRPHLSVILVGENPASHSYVLNKTRAAAVVGINSETIMKPASISEEELLNLINKLNNDDNVDGLLVQLPLPEHIDERRICNAVSPDKDVDGFHVINVGRMCLDQYSMLPATPWGVWEIIKRTGIPTLGKNVVVAGRSKNVGMPIAMLLHTDGAHERPGGDATVTISHRYTPKEQLKKHTILADIVISAAGIPNLITADMIKEGAAVIDVGINRVHDPVTAKPKLVGDVDFEGVRQKAGYITPVPGGVGPMTVAMLMKNTIIAAKKVLRLEEREVLKSKELGVATN

SEQ ID NO: 33241 - protein, 248 aa, Homo sapiens
MKPASISEEELLNLINKLNNDDNVDGLLVQLPLPEHIDERRICNAVSPDKDVDGFHVINVGRMCLDQYSMLPATPWGVWEIIKRTGIPTLGKNVVVAGRSKNVGMPIAMLLHTDGAHERPGGDATVTISHRYTPKEQLKKHTILADIVISAAGIPNLITADMIKEGAAVIDVGINRVHDPVTAKPKLVGDVDFEGVRQKAGYITPVPGGVGPMTVAMLMKNTIIAAKKVLRLEEREVLKSKELGVATN

SEQ ID NO: 33242 - protein, 290 aa, Homo sapiens
MRIFAVFIFMTYWHLLNAFTVTVPKDLYVVEYGSNMTIECKFPVEKQLDLAALIVYWEMEDKNIIQFVHGEEDLKVQHSSYRQRARLLKDQLSLGNAALQITDVKLQDAGVYRCMISYGGADYKRITVKVNAPYNKINQRILVVDPVTSEHELTCQAEGYPKAEVIWTSSDHQVLSGKTTTTNSKREEKLFNVTSTLRINTTTNEIFYCTFRRLDPEENHTAELVIPELPLAHPPNERTHLVILGAILLCLGVALTFIFRLRKGRMMDVKKCGIQDTNSKKQSDTHLEET

SEQ ID NO: 33243 - protein, 176 aa, Homo sapiens
MRIFAVFIFMTYWHLLNAPYNKINQRILVVDPVTSEHELTCQAEGYPKAEVIWTSSDHQVLSGKTTTTNSKREEKLFNVTSTLRINTTTNEIFYCTFRRLDPEENHTAELVIPELPLAHPPNERTHLVILGAILLCLGVALTFIFRLRKGRMMDVKKCGIQDTNSKKQSDTHLEET

SEQ ID NO: 33244 - protein, 178 aa, Homo sapiens
MRIFAVFIFMTYWHLLNAFTVTVPKDLYVVEYGSNMTIECKFPVEKQLDLAALIVYWEMEDKNIIQFVHGEEDLKVQHSSYRQRARLLKDQLSLGNAALQITDVKLQDAGVYRCMISYGGADYKRITVKVNAPYNKINQRILVVDPVTSEHELTCQAEGYPKAEVIWTSSDHQVLSGD

SEQ ID NO: 33245 - protein, 582 aa, Homo sapiens
MAVPGVGLLTRLNLCARRRTRVQRPIVRLLSCPGTVAKDLRRDEQPSGSVETGFEDKIPKRRFSEMQNERREQAQRTVLIHCPEKISENKFLKYLSQFGPINNHFFYESFGLYAVVEFCQKESIGSLQNGTHTPSTAMETAIPFRSRFFNLKLKNQTSERSRVRSSNQLPRSNKQLFELLCYAESIDDQLNTLLKEFQLTEENTKLRYLTCSLIEDMAAAYFPDCIVRPFGSSVNTFGKLGCDLDMFLDLDETRNLSAHKISGNFLMEFQVKNVPSERIATQKILSVLGECLDHFGPGCVGVQKILNARCPLVRFSHQASGFQCDLTTNNRIALTSSELLYIYGALDSRVRALVFSVRCWARAHSLTSSIPGAWITNFSLTMMVIFFLQRRSPPILPTLDSLKTLADAEDKCVIEGNNCTFVRDLSRIKPSQNTETLELLLKEFFEYFGNFAFDKNSINIRQGREQNKPDSSPLYIQNPFETSLNISKNVSQSQLQKFVDLARESAWILQQEDTDRPSISSNRPWGLVSLLLPSAPNRKSFTKKKSNKFAIETVKNLLESLKGNRTENFTKTSGKRTISTQT

SEQ ID NO: 33246 - protein, 712 aa, Homo sapiens
MAWAKKVGGRAGQGRSLSRCDPIILDPEWLYGPPEGEGGPEGVGGETRASIHPPLRTGRHHQKVNHNIRGPEGSAKDAAPGGGGHHQAGPGQRGDEDGALQHLCGGGGGVGVSVGRGTGTSVAAEHPSLQVKLLELQELVLRLAGDHNEGHGKFLAAAQNPADDPAPGAPAPQELGAADKQGGFEDKIPKRRFSEMQNERREQAQRTVLIHCPEKISENKFLKYLSQFGPINNHFFYESFGLYAVVEFCQKESIGSLQNGTHTPSTAMETAIPFRSRFFNLKLKNQTSERSRVRSSNQLPRSNKQLFELLCYAESIDDQLNTLLKEFQLTEENTKLRYLTCSLIEDMAAAYFPDCIVRPFGSSVNTFGKLGCDLDMFLDLDETRNLSAHKISGNFLMEFQVKNVPSERIATQKILSVLGECLDHFGPGCVGVQKILNARCPLVRFSHQASGFQCDLTTNNRIALTSSELLYIYGALDSRVRALVFSVRCWARAHSLTSSIPGAWITNFSLTMMVIFFLQRRSPPILPTLDSLKTLADAEDKCVIEGNNCTFVRDLSRIKPSQNTETLELLLKEFFEYFGNFAFDKNSINIRQGREQNKPDSSPLYIQNPFETSLNISKNVSQSQLQKFVDLARESAWILQQEDTDRPSISSNRPWGLVSLLLPSAPNRKSFTKKKSNKFAIETVKNLLESLKGNRTENFTKTSGKRTISTQT

SEQ ID NO: 33247 - protein, 273 aa, Homo sapiens
MIFLLLMLSLELQLHQIAALFTVTVPKELYIIEHGSNVTLECNFDTGSHVNLGAITASLQKVENDTSPHRERATLLEEQLPLGKASFHIPQVQVRDEGQYQCIIIYGVAWDYKYLTLKVKASYRKINTHILKVPETDEVELTCQATGYPLAEVSWPNVSVPANTSHSRTPEGLYQVTSVLRLKPPPGRNFSCVFWNTHVRELTLASIDLQSQMEPRTHPTWLLHIFIPFCIIAFIFIATVIALRKQLCQKLYSSKDTTKRPVTTTKREVNSAI

SEQ ID NO: 33248 - protein, 183 aa, Homo sapiens
MIFLLLMLSLELQLHQIAALFTVTVPKELYIIEHGSNVTLECNFDTGSHVNLGAITASLQKVENDTSPHRERATLLEEQLPLGKASFHIPQVQVRDEGQYQCIIIYGVAWDYKYLTLKVKGQMEPRTHPTWLLHIFIPFCIIAFIFIATVIALRKQLCQKLYSSKDTTKRPVTTTKREVNSAI

SEQ ID NO: 33249 - protein, 182 aa, Homo sapiens
MIFLLLMLSLELQLHQIAALFTVTVPKELYIIEHGSNVTLECNFDTGSHVNLGAITASLQKVENDTSPHRERATLLEEQLPLGKASFHIPQVQVRDEGQYQCIIIYGVAWDYKYLTLKVKDGTQDPSNLAASHFHPLLHHCFHFHSHSDSPKKTTLSKAVFFKRHNKKTCHHNKEGSEQCYL

SEQ ID NO: 33250 - protein, 572 aa, Homo sapiens
MYRSGERLLGSHALPAEQRDFLPLETTNNNNNHHQPGAWARRAGSSASSPPSASSSPHPSAAVPAADPADSASGSSNKRKRDNKASGGRAAGGGRADGGGVVYSGTPWKRRNYNQGVVGLHEEISDFYEYMSPRPEEEKMRMEVVNRIESVIKELWPSADVQIFGSFKTGLYLPTSDIDLVVFGKWENLPLWTLEEALRKHKVADEDSVKVLDKATVPIIKLTDSFTEVKVDISFNVQNGVRAADLIKDFTKKYPVLPYLVLVLKQFLLQRDLNEVFTGGIGSYSLFLMAVSFLQLHPREDACIPNTNYGVLLIEFFELYGRHFNYLKTGIRIKDGGSYVAKDEVQKNMLDGYRPSMLYIEDPLQPGNDVGRSSYGAMQVKQAFDYAYVVLSHAVSPIAKYYPNNETESILGRIIRVTDEVATYRDWISKQWGLKNRPEPSCNGPVSSSSATQSSSSDVDSDATPCKTPKQLLCRPSTGNRVGSQDVSLESSQAVGKMQSTQTTNTSNSTNKSQHGSARLFRSSSKGFQGTTQTSHGSLMTNKQHQGKSNNQYYHGKKRKHKRDAPLSDLCR

SEQ ID NO: 33251 - protein, 465 aa, Homo sapiens
MYRSGERLLGSHALPAEQRDFLPLETTNNNNNHHQPGAWARRAGSSASSPPSASSSPHPSAAVPAADPADSASGSSNKRKRDNKASGGRAAGGGRADGGGVVYSGTPWKRRNYNQGVVGLHEEISDFYEYMSPRPEEEKMRMEVVNRIESVIKELWPSADVQIFGSFKTGLYLPTSDIDLVVFGKWENLPLWTLEEALRKHKVADEDSVKVLDKATVPIIKLTDSFTEVKVDISFNVQNGVRAADLIKDFTKKYPVLPYLVLVLKQFLLQRDLNEVFTGGIGSYSLFLMAVSFLQLHPREDACIPNTNYGVLLIEFFELYGRHFNYLKTGIRIKDGGSYVAKDEVQKNMLDGYRPSMLYIEDPLQPGNDVGRSSYGAMQVKQAFDYAYVVLSHAVSPIAKYYPNNETESILGRIIRVTDEVATYRDWISKQWGLKNRPEPSCNGNETLHQVQCRPLLPHSPALVT

SEQ ID NO: 33252 - protein, 585 aa, Homo sapiens
MYRSGERLLGSHALPAEQRDFLPLETTNNNNNHHQPGAWARRAGSSASSPPSASSSPHPSAAVPAADPADSASGSSNKRKRDNKASGGRAAGGGRADGGGVVYSGTPWKRRNYNQGVVGLHEEISDFYEYMSPRPEEEKMRMEVVNRIESVIKELWPSADVQIFGSFKTGLYLPTSDIDLVVFGKWENLPLWTLEEALRKHKVADEDSVKVLDKATVPIIKLTDSFTEVKVDISFNVQNGVRAADLIKDFTKKYPVLPYLVLVLKQFLLQRDLNEVFTGGIGSYSLFLMAVSFLQLHPREDACIPNTNYGVLLIEFFELYGRHFNYLKTGIRIKDGGSYVAKDEVQKNMLDGYRPSMLYIEDPLQPGNDVGRSSYGAMQVKQAFDYAYVVLSHAVSPIAKYYPNNETESILGRIIRVTDEVATYRDWISKQWGLKNRPEPSCNGNGVTLIVDTQQLDKCNNNLSEENEALGKCRSKTSESLSKHSSNSSSGPVSSSSATQSSSSDVDSDATPCKTPKQLLCRPSTGNRVGSQDVSLESSQAVGKMQSTQTTNTSNSTNKSQHGSARLFRSSSKGFQGTTQTSHGS

SEQ ID NO: 33253 - protein, 370 aa, Homo sapiens
MYRSGERLLGSHALPAEQRDFLPLETTNNNNNHHQPGAWARRAGSSASSPPSASSSPHPSAAVPAADPADSASGSSNKRKRDNKASGGRAAGGGRADGGGVVYSGTPWKRRNYNQGVVGLHEEISDFYEYMSPRPEEEKMRMEVVNRIESVIKELWPSADVQIFGSFKTGLYLPTSDIDLVVFGKWENLPLWTLEEALRKHKVADEDSVKVLDKATVPIIKLTDSFTEVKVDISFNVQNGVRAADLIKDFTKKYPVLPYLVLVLKQFLLQRDLNEVFTGGIGSYSLFLMAVSFLQLHPREDACIPNTNYGVLLIEFFELYGRHFNYLKTGIRIKDGGSYVAKDEVQKNMLDGYRPSMLYIEDPLQPGIEI

SEQ ID NO: 33254 - protein, 698 aa, Homo sapiens
MRPRPRSAPGKPRRRSRARLRSSRTPSGGASGGGGSSSSSSTATGGSGSSTGSPGGAASAPAPAPAGMYRSGERLLGSHALPAEQRDFLPLETTNNNNNHHQPGAWARRAGSSASSPPSASSSPHPSAAVPAADPADSASGSSNKRKRDNKASTYGLNYSLLQPSGGRAAGGGRADGGGVVYSGTPWKRRNYNQGVVGLHEEISDFYEYMSPRPEEEKMRMEVVNRIESVIKELWPSADVQIFGSFKTGLYLPTSDIDLVVFGKWENLPLWTLEEALRKHKVADEDSVKVLDKATVPIIKLTDSFTEVKVDISFNVQNGVRAADLIKDFTKKYPVLPYLVLVLKQFLLQRDLNEVFTGGIGSYSLFLMAVSFLQLHPREDACIPNTNYGVLLIEFFELYGRHFNYLKTGIRIKDGGSYVAKDEVQKNMLDGYRPSMLYIEDPLQPGNDVGRSSYGAMQVKQAFDYAYVVLSHAVSPIAKYYPNNETESILGRIIRVTDEVATYRDWISKQWGLKNRPEPSCNGNGVTLIVDTQQLDKCNNNLSEENEALGKCRSKTSESLSKHSSNSSSGPVSSSSATQSSSSDVDSDATPCKTPKQLLCRPSTGNRVGSQDVSLESSQAVGKMQSTQTTNTSNSTNKSQHGSARLFRSSSKGFQGTTQTSHGSLMTNKQHQGKSNNQYYHGKKRKHKRDAPLSDLCR

SEQ ID NO: 33255 - protein, 395 aa, Homo sapiens
MSANATLKPLCPILEQMSRLQSHSNTSIRYIDHAAVLLHGLASLLGLVENGVILFVVGCRMRQTVVTTWVLHLALSDLLASASLPFFTYFLAVGHSWELGTTFCKLHSSIFFLNMFASGFLLSAISLDRCLQVVRPVWAQNHRTVAAAHKVCLVLWALAVLNTVPYFVFRDTISRLDGRIMCYYNVLLLNPGPDRDATCNSRQVALAVSKFLLAFLVPLAIIASSHAAVSLRLQHRGRRRPGRFVRLVAAVVAAFALCWGPYHVFSLLEARAHANPGLRPLVWRGLPFVTSLAFFNSVANPVLYVLTCPDMLRKLRRSLRTVLESVLVDDSELGGAGSSRRRRTSSTARSASPLALCSRPEEPRGPARLLGWLLGSCAASPQTGPLNRALSSTSS

SEQ ID NO: 33256 - protein, 772 aa, Homo sapiens
MQIWETSQGVGRGGSGFASYFCLNSPALDTAAAAGAAGRGSGGLGPALPAASPPPPGPTAPAALPPALLTALGPAAEGARRLHKSPSLSSSSSSSSSNAESGTESPGCSSSSSSSASLGRPGGGRGGAFFNFADGAPSAPGTANGHPGPRGPAPAGSPSQHQFHPGRRKRENKASTYGLNYLLSGSRAAALSGGGGPGAQAPRPGTPWKSRAYSPGIQGLHEEIIDFYNFMSPCPEEAAMRREVVKRIETVVKDLWPTADVQIFGSFSTGLYLPTSDIDLVVFGKWERPPLQLLEQALRKHNVAEPCSIKVLDKATVPIIKLTDQETEVKVDISFNMETGVRAAEFIKNYMKKYSLLPYLILVLKQFLLQRDLNEVFTGGISSYSLILMAISFLQLHPRIDARRADENLGMLLVEFFELYGRNFNYLKTGIRIKEGGAYIAKEEIMKAMTSGYRPSMLCIEDPLLPGNDVGRSSYGAMQVKQVFDYAYIVLSHAVSPLARSYPNRDAESTLGRIIKVTQEVIDYRRWIKEKWGSKAHPSPGMDSRIKIKERIATCNGEQTQNREPESPYGQRLTLSLSSPQLLSSGSSASSVSSLSGSDVDSDTPPCTTPSVYQFSLQAPAPLMAGLPTALPMPSGKPQPTTSRTLIMTTNNQTRFTIPPPTLGVAPVPCRQAGVEGTASLKAVHHMSSPAIPSASPNPLSSPHLYHKQHNGMKLSMKGSHGHTQGGGYSSVGSGGVRPPVGNRGHHQYNRTGWRRKKHTHTRDSLPVSLSR

SEQ ID NO: 33257 - protein, 542 aa, Homo sapiens
MSPCPEEAAMRREVVKRIETVVKDLWPTADVQIFGSFSTGLYLPTSDIDLVVFGKWERPPLQLLEQALRKHNVAEPCSIKVLDKATVPIIKLTDQETEVKVDISFNMETGVRAAEFIKNYMKKYSLLPYLILVLKQFLLQRDLNEVFTGGISSYSLILMAISFLQLHPRIDARRADENLGMLLVEFFELYGRNFNYLKTGIRIKEGGAYIAKEEIMKAMTSGYRPSMLCIEDPLLPGNDVGRSSYGAMQVKQVFDYAYIVLSHAVSPLARSYPNRDAESTLGRIIKVTQEVIDYRRWIKEKWGSKAHPSPGMDSRIKIKERIATCNGEQTQNREPESPYGQRLTLSLSSPQLLSSGSSASSVSSLSGSDVDSDTPPCTTPSVYQFSLQAPAPLMAGLPTALPMPSGKPQPTTSRTLIMTTNNQTRFTIPPPTLGVAPVPCRQAGVEGTASLKAVHHMSSPAIPSASPNPLSSPHLYHKQHNGMKLSMKGSHGHTQGGGYSSVGSGGVRPPVGNRGHHQYNRTGWRRKKHTHTRDSLPVSLSR

SEQ ID NO: 33258 - protein, 1249 aa, Homo sapiens
MSPAAAAAGAGERRRPIASVRDGRGRGCGGPARAVLLGLSLVGLLLYLVPAAAALAWLTVGATAAWWGLSREPRGSRPLSSFVRKARHRRPLSSFVRKARHRRTLFASPLAKSTANGNLLEPRTLLEGPDPAELLLMGSYLGKPGPPQPAAAPEGQDLRDRPGRRPPARPAPRSPPPRSPPPRSPPPSPPTHRAHHVYPSLPTPLLRPSRRPSPRDCGTLPNRFVITPRRRYPIHQAQYSCLGVLPTVCWNGYHKKAVLSPRNSRMVCSPVTVRIAPPDRRFSRSAIPEQIISSTLSSPSSNAPDPCAKETVLSALKEKEKKRTVEEEDQIFLDGQENKRRRHDSSGSGHSAFEPLVANGVPASFVPKPGSLKRGLNSQSSDDHLNKRSRSSSMSSLTGAYASGIPSSSRNAITSSYSSTRGISQLWKRNGPSSSPFSSPASSRSQTPERPAKKIREEELCHHSSSSTPLAADRESQGEKAADTTPRKKQNSNSQSTPGSSGQRKRKVQLLPSRRGEQLTLPPPPQLGYSITAEDLDLEKKASLQWFNQALEDKSDAASNSVTETPPITQPSFTFTLPAAAPASPPTSLLAPSTNPLLESLKKMQTPPSLPPCPESAGAATTEALSPPKTPSLLPPLGLSQSGPPGLLPSPSFDSKPPTTLLGLIPAPSMVPATDTKAPPTLQAETATKPQATSAPSPAPKQSFLFGTQNTSPSSPAAPAASSAPPMFKPIFTAPPKSEKEGPTPPGPSVTATAPSSSSLPTTTSTTAPTFQPVFSSMGPPASVPLPAPFFKQTTTPATAPTTTAPLFTGLASATSAVAPITSASPSTDSASKPAFGFGINSVSSSSVSTTTSTATAASQPFLFGAPQASAASFTPAMGSIFQFGKPPALPTTTTVTTFSQSLHTAVPTATSSSAADFSGFGSTLATSAPATSSQPTLTFSNTSTPTFNIPFGSSAKSPLPSYPGANPQPAFGAAEGQPPGAAKPALAPSFGSSFTFGNSAAPAAAPTPAPPSMIKVVPAYVPTPIHPIFGGATHSAFGLKATASAFGAPASSQPAFGGSTAVFFGAATSSGFGATTQTASSGSSSSVFGSTTPSPFTFGGSAAPAGSGSFGINVATPGSSTTTGAFSFGAGQSGSTATSTPFAGGLGQNALGTTGQSTPFAFNVSSTTESKPVFGGTATPTFGLNTPAPGVGTSGSSLSFGASSAPAQGFVGVAPFGSAALSFSIGAGSKTPGARQRLQARRQHTRKK

SEQ ID NO: 33259 - protein, 984 aa, Homo sapiens
MVCSPVTVRIAPPDRRFSRSAIPEQIISSTLSSPSSNAPDPCAKETVLSALKEKEKKRTVEEEDQIFLDGQENKRRRHDSSGSGHSAFEPLVANGVPASFVPKPGSLKRGLNSQSSDDHLNKRSRSSSMSSLTGAYASGIPSSSRNAITSSYSSTRGISQLWKRNGPSSSPFSSPASSRSQTPERPAKKIREEELCHHSSSSTPLAADRESQGEKAADTTPRKKQNSNSQSTPGSSGQRKRKVQLLPSRRGEQLTLPPPPQLGYSITAEDLDLEKKASLQWFNQALEDKSDAASNSVTETPPITQPSFTFTLPAAAPASPPTSLLAPSTNPLLESLKKMQTPPSLPPCPESAGAATTEALSPPKTPSLLPPLGLSQSGPPGLLPSPSFDSKPPTTLLGLIPAPSMVPATDTKAPPTLQAETATKPQATSAPSPAPKQSFLFGTQNTSPSSPAAPAASSAPPMFKPIFTAPPKSEKEGPTPPGPSVTATAPSSSSLPTTTSTTAPTFQPVFSSMGPPASVPLPAPFFKQTTTPATAPTTTAPLFTGLASATSAVAPITSASPSTDSASKPAFGFGINSVSSSSVSTTTSTATAASQPFLFGAPQASAASFTPAMGSIFQFGKPPALPTTTTVTTFSQSLHTAVPTATSSSAADFSGFGSTLATSAPATSSQPTLTFSNTSTPTFNIPFGSSAKSPLPSYPGANPQPAFGAAEGQPPGAAKPALAPSFGSSFTFGNSAAPAAAPTPAPPSMIKVVPAYVPTPIHPIFGGATHSAFGLKATASAFGAPASSQPAFGGSTAVFFGAATSSGFGATTQTASSGSSSSVFGSTTPSPFTFGGSAAPAGSGSFGINVATPGSSTTTGAFSFGAGQSGSTATSTPFAGGLGQNALGTTGQSTPFAFNVSSTTESKPVFGGTATPTFGLNTPAPGVGTSGSSLSFGASSAPAQGFVGVAPFGSAALSFSIGAGSKTPGARQRLQARRQHTRKK

SEQ ID NO: 33260 - protein, 999 aa, Homo sapiens
MVCSPVTVRIAPPDRRFSRSAIPEQIISSTLSSPSSNAPDPCAKETVLSALKEKEKKRTVEEEDQIFLDGQENKRRRHDSSGSGHSAFEPLVANGVPASFVPKPGSLKRGLNSQSSDDHLNKRSRSSSMSSLTGAYASGIPSSSRNAITSSYSSTRGISQLWKRNGPSSSPFSSPASSRSQTPERPAKKIREEELCHHSSSSTPLAADRESQGEKAADTTPRKKQNSNSQSTPGSSGQRKRKVQLLPSRRGEQLTLPPPPQLGYSITAEDLDLEKKASLQWFNQALEDKSDAASNSVTETPPITQPSFTFTLPAAAPASPPTSLLAPSTNPLLESLKKMQTPPSLPPCPESAGAATTEALSPPKTPSLLPPLGLSQSGPPGLLPSPSFDSKPPTTLLGLIPAPSMVPATDTKAPPTLQAETATKPQATSAPSPAPKQSFLFGTQNTSPSSPAAPAASSAPPMFKPIFTAPPKSEKEGPTPPGPSVTATAPSSSSLPTTTSTTAPTFQPVFSSMGPPASVPLPAPFFKQTTTPATAPTTTAPLFTGLASATSAVAPITSASPSTDSASKPAFGFGINSVSSSSVSTTTSTATAASQPFLFGAPQASAASFTPAMGSIFQFGKPPALPTTTTVTTFSQSLHTAVPTATSSSAADFSGFGSTLATSAPATSSQPTLTFSNTSTPTFNIPFGSSAKSPLPSYPGANPQPAFGAAEGQPPGAAKPALAPSFGSSFTFGNSAAPAAAPTPAPPSMIKVVPAYVPTPIHPIFGGATHSAFGLKATASAFGAPASSQPAFGGSTAVFFGAATSSGFGATTQTASSGSSSSVFGSTTPSPFTFGGSAAPAGSGSFGINVATPGSSTTTGAFSFGAGQSGSTATSTPFAGGLGQNALGTTGQSTPFAFNVSSTTESKPVFGGTATPTFGLNTPAPGVGTSGSSLSFGASSAPAQGFVGVAPFGNTFAHQQEHSPRKGPNNLSKRKLLPAVRAQGLPRRGQASSFPTRKE

SEQ ID NO: 33261 - protein, 834 aa, Homo sapiens
MSRRVRTSELWKRNGPSSSPFSSPASSRSQTPERPAKKIREEEMCHHSSSSTPLAADKESQGEKAADTTPRKKQNSNSQSTPGSSGQRKRKVQLLPSRRGEQLTLPPPPQLGYSITAEDLDLEKKASLQWFNQALEDKSDAASNSVTETPPITQPSFTFTLPAAAPASPPTSLLAPSTNPLLESLKKMQTPPSLPPCPESAGAATTEALSPPKTPNLLPPLGLSQSGPPGLLPSPSFDSNPPTTLLGLIPAPSMVPATDTKAPPTLQAETTTKPQATSAPSPAPKQSFLFGTQNTSPSSPAAPAASSASPMFKPIFTAPPKSEKEGPTPPGPSVSATAPSSSSLPTTTSTTAPTFQPVFSSMGPPASVPLPAPFFKQTTTPATAPTTTAPLFTGLASATSAVAPITSASPSTDSASKPAFGFGINSVSSSSVSTTTSTATAASQPFLFGAPQASAASFTPAMGSIFQFGKPPALPTTTTVTTFSQSLPTAVPTATSSSAADFSGFGSTLATSAPATSSQPTLTFSNTSTPTFNIPFGSSAKSPLPSYPGANPQPAFGAAEGQPPGAAKPALTPSFGSSFTFGNSAAPAAAPTPAPPSMIKIVPAHVPTPIQPTFGGATHSAFGLKATASAFGAPASSQPAFGGSTAVFSFGAATSSGFGATTQTASSGSSSSVFGSTTPSPFTFGGSAAPAGSGSFGINVATPGSSATTGAFSFGAGQSGSTATSTPFAGGLGQNALGTTGQSTPFAFNVGSTTESKPVFGGTATPTFGLNTPAPGVGTSGSSLSFGASSAPAQGFVGVAPFGSAAPSFSIGAGSKTLGARQRLQARRQHTRKK

SEQ ID NO: 33262 - protein, 1229 aa, Homo sapiens
MSPAAAAAGAGERRRPIASVRDGRGRGCGGPAGAALLGLSLVGLLLYLVPAAAALAWLAVGTTAAWWGLSREPRGSRPLSSFVQKARHRRTLFASPPAKSTANGNLLEPRTLLEGPDPAELLLMGSYLGKPGPPQPAPAPEGQDLRNRPGRRPPARPAPRSTPPSQPTHRVHHFYPSLPTPLLRPSGRPSPRDRGTLPDRFVITPRRRYPIHQTQYSCPGVLPTVCWNGYHKKAVLSPRNSRMVCSPVTVRIAPPDRRFSRSAIPEQIISSTLSSPSSNAPDPCAKETVLSALKEKKKKRTVEEEDQIFLDGQENKRRRHDSSGSGHSAFEPLVASGVPASFVPKPGSLKRGLNSQSSDDHLNKRSRSSSMSSLTGAYTSGIPSSSRNAITSSYSSTRGISQLWKRNGPSSSPFSSPASSRSQTPERPAKKIREEELCHHSSSSTPLAADKESQGEKAADTTPRKKQNSNSQSTPGSSGQRKRKVQLLPSRRGEQLTLPPPPQLGYSITAEDLDLEKKASLQWFNQALEDKSDAASNSVTETPPTTQPSFTFTLPAAATASPPTSLLAPSTNPLLESLKKMQTPPSLPPCPESAGAATTEALSPPKTPSLLPPLGLSQSGPPGLLPSPSFDSKPPTTLLGLIPAPSMVPATDTKAPPTLQAETATKPQATSAPSPAPKQSFLFGTQNTSPSSPAAPAASSASPMFKPIFTAPPKSEKEGLTPPGPSVSATAPSSSSLPTTTSTTAPTFQPVFSSMGPPASVPLPAPFFKQTTTPATAPTTTAPLFTGLASATSAVAPITSASPSTDSASKPAFGFGINSVSSSSVSTTTSTATAASQPFLFGAPQASAASFTPAMGSIFQFGKPPALPTTTTVTTFSQSLPTAVPTATSSSAADFSGFGSTLATSAPATSSQPTLTFSNTSTPTFNIPFGSSAKSPLPSYPGANPQPAFGAAEGQPPGAAKPALTPSFGSSFTFGNSAAPAPATAPTPAPASTIKIVPAHVPTPIQPTFGGATHSAFGLKATASAFGAPASSQPAFGGSTAVFSFGAATSSGFGATTQTASSGSSSSVFGSTTPSPFTFGGSAAPAGSGSFGINVATPGSSATTGAFSFGAGQSGSTATSTPFTGGLGQNALGTTGQSTPFAFNVGSTTESKPVFGGTATPTFGQNTPAPGVGTSGSSLSFGASSAPAQGFVGVGPFGSAAPSFSIGAGSKTPGARQRLQARRQHTRKK

SEQ ID NO: 33263 - protein, 987 aa, Homo sapiens
MVCSPVTVRIAPPDRRFSRSAIPEQIISSTLSSPSSNAPDPCAKETVLSALKEKKKKRTVEEEDQIFLDGQENKRRRHDSSGSGHSAFEPLVASGVPASFVPKPGSLKRGLNSQSSDDHLNKRSRSSSMSSLTGAYTSGIPSSSRNAITSSYSSTRGISQLWKRNGPSSSPFSSPASSRSQTPERPAKKIREEELCHHSSSSTPLAADKESQGEKAADTTPRKKQNSNSQSTPGSSGQRKRKVQLLPSRRGEQLTLPPPPQLGYSITAEDLDLEKKASLQWFNQALEDKSDAASNSVTETPPTTQPSFTFTLPAAATASPPTSLLAPSTNPLLESLKKMQTPPSLPPCPESAGAATTEALSPPKTPSLLPPLGLSQSGPPGLLPSPSFDSKPPTTLLGLIPAPSMVPATDTKAPPTLQAETATKPQATSAPSPAPKQSFLFGTQNTSPSSPAAPAASSASPMFKPIFTAPPKSEKEGLTPPGPSVSATAPSSSSLPTTTSTTAPTFQPVFSSMGPPASVPLPAPFFKQTTTPATAPTTTAPLFTGLASATSAVAPITSASPSTDSASKPAFGFGINSVSSSSVSTTTSTATAASQPFLFGAPQASAASFTPAMGSIFQFGKPPALPTTTTVTTFSQSLPTAVPTATSSSAADFSGFGSTLATSAPATSSQPTLTFSNTSTPTFNIPFGSSAKSPLPSYPGANPQPAFGAAEGQPPGAAKPALTPSFGSSFTFGNSAAPAPATAPTPAPASTIKIVPAHVPTPIQPTFGGATHSAFGLKATASAFGAPASSQPAFGGSTAVFSFGAATSSGFGATTQTASSGSSSSVFGSTTPSPFTFGGSAAPAGSGSFGINVATPGSSATTGAFSFGAGQSGSTATSTPFTGGLGQNALGTTGQSTPFAFNVGSTTESKPVFGGTATPTFGQNTPAPGVGTSGSSLSFGASSAPAQGFVGVGPFGSAAPSFSIGAGSKTPGARQRLQARRQHTRKK

SEQ ID NO: 33264 - protein, 359 aa, Homo sapiens
MKSPFYRCQNTTSVEKGNSAVMGGVLFSTGLLGNLLALGLLARSGLGWCSRRPLRPLPSVFYMLVCGLTVTDLLGKCLLSPVVLAAYAQNRSLRVLAPALDNSLCQAFAFFMSFFGLSSTLQLLAMALECWLSLGHPFFYRRHITLRLGALVAPVVSAFSLAFCALPFMGFGKFVQYCPGTWCFIQMVHEEGSLSVLGYSVLYSSLMALLVLATVLCNLGAMRNLYAMHRRLQRHPRSCTRDCAEPRADGREASPQPLEELDHLLLLALMTVLFTMCSLPVIYRAYYGAFKDVKEKNRTSEEAEDLRALRFLSVISIVDPWIFIIFRSPVFRIFFHKIFIRPLRYRSRCSNSTNMESSL

SEQ ID NO: 33265 - protein, 296 aa, Homo sapiens
MKSPFYRCQNTTSVEKGNSAVMGGVLFSTGLLGNLLALGLLARSGLGWCSRRPLRPLPSVFYMLVCGLTVTDLLGKCLLSPVVLAAYAQNRSLRVLAPALDNSLCQAFAFFMSFFGLSSTLQLLAMALECWLSLGHPFFYRRHITLRLGALVAPVVSAFSLAFCALPFMGFGKFVQYCPGTWCFIQMVHEEGSLSVLGYSVLYSSLMALLVLATVLCNLGAMRNLYAMHRRLQRHPRSCTRDCAEPRADGREASPQPLEELDHLLLLALMTVLFTMCSLPVIAFVPGVPAKTPGSR

SEQ ID NO: 33266 - protein, 428 aa, Homo sapiens
MDSLWGPGAGSHPFGVHNSRLSPDLCPGKIVLRALKESGAGMPEQDKDPRVQENPGDQRRVPEVTGDAPSAFRPLRDNGGLSPFVPGPGPLQTDLHAQRSEIRYNQTSQTSWTSSCTNRNAISSSYSSTGGLPGLKRRRGPASSHCQLTLSSSKTVSEDRPQAVSSGHTQCEKVAEIAPGQTLALRNDSSRSEASRPSTRKFPLLPRRRGEPLMLPPPVELGYRVTAEDLDWEKEAAFQCIKSALQVEDKAISDCRPSRPSHTLSSLATGASGLPAVSKAPSMDAQQERHKSQDCLGLVAPLASATEVPSTAPMSGEKHRPPGPLFSSSDPLPATSSHSQDSAQVTSLIPAPFPAASMDAGMRRTRPGTSAPAAAAAAPPPSTLNRTLGSLLEWMEALHISGPQPQLQQVPRGQNQRSQTSRTSSCPK

SEQ ID NO: 33267 - protein, 1035 aa, Homo sapiens
MGSFLSKLELSPSSPAQVRTDLPERPTKRRPPQPLHQVHRVQFVHRAHPAPRYRPVRRRPNLDPANPTTWLANEAWRRFPMKKSQNSPLGPLPSDWWESYLKRTIWSLRHPRPIWSPVTIRITPPDQRVPPSTSPEDVIALAGLPPSEELADPCSKETVLRALRECRKGKGRLEEPLFPESLDSKRRSPETRPSAFKPLMKNGTLTSFVPRPGPLKRSLHSWGSDHSLTKRPNCSSMSSLASIYRGGTLSSKRNAIGSSYSSCRNFSDPWKRSVPSVSFETPEWPIKKEKSCHRPSSPVPLVSDFESLGGSESSGQQNQKIPQLPSSPENLVSEIPPPQLGYAVSDENLTLGKKAELQVSNNAGEDTTEVNTDPFPETWLAIQPSLSLALPSSETDLTQGANPQLENLRKMQKSLGPLASPQSTGEATSVAHSPLKTPSLPTPPGCSQSELLPGTSPDSKPTATFILLTPTSPTLPVTDTTWPPSTSQADRSPMPPDPPAPPTIQSTLLGMVSSPTSHLSASAPPDATSAHLMLKPILGPLHNSEIGSSSYSRISVTAAASSISSLSTIQGTLTPTFKPIFGSIDPLKTTPMIAPFSSKQTPPPFTHASTHHFHGLVKATSVVMSTTLASTSKDSVFKPPLDFGVVNVTSAVGNTYSVPSTCDTFLLGTAQAFRADFTPATGFIFPPHHHPTIPTVHTVTMFTQVLSSVVQISPRSSTANFRGMGSPLPASALVSTNWLASTPSISNLTPAITSPLGSSSRPPFPLSQGANPQPAFGATNGQKQGPSQPALMPSVSSSFLFGSSAVALPTPMPTPAQPAFISTTQSALGCLTPSASTSQTPASTWSGIGGIPAGFPISQASTTGFRIVIQTHQSGAFGSVFGSRAPQPFTFGGFVTPMDCDESGIIMTGPDMSPTSGAFSIGALPSGTTNTMIPFGKGWSQNTEGLPSHRTAFSLGRGSISARKTMAPIAQNTPVPGQAKAGSSVGFGMPFPPAQGSVGRGPFRSSASSFSIGAKSKTPKNREKGHSRRHHAYKK

SEQ ID NO: 33268 - protein, 897 aa, Homo sapiens
MPEQDKDPRVQENPDDQRTVPEVTGDARSAFWPLRDNGGPSPFVPRPGPLQTDLHAQSSEIRYNHTSQTSWTSSSTKRNAISSSYSSTGGLPGLKQRRGPASSRCQLTLSYSKTVSEDRPQAVSSGHTRCEKGADTAPGQTIAPTGGSPRSQDSRPRRRKIPLLPRRRGEPLMLPPPLELGYRVTAEDLHLEKETAFQRINSALHVEDKAIPDCRPSRPSHTLSSLATGASGGPPVSKAPTMDAQQDRPKSQDSLGLLAPLASAAEVPSTAPVSGKKHRPPGPLFSSSDPLPATSYHSRDTAQVTSLIPATFTAASRDAGMRRTRSAPAAATAAPPPSTLNNTSGSLLNAVDGGPSHFLASATAAARAQRSEVRYNQRSQTSRTRSCLKRNASSSSSSHSSTEGLQELKRRRGPASSHCQLAHSSSNTVSEDGPQAVSSGHRCENKAGTAPGQTLAPRGGSPRSQASRPHINSALYVEDKAISDCRPSRPSHTLSSLATGASGGPPVSKAPTMDAQQDRPKSQDCLGLVAPLASAAEVPSTAPVSGKKHRPPGPLFSSSDPLPATSSHSRDSAQVTSLIPATFTAASRDAGMRRTRPGTSAPAAAAAALPPSTLNPTSGSLLNAVDGGPSHFLASATAAARAQRSEVRYNQRSQTSRTRSCLKRNASSSSHSSTEGLQELKRRRGPASSHCQLAHSSSNTVSEDGPQAVSSGHRCENKAGTAPGQTLAPRGGYPRSQASRPRINSALHVEDKAISDCRPSRPSHTLSSLATGASGGPPVSKAPTMDAQQDRPKSQDCLGLLAPLASAAEVSSTAPVSGKKHRPPGPLFSSSDPLPATSSHSGDSAQDTSLIPAPFTPASRDAGIRRMFRVRNCLRGLGLFLLVFSFFFLLTWASFSF

SEQ ID NO: 33269 - protein, 736 aa, Homo sapiens
MKEMSANTVLDSQRQQKHYGITSPISLASPKEIDHIYTQKLIDAMKPFGVFEDEEELNHRLVVLGKLNNLVKEWISDVSESKNLPPSVVATVGGKIFTFGSYRLGVHTKGADIDALCVAPRHVERSDFFQSFFEKLKHQDGIRNLRAVEDAFVPVIKFEFDGIEIDLVFARLAIQTISDNLDLRDDSRLRSLDIRCIRSLNGCRVTDEILHLVPNKETFRLTLRAVKLWAKRRGIYSNMLGFLGGVSWAMLVARTCQLYPNAAASTLVHKFFLVFSKWEWPNPVLLKQPEESNLNLPVWDPRVNPSDRYHLMPIITPAYPQQNSTYNVSTSTRTVMVEEFKQGLAVTDEILQGKSDWSKLLEPPNFFQKYRHYIVLTASASTEENHLEWVGLVESKIRVLVGNLERNEFITLAHVNPQSFPGNKEHHKDNNYVSMWFLGIIFRRVENAESVNIDLTYDIQSFTDTVYRQANNINMLKEGMKIEATHVKKKQLHHYLPAEILQKKKKQSLSDVNRSSGGLQSKRLSLDSSCLDSSRDTDNGTPFNSPASKSDSPSVGETERNSAEPAAVIVEKPLSVPPAQGLSIPVIGAKVDSTVKTVSPPTVCTIPTVVGRNVIPRITTPHNPAQGQPHLNGMSNITKTVTPKRSHSPSIDGTPKRLKDVEKFIRLESTFKDPRTAEERKRKSVDAIGGESMPIPTIDTSRKKRLPSKELPDSSSPVPANNIRVIKNSIRLTLNR

SEQ ID NO: 33270 - protein, 714 aa, Homo sapiens
MKEMSANTVLDSQRQQKHYGITSPISLASPKEIDHIYTQKLIDAMKPFGVFEDEEELNHRLVVLGKLNNLVKEWISDVSESKNLPPSVVATVGGKIFTFGSYRLGVHTKGADIDALCVAPRHVERSDFFQSFFEKLKHQDGIRNLRAVEDAFVPVIKFEFDGIEIDLVFARLAIQTISDNLDLRDDSRLRSLDIRCIRSLNGCRVTDEILHLVPNKETFRLTLRAVKLWAKRRGIYSNMLGFLGGVSWAMLVARTCQLYPNAAASTLVHKFFLVFSKWEWPNPVLLKQPEESNLNLPVWDPRVNPSDRYHLMPIITPAYPQQNSTYNVSTSTRTVMVEEFKQGLAVTDEILQGKSDWSKLLEPPNFFQKYRHYIVLTASASTEENHLEWVGLVESKIRVLVGNLERNEFITLAHVNPQSFPGNKEHHKDNNYVSMWFLGIIFRRVENAESVNIDLTYDIQSFTDTVYRQANNINMLKEGMKIEATHVKKKQLHHYLPAEILQKKKKQSLSDVNRSSGGLQSKRLSLDSSCLDSSRDTDNGTPFNSPASKSDSPSVGETERNSAEPAAVIVEKPLSVPPAQGLSIPVIGAKVDSTVKTVSPPTVCTIPTVVGRNVIPRITTPHNPAQGQPHLNGMSNITKTVTPKRSHSPSIDGTPKRLKDVEKDAIGGESMPIPTIDTSRKKRLPSKELPDSSSPVPANNIRVIKNSIRLTLNR

SEQ ID NO: 33271 - protein, 1627 aa, Homo sapiens
MRLWSWVLHLGLLSAALGCGLAERPRRARRDPRAGRPPRPAAGPATCATRAARGRRASPPPPPPPGGAWEAVRVPRRRQQREARGATEEPSPPSRALYFSGRGEQLRLRADLELPRDAFTLQVWLRAEGGQRSPAVITGLYDKCSYISRDRGWVVGIHTISDQDNKDPRYFFSLKTDRARQVTTINAHRSYLPGQWVYLAATYDGQFMKLYVNGAQVATSGEQVGGIFSPLTQKCKVLMLGGSALNHNYRGYIEHFSLWKVARTQREILSDMETHGAHTALPQLLLQENWDNVKHAWSPMKDGSSPKVEFSNAHGFLLDTSLEPPLCGQTLCDNTEVIASYNQLSSFRQPKVVRYRVVNLYEDDHKNPTVTREQVDFQHHQLAEAFKQYNISWELDVLEVSNSSLRRRLILANCDISKIGDENCDPECNHTLTGHDGGDCRHLRHPAFVKKQHNGVCDMDCNYERFNFDGGECCDPEITNVTQTCFDPDSPHRAYLDVNELKNILKLDGSTHLNIFFAKSSEEELAGVATWPWDKEALMHLGGIVLNPSFYGMPGHTHTMIHEIGHSLGLYHVFRGISEIQSCSDPCMETEPSFETGDLCNDTNPAPKHKSCGDPGPGNDTCGFHSFFNTPYNNFMSYADDDCTDSFTPNQVARMHCYLDLVYQGWQPSRKPAPVALAPQVLGHTTDSVTLEWFPPIDGHFFERELGSACHLCLEGRILVQYASNASSPMPCSPSGHWSPREAEGHPDVEQPCKSSVRTWSPNSAVNPHTVPPACPEPQGCYLELEFLYPLVPESLTIWVTFVSTDWDSSGAVNDIKLLAVSGKNISLGPQNVFCDVPLTIRLWDVGEEVYGIQIYTLDEHLEIDAAMLTSTADTPLCLQCKPLKYKVVRDPPLQMDVASILHLNRKFVDMDLNLGSVYQYWVITISGTEESEPSPAVTYIHGSGYCGDGIIQKDQGEQCDDMNKINGDGCSLFCRQEVSFNCIDEPSRCYFHDGDGVCEEFEQKTSIKDCGVYTPQGFLDQWASNASVSHQDQQCPGWVIIGQPAASQVCRTKVIDLSEGISQHAWYPCTISYPYSQLAQTTFWLRAYFSQPMVAAAVIVHLVTDGTYYGDQKQETISVQLLDTKDQSHDLGLHVLSCRNNPLIIPVVHDLSQPFYHSQAVRVSFSSPLVAISGVALRSFDNFDPVTLSSCQRGETYSPAEQSCVHFACEKTDCPELAVENASLNCSSSDRYHGAQCTVSCRTGYVLQIRRDDELIKSQTGPSVTVTCTEGKWNKQVACEPVDCSIPDHHQVYAASFSCPEGTTFGSQCSFQCRHPAQLKGNNSLLTCMEDGLWSFPEALCELMCLAPPPVPNADLQTARCRENKHKVGSFCKYKCKPGYHVPGSSRKSKKRAFKTQCTQDGSWQEGACVPVTCDPPPPKFHGLYQCTNGFQFNSECRIKCEDSDASQGLGSNVIHCRKDGTWNGSFHVCQEMQGQCSVPNELNSNLKLQCPDGYAIGSECATSCLDHNSESIILPMNVTVRDIPHWLNPTRVERVVCTAGLKWYPHPALIHCVKGCEPFMGDNYCDAINNRAFCNYDGGDCCTSTVKTKKVTPFPMSCDLQGDCACRDPQAQEHSRKDLRGYSHG

SEQ ID NO: 33272 - protein, 381 aa, Homo sapiens
MAAFGRQVLDWHRLIPLTWACMARQTPHLGEQRRTTASLLRKLTTASNGGVIEELSCVRSNNYVQEPECRRNLVQCLLEKQGTPVVQGSLELERVMSSLLDMGFSNAHINELLSVRRGASLQQLLDIISEFILLGLNPEPVCVVLKKSPQLLKLPIMQMRKRSSYLQKLGLGEGKLKRVLYCCPEIFTMRQQDINDTVRLLKEKCLFTVQQVTKILHSCPSVLREDLGQLEYKFQYAYFRMGIKHPDIVKSEYLQYSLTKIKQRHIYLERLGRYQTPDKKGQTQIPNPLLKDILRVSEAEFLARTACTSVEEFQVFKKLLAREEEESESSTSDDKRASLDEDEDDDDEEDNDEDDNDEDDDDEDDDEAEDNDEDEDDDEEE

SEQ ID NO: 33273 - protein, 1369 aa, Homo sapiens
MSVPVAPKKSCYTQLRDNRNAARNNNESILSLGDTNANQIMLEVSSSHDESKTCDLGDEIGNTNSSEPENRTHFHKEFHQLQGFGKGSQAGSASLKDFRLSSTIQRELNEEHTVERGTDSLQTTRSIQGPSLSSWRNVMSEASLDVLAKRDAEIPRHVPKDKLAKTLDNEELRRHSLERASSSVAAVGSLTPQHPQPLSLDSREARGQIPGGGEGPQKTLPDHAVPAAFPATDSTSEGKSVRHPKPSTSESKQSTPSETQTVGAHVLQVCSEHTSHSAHPEPALNLTLASKEIPSKLEAQLGQGKGEAKLDLKYVPPRRVEQEGKAAQEGYLGCHKEENLSALEGRDPCGEAHPEATDALGHLLNSDLHHLGVGRGNCEEKRGVNPGEQDSLHTTPKQGSASLGGADNQPTGKISPCAGEKLGERTSSSFSPGDSHVAFIPNNLTDSKPLDVIEEERRLGSGNKDSVMVLVFNPSVGENKTEVPEPLDPQSGRSEARESKEVTTSVAENRNLLENADKIESTSARADSVLNIPAPLHPETTVNMTYQPTTPSSSFQDVSVFGMDAGSPLVVPPPTDSARLLNTSPKVPDKNTCPSGIPKPVFTHSKDTPSSQEGMENYQVEKTEERTETKPIIMPKPKHVRPKIITYIRRNPQALGQVDASLVPVGLPYAPPTCTMPLPHEEKAAGGDLKPSANLYEKFKPDLQKPRVFSSGLMVSGIKPPGHPFSQMSEKFLQEVTDHPGKEEFCSPPYAHYEVPPTFYRSAMLLKPQLGLGAMSRLPSAKSRILIASQRSSASAIHPPGPITTATSLYSSDPSADLKKASSSNAAKSNLPKSGLRPPGYSRLPAAKLAAFGFVRSSSVSSVSSTQSGDSAQPEQGRPATRSTFGNEEQPVLKASLPSKDTPKGAGRVAPPASSSVTAPRRSLLPAPKSTSTPAGTKKDAQKDQDTNKPAVSSPKRVAASTTKLHSPGYPKQRTAAARNGFPPKPDPQAREAERQLVLRLKERCEQQTRQLGVAQGELKRAICGFDALAVATQHFFRKNESALVKEKELSIELANIRDEVAFHTAKCEKLQKEKEELERRFEDEVKRLGWQQQAELQELEERLQLQFEAEMARLQEEHGDQLLSIRCQHQEQVEDLTASHDAALLEMENNHTVAITILQDDHDHKVQELMSTHELEKKELEENFEKLRLSLQDQVDTLTFQSQSLRDRARRFEEALRKNTEEQLEIALAPYQHLEEDMKSLKQVLEMKNQQIHEQEKKILELEKLAEKNIILEEKIQVLQQQNEDLKARIDQNTVVTRQLSEENANLQEYVEKETQEKKRLSRTNEELLWKLQTGDPTSPIKLSPTSPVYRGSSSGPSSPARVSTTPR

SEQ ID NO: 33274 - protein, 348 aa, Homo sapiens
MGHCCCKPYNCLQCLDKTNESALVKEKELSIELANIRDEVAFHTAKCEKLQKEKEELERRFEDEVKRLGWQQQAELQELEERLQLQFEAEMARLQEEHGDQLLSIRCQHQEQVEDLTASHDAALLEMENNHTVAITILQDDHDHKVQELMSTHELEKKELEENFEKLRLSLQDQVDTLTFQSQSLRDRARRFEEALRKNTEEQLEIALAPYQHLEEDMKSLKQVLEMKNQQIHEQEKKILELEKLAEKNIILEEKIQVLQQQNEDLKARIDQNTVVTRQLSEENANLQEYVEKETQEKKRLSRTNEELLWKLQTGDPTSPIKLSPTSPVYRGSSSGPSSPARVSTTPR

SEQ ID NO: 33275 - protein, 258 aa, Homo sapiens
MARLQEEHGDQLLSIRCQHQEQVEDLTASHDAALLEMENNHTVAITILQDDHDHKVQELMSTHELEKKELEENFEKLRLSLQDQVDTLTFQSQSLRDRARRFEEALRKNTEEQLEIALAPYQHLEEDMKSLKQVLEMKNQQIHEQEKKILELEKLAEKNIILEEKIQVLQQQNEDLKARIDQNTVVTRQLSEENANLQEYVEKETQEKKRLSRTNEELLWKLQTGDPTSPIKLSPTSPVYRGSSSGPSSPARVSTTPR

SEQ ID NO: 33276 - protein, 62 aa, Homo sapiens
MDPRECVCMSGGICMCGDNCKCTTCNCKTYWKSCCPCCPPGCAKCARGCICKGGSDKCSCCP

SEQ ID NO: 33277 - protein, 777 aa, Homo sapiens
MFSLKPPKPTFRSYLLPPPQTDDKINSEPKIKKLEPVLLPGEIVVNEVNFVRKCIATDTSQYDLWGKLICSNFKISFITDDPMPLQKFHYRNLLLGEHDVPLTCIEQIVTVNDHKRKQKVLGPNQKLKFNPTELIIYCKDFRIVRFRFDESGPESAKKVCLAIAHYSQPTDLQLLFAFEYVGKKYHNSANKINGIPSGDGGGGGGGGNGAGGGSSQKTPLFETYSDWDREIKRTGASGWRVCSINEGYMISTCLPEYIVVPSSLADQDLKIFSHSFVGRRMPLWCWSHSNGSALVRMALIKDVLQQRKIDQRICNAITKSHPQRSDVYKSDLDKTLPNIQEVQAAFVKLKQLCVNEPFEETEEKWLSSLENTRWLEYVRAFLKHSAELVYMLESKHLSVVLQEEEGRDLSCCVASLVQVMLDPYFRTITGFQSLIQKEWVMAGYQFLDRCNHLKRSEKESPLFLLFLDATWQLLEQYPAAFEFSETYLAVLYDSTRISLFGTFLFNSPHQRVKQSTEFAISKNIQLGDEKGLKFPSVWDWSLQFTAKDRTLFHNPFYIGKSTPCIQNGSVKSFKRTKKSYSSTLRGMPSALKNGIISDQELLPRRNSLILKPKPDPAQQTDSQNSDTEQYFREWFSKPANLHGVILPRVSGTHIKLWKLCYFRWVPEAQISLGGSITAFHKLSLLADEVDVLSRMLRQQRSGPLEACYGELGQSRMYFNASGPHHTDTSGTPEFLSSSFPFSPVGNLCRRSILGTPLSKFLSGAKIWLSTETLANED

SEQ ID NO: 33278 - protein, 451 aa, Homo sapiens
MPLQKFHYRNLLLGEHDVPLTCIEQIVTVNDHKRKQKVLGPNQKLKFNPTELIIYCKDFRIVRFRFDESGPESAKKVCLAIAHYSQPTDLQLLFAFEYVGKKYHNSANKINGIPSGDGGGGGGGGNGAGGGSSQKTPLFETYSDWDREIKRTGASGWRVCSINEGYMISTCLPEYIVVPSSLADQDLKIFSHSFVGRRMPLWCWSHSNGSALVRMALIKDVLQQRKIDQRICNAITKSHPQRSDVYKSDLDKTLPNIQEVQAAFVKLKQLCVNEPFEETEEKWLSSLENTRWLEYVRAFLKHSAELVYMLESKHLSVVLQEEEGRDLSCCVASLVQVMLDPYFRTITGFQSLIQKEWVMAGYQFLDRCNHLKRSEKESPLFLLFLDATWQLLEQYPAAFEFSETYLAVLYDSTRISLFGTFLFNSPHQRVKQSTVSRIKSCTKQDYFPSRV

SEQ ID NO: 33279 - protein, 218 aa, Homo sapiens
MFSLKPPKPTFRSYLLPPPQTDDKINSEPKIKKLEPVLLPGEIVVNEVNFVRKCIATDTSQYDLWGKLICSNFKISFITDDPMPLQKFHYRNLLLGEHDVPLTCIEQIVTVNDHKRKQKVLGPNQKLKFNPTELIIYCKDFRIVRFRFDESGPESAKKQTKLMEFPQEMEEEEEEEVMELVVAAARKLHSLKLTRIGTEKSRGQVLPGGEFVLLTRVT

SEQ ID NO: 33280 - protein, 614 aa, Homo sapiens
MTMRSAVFKAAAAPAGGNPEQRLDYERAAALGGPEDEPGAAEAHFLPRHRKLKEPGPPLASSQGGSPAPSPAGCGGKGRGLLLPAGAAPGQQEESWGGSVPLPCPPPATKQAGIGGEPAAAGAGCSPRPKYQAVLPIQTGSLVAAAKEPTPWAGDKGGAASPAATASDPAGPPPLPLPGPPPLAPTATAGTLAASEGRWKSMRKSPLGGGGGSGASSQAACLKQILLLQLDLIEQQQQQLQAKEKEIEELKSERDTLLARIERMERRMQLVKKDNEKERHKLFQGYETEEREETELSEKIKLECQPELSETSQTLPPKPFSCGRSGKGHKRKSPFGSTERKTPVKKLAPEFSKVKTKTPKHSPIKEEPCGSLSETVCKRELRSQETPEKPRSSVDTPPRLSTPQKGPSTHPKEKAFSSEIEDLPYLSTTEMYLCRWHQPPPSPLPLRESSPKKEETVARCLMPSSVAGETSVLAVPSWRDHSVEPLRDPNPSDLLENLDDSVFSKRHAKLELDEKRRKRWDIQRIREQRILQRLQLRMYKKKGIQESEPEVTSFFPEPDDVESLMITPFLPVVAFGRPLPKLTPQNFELPWLDERSRCRLEIQKKQTPHRTCRK

SEQ ID NO: 33281 - protein, 413 aa, Homo sapiens
MRKSPLGGGGGSGASSQAACLKQILLLQLDLIEQQQQQLQAKEKEIEELKSERDTLLARIERMERRMQLVKKDNEKERHKLFQGYETEEREETELSEKIKLECQPELSETSQTLPPKPFSCGRSGKGHKRKSPFGSTERKTPVKKLAPEFSKVKTKTPKHSPIKEEPCGSLSETVCKRELRSQETPEKPRSSVDTPPRLSTPQKGPSTHPKEKAFSSEIEDLPYLSTTEMYLCRWHQPPPSPLPLRESSPKKEETVARCLMPSSVAGETSVLAVPSWRDHSVEPLRDPNPSDLLENLDDSVFSKRHAKLELDEKRRKRWDIQRIREQRILQRLQLRMYKKKGIQESEPEVTSFFPEPDDVESLMITPFLPVVAFGRPLPKLTPQNFELPWLDERSRCRLEIQKKQTPHRTCRK

SEQ ID NO: 33282 - protein, 351 aa, Homo sapiens
MERRMQLVKKDNEKERHKLFQGYETEEREETELSEKIKLECQPELSETSQTLPPKPFSCGRSGKGHKRKSPFGSTERKTPVKKLAPEFSKVKTKTPKHSPIKEEPCGSLSETVCKRELRSQETPEKPRSSVDTPPRLSTPQKGPSTHPKEKAFSSEIEDLPYLSTTEMYLCRWHQPPPSPLPLRESSPKKEETVARCLMPSSVAGETSVLAVPSWRDHSVEPLRDPNPSDLLENLDDSVFSKRHAKLELDEKRRKRWDIQRIREQRILQRLQLRMYKKKGIQESEPEVTSFFPEPDDVESLMITPFLPVVAFGRPLPKLTPQNFELPWLDERSRCRLEIQKKQTPHRTCRK

SEQ ID NO: 33283 - protein, 118 aa, Homo sapiens
MCDKEFMWALKNGDLDEVKDYVAKGEDVNRTLEGGRKPLHYAADCGQLEILEFLLLKGADINAPDKHHITPLLSAVYEGHVSCVKLLLSKGADKTVKGPDGLTAFEATDNQAIKALLQ

SEQ ID NO: 33284 - protein, 213 aa, Homo sapiens
MPGEATETVPAIEQQLLQPQAETGSGTESDSDESVPELEEQDSTQVTAQVQLVVAAEIDEEPVSKAKQRRSEKKARKARFKLGLQQVTGVTRVTIRKSKNILFVITKPDVYKSPASDTYMVFGEAKIEDLSQEAQLAAAEKFKVQGEAVSNIQENTQTPTVQEGSEDEEVDETGVEIKDIELVLSQANVWGAKAVRALKNSNDIVNAIMELTM

SEQ ID NO: 33285 - protein, 347 aa, Homo sapiens
MARFWVCVAGAGFFLAFLVLHSRFCGSPVLRNFTFAVSWRTEKILYRLDVGWPKHPEYFTGTTFCVAVDSLNGLVYIGQRGDNIPKILVFTEDGYFLRAWNYTVDTPHGIFAASTLYEQSVWITDVGSGFFGHTVKKYSSFGDLVQVLGTPGKKGTSLNPLQFDNPAELYVEDTGDIYIVDGDGGLNNRLIKLSQDFMILWLHGENGTGPAKFNIPHSVTLDSAGRVWVADRGNKRIQVFDKDTGEWLGAWNNCFTEEGPSSVRFTPDGKYLIVAQLNLSRLSVVAAPPVGSIGECSVISTIQLADQVLPHLLEVDRKTGAVYVAEIGAKQVQKYVPLNSYVPSFGS

SEQ ID NO: 33286 - protein, 280 aa, Homo sapiens
MARFWVCVAGAGFFLAFLVLHSRFCGSPVLRNFTFAVSWRTEKILYRLDVGWPKHPEYFTGTTFCVAVDSLNGLVYIGQRGDNIPKILVFTEDGYFLRAWNYTVDTPHGIFAASTLYEQSVWITDVGSDFMILWLHGENGTGPAKFNIPHSVTLDSAGRVWVADRGNKRIQVFDKDTGEWLGAWNNCFTEEGPSSVRFTPDGKYLIVAQLNLSRLSVVAAPPVGSIGECSVISTIQLADQVLPHLLEVDRKTGAVYVAEIGAKQVQKYVPLNSYVPSFGS

SEQ ID NO: 33287 - protein, 638 aa, Homo sapiens
MKGGCVSQWKAAAGFLFCVMVFASAERPVFTNHFLVELHKGGEDKARQVAAEHGFGVRKLPFAEGLYHFYHNGLAKAKRRRSLHHKQQLERDPRVKMALQQEGFDRKKRGYRDINEIDINMNDPLFTKQWYLINTGQADGTPGLDLNVAEAWELGYTGKGVTIGIMDDGIDYLHPDLASNYNAEASYDFSSNDPYPYPRYTDDWFNSHGTRCAGEVSAAANNNICGVGVAYNSKVAGIRMLDQPFMTDIIEASSISHMPQLIDIYSASWGPTDNGKTVDGPRELTLQAMADGVNKGRGGKGSIYVWASGDGGSYDDCNCDGYASSMWTISINSAINDGRTALYDESCSSTLASTFSNGRKRNPEAGVATTDLYGNCTLRHSGTSAAAPEAAGVFALALEANLGLTWRDMQHLTVLTSKRNQLHDEVHQWRRNGVGLEFNHLFGYGVLDAGAMVKMAKDWKTVPERFHCVGGSVQDPEKIPSTGKLVLTLTTDACEGKENFVRYLEHVQAVITVNATRRGDLNINMTSPMGTKSILLSRRPRDDDSKVGFDKWPFMTTHTWGEDARGTWTLELGFVGSAPQKGVLKEWTLMLHGTQSAPYIDQVVRDYQSKLAMSKKEELEEELDEAVERSLKSILNKN

SEQ ID NO: 33288 - protein, 603 aa, Homo sapiens
MKGGCVSQWKAAAGFLFCVMVFASAERPVFTNHFLVELHKGGEDKARQVAAEHGFGVRKVKMALQQEGFDRKKRGYRDINEIDINMNDPLFTKQWYLINTGQADGTPGLDLNVAEAWELGYTGKGVTIGIMDDGIDYLHPDLASNYNAEASYDFSSNDPYPYPRYTDDWFNSHGTRCAGEVSAAANNNICGVGVAYNSKVAGIRMLDQPFMTDIIEASSISHMPQLIDIYSASWGPTDNGKTVDGPRELTLQAMADGVNKGRGGKGSIYVWASGDGGSYDDCNCDGYASSMWTISINSAINDGRTALYDESCSSTLASTFSNGRKRNPEAGVATTDLYGNCTLRHSGTSAAAPEAAGVFALALEANLGLTWRDMQHLTVLTSKRNQLHDEVHQWRRNGVGLEFNHLFGYGVLDAGAMVKMAKDWKTVPERFHCVGGSVQDPEKIPSTGKLVLTLTTDACEGKENFVRYLEHVQAVITVNATRRGDLNINMTSPMGTKSILLSRRPRDDDSKVGFDKWPFMTTHTWGEDARGTWTLELGFVGSAPQKGVLKEWTLMLHGTQSAPYIDQVVRDYQSKLAMSKKEELEEELDEAVERSLKSILNKN

SEQ ID NO: 33289 - protein, 619 aa, Homo sapiens
MVFASAERPVFTNHFLVELHKGGEDKARQVAAEHGFGVRKLPFAEGLYHFYHNGLAKAKRRRSLHHKQQLERDPRVKMALQQEGFDRKKRGYRDINEIDINMNDPLFTKQWYLINTGQADGTPGLDLNVAEAWELGYTGKGVTIGIMDDGIDYLHPDLASNYNAEASYDFSSNDPYPYPRYTDDWFNSHGTRCAGEVSAAANNNICGVGVAYNSKVAGIRMLDQPFMTDIIEASSISHMPQLIDIYSASWGPTDNGKTVDGPRELTLQAMADGVNKGRGGKGSIYVWASGDGGSYDDCNCDGYASSMWTISINSAINDGRTALYDESCSSTLASTFSNGRKRNPEAGVATTDLYGNCTLRHSGTSAAAPEAAGVFALALEANLGLTWRDMQHLTVLTSKRNQLHDEVHQWRRNGVGLEFNHLFGYGVLDAGAMVKMAKDWKTVPERFHCVGGSVQDPEKIPSTGKLVLTLTTDACEGKENFVRYLEHVQAVITVNATRRGDLNINMTSPMGTKSILLSRRPRDDDSKVGFDKWPFMTTHTWGEDARGTWTLELGFVGSAPQKGVLKEWTLMLHGTQSAPYIDQVVRDYQSKLAMSKKEELEEELDEAVERSLKSILNKN

SEQ ID NO: 33290 - protein, 273 aa, Homo sapiens
MSLTNTKTGFSVKDILDLPDTNDEEGSVAEGPEEENEGPEPAKRAGPLGQGALDAVQSLPLKNPFYDSSDNPYTRWLASTEGLQYSLHGLAAGAPPQDSSSKSPEPSADESPDNDKETPGGGGDAGKKRKRRVLFSKAQTYELERRFRQQRYLSAPEREHLASLIRLTPTQVKIWFQNHRYKMKRARAEKGMEVTPLPSPRRVAVPVLVRDGKPCHALKAQDLAAATFQAGIPFSAYSAQSLQHMQYNAQYSSASTPQYPTAHPLVQAQQWTW

SEQ ID NO: 33291 - protein, 463 aa, Homo sapiens
MAALRALCGFRGVAAQVLRPGAGVRLPIQPSRGVRQWQPDVEWAQQFGGAVMYPSKETAHWKPPPWNDVDPPKDTIVKNITLNFGPQHPAAHGVLRLVMELSGEMVRKCDPHIGLLHRGTEKLIEYKTYLQALPYFDRLDYVSMMCNEQAYSLAVEKLLNIRPPPRAQWIRVLFGEITRLLNHIMAVTTHALDLGAMTPFFWLFEEREKMFEFYERVSGARMHAAYIRPGGVHQDLPLGLMDDIYQFSKNFSLRLDELEELLTNNRIWRNRTIDIGVVTAEEALNYGFSGVMLRGSGIQWDLRKTQPYDVYDQVEFDVPVGSRGDCYDRYLCRVEEMRQSLRIIAQCLNKMPPGEIKVDDAKVSPPKRAEMKTSMESLIHHFKLYTEGYQVPPGATYTAIEAPKGEFGVYLVSDGSSRPYRCKIKAPGFAHLAGLDKMSKGHMLADVVAIIGTQDIVFGEVDR

SEQ ID NO: 33292 - protein, 457 aa, Homo sapiens
MAALRALCGFRGVAAQVLRPGAGVRLPIQPSRGVRQWQPDVEWAQQFGGAVMYPSKETAHWKPPPWNDVDPPKDTIVKNITLNFGPQHPAAHGVLRLVMELSGEMVRKCDPHIGLLHRGTEKLIEYKTYLQALPYFDRLDYVSMMCNEQAYSLAVEKLLNIRPPPRAQWIRVLFGEITRLLNHIMAVTTHALDLGAMTPFFWLFEEREKMFEFYERVSGARMHAAYIRPGGVHQDLPLGLMDDIYQFSKNFSLRLDELEELLTNNRIWRNRTIDIGVVTAEEALNYGFSGVMLRGSGIQWDLRKTQPYDVYDQVEFDVPVGSRGDCYDRYLCRVEEMRQSLRIIAQCLNKMPPGEIKVDDAKVSPPKRAEMKTSMESLIHHFKLYTEGYQVPPGATYTAIEAPKGEFGVYLVSDGSSRPYRCKIKAPGFAHLAGLDKMSKGHMLADVVAIIGTRPIV

SEQ ID NO: 33293 - protein, 473 aa, Homo sapiens
MSSPEPPTEPPEPDNPTWSTQPTYSNLGQIRAHLLPSKACRLRTPGSLSTNPEPLPPPLPKKILTRTQSLPTRRTLHPSSIQVQPPRRPFLGSHSVDKSQAAVGPACLPAELTFGPADAPLGLSLRDLHSPEAVHTALAARQLQGLRTIYARLRARLMGGHPGPCHPGHSFRLLDSSPCAESGDALYYRVVRAHEDAWHILVAKVPKPGADVPHPWGLELQASLSPHFNLQGLCGLVPEGTLPGAPWRGAVALAAEVPERTVAQWLAEACTQPPEEFVWAVALLLLQLSAALKFLEAWGAALVELRPENLLLVAPRGCATTGPPRLLLTDFGRVCLQPPGPPGSPGPHAPQLGSLLRALLSLAAPSTTPLAAGLELLAAQLTRLRPSASRTRGALQALLWGPGPELRGRGAPLGPWLRALGPWLRVRRGLLVLRLAERAAGGEAPSLEDWLCCEYLAEATESSMGQALALLWD

SEQ ID NO: 33294 - protein, 457 aa, Homo sapiens
MDSFKVVLEGPAPWGFRLQGGKDFNVPLSISRLTPGGKAAQAGVAVGDWVLSIDGENAGSLTHIEAQNKIRACGERLSLGLSRAQPVQSKPQKASAPAADPPRYTFAPSVSLNKTARPFGAPPPADSAPQQNGQPLRPLVPDASKQRLMENTEDWRPRPGTGQSRSFRILAHLTGTEFMQDPDEEHLKKSSQVPRTEAPAPASSTPQEPWPGPTAPSPTSRPPWAVDPAFAERYAPDKTSTVLTRHSQPATPTPLQSRTSIVQAAAGGVPGGGSNNGKTPVCHQCHKVIRGRYLVALGHAYHPEEFVCSQCGKVLEEGGFFEEKGAIFCPPCYDVRYAPSCAKCKKKITGEIMHALKMTWHVHCFTCAACKTPIRNRAFYMEEGVPYCERDYEKMFGTKCHGCDFKIDAGDRFLEALGFSWHDTCFVCAICQINLEGKTFYSKKDRPLCKSHAFSHV

SEQ ID NO: 33295 - protein, 423 aa, Homo sapiens
MDSFKVVLEGPAPWGFRLQGGKDFNVPLSISRLTPGGKAAQAGVAVGDWVLSIDGENAGSLTHIEAQNKIRACGERLSLGLSRAQPVQSKPQKVQTPDKQPLRPLVPDASKQRLMENTEDWRPRPGTGQSRSFRILAHLTGTEFMQDPDEEHLKKSSQVPRTEAPAPASSTPQEPWPGPTAPSPTSRPPWAVDPAFAERYAPDKTSTVLTRHSQPATPTPLQSRTSIVQAAAGGVPGGGSNNGKTPVCHQCHKVIRGRYLVALGHAYHPEEFVCSQCGKVLEEGGFFEEKGAIFCPPCYDVRYAPSCAKCKKKITGEIMHALKMTWHVHCFTCAACKTPIRNRAFYMEEGVPYCERDYEKMFGTKCHGCDFKIDAGDRFLEALGFSWHDTCFVCAICQINLEGKTFYSKKDRPLCKSHAFSHV

SEQ ID NO: 33296 - protein, 153 aa, Homo sapiens
MDSFKVVLEGPAPWGFRLQGGKDFNVPLSISRLTPGGKAAQAGVAVGDWVLSIDGENAGSLTHIEAQNKIRACGERLSLGLSRAQPVQSKPQKASAPAADPPRYTFAPSVSLNKTARPFGAPPPADSAPQQNGCRPLTNSRSDRWSQMPASSG

SEQ ID NO: 33297 - protein, 287 aa, Homo sapiens
MDSFKVVLEGPAPWGFRLQGGKDFNVPLSISRLTPGGKAAQAGVAVGDWVLSIDGENAGSLTHIEAQNKIRACGERLSLGLSRAQPVQSKPQKASAPAADPPRYTFAPSVSLNKTARPFGAPPPADSAPQQNGQPLRPLVPDASKQRLMENTEDWRPRPGTGQSRSFRILAHLTGTEFMQDPDEEHLKKSRPYRPQPYQPPALGCGPCVCRALCPGQNEHSADPAQPAGHAHAAAEPHLHCAGSCRRGARRGQQQRQDSRVSPVPQGHPGPLPGGAGPRVPPGGVCV

SEQ ID NO: 33298 - protein, 191 aa, Homo sapiens
MDSFKVVLEGPAPWGFRLQGGKDFNVPLSISRLTPGGKAAQAGVAVGDWVLSIDGENAGSLTHIEAQNKIRACGERLSLGLSRAQPVQSKPQKASAPAADPPRYTFAPSVSLNKTARPFGAPPPADSAPQQNGQPLRPLVPDASKQRLMENTEDWRPRPGTGQSRSFRILAHLTGTEFMQDPDEEHLKKSS

SEQ ID NO: 33299 - protein, 222 aa, Homo sapiens
MDSFKVVLEGPAPWGFRLQGGKDFNVPLSISRLTPGGKAAQAGVAVGDWVLSIDGENAGSLTHIEAQNKIRACGERLSLGLSRAQPVQSKPQKASAPAADPPRYTFAPSVSLNKTARPFGAPPPADSAPQQNGQPLRPLVPDASKQRLMENTEDWRPRPGTGQSRSFRILAHLTGTEFMQDPDEEHLKKSREKYVLELQSPRYTRLRDWHHQRSAHVLNVQS

SEQ ID NO: 33300 - protein, 482 aa, Homo sapiens
MEVCYQLPVLPLDRPVPQHVLSRRGAISFSSSSALFGCPNPRQLSQRRGAISYDSSDQTALYIRMLGDVRVRSRAGFESERRGSHPYIDFRIFHSQSEIEVSVSARNIRRLLSFQRYLRSSRFFRGTAVSNSLNILDDDYNGQAKCMLEKVGNWNFDIFLFDRLTNGNSLVSLTFHLFSLHGLIEYFHLDMMKLRRFLVMIQEDYHSQNPYHNAVHAADVTQAMHCYLKEPKLANSVTPWDILLSLIAAATHDLDHPGVNQPFLIKTNHYLATLYKNTSVLENHHWRSAVGLLRESGLFSHLPLESRQQMETQIGALILATDISRQNEYLSLFRSHLDRGDLCLEDTRHRHLVLQMALKCADICNPCRTWELSKQWSEKVTEEFFHQGDIEKKYHLGVSPLCDRHTESIANIQIGFMTYLVEPLFTEWARFSNTRLSQTMLGHVGLNKASWKGLQREQSSSEDTDAAFELNSQLLPQENRLS

SEQ ID NO: 33301 - protein, 456 aa, Homo sapiens
MGITLIWCLALVLIKWITSKRRGAISYDSSDQTALYIRMLGDVRVRSRAGFESERRGSHPYIDFRIFHSQSEIEVSVSARNIRRLLSFQRYLRSSRFFRGTAVSNSLNILDDDYNGQAKCMLEKVGNWNFDIFLFDRLTNGNSLVSLTFHLFSLHGLIEYFHLDMMKLRRFLVMIQEDYHSQNPYHNAVHAADVTQAMHCYLKEPKLANSVTPWDILLSLIAAATHDLDHPGVNQPFLIKTNHYLATLYKNTSVLENHHWRSAVGLLRESGLFSHLPLESRQQMETQIGALILATDISRQNEYLSLFRSHLDRGDLCLEDTRHRHLVLQMALKCADICNPCRTWELSKQWSEKVTEEFFHQGDIEKKYHLGVSPLCDRHTESIANIQIGFMTYLVEPLFTEWARFSNTRLSQTMLGHVGLNKASWKGLQREQSSSEDTDAAFELNSQLLPQENRLS

SEQ ID NO: 33302 - protein, 424 aa, Homo sapiens
MEVCYQLPVLPLDRPVPQHVLSRRGAISFSSSSALFGCPNPRQLSQRRGAISYDSSDQTALYIRMLGDVRVRSRAGFESERRGSHPYIDFRIFHSQSEIEVSVSARNIRRLLSFQRYLRSSRFFRGTAVSNSLNILDDDYNGQAKCMLEKVGNWNFDIFLFDRLTNGNSLVSLTFHLFSLHGLIEYFHLDMMKLRRFLVMIQEDYHSQNPYHNAVHAADVTQAMHCYLKEPKLANSVTPWDILLSLIAAATHDLDHPGVNQPFLIKTNHYLATLYKNTSVLENHHWRSAVGLLRESGLFSHLPLESRQQMETQIGALILATDISRQNEYLSLFRSHLDRGDLCLEDTRHRHLVLQMALKCADICNPCRTWELSKQWSEKVTEEFFHQGDIEKKYHLGVSPLCDRHTESIANIQIGNYTYLDIAG

SEQ ID NO: 33303 - protein, 450 aa, Homo sapiens
MSCLMVERCGEILFENPDQNAKCVCMLGDIRLRGQTGVRAERRGSYPFIDFRLLNSTTYSGEIGTKKKVKRLLSFQRYFHASRLLRGIIPQAPLHLLDEDYLGQARHMLSKVGMWDFDIFLFDRLTNGNSLVTLLCHLFNTHGLIHHFKLDMVTLHRFLVMVQEDYHSQNPYHNAVHAADVTQAMHCYLKEPKLASFLTPLDIMLGLLAAAAHDVDHPGVNQPFLIKTNHHLANLYQNMSVLENHHWRSTIGMLRESRLLAHLPKEMTQDIEQQLGSLILATDINRQNEFLTRLKAHLHNKDLRLEDAQDRHFMLQIALKCADICNPCRIWEMSKQWSERVCEEFYRQGELEQKFELEISPLCNQQKDSIPSIQIGFMSYIVEPLFREWAHFTGNSTLSENMLGHLAHNKAQWKSLLPRQHRSRGSSGSGPDHDHAGQGTESEEQEGDSP

SEQ ID NO: 33304 - protein, 537 aa, Homo sapiens
MPAPTQLFFPLIRNCELSRIYGTACYCHHKHLCCSSSYIPQSRLRYTPHPAYATFCRPKENWWQYTQGRRYASTPQKFYLTPPQVNSILKANEYSFKVPEFDGKNVSSILGFDSNQLPANAPIEDRRSAATCLQTRGMLLGVFDGHAGCACSQAVSERLFYYIAVSLLPHETLLEIENAVESGRALLPILQWHKHPNDYFSKEASKLYFNSLRTYWQELIDLNTGESTDIDVKEALINAFKRLDNDISLEAQVGDPNSFLNYLVLRVAFSGATACVAHVDGVDLHVANTGDSRAMLGVQEEDGSWSAVTLSNDHNAQNERELERLKLEHPKSEAKSVVKQDRLLGLLMPFRAFGDVKFKWSIDLQKRVIESGPDQLNDNEYTKFIPPNYHTPPYLTAEPEVTYHRLRPQDKFLVLATDGLWETMHRQDVVRIVGEYLTGMHHQQPIAVGGYKVTLGQMHGLLTERRTKMSSVFEDQNAATHLIRHAVGNNEFGTVDHERLSKMLSLPEELARMYRDDITIIVVQFNSHVVGAYQNQE

SEQ ID NO: 33305 - protein, 562 aa, Homo sapiens
MCVCPGPRRIGIPVRSSSLPLFSDAMPAPTQLFFPLIRNCELSRIYGTACYCHHKHLCCSSSYIPQSRLRYTPHPAYATFCRPKENWWQYTQGRRYASTPQKFYLTPPQVNSILKANEYSFKVPEFDGKNVSSILGFDSNQLPANAPIEDRRSAATCLQTRGMLLGVFDGHAGCACSQAVSERLFYYIAVSLLPHETLLEIENAVESGRALLPILQWHKHPNDYFSKEASKLYFNSLRTYWQELIDLNTGESTDIDVKEALINAFKRLDNDISLEAQVGDPNSFLNYLVLRVAFSGATACVAHVDGVDLHVANTGDSRAMLGVQEEDGSWSAVTLSNDHNAQNERELERLKLEHPKSEAKSVVKQDRLLGLLMPFRAFGDVKFKWSIDLQKRVIESGPDQLNDNEYTKFIPPNYHTPPYLTAEPEVTYHRLRPQDKFLVLATDGLWETMHRQDVVRIVGEYLTGMHHQQPIAVGGYKVTLGQMHGLLTERRTKMSSVFEDQNAATHLIRHAVGNNEFGTVDHERLSKMLSLPEELARMYRDDITIIVVQFNSHVVGAYQNQE

SEQ ID NO: 33306 - protein, 829 aa, Homo sapiens
MGCAPSIHISERLVAEDAPSPAAPPLSSGGPRLPQGQKTAALPRTRGAGLLESELRDGSGKKVAVADVQFGPMRFHQDQLQVLLVFTKEDNQCNGFCRACEKAGFKCTVTKEAQAVLACFLDKHHDIIIIDHRNPRQLDAEALCRSIRSSKLSENTVIVGVVRRVDREELSVMPFISAGFTRRYVENPNIMACYNELLQLEFGEVRSQLKLRACNSVFTALENSEDAIEITSEDRFIQYANPAFETTMGYQSGELIGKELGEVPINEKKADLLDTINSCIRIGKEWQGIYYAKKKNGDNIQQNVKIIPVIGQGGKIRHYVSIIRVCNGNNKAEKISECVQSDTHTDNQTGKHKDRRKGSLDVKAVASRATEVSSQRRHSSMARIHSMTIEAPITKVINIINAAQESSPMPVTEALDRVLEILRTTELYSPQFGAKDDDPHANDLVGGLMSDGLRRLSGNEYVLSTKNTQMVSSNIITPISLDDVPPRIARAMENEEYWDFDIFELEAATHNRPLIYLGLKMFARFGICEFLHCSESTLRSWLQIIEANYHSSNPYHNSTHSADVLHATAYFLSKERIKETLDPIDEVAALIAATIHDVDHPGRTNSFLCNAGSELAILYNDTAVLESHHAALAFQLTTGDDKCNIFKNMERNDYRTLRQGIIDMVLATEMTKHFEHVNKFVNSINKPLATLEENGETDKNQEVINTMLRTPENRTLIKRMLIKCADVSNPCRPLQYCIEWAARISEEYFSQTDEEKQQGLPVVMPVFDRNTCSIPKSQISFIDYFITDMFDAWDAFVDLPDLMQHLDNNFKYWKGLDEMKLRNLRPPPE

SEQ ID NO: 33307 - protein, 783 aa, Homo sapiens
MGCAPSIHISERLVAEDAPSPAAPPLSSGGPRLPQGQKTAALPRTRGAGLLESELRDGSGKKVAVADVQFGPMRFHQDQLQVLLVFTKEDNQCNGFCRACEKAGFKCTVTKEAQAVLACFLDKHHDIIIIDHRNPRQLDAEALCRSIRSSKLSENTVIVGVVRRVDREELSVMPFISAGFTRRYVENPNIMACYNELLQLEFGEVRSQLKLRACNSVFTALENSEDAIEITSEDRFIQEWQGIYYAKKKNGDNIQQNVKIIPVIGQGGKIRHYVSIIRVCNGNNKAEKISECVQSDTHTDNQTGKHKDRRKGSLDVKAVASRATEVSSQRRHSSMARIHSMTIEAPITKVINIINAAQESSPMPVTEALDRVLEILRTTELYSPQFGAKDDDPHANDLVGGLMSDGLRRLSGNEYVLSTKNTQMVSSNIITPISLDDVPPRIARAMENEEYWDFDIFELEAATHNRPLIYLGLKMFARFGICEFLHCSESTLRSWLQIIEANYHSSNPYHNSTHSADVLHATAYFLSKERIKETLDPIDEVAALIAATIHDVDHPGRTNSFLCNAGSELAILYNDTAVLESHHAALAFQLTTGDDKCNIFKNMERNDYRTLRQGIIDMVLATEMTKHFEHVNKFVNSINKPLATLEENGETDKNQEVINTMLRTPENRTLIKRMLIKCADVSNPCRPLQYCIEWAARISEEYFSQTDEEKQQGLPVVMPVFDRNTCSIPKSQISFIDYFITDMFDAWDAFVDLPDLMQHLDNNFKYWKGLDEMKLRNLRPPPE

SEQ ID NO: 33308 - protein, 231 aa, Homo sapiens
MGCAPSIHISERLVAEDAPSPAAPPLSSGGPRLPQGQKTAALPRTRGAGLLESELRDGSGKKVAVADVQFGPMRFHQDQLQVLLVFTKEDNQCNGFCRACEKAGFKCTVTKEAQAVLACFLDKHHDIIIIDHRNPRQLDAEALCRSIRSSKLSENTVIVGVVRRVDREELSVMPFISAGFTRRYVENPNIMACYNELLQLEFGEVRSQLKLRSGKEFTMQKRKTEIIYNKM

SEQ ID NO: 33309 - protein, 228 aa, Homo sapiens
MGCAPSIHISERLVAEDAPSPAAPPLSSGGPRLPQGQKTAALPRTRGAGLLESELRDGSGKKVAVADVQFGPMRFHQDQLQVLLVFTKEDNQCNGFCRACEKAGFKCTVTKEAQAVLACFLDKHHDIIIIDHRNPRQLDAEALCRSIRSSKLSENTVIVGVVRRVDREELSVMPFISAGFTRRYVENPNIMACYNELLQLEFGEVRSQLKLSMQILHLKQQWAISQVN

SEQ ID NO: 33310 - protein, 272 aa, Homo sapiens
MGCAPSIHISERLVAEDAPSPAAPPLSSGGPRLPQGQKTAALPRTRGAGLLESELRDGSGKKVAVADVQFGPMRFHQDQLQVLLVFTKEDNQCNGFCRACEKAGFKCTVTKEAQAVLACFLDKHHDIIIIDHRNPRQLDAEALCRSIRSSKLSENTVIVGVVRRVDREELSVMPFISAGFTRRYVENPNIMACYNELLQLEFGEVRSQLKLRACNSVFTALENSEDAIEITSEDRFIQPCCSSSWFGAAHIPSSAPVEVGVGLLPSWSLRRT

SEQ ID NO: 33311 - protein, 757 aa, Homo sapiens
MRFHQDQLQVLLVFTKEDNQCNGFCRACEKAGFKCTVTKEAQAVLACFLDKHHDIIIIDHRNPRQLDAEALCRSIRSSKLSENTVIVGVVRRVDREELSVMPFISAGFTRRYVENPNIMACYNELLQLEFGEVRSQLKLRACNSVFTALENSEDAIEITSEDRFIQYANPAFETTMGYQSGELIGKELGEVPINEKKADLLDTINSCIRIGKEWQGIYYAKKKNGDNIQQNVKIIPVIGQGGKIRHYVSIIRVCNGNNKAEKISECVQSDTHTDNQTGKHKDRRKGSLDVKAVASRATEVSSQRRHSSMARIHSMTIEAPITKVINIINAAQESSPMPVTEALDRVLEILRTTELYSPQFGAKDDDPHANDLVGGLMSDGLRRLSGNEYVLSTKNTQMVSSNIITPISLDDVPPRIARAMENEEYWDFDIFELEAATHNRPLIYLGLKMFARFGICEFLHCSESTLRSWLQIIEANYHSSNPYHNSTHSADVLHATAYFLSKERIKETLDPIDEVAALIAATIHDVDHPGRTNSFLCNAGSELAILYNDTAVLESHHAALAFQLTTGDDKCNIFKNMERNDYRTLRQGIIDMVLATEMTKHFEHVNKFVNSINKPLATLEENGETDKNQEVINTMLRTPENRTLIKRMLIKCADVSNPCRPLQYCIEWAARISEEYFSQTDEEKQQGLPVVMPVFDRNTCSIPKSQISFIDYFITDMFDAWDAFVDLPDLMQHLDNNFKYWKGLDEMKLRNLRPPPE

SEQ ID NO: 33312 - protein, 885 aa, Homo sapiens
MGCAPSIHVSQSGVIYCRDSDESSSPRQTTSVSQGPAAPLPGLFVQTDAADAIPPSRASGPPSVARVRRARTELGSGSSAGSAAPAATTSRGRRRHCCSSAEAETQTCYTSVKQVSSAEVRIGPMRLTQDPIQVLLIFAKEDSQSDGFWWACDRAGYRCNIARTPESALECFLDKHHEIIVIDHRQTQNFDAEAVCRSIRATNPSEHTVILAVVSRVSDDHEEASVLPLLHAGFNRRFMENSSIIACYNELIQIEHGEVRSQFKLRACNSVFTALDHCHEAIEITSDDHVIQYVNPAFERMMGYHKGELLGKELADLPKSDKNRADLLDTINTCIKKGKEWQGVYYARRKSGDSIQQHVKITPVIGQGGKIRHFVSLKKLCCTTDNNKQIHKIHRDSGDNSQTEPHSFRYKNRRKESIDVKSISSRGSDAPSLQNRRYPSMARIHSMTIEAPITKVINIINAAQENSPVTVAEALDRVLEILRTTELYSPQLGTKDEDPHTSDLVGGLMTDGLRRLSGNEYVFTKNVHQSHSHLAMPITINDVPPCISQLLDNEESWDFNIFELEAITHKRPLVYLGLKVFSRFGVCEFLNCSETTLRAWFQVIEANYHSSNAYHNSTHAADVLHATAFFLGKERVKGSLDQLDEVAALIAATVHDVDHPGRTNSFLCNAGSELAVLYNDTAVLESHHTALAFQLTVKDTKCNIFKNIDRNHYRTLRQAIIDMVLATEMTKHFEHVNKFVNSINKPMAAEIEGSDCECNPAGKNFPENQILIKRMMIKCADVANPCRPLDLCIEWAGRISEEYFAQTDEEKRQGLPVVMPVFDRNTCSIPKSQISFIDYFITDMFDAWDAFAHLPALMQHLADNYKHWKTLDDLKCKSLRLPSDS

SEQ ID NO: 33313 - protein, 788 aa, Homo sapiens
MGCAPSIHVSQSGVIYCRDSDESSSPRQTTSVSQGPAAPLPGLFVQTDAADAIPPSRASGPPSVARVRRARTELGSGSSAGSAAPAATTSRGRRRHCCSSAEAETQTCYTSVKQVSSAEVRIGPMRLTQDPIQVLLIFAKEDSQSDGFWWACDRAGYRCNIARTPESALECFLDKHHEIIVIDHRQTQNFDAEAVCRSIRATNPSEHTVILAVVSRVSDDHEEASVLPLLHAGFNRRFMENSSIIACYNELIQIEHGEVRSQFKLRACNSVFTALDHCHEAIEITSDDHVIQIHKIHRDSGDNSQTEPHSFRYKNRRKESIDVKSISSRGSDAPSLQNRRYPSMARIHSMTIEAPITKVINIINAAQENSPVTVAEALDRVLEILRTTELYSPQLGTKDEDPHTSDLVGGLMTDGLRRLSGNEYVFTKNVHQSHSHLAMPITINDVPPCISQLLDNEESWDFNIFELEAITHKRPLVYLGLKVFSRFGVCEFLNCSETTLRAWFQVIEANYHSSNAYHNSTHAADVLHATAFFLGKERVKGSLDQLDEVAALIAATVHDVDHPGRTNSFLCNAGSELAVLYNDTAVLESHHTALAFQLTVKDTKCNIFKNIDRNHYRTLRQAIIDMVLATEMTKHFEHVNKFVNSINKPMAAEIEGSDCECNPAGKNFPENQILIKRMMIKCADVANPCRPLDLCIEWAGRISEEYFAQTDEEKRQGLPVVMPVFDRNTCSIPKSQISFIDYFITDMFDAWDAFAHLPALMQHLADNYKHWKTLDDLKCKSLRLPSDS

SEQ ID NO: 33314 - protein, 830 aa, Homo sapiens
MGCAPSIHVSQSGVIYCRDSDESSSPRQTTSVSQGPAAPLPGLFVQTDAADAIPPSRASGPPSVARVRRARTELGSGSSAGSAAPAATTSRGRRRHCCSSAEAETQTCYTSVKQVSSAEVRIGPMRLTQDPIQVLLIFAKEDSQSDGFWWACDRAGYRCNIARTPESALECFLDKHHEIIVIDHRQTQNFDAEAVCRSIRATNPSEHTVILAVVSRVSDDHEEASVLPLLHAGFNRRFMENSSIIACYNELIQIEHGEVRSQFKLRACNSVFTALDHCHEAIEITSDDHVIQYVNPAFERMMGYHKGELLGKELADLPKSDKNRADLLDTINTCIKKGKEWQGVYYARRKSGDSIQQHVKITPVIGQGGKIRHFVSLKKLCCTTDNNKQIHKIHRDSGDNSQTEPHSFRYKNRRKESIDVKSISSRGSDAPSLQNRRYPSMARIHSMTIEAPITKDGLRRLSGNEYVFTKNVHQSHSHLAMPITINDVPPCISQLLDNEESWDFNIFELEAITHKRPLVYLGLKVFSRFGVCEFLNCSETTLRAWFQVIEANYHSSNAYHNSTHAADVLHATAFFLGKERVKGSLDQLDEVAALIAATVHDVDHPGRTNSFLCNAGSELAVLYNDTAVLESHHTALAFQLTVKDTKCNIFKNIDRNHYRTLRQAIIDMVLATEMTKHFEHVNKFVNSINKPMAAEIEGSDCECNPAGKNFPENQILIKRMMIKCADVANPCRPLDLCIEWAGRISEEYFAQTDEEKRQGLPVVMPVFDRNTCSIPKSQISFIDYFITDMFDAWDAFAHLPALMQHLADNYKHWKTLDDLKCKSLRLPSDS

SEQ ID NO: 33315 - protein, 865 aa, Homo sapiens
MGCAPSIHVSQSGVIYCRDSDESSSPRQTTSVSQGPAAPLPGLFVQTDAADAIPPSRASGPPSVARVRRARTELGSGSSAGSAAPAATTSRGRRRHCCSSAEAETQTCYTSVKVLLIFAKEDSQSDGFWWACDRAGYRCNIARTPESALECFLDKHHEIIVIDHRQTQNFDAEAVCRSIRATNPSEHTVILAVVSRVSDDHEEASVLPLLHAGFNRRFMENSSIIACYNELIQIEHGEVRSQFKLRACNSVFTALDHCHEAIEITSDDHVIQYVNPAFERMMGYHKGELLGKELADLPKSDKNRADLLDTINTCIKKGKEWQGVYYARRKSGDSIQQHVKITPVIGQGGKIRHFVSLKKLCCTTDNNKQIHKIHRDSGDNSQTEPHSFRYKNRRKESIDVKSISSRGSDAPSLQNRRYPSMARIHSMTIEAPITKVINIINAAQENSPVTVAEALDRVLEILRTTELYSPQLGTKDEDPHTSDLVGGLMTDGLRRLSGNEYVFTKNVHQSHSHLAMPITINDVPPCISQLLDNEESWDFNIFELEAITHKRPLVYLGLKVFSRFGVCEFLNCSETTLRAWFQVIEANYHSSNAYHNSTHAADVLHATAFFLGKERVKGSLDQLDEVAALIAATVHDVDHPGRTNSFLCNAGSELAVLYNDTAVLESHHTALAFQLTVKDTKCNIFKNIDRNHYRTLRQAIIDMVLATEMTKHFEHVNKFVNSINKPMAAEIEGSDCECNPAGKNFPENQILIKRMMIKCADVANPCRPLDLCIEWAGRISEEYFAQTDEEKRQGLPVVMPVFDRNTCSIPKSQISFIDYFITDMFDAWDAFAHLPALMQHLADNYKHWKTLDDLKCKSLRLPSDS

SEQ ID NO: 33316 - protein, 350 aa, Homo sapiens
MPITINDVPPCISQLLDNEESWDFNIFELEAITHKRPLVYLGLKVFSRFGVCEFLNCSETTLRAWFQVIEANYHSSNAYHNSTHAADVLHATAFFLGKERVKGSLDQLDEVAALIAATVHDVDHPGRTNSFLCNAGSELAVLYNDTAVLESHHTALAFQLTVKDTKCNIFKNIDRNHYRTLRQAIIDMVLATEMTKHFEHVNKFVNSINKPMAAEIEGSDCECNPAGKNFPENQILIKRMMIKCADVANPCRPLDLCIEWAGRISEEYFAQTDEEKRQGLPVVMPVFDRNTCSIPKSQISFIDYFITDMFDAWDAFAHLPALMQHLADNYKHWKTLDDLKCKSLRLPSDS

SEQ ID NO: 33317 - protein, 838 aa, Homo sapiens
MGCAPSIHVSQSGVIYCRDSDESSSPRQTTSVSQGPAAPLPGLFVQTDAADAIPPSRASGPPSVARVRRARTELGSGSSAGSAAPAATTSRGRRRHCCSSAEAETQTCYTSVKQVSSAEVRIGPMRLTQDPIQVLLIFAKEDSQSDGFWWACDRAGYRCNIARTPESALECFLDKHHEIIVIDHRQTQNFDAEAVCRSIRATNPSEHTVILAVVSRVSDDHEEASVLPLLHAGFNRRFMENSSIIACYNELIQIEHGEVRSQFKLRACNSVFTALDHCHEAIEITSDDHVIQEWQGVYYARRKSGDSIQQHVKITPVIGQGGKIRHFVSLKKLCCTTDNNKQIHKIHRDSGDNSQTEPHSFRYKNRRKESIDVKSISSRGSDAPSLQNRRYPSMARIHSMTIEAPITKVINIINAAQENSPVTVAEALDRVLEILRTTELYSPQLGTKDEDPHTSDLVGGLMTDGLRRLSGNEYVFTKNVHQSHSHLAMPITINDVPPCISQLLDNEESWDFNIFELEAITHKRPLVYLGLKVFSRFGVCEFLNCSETTLRAWFQVIEANYHSSNAYHNSTHAADVLHATAFFLGKERVKGSLDQLDEVAALIAATVHDVDHPGRTNSFLCNAGSELAVLYNDTAVLESHHTALAFQLTVKDTKCNIFKNIDRNHYRTLRQAIIDMVLATEMTKHFEHVNKFVNSINKPMAAEIEGSDCECNPAGKNFPENQILIKRMMIKCADVANPCRPLDLCIEWAGRISEEYFAQTDEEKRQGLPVVMPVFDRNTCSIPKSQISFIDYFITDMFDAWDAFAHLPALMQHLADNYKHWKTLDDLKCKSLRLPSDS

SEQ ID NO: 33318 - protein, 529 aa, Homo sapiens
MSSTVSYWILNSTRNSIATLQGGRRLYSRYVSNRNKLKWRLFSRVPPTLNSSPCGGFTLCKAYRHTSTEEDDFHLQLSPEQINEVLRAGETTHKILDLESRVPNSVLRFESNQLAANSPVEDRRGVASCLQTNGLMFGIFDGHGGHACAQAVSERLFYYVAVSLMSHQTLEHMEGAMESMKPLLPILHWLKHPGDSIYKDVTSVHLDHLRVYWQELLDLHMEMGLSIEEALMYSFQRLDSDISLEIQAPLEDEVTRNLSLQVAFSGATACMAHVDGIHLHVANAGDCRAILGVQEDNGMWSCLPLTRDHNAWNQAELSRLKREHPESEDRTIIMEDRLLGVLIPCRAFGDVQLKWSKELQRSILERGFNTEALNIYQFTPPHYYTPPYLTAEPEVTYHRLRPQDKFLVLASDGLWDMLSNEDVVRLVVGHLAEADWHKTDLAQRPANLGLMQSLLLQRKASGLHEADQNAATRLIRHAIGNNEYGEMEAERLAAMLTLPEDLARMYRDDITVTVVYFNSESIGAYYKGG

SEQ ID NO: 33319 - protein, 593 aa, Homo sapiens
MGSGSSSYRPKAIYLDIDGRIQKVIFSKYCNSSDIMDLFCIATGLPRNTTISLLTTDDAMVSIDPTMPANSERTPYKVRPVAIKQLSAGVEDKRTTSRGQSAERPLRDRRVVGLEQPRREGAFESGQVEPRPREPQGCYQEGQRIPPEREELIQSVLAQVAEQFSRAFKINELKAEVANHLAVLEKRVELEGLKVVEIEKCKSDIKKMREELAARSSRTNCPCKYSFLDNHKKLTPRRDVPTYPKYLLSPETIEALRKPTFDVWLWEPNEMLSCLEHMYHDLGLVRDFSINPVTLRRWLFCVHDNYRNNPFHNFRHCFCVAQMMYSMVWLCSLQEKFSQTDILILMTAAICHDLDHPGYNNTYQINARTELAVRYNDISPLENHHCAVAFQILAEPECNIFSNIPPDGFKQIRQGMITLILATDMARHAEIMDSFKEKMENFDYSNEEHMTLLKMILIKCCDISNEVRPMEVAEPWVDCLLEEYFMQSDREKSEGLPVAPFMDRDKVTKATAQIGFIKFVLIPMFETVTKLFPMVEEIMLQPLWESRDRYEELKRIDDAMKELQKKTDSLTSGATEKSRERSRDVKNSEGDCA

SEQ ID NO: 33320 - protein, 533 aa, Homo sapiens
MGSGSSSYRPKAIYLDIDGRIQKVIFSKYCNSSDIMDLFCIATGLPRNTTISLLTTDDAMVSIDPTMPANSERTPYKVRPVAIKQLSEREELIQSVLAQVAEQFSRAFKINELKAEVANHLAVLEKRVELEGLKVVEIEKCKSDIKKMREELAARSSRTNCPCKYSFLDNHKKLTPRRDVPTYPKYLLSPETIEALRKPTFDVWLWEPNEMLSCLEHMYHDLGLVRDFSINPVTLRRWLFCVHDNYRNNPFHNFRHCFCVAQMMYSMVWLCSLQEKFSQTDILILMTAAICHDLDHPGYNNTYQINARTELAVRYNDISPLENHHCAVAFQILAEPECNIFSNIPPDGFKQIRQGMITLILATDMARHAEIMDSFKEKMENFDYSNEEHMTLLKMILIKCCDISNEVRPMEVAEPWVDCLLEEYFMQSDREKSEGLPVAPFMDRDKVTKATAQIGFIKFVLIPMFETVTKLFPMVEEIMLQPLWESRDRYEELKRIDDAMKELQKKTDSLTSGATEKSRERSRDVKNSEGDCA

SEQ ID NO: 33321 - protein, 466 aa, Homo sapiens
MDAFRSTPYKVRPVAIKQLSEREELIQSVLAQVAEQFSRAFKINELKAEVANHLAVLEKRVELEGLKVVEIEKCKSDIKKMREELAARSSRTNCPCKYSFLDNHKKLTPRRDVPTYPKYLLSPETIEALRKPTFDVWLWEPNEMLSCLEHMYHDLGLVRDFSINPVTLRRWLFCVHDNYRNNPFHNFRHCFCVAQMMYSMVWLCSLQEKFSQTDILILMTAAICHDLDHPGYNNTYQINARTELAVRYNDISPLENHHCAVAFQILAEPECNIFSNIPPDGFKQIRQGMITLILATDMARHAEIMDSFKEKMENFDYSNEEHMTLLKMILIKCCDISNEVRPMEVAEPWVDCLLEEYFMQSDREKSEGLPVAPFMDRDKVTKATAQIGFIKFVLIPMFETVTKLFPMVEEIMLQPLWESRDRYEELKRIDDAMKELQKKTDSLTSGATEKSRERSRDVKNSEGDCA

SEQ ID NO: 33322 - protein, 465 aa, Homo sapiens
MGSGSSSYRPKAIYLDIDGRIQKHSVQSETCGHQATLRAFKINELKAEVANHLAVLEKRVELEGLKVVEIEKCKSDIKKMREELAARSSRTNCPCKYSFLDNHKKLTPRRDVPTYPKYLLSPETIEALRKPTFDVWLWEPNEMLSCLEHMYHDLGLVRDFSINPVTLRRWLFCVHDNYRNNPFHNFRHCFCVAQMMYSMVWLCSLQEKFSQTDILILMTAAICHDLDHPGYNNTYQINARTELAVRYNDISPLENHHCAVAFQILAEPECNIFSNIPPDGFKQIRQGMITLILATDMARHAEIMDSFKEKMENFDYSNEEHMTLLKMILIKCCDISNEVRPMEVAEPWVDCLLEEYFMQSDREKSEGLPVAPFMDRDKVTKATAQIGFIKFVLIPMFETVTKLFPMVEEIMLQPLWESRDRYEELKRIDDAMKELQKKTDSLTSGATEKSRERSRDVKNSEGDCA

SEQ ID NO: 33323 - protein, 540 aa, Homo sapiens
MGSGSSSYRPKAIYLDIDGRIQKVIFSKYCNSSDIMDLFCIATGLPRNTTISLLTTDDAMVSIDPTMPANSERNELILYTSLRNLLFLPSKESWASHQHSVQSETCGHQATLRAFKINELKAEVANHLAVLEKRVELEGLKVVEIEKCKSDIKKMREELAARSSRTNCPCKYSFLDNHKKLTPRRDVPTYPKYLLSPETIEALRKPTFDVWLWEPNEMLSCLEHMYHDLGLVRDFSINPVTLRRWLFCVHDNYRNNPFHNFRHCFCVAQMMYSMVWLCSLQEKFSQTDILILMTAAICHDLDHPGYNNTYQINARTELAVRYNDISPLENHHCAVAFQILAEPECNIFSNIPPDGFKQIRQGMITLILATDMARHAEIMDSFKEKMENFDYSNEEHMTLLKMILIKCCDISNEVRPMEVAEPWVDCLLEEYFMQSDREKSEGLPVAPFMDRDKVTKATAQIGFIKFVLIPMFETVTKLFPMVEEIMLQPLWESRDRYEELKRIDDAMKELQKKTDSLTSGATEKSRERSRDVKNSEGDCA

SEQ ID NO: 33324 - protein, 492 aa, Homo sapiens
MDAFRRNTTISLLTTDDAMVSIDPTMPANSERTPYKVRPVAIKQLSEREELIQSVLAQVAEQFSRAFKINELKAEVANHLAVLEKRVELEGLKVVEIEKCKSDIKKMREELAARSSRTNCPCKYSFLDNHKKLTPRRDVPTYPKYLLSPETIEALRKPTFDVWLWEPNEMLSCLEHMYHDLGLVRDFSINPVTLRRWLFCVHDNYRNNPFHNFRHCFCVAQMMYSMVWLCSLQEKFSQTDILILMTAAICHDLDHPGYNNTYQINARTELAVRYNDISPLENHHCAVAFQILAEPECNIFSNIPPDGFKQIRQGMITLILATDMARHAEIMDSFKEKMENFDYSNEEHMTLLKMILIKCCDISNEVRPMEVAEPWVDCLLEEYFMQSDREKSEGLPVAPFMDRDKVTKATAQIGFIKFVLIPMFETVTKLFPMVEEIMLQPLWESRDRYEELKRIDDAMKELQKKTDSLTSGATEKSRERSRDVKNSEGDCA

SEQ ID NO: 33325 - protein, 386 aa, Homo sapiens
MREELAARSSRTNCPCKYSFLDNHKKLTPRRDVPTYPKYLLSPETIEALRKPTFDVWLWEPNEMLSCLEHMYHDLGLVRDFSINPVTLRRWLFCVHDNYRNNPFHNFRHCFCVAQMMYSMVWLCSLQEKFSQTDILILMTAAICHDLDHPGYNNTYQINARTELAVRYNDISPLENHHCAVAFQILAEPECNIFSNIPPDGFKQIRQGMITLILATDMARHAEIMDSFKEKMENFDYSNEEHMTLLKMILIKCCDISNEVRPMEVAEPWVDCLLEEYFMQSDREKSEGLPVAPFMDRDKVTKATAQIGFIKFVLIPMFETVTKLFPMVEEIMLQPLWESRDRYEELKRIDDAMKELQKKTDSLTSGATEKSRERSRDVKNSEGDCA

SEQ ID NO: 33326 - protein, 507 aa, Homo sapiens
MGSGSSSYRPKAIYLDIDGRIQKVIFSKYCNSSDIMDLFCIATGLPRTPYKVRPVAIKQLSEREELIQSVLAQVAEQFSRAFKINELKAEVANHLAVLEKRVELEGLKVVEIEKCKSDIKKMREELAARSSRTNCPCKYSFLDNHKKLTPRRDVPTYPKYLLSPETIEALRKPTFDVWLWEPNEMLSCLEHMYHDLGLVRDFSINPVTLRRWLFCVHDNYRNNPFHNFRHCFCVAQMMYSMVWLCSLQEKFSQTDILILMTAAICHDLDHPGYNNTYQINARTELAVRYNDISPLENHHCAVAFQILAEPECNIFSNIPPDGFKQIRQGMITLILATDMARHAEIMDSFKEKMENFDYSNEEHMTLLKMILIKCCDISNEVRPMEVAEPWVDCLLEEYFMQSDREKSEGLPVAPFMDRDKVTKATAQIGFIKFVLIPMFETVTKLFPMVEEIMLQPLWESRDRYEELKRIDDAMKELQKKTDSLTSGATEKSRERSRDVKNSEGDCA

SEQ ID NO: 33327 - protein, 433 aa, Homo sapiens
MDAFRRAFKINELKAEVANHLAVLEKRVELEGLKVVEIEKCKSDIKKMREELAARSSRTNCPCKYSFLDNHKKLTPRRDVPTYPKYLLSPETIEALRKPTFDVWLWEPNEMLSCLEHMYHDLGLVRDFSINPVTLRRWLFCVHDNYRNNPFHNFRHCFCVAQMMYSMVWLCSLQEKFSQTDILILMTAAICHDLDHPGYNNTYQINARTELAVRYNDISPLENHHCAVAFQILAEPECNIFSNIPPDGFKQIRQGMITLILATDMARHAEIMDSFKEKMENFDYSNEEHMTLLKMILIKCCDISNEVRPMEVAEPWVDCLLEEYFMQSDREKSEGLPVAPFMDRDKVTKATAQIGFIKFVLIPMFETVTKLFPMVEEIMLQPLWESRDRYEELKRIDDAMKELQKKTDSLTSGATEKSRERSRDVKNSEGDCA

SEQ ID NO: 33328 - protein, 376 aa, Homo sapiens
MTNCPCKYSFLDNHKKLTPRRDVPTYPKYLLSPETIEALRKPTFDVWLWEPNEMLSCLEHMYHDLGLVRDFSINPVTLRRWLFCVHDNYRNNPFHNFRHCFCVAQMMYSMVWLCSLQEKFSQTDILILMTAAICHDLDHPGYNNTYQINARTELAVRYNDISPLENHHCAVAFQILAEPECNIFSNIPPDGFKQIRQGMITLILATDMARHAEIMDSFKEKMENFDYSNEEHMTLLKMILIKCCDISNEVRPMEVAEPWVDCLLEEYFMQSDREKSEGLPVAPFMDRDKVTKATAQIGFIKFVLIPMFETVTKLFPMVEEIMLQPLWESRDRYEELKRIDDAMKELQKKTDSLTSGATEKSRERSRDVKNSEGDCA

SEQ ID NO: 33329 - protein, 459 aa, Homo sapiens
MDAFRRNTTISLLTTDDAMVSIDPTMPANSERAFKINELKAEVANHLAVLEKRVELEGLKVVEIEKCKSDIKKMREELAARSSRTNCPCKYSFLDNHKKLTPRRDVPTYPKYLLSPETIEALRKPTFDVWLWEPNEMLSCLEHMYHDLGLVRDFSINPVTLRRWLFCVHDNYRNNPFHNFRHCFCVAQMMYSMVWLCSLQEKFSQTDILILMTAAICHDLDHPGYNNTYQINARTELAVRYNDISPLENHHCAVAFQILAEPECNIFSNIPPDGFKQIRQGMITLILATDMARHAEIMDSFKEKMENFDYSNEEHMTLLKMILIKCCDISNEVRPMEVAEPWVDCLLEEYFMQSDREKSEGLPVAPFMDRDKVTKATAQIGFIKFVLIPMFETVTKLFPMVEEIMLQPLWESRDRYEELKRIDDAMKELQKKTDSLTSGATEKSRERSRDVKNSEGDCA

SEQ ID NO: 33330 - protein, 491 aa, Homo sapiens
MGSGSSSYRPKAIYLDIDGRIQKEHDHLPADHRRRHGLHRPHHAREFRTHSVQSETCGHQATLRAFKINELKAEVANHLAVLEKRVELEGLKVVEIEKCKSDIKKMREELAARSSRTNCPCKYSFLDNHKKLTPRRDVPTYPKYLLSPETIEALRKPTFDVWLWEPNEMLSCLEHMYHDLGLVRDFSINPVTLRRWLFCVHDNYRNNPFHNFRHCFCVAQMMYSMVWLCSLQEKFSQTDILILMTAAICHDLDHPGYNNTYQINARTELAVRYNDISPLENHHCAVAFQILAEPECNIFSNIPPDGFKQIRQGMITLILATDMARHAEIMDSFKEKMENFDYSNEEHMTLLKMILIKCCDISNEVRPMEVAEPWVDCLLEEYFMQSDREKSEGLPVAPFMDRDKVTKATAQIGFIKFVLIPMFETVTKLFPMVEEIMLQPLWESRDRYEELKRIDDAMKELQKKTDSLTSGATEKSRERSRDVKNSEGDCA

SEQ ID NO: 33331 - protein, 526 aa, Homo sapiens
MDAFRSTPYKVRPVAIKQLSAGVEDKRTTSRGQSAERPLRDRRVVGLEQPRREGAFESGQVEPRPREPQGCYQEGQRIPPEREELIQSVLAQVAEQFSRAFKINELKAEVANHLAVLEKRVELEGLKVVEIEKCKSDIKKMREELAARSSRTNCPCKYSFLDNHKKLTPRRDVPTYPKYLLSPETIEALRKPTFDVWLWEPNEMLSCLEHMYHDLGLVRDFSINPVTLRRWLFCVHDNYRNNPFHNFRHCFCVAQMMYSMVWLCSLQEKFSQTDILILMTAAICHDLDHPGYNNTYQINARTELAVRYNDISPLENHHCAVAFQILAEPECNIFSNIPPDGFKQIRQGMITLILATDMARHAEIMDSFKEKMENFDYSNEEHMTLLKMILIKCCDISNEVRPMEVAEPWVDCLLEEYFMQSDREKSEGLPVAPFMDRDKVTKATAQIGFIKFVLIPMFETVTKLFPMVEEIMLQPLWESRDRYEELKRIDDAMKELQKKTDSLTSGATEKSRERSRDVKNSEGDCA

SEQ ID NO: 33332 - protein, 552 aa, Homo sapiens
MDAFRRNTTISLLTTDDAMVSIDPTMPANSERTPYKVRPVAIKQLSAGVEDKRTTSRGQSAERPLRDRRVVGLEQPRREGAFESGQVEPRPREPQGCYQEGQRIPPEREELIQSVLAQVAEQFSRAFKINELKAEVANHLAVLEKRVELEGLKVVEIEKCKSDIKKMREELAARSSRTNCPCKYSFLDNHKKLTPRRDVPTYPKYLLSPETIEALRKPTFDVWLWEPNEMLSCLEHMYHDLGLVRDFSINPVTLRRWLFCVHDNYRNNPFHNFRHCFCVAQMMYSMVWLCSLQEKFSQTDILILMTAAICHDLDHPGYNNTYQINARTELAVRYNDISPLENHHCAVAFQILAEPECNIFSNIPPDGFKQIRQGMITLILATDMARHAEIMDSFKEKMENFDYSNEEHMTLLKMILIKCCDISNEVRPMEVAEPWVDCLLEEYFMQSDREKSEGLPVAPFMDRDKVTKATAQIGFIKFVLIPMFETVTKLFPMVEEIMLQPLWESRDRYEELKRIDDAMKELQKKTDSLTSGATEKSRERSRDVKNSEGDCA

SEQ ID NO: 33333 - protein, 567 aa, Homo sapiens
MGSGSSSYRPKAIYLDIDGRIQKVIFSKYCNSSDIMDLFCIATGLPRTPYKVRPVAIKQLSAGVEDKRTTSRGQSAERPLRDRRVVGLEQPRREGAFESGQVEPRPREPQGCYQEGQRIPPEREELIQSVLAQVAEQFSRAFKINELKAEVANHLAVLEKRVELEGLKVVEIEKCKSDIKKMREELAARSSRTNCPCKYSFLDNHKKLTPRRDVPTYPKYLLSPETIEALRKPTFDVWLWEPNEMLSCLEHMYHDLGLVRDFSINPVTLRRWLFCVHDNYRNNPFHNFRHCFCVAQMMYSMVWLCSLQEKFSQTDILILMTAAICHDLDHPGYNNTYQINARTELAVRYNDISPLENHHCAVAFQILAEPECNIFSNIPPDGFKQIRQGMITLILATDMARHAEIMDSFKEKMENFDYSNEEHMTLLKMILIKCCDISNEVRPMEVAEPWVDCLLEEYFMQSDREKSEGLPVAPFMDRDKVTKATAQIGFIKFVLIPMFETVTKLFPMVEEIMLQPLWESRDRYEELKRIDDAMKELQKKTDSLTSGATEKSRERSRDVKNSEGDCA

SEQ ID NO: 33334 - protein, 485 aa, Homo sapiens
MSSFSIHHSVTCCFYLVRSHGRPTSTPYKVRPVAIKQLSEREELIQSVLAQVAEQFSRAFKINELKAEVANHLAVLEKRVELEGLKVVEIEKCKSDIKKMREELAARSSRTNCPCKYSFLDNHKKLTPRRDVPTYPKYLLSPETIEALRKPTFDVWLWEPNEMLSCLEHMYHDLGLVRDFSINPVTLRRWLFCVHDNYRNNPFHNFRHCFCVAQMMYSMVWLCSLQEKFSQTDILILMTAAICHDLDHPGYNNTYQINARTELAVRYNDISPLENHHCAVAFQILAEPECNIFSNIPPDGFKQIRQGMITLILATDMARHAEIMDSFKEKMENFDYSNEEHMTLLKMILIKCCDISNEVRPMEVAEPWVDCLLEEYFMQSDREKSEGLPVAPFMDRDKVTKATAQIGFIKFVLIPMFETVTKLFPMVEEIMLQPLWESRDRYEELKRIDDAMKELQKKTDSLTSGATEKSRERSRDVKNSEGDCA

SEQ ID NO: 33335 - protein, 84 aa, Homo sapiens
MASVPSIGCLLARNQYYRKSSVSSVSSLTSSDSVNFIDDDKPQQGLPEVAESTWWFKSFFHSEPVLSNVRIKDLSATGSLSGRS

SEQ ID NO: 33336 - protein, 81 aa, Homo sapiens
MASVPSIGCLLARNQYYRKSSVSSVSSLTSSDSVNFIDDDKPQQGLPEVAESTWWFKSFFHSEPVLSNVRIKDLSATGMNS

SEQ ID NO: 33337 - protein, 84 aa, Homo sapiens
MASVPSIGCLLARNQYYRKSSVSSVSSLTSSDSVNFIDDDKPQQGLPEVAESTWWFKSFFHSEPVLSNVRIKDLSATGLQMSTL

SEQ ID NO: 33338 - protein, 556 aa, Homo sapiens
MARTTSQLYDAVPIQSSVVLCSCPSPSMVRTQTESSTPPGIPGGSRQGPAMDGTAAEPRPGAGSLQHAQPPPQPRKKRPEDFKFGKILGEGSFSTVVLARELATSREYAIKILEKRHIIKENKVPYVTRERDVMSRLDHPFFVKLYFTFQDDEKLYFGLSYAKNGELLKYIRKIGSFDETCTRFYTAEIVSALEYLHGKGIIHRDLKPENILLNEDMHIQITDFGTAKVLSPESKQARANSFVGTAQYVSPELLTEKSACKSSDLWALGCIIYQLVAGLPPFRAGNEYLIFQKIIKLEYDFPEKFFPKARDLVEKLLVLDATKRLGCEEMEGYGPLKAHPFFESVTWENLHQQTPPKLTAYLPAMSEDDEDCYGNYDNLLSQFGCMQVSSSSSSHSLSASDTGLPQRSGSNIEQYIHDLDSNSFELDLQFSEDEKRLLLEKQAGGNPWHQFVENNLILKMGPVDKRKGLFARRRQLLLTEGPHLYYVDPVNKVLKGEIPWSQELRPEAKNFKTFFVHTPNRTYYLMDPSGNAHKWCRKIQEVWRQRYQSHPDAAVQ

SEQ ID NO: 33339 - protein, 506 aa, Homo sapiens
MDGTAAEPRPGAGSLQHAQPPPQPRKKRPEDFKFGKILGEGSFSTVVLARELATSREYAIKILEKRHIIKENKVPYVTRERDVMSRLDHPFFVKLYFTFQDDEKLYFGLSYAKNGELLKYIRKIGSFDETCTRFYTAEIVSALEYLHGKGIIHRDLKPENILLNEDMHIQITDFGTAKVLSPESKQARANSFVGTAQYVSPELLTEKSACKSSDLWALGCIIYQLVAGLPPFRAGNEYLIFQKIIKLEYDFPEKFFPKARDLVEKLLVLDATKRLGCEEMEGYGPLKAHPFFESVTWENLHQQTPPKLTAYLPAMSEDDEDCYGNYDNLLSQFGCMQVSSSSSSHSLSASDTGLPQRSGSNIEQYIHDLDSNSFELDLQFSEDEKRLLLEKQAGGNPWHQFVENNLILKMGPVDKRKGLFARRRQLLLTEGPHLYYVDPVNKVLKGEIPWSQELRPEAKNFKTFFVHTPNRTYYLMDPSGNAHKWCRKIQEVWRQRYQSHPDAAVQ

SEQ ID NO: 33340 - protein, 530 aa, Homo sapiens
MARTTSQLYDAVPIQSSVVLCSCPSPSMVRTQTESSTPPGIPGGSRQGPAMDGTAAEPRPGAGSLQHAQPPPQPRKKRPEDFKFGKILGEGSFSTVVLARELATSREYAIKILEKRHIIKENKVPYVTRERDVMSRLDHPFFVKLYFTFQDDEKLYFGLSYAKNGELLKYIRKIGSFDETCTRFYTAEIVSALEYLHGKGIIHRDLKPENILLNEDMHIQITDFGTAKVLSPESKQADLWALGCIIYQLVAGLPPFRAGNEYLIFQKIIKLEYDFPEKFFPKARDLVEKLLVLDATKRLGCEEMEGYGPLKAHPFFESVTWENLHQQTPPKLTAYLPAMSEDDEDCYGNYDNLLSQFGCMQVSSSSSSHSLSASDTGLPQRSGSNIEQYIHDLDSNSFELDLQFSEDEKRLLLEKQAGGNPWHQFVENNLILKMGPVDKRKGLFARRRQLLLTEGPHLYYVDPVNKVLKGEIPWSQELRPEAKNFKTFFVHTPNRTYYLMDPSGNAHKWCRKIQEVWRQRYQSHPDAAVQ

SEQ ID NO: 33341 - protein, 429 aa, Homo sapiens
MARTTSQLYDAVPIQSSVVLCSCPSPSMVRTQTESSTPPGIPGGSRQGPAMDGTAAEPRPGAGSLQHAQPPPQPRKKRPEDFKFGKILGEGSFSTVVLARELATSREYATRANSFVGTAQYVSPELLTEKSACKSSDLWALGCIIYQLVAGLPPFRAGNEYLIFQKIIKLEYDFPEKFFPKARDLVEKLLVLDATKRLGCEEMEGYGPLKAHPFFESVTWENLHQQTPPKLTAYLPAMSEDDEDCYGNYDNLLSQFGCMQVSSSSSSHSLSASDTGLPQRSGSNIEQYIHDLDSNSFELDLQFSEDEKRLLLEKQAGGNPWHQFVENNLILKMGPVDKRKGLFARRRQLLLTEGPHLYYVDPVNKVLKGEIPWSQELRPEAKNFKTFFVHTPNRTYYLMDPSGNAHKWCRKIQEVWRQRYQSHPDAAVQ

SEQ ID NO: 33342 - protein, 454 aa, Homo sapiens
MARTTSQLYDAVPIQSSVVLCSCPSPSMVRTQTESSTPPGIPGGSRQGPAMDGTAAEPRPGAGSLQHAQPPPQPRKKRPEDFKFGKILGEGSFSTVVLARELATSREYAIKILEKRHIIKENKVPYVTRERDVMSRLDHPFFVKLYFTFQDDEKLYFGLSYAKNGELLKYIRKIGSFDETCTRFYTAEIVSALEYLHGKGIIHRDLKPENILLNEDMHIQITDFGTAKVLSPESKQARANSFVGTAQYVSPELLTEKSACKSSDLWALGCIIYQLVAGLPPFRAGNEYLIFQKIIKLEYDFPEKFFPKARDLVEKLLVLDATKRLGCEEMEGYGPLKAHPFFESVTWENLHQQTPPKLTAYLPAMSEDDEDCYGNYDNLLSQFGCMQVSSSSSSHSLSASDTGLPQRSGSNIEQYIHDLDSNSFELDLQFSEDEKRLLLEKQAGGNPCLTGRII

SEQ ID NO: 33343 - protein, 396 aa, Homo sapiens
MVRTQTESSTPPGIPGGSRQGPAMDGTAAEPRPGAGSLQHAQPPPQPRKKRPEDFKFGKILGEGSFSTVVLARELATSREYAIKILEKRHIIKENKVPYVTRERDVMSRLDHPFFVKLYFTFQDDEKLYFGLSYAKNGELLKYIRKIGSFDETCTRFYTAEIVSALEYLHGKGIIHRDLKPENILLNEDMYIQITDFGTAKVLSPESKQARANSFVGTAQYVSPELLTEKSACKSSDLWALGCIIYQLVAGLPPFRAGNEYLIFQKIIKLEYDFPEKFFPKARDLVEKLLVLDATKRLGCEEMEGYGPLKAHPFFESVTWENLHQQTPPKLTAYLPAMSEDDEDCYGNVSWPGWRARQVALGPPCTGLHARAPDPRVICSRKGRVSVPLRQACWWL

SEQ ID NO: 33344 - protein, 270 aa, Homo sapiens
MAGAENWPGQQLELDEDEASCCRWGAQHAGARELAALYSPGKRLQEWCSVILCFSLIAHNLVHLLLLARWEDTPLVILGVVAGALIADFLSGLVHWGADTWGSVELPIVGKAFIRPFREHHIDPTAITRHDFIETNGDNCLVTLLPLLNMAYKFRTHSPEALEQLYPWECFVFCLIIFGTFTNQIHKWSHTYFGLPRWVTLLQDWHVILPRKHHRIHHVSPHETYFCITTGWLNYPLEKIGFWRRLEDLIQGLTGEKPRADDMKWAQKIK

SEQ ID NO: 33345 - protein, 267 aa, Homo sapiens
MAGAENWPGQQLELDEDEASCCRWGAQHAGARELAALYSPGKRLQEWCSVILCFSLIAHNLVHLLLLARWEDTPLVILGVVAGALIADFLSGLVHWGADTWGSVELPIAFIRPFREHHIDPTAITRHDFIETNGDNCLVTLLPLLNMAYKFRTHSPEALEQLYPWECFVFCLIIFGTFTNQIHKWSHTYFGLPRWVTLLQDWHVILPRKHHRIHHVSPHETYFCITTGWLNYPLEKIGFWRRLEDLIQGLTGEKPRADDMKWAQKIK

SEQ ID NO: 33346 - protein, 162 aa, Homo sapiens
MWKVSALLFVLGSASLWVLAEGASTGQPEDDTETTGLEGGVAMPGAEDDVVTPGTSEDRYKSGLTTLVATSVNSVTGIRIEDLPTSESTVHAQEQSPSATASNVATSHSTEKVDGDTQTTVEKDGLSTVTLVGIIVGVLLAIGFIGAIIVVVMRKMSGRYSP

SEQ ID NO: 33347 - protein, 164 aa, Homo sapiens
MLHILSPMYFFLWGSCFFPLSSSDGLSTVTLVGIIVGVLLAIGFIGAIIVVVMRKMSGRYSEVNSLHPCDRQMKAIVSRTQIFELIEISDISWVWWLVPVVSAAGQLQTSLGNIVRPCLKKIISGTMVMFQSSLLGPLECSGSHLESQCFERLRRQEVHLCPGI

SEQ ID NO: 33348 - protein, 238 aa, Homo sapiens
MLTPLGKFSTAKFAVRLPRVWEARAPSLSGAPAPTPPAPPPSRSSRLGLWPRCFLIFPQLRILLLGPQESNNSTGTMWKVSALLFVLGSASLWVLAEGASTGQPEDDTETTGLEGGVAMPGAEDDVVTPGTSEDRYKSGLTTLVATSVNSVTGIRIEDLPTSESTVHAQEQSPSATASNVATSHSTEKVDGDTQTTVEKDGLSTVTLVGIIVGVLLAIGFIGAIIVVVMRKMSGRYSP

SEQ ID NO: 33349 - protein, 236 aa, Homo sapiens
MLTPLGKFSTAKFAVRLPRVWEARAPSLSGAPAPTPPAPPPSRSSRLGLWPRCFLIFPQLRILLLGPQESNNSTGTMWKVSALLFVLGSASLWVLAEGASTGQPEDDTETTGLEGGVAMPGAEDDVVTPGTSEDRYKSGLTTLVATSVNSVTGIRIEDLPTSESTVHAQEQSPSATASNVATSHSTEKVDGDTQTTVEKDGLSTVTLVGIIVGVLLAIGFIGAIIVVVMRKMSGRP

SEQ ID NO: 33350 - protein, 118 aa, Homo sapiens
MPGAEDDVVTPGTSEDRYKSGLTTLVATSVNSVTGIRIEDLPTSESTVHAQEQSPSATASNVATSHSTEKVDGDTQTTVEKDGLSTVTLVGIIVGVLLAIGFIGAIIVVVMRKMSGRP

SEQ ID NO: 33351 - protein, 120 aa, Homo sapiens
MPGAEDDVVTPGTSEDRYKSGLTTLVATSVNSVTGIRIEDLPTSESTVHAQEQSPSATASNVATSHSTEKVDGDTQTTVEKDGLSTVTLVGIIVGVLLAIGFIGAIIVVVMRKMSGRYSP

SEQ ID NO: 33352 - protein, 879 aa, Homo sapiens
MMFYRLLSIVGRQRASPGWQNWSSARNSTSAAEARSMALPTQAQVVICGGGITGTSVAYHLSKMGWKDIVLLEQGRLAAGSTRFCAGILSTARHLTIEQKMADYSNKLYYQLEQETGIQTGYTRTGSIFLAQTQDRLISLKRINAGLNVIGIPSEIISPKKVAELHHLLNVHDLVGAMHVPEDAVVSSADVALALASAASQNGVQIYDRTSVLHVMVKKGQVTGVETDKGQIECQYFVNCAGQWAYELGLSNEEPVSIPLHACEHFYLLTRPLETPLQSSTPTIVDADGRIYIRNWQGGILSGGFEKNPKPIFTEGKNQLEIQNLQEDWDHFEPLLSSLLRRMPELETLEIMKLVNCPETFTPDMRCIMGESPAVQGYFVLAGMNSAGLSFGGGAGKYLAEWMVHGYPSENVWELDLKRFGALQSSRTFLRHRVMEVMPLMYDLKVPRWDFQTGRQLRTSPLYDRLDAQGARWMEKHGFERPKYFVPPDKDLLALEQSKTFYKPDWFDIVESEVKCCKEAVCVIDMSSFTKFEITSTGDQALEVLQYLFSNDLDVPVGHIVHTGMLNEGGGYENDCSIARLNKRSFFMISPTDQQVHCWAWLKKHMPKDSNLLLEDVTWKYTALNLIGPRAVDVLSELSYAPMTPDHFPSLFCKEMSVGYANGIRVMSMTHTGEPGFMLYIPIEYALHVYNEVMSVGQKYGIRNAGYYALRSLRIEKFFAFWGQDINNLTTPLECGRESRVKLEKGMDFIGRDALLQQKQNGVYKRLTMFILDDHDSDLDLWPWWGEPIYRNGQYVGKTTSSAYSYSLERHVCLGFVHNFSEDTGEEQVVTADFINRGEYEIDIAGYRFQAKAKLYPVASLFTQKRRKDDMELSDLHGK

SEQ ID NO: 33353 - protein, 224 aa, Homo sapiens
MSVGYANGIRVMSMTHTGEPGFMLYIPIEYALHVYNEVMSVGQKYGIRNAGYYALRSLRIEKFFAFWGQDINNLTTPLECGRESRVKLEKGMDFIGRDALLQQKQNGVYKRLTMFILDDHDSDLDLWPWWGEPIYRNGQYVGKTTSSAYSYSLERHVCLGFVHNFSEDTGEEQVVTADFINRGEYEIDIAGYRFQAKAKLYPVASLFTQKRRKDDMELSDLHGK

SEQ ID NO: 33354 - protein, 211 aa, Homo sapiens [sequence omitted]

SEQ ID NO: 33355 - protein, 196 aa, Homo sapiens
MRTLACLLLLGCGYLAHVLAEEAEIPREVIERLARSQIHSIRDLQRLLEIDSVGSEDSLDTSLRAHGVHATKHVPEKRPLPIRRKRSIEEAVPAVCKTRTVIYEIPRSQVDPTSANFLIWPPCVEVKRCTGCCNTSSVKCQPSRVHHRSVKVAKVEYVRKKPKLKEVQVRLEEHLECACATTSLNPDYREEDTDVR

SEQ ID NO: 33356 - protein, 241 aa, Homo sapiens
MNRCWALFLSLCCYLRLVSAEGDPIPEELYEMLSDHSIRSFDDLQRLLHGDPGEEDGAELDLNMTRSHSGGELESLARGRRSLGSLTIAEPAMIAECKTRTEVFEISRRLIDRTNANFLVWPPCVEVQRCSGCCNNRNVQCRPTQVQLRPVQVRKIEIVRKKPIFKKATVTLEDHLACKCETVAAARPVTRSPGGSQEQRAKTPQTRVTIRTVRVRRPPKGKHRKFKHTHDKTALKETLGA

SEQ ID NO: 33357 - protein, 226 aa, Homo sapiens
MFIMGLGDPIPEELYEMLSDHSIRSFDDLQRLLHGDPGEEDGAELDLNMTRSHSGGELESLARGRRSLGSLTIAEPAMIAECKTRTEVFEISRRLIDRTNANFLVWPPCVEVQRCSGCCNNRNVQCRPTQVQLRPVQVRKIEIVRKKPIFKKATVTLEDHLACKCETVAAARPVTRSPGGSQEQRAKTPQTRVTIRTVRVRRPPKGKHRKFKHTHDKTALKETLGA

SEQ ID NO: 33358 - protein, 225 aa, Homo sapiens
MVMAEGTAVLRRNRPGTKAQDFYNWPDESFDEMDSTLAVQQYIQQNIRADCSNIDKILEPPEGQDEGVWKYEHLRQFCLELNGLAVKLQSECHPDTCTQMTATEQWIFLCAAHKTPKECPAIDYTRHTLDGAACLLNSNKYFPSRVSIKESSVAKLGSVCRRIYRIFSHAYFHHRQIFDEYENETFLCHRFTKFVMKYNLMSKDNLIVPILEEEVQNSVSGESEA

SEQ ID NO: 33359 - protein, 193 aa, Homo sapiens
MDSTLAVQQYIQQNIRADCSNIDKILEPPEGQDEGVWKYEHLRQFCLELNGLAVKLQSECHPDTCTQMTATEQWIFLCAAHKTPKECPAIDYTRHTLDGAACLLNSNKYFPSRVSIKESSVAKLGSVCRRIYRIFSHAYFHHRQIFDEYENETFLCHRFTKFVMKYNLMSKDNLIVPILEEEVQNSVSGESEA

SEQ ID NO: 33360 - protein, 204 aa, Homo sapiens
MVMAEGTAVLRRNRPGTKAQYIQQNIRADCSNIDKILEPPEGQDEGVWKYEHLRQFCLELNGLAVKLQSECHPDTCTQMTATEQWIFLCAAHKTPKECPAIDYTRHTLDGAACLLNSNKYFPSRVSIKESSVAKLGSVCRRIYRIFSHAYFHHRQIFDEYENETFLCHRFTKFVMKYNLMSKDNLIVPILEEEVQNSVSGESEA

SEQ ID NO: 33361 - protein, 345 aa, Homo sapiens
MSLFGLLLLTSALAGQRQGTQAESNLSSKFQFSSNKEQNGVQDPQHERIITVSTNGSIHSPRFPHTYPRNTVLVWRLVAVEENVWIQLTFDERFGLEDPEDDICKYDFVEVEEPSDGTILGRWCGSGTVPGKQISKGNQIRIRFVSDEYFPSEPGFCIHYNIVMPQFTEAVSPSVLPPSALPLDLLNNAITAFSTLEDLIRYLEPERWQLDLEDLYRPTWQLLGKAFVFGRKSRVVDLNLLTEEVRLYSCTPRNFSVSIREELKRTDTIFWPGCLLVKRCGGNCACCLHNCNECQCVPSKVTKKYHEVLQLRPKTGVRGLHKSLTDVALEHHEECDCVCRGSTGG

SEQ ID NO: 33362 - protein, 282 aa, Homo sapiens
MSLFGLLLLTSALAGQRQGTQAESNLSSKFQFSSNKEQNGVQDPQHERIITVSTNGSIHSPRFPHTYPRNTVLVWRLVAVEENVWIQLTFDERFGLEDPEDDICKYDFVEVEEPSDGTILGRWCGSGTVPGKQISKGNQIRIRFVSDEYFPSEPGFCIHYNIVMPQFTEAVSPSVLPPSALPLDLLNNAITAFSTLEDLIRYLEPERWQLDLEDLYRPTWQLLGKAFVFGRKSRVVDLNLLTEEVLQLRPKTGVRGLHKSLTDVALEHHEECDCVCRGSTGG

SEQ ID NO: 33363 - protein, 167 aa, Homo sapiens
MSLFGLLLLTSALAGQRQGTQAESNLSSKFQFSSNKEQNGVQDPQHERIITVSTNGSIHSPRFPHTYPRNTVLVWRLVAVEENVWIQLTFDERFGLEDPEDDICKYDFVEVEEPSDGTILGRWCGSGTVPGKQISKGNQIRIRFVSDEYFPSEPSNRGGKIIQLHTS

SEQ ID NO: 33364 - protein, 182 aa, Homo sapiens
MPQFTEAVSPSVLPPSALPLDLLNNAITAFSTLEDLIRYLEPERWQLDLEDLYRPTWQLLGKAFVFGRKSRVVDLNLLTEEVRLYSCTPRNFSVSIREELKRTDTIFWPGCLLVKRCGGNCACCLHNCNECQCVPSKVTKKYHEVLQLRPKTGVRGLHKSLTDVALEHHEECDCVCRGSTGG

SEQ ID NO: 33365 - protein, 370 aa, Homo sapiens
MHRLIFVYTLICANFCSCRDTSATPQSASIKALRNANLRRDESNHLTDLYRRDETIQVKGNGYVQSPRFPNSYPRNLLLTWRLHSQENTRIQLVFDNQFGLEEAENDICRYDFVEVEDISETSTIIRGRWCGHKEVPPRIKSRTNQIKITFKSDDYFVAKPGFKIYYSLLEDFQPAAASETNWESVTSSISGVSYNSPSVTDPTLIADALDKKIAEFDTVEDLLKYFNPESWQEDLENMYLDTPRYRGRSYHDRKSKVDLDRLNDDAKRYSCTPRNYSVNIREELKLANVVFFPRCLLVQRCGGNCGCGTVNWRSCTCNSGKTVKKYHEVLQFEPGHIKRRGRAKTMALVDIQLDHHERCDCICSSRPPR

SEQ ID NO: 33366 - protein, 364 aa, Homo sapiens
MHRLIFVYTLICANFCSCRDTSATPQSASIKALRNANLRRDDLYRRDETIQVKGNGYVQSPRFPNSYPRNLLLTWRLHSQENTRIQLVFDNQFGLEEAENDICRYDFVEVEDISETSTIIRGRWCGHKEVPPRIKSRTNQIKITFKSDDYFVAKPGFKIYYSLLEDFQPAAASETNWESVTSSISGVSYNSPSVTDPTLIADALDKKIAEFDTVEDLLKYFNPESWQEDLENMYLDTPRYRGRSYHDRKSKVDLDRLNDDAKRYSCTPRNYSVNIREELKLANVVFFPRCLLVQRCGGNCGCGTVNWRSCTCNSGKTVKKYHEVLQFEPGHIKRRGRAKTMALVDIQLDHHERCDCICSSRPPR

SEQ ID NO: 33367 - protein, 133 aa, Homo sapiens
MLSPEAERVLRYLVEVEELAEEVLADKRQIVDLDTKRNQNREGLRALQKDLSLSEDVMVCFGNMFIKMPHPETKEMIEKDQDHLDKEIEKLRKQLKVKVNRLFEAQGKPELKGFNLNPLNQDELKALKVILKG

SEQ ID NO: 33368 - protein, 788 aa, Homo sapiens
MDASLEKIADPTLAEMGKNLKEAVKMLEDSQRRTEEENGKKLISGDIPGPLQGSGQDMVSILQLVQNLMHGDEDEEPQSPRIQNIGEQGHMALLGHSLGAYISTLDKEKLRKLTTRILSDTTLWLCRIFRYENGCAYFHEEEREGLAKICRLAIHSRYEDFVVDGFNVLYNKKPVIYLSAAARPGLGQYLCNQLGLPFPCLCRVPCNTVFGSQHQMDVAFLEKLIKDDIERGRLPLLLVANAGTAAVGHTDKIGRLKELCEQYGIWLHVEGVNLATLALGYVSSSVLAAAKCDSMTMTPGPWLGLPAVPAVTLYKHDDPALTLVAGLTSNKPTDKLRALPLWLSLQYLGLDGFVERIKHACQLSQRLQESLKKVNYIKILVEDELSSPVVVFRFFQELPGSDPVFKAVPVPNMTPSGVGRERHSCDALNRWLGEQLKQLVPASGLTVMDLEAEGTCLRFSPLMTAAVLGTRGEDVDQLVACIESKLPVLCCTLQLREEFKQEVEATAGLLYVDDPNWSGIGVVRYEHANDDKSSLKSDPEGENIHAGLLKKLNELESDLTFKIGPEYKSMKSCLYVGMASDNVDAAELVETIAATAREIEENSRLLENMTEVVRKGIQEAQVELQKASEERLLEEGVLRQIPVVGSVLNWFSPVQALQKGRTFNLTAGSLESTEPIYVYKAQGAGVTLPPTPSGSRTKQRLPGQKPFKRSLRGSDALSETSSVSHIEDLEKVERLSSGPEQITLEASSTEGHPGAPSPQHTDQTEAFQKGVPHPEDDHSQVEGPESLR

SEQ ID NO: 33369 - protein, 429 aa, Homo sapiens
MDASLEKIADPTLAEMGKNLKEAVKMLEDSQRRTEEENGKKLISGDIPGPLQGSGQDMVSILQLVQNLMHGDEDEEPQSPRIQNIGEQGHMALLGHSLGAYISTLDKEKLRKLTTRILSDTTLWLCRIFRYENGCAYFHEEEREGLAKICRLAIHSRYEDFVVDGFNVLYNKKPVIYLSAAARPGLGQYLCNQDVAFLEKLIKDDIERGRLPLLLVANAGTAAVGHTDKIGRLKELCEQYGIWLHVEGVNLATLALGYVSSSVLAAAKCDSMTMTPGPWLGLPAVPAVTLYKHDDPALTLVAGLTSNKPTDKLRALPLWLSLQYLGLDGFVERIKHACQLSQRLQESLKKVNYIKILVEDELSSPVVVFRFFQELPGSDPVFKAVPVPNMTPSGVGRERHSCDALNRWVRMAVTPLSFQVPVHHHPTCW

SEQ ID NO: 33370 - protein, 697 aa, Homo sapiens
MGKNLKEAVKMLEDSQRRTEEENGKKLISGDIPGPLQGRYENGCAYFHEEEREGLAKICRLAIHSRYEDFVVDGFNVLYNKKPVIYLSAAARPGLGQYLCNQLGLPFPCLCRVPCNTVFGSQHQMDVAFLEKLIKDDIERGRLPLLLVANAGTAAVGHTDKIGRLKELCEQYGIWLHVEGVNLATLALGYVSSSVLAAAKCDSMTMTPGPWLGLPAVPAVTLYKHDDPALTLVAGLTSNKPTDKLRALPLWLSLQYLGLDGFVERIKHACQLSQRLQESLKKVNYIKILVEDELSSPVVVFRFFQELPGSDPVFKAVPVPNMTPSGVGRERHSCDALNRWLGEQLKQLVPASGLTVMDLEAEGTCLRFSPLMTAAVLGTRGEDVDQLVACIESKLPVLCCTLQLREEFKQEVEATAGLLYVDDPNWSGIGVVRYEHANDDKSSLKSDPEGENIHAGLLKKLNELESDLTFKIGPEYKSMKSCLYVGMASDNVDAAELVETIAATAREIEENSRLLENMTEVVRKGIQEAQVELQKASEERLLEEGVLRQIPVVGSVLNWFSPVQALQKGRTFNLTAGSLESTEPIYVYKAQGAGVTLPPTPSGSRTKQRLPGQKPFKRSLRGSDALSETSSVSHIEDLEKVERLSSGPEQITLEASSTEGHPGAPSPQHTDQTEAFQKGVPHPEDDHSQVEGPESLR

SEQ ID NO: 33371 - protein, 760 aa, Homo sapiens
MDASLEKIADPTLAEMGKNLKEAVKMLEDSQRTEEENGKKLISGDIPGPLQGRIQNIGEQGHMALLGHSLGAYISTLDKEKLRKLTTRILSDTTLWLCRIFRYENGCAYFHEEEREGLAKICRLAIHSRYEDFVVDGFNVLYNKKPVIYLSAAARPGLGQYLCNQLGLPFPCLCRVPCNTVFGSQHQMDVAFLEKLIKDDIERGRLPLLLVANAGTAAVGHTDKIGRLKELCEQYGIWLHVEGVNLATLALGYVSSSVLAAAKCDSMTMTPGPWLGLPAVPAVTLYKHDDPALTLVAGLTSNKPTDKLRALPLWLSLQYLGLDGFVERIKHACQLSQRLQESLKKVNYIKILVEDELSSPVVVFRFFQELPGSDPVFKAVPVPNMTPSGVGRERHSCDALNRWLGEQLKQLVPASGLTVMDLEAEGTCLRFSPLMTAAVLGTRGEDVDQLVACIESKLPVLCCTLQLREEFKQEVEATAGLLYVDDPNWSGIGVVRYEHANDDKSSLKSDPEGENIHAGLLKKLNELESDLTFKIGPEYKSMKSCLYVGMASDNVDAAELVETIAATAREIEENSRLLENMTEVVRKGIQEAQVELQKASEERLLEEGVLRQIPVVGSVLNWFSPVQALQKGRTFNLTAGSLESTEPIYVYKAQGAGVTLPPTPSGSRTKQRLPGQKPFKRSLRGSDALSETSSVSHIEDLEKVERLSSGPEQITLEASSTEGHPGAPSPQHTDQTEAFQKGVPHPEDDHSQVEGPESLR

SEQ ID NO: 33372 - protein, 761 aa, Homo sapiens
MDASLEKIADPTLAEMGKNLKEAVKMLEDSQRRTEEENGKKLISGDIPGPLQGRIQNIGEQGHMALLGHSLGAYISTLDKEKLRKLTTRILSDTTLWLCRIFRYENGCAYFHEEEREGLAKICRLAIHSRYEDFVVDGFNVLYNKKPVIYLSAAARPGLGQYLCNQLGLPFPCLCRVPCNTVFGSQHQMDVAFLEKLIKDDIERGRLPLLLVANAGTAAVGHTDKIGRLKELCEQYGIWLHVEGVNLATLALGYVSSSVLAAAKCDSMTMTPGPWLGLPAVPAVTLYKHDDPALTLVAGLTSNKPTDKLRALPLWLSLQYLGLDGFVERIKHACQLSQRLQESLKKVNYIKILVEDELSSPVVVFRFFQELPGSDPVFKAVPVPNMTPSGVGRERHSCDALNRWLGEQLKQLVPASGLTVMDLEAEGTCLRFSPLMTAAVLGTRGEDVDQLVACIESKLPVLCCTLQLREEFKQEVEATAGLLYVDDPNWSGIGVVRYEHANDDKSSLKSDPEGENIHAGLLKKLNELESDLTFKIGPEYKSMKSCLYVGMASDNVDAAELVETIAATAREIEENSRLLENMTEVVRKGIQEAQVELQKASEERLLEEGVLRQIPVVGSVLNWFSPVQALQKGRTFNLTAGSLESTEPIYVYKAQGAGVTLPPTPSGSRTKQRLPGQKPFKRSLRGSDALSETSSVSHIEDLEKVERLSSGPEQITLEASSTEGHPGAPSPQHTDQTEAFQKGVPHPEDDHSQVEGPESLR

SEQ ID NO: 33373 - protein, 508 aa, Homo sapiens
MLRRALLCLAVAALVRADAPEEEDHVLVLRKSNFAEALAAHKYLLVEFYAPWCGHCKALAPEYAKAAGKLKAEGSEIRLAKVDATEESDLAQQYGVRGYPTIKFFRNGDTASPKEYTAGREADDIVNWLKKRTGPAATTLPDGAAAESLVESSEVAVIGFFKDVESDSAKQFLQAAEAIDDIPFGITSNSDVFSKYQLDKDGVVLFKKFDEGRNNFEGEVTKENLLDFIKHNQLPLVIEFTEQTAPKIFGGEIKTHILLFLPKSVSDYDGKLSNFKTAAESFKGKILFIFIDSDHTDNQRILEFFGLKKEECPAVRLITLEEEMTKYKPESEELTAERITEFCHRFLEGKIKPHLMSQELPEDWDKQPVKVLVGKNFEDVAFDEKKNVFVEFYAPWCGHCKQLAPIWDKLGETYKDHENIVIAKMDSTANEVEAVKVHSFPTLKFFPASADRTVIDYNGERTLDGFKKFLESGGQDGAGDDDDLEDLEEAEEPDMEEDDDQKAVKDEL

SEQ ID NO: 33374 - protein, 525 aa, Homo sapiens
MSRQLLPVLLLLLLRASCPWGQEQGARSPSEEPPEEEIPKEDGILVLSRHTLGLALREHPALLVEFYAPWCGHCQALAPEYSKAAAVLAAESMVVTLAKVDGPAQRELAEEFGVTEYPTLKFFRNGNRTHPEEYTGPRDAEGIAEWLRRRVGPSAMRLEDEAAAQALIGGRDLVVIGFFQDLQDEDVATFLALAQDALDMTFGLTDRPRLFQQFGLTKDTVVLFKKFDEGRADFPVDEELGLDLGDLSRFLVTHSMRLVTEFNSQTSAKIFAARILNHLLLFVNQTLAAHRELLAGFGEAAPRFRGQVLFVVVDVAADNEHVLQYFGLKAEAAPTLRLVNLETTKKYAPVDGGPVTAASITAFCHAVLNGQVKPYLLSQEIPPDWDQRPVKTLVGKNFEQVAFDETKNVFVKFYAPWCTHCKEMAPAWEALAEKYQDHEDIIIAELDATANELDAFAVHGFPTLKYFPAGPGRKVIEYKSTRDLETFSKFLDNGGVLPTEEPPEEPAAPFPEPPANSTMGSKEEL

SEQ ID NO: 33375 - protein, 522 aa, Homo sapiens
MSRQLLPVLLLLLLRASCPWGQEQGARSPSEEPPEEEIPKEDGILVLSRHTLGLALREHPALLVEFYAPWCGHCQALAPEYSKAAAVLAAESMVVTLAKVDGPAQRELAEEFGVTEYPTLKFFRNGNRTHPEEYTGPRDAEGIAEWLRRRVGPSAMRLEDEAAAQALIGGRDLVVIGFFQDEDVATFLALAQDALDMTFGLTDRPRLFQQFGLTKDTVVLFKKFDEGRADFPVDEELGLDLGDLSRFLVTHSMRLVTEFNSQTSAKIFAARILNHLLLFVNQTLAAHRELLAGFGEAAPRFRGQVLFVVVDVAADNEHVLQYFGLKAEAAPTLRLVNLETTKKYAPVDGGPVTAASITAFCHAVLNGQVKPYLLSQEIPPDWDQRPVKTLVGKNFEQVAFDETKNVFVKFYAPWCTHCKEMAPAWEALAEKYQDHEDIIIAELDATANELDAFAVHGFPTLKYFPAGPGRKVIEYKSTRDLETFSKFLDNGGVLPTEEPPEEPAAPFPEPPANSTMGSKEEL

SEQ ID NO: 33376 - protein, 505 aa, Homo sapiens
MRLRRLALFPGVALLLAAARLAAASDVLELTDDNFESRISDTGSAGLMLVEFFAPWCGHCKRLAPEYEAAATRLKGIVPLAKVDCTANTNTCNKYGVSGYPTLKIFRDGEEAGAYDGPRTADGIVSHLKKQAGPASVPLRTEEEFKKFISDKDASIVGFFDDSFSEAHSEFLKAASNLRDNYRFAHTNVESLVNEYDDNGEGIILFRPSHLTNKFEDKTVAYTEQKMTSGKIKKFIQENIFGICPHMTEDNKDLIQGKDLLIAYYDVDYEKNAKGSNYWRNRVMMVAKKFLDAGHKLNFAVASRKTFSHELSDFGLESTAGEIPVVAIRTAKGEKFVMQEEFSRDGKALERFLQDYFDGNLKRYLKSEPIPESNDGPVKVVVAENFDEIVNNENKDVLIEFYAPWCGHCKNLEPKYKELGEKLSKDPNIVIAKMDATANDVPSPYEVRGFPTIYFSPANKKLNPKKYEGGRELSDFISYLQREATNPPVIQEEKPKKKKKAQEDL

SEQ ID NO: 33377 - protein, 645 aa, Homo sapiens
MRPRKAFLLLLLLGLVQLLAVAGAEGPDEDSSNRENAIEDEEEEEEEDDDEEEDDLEVKEENGVLVLNDANFDNFVADKDTVLLEFYAPWCGHCKQFAPEYEKIANILKDKDPPIPVAKIDATSASVLASRFDVSGYPTIKILKKGQAVDYEGSRTQEEIVAKVREVSQPDWTPPPEVTLVLTKENFDEVVNDADIILVEFYAPWCGHCKKLAPEYEKAAKELSKRSPPIPLAKVDATAETDLAKRFDVSGYPTLKIFRKGRPYDYNGPREKYGIVDYMIEQSGPPSKEILTLKQVQEFLKDGDDVIIIGVFKGESDPAYQQYQDAANNLREDYKFHHTFSTEIAKFLKVSQGQLVVMQPEKFQSKYEPRSHMMDVQGSTQDSAIKDFVLKYALPLVGHRKVSNDAKRYTRRPLVVVYYSVDFSFDYRAATQFWRSKVLEVAKDFPEYTFAIADEEDYAGEVKDLGLSESGEDVNAAILDESGKKFAMEPEEFDSDTLREFVTAFKKGKLKPVIKSQPVPKNNKGPVKVVVGKTFDSIVMDPKKDVLIEFYAPWCGHCKQLEPVYNSLAKKYKGQKGLVIAKMDATANDVPSDRYKVEGFPTIYFAPSGDKKNPVKFEGGDRDLEHLSKFIEEHATKLSRTKEEL

SEQ ID NO: 33378 - protein, 519 aa, Homo sapiens
MARAGPAWLLLAIWVVLPSWLSSAKVSSLIERISDPKDLKKLLRTRNNVLVLYSKSEVAAENHLRLLSTVAQAVKGQGTICWVDCGDAESRKLCKKMKVDLSPKDKKVELFHYQDGAFHTEYNRAVTFKSIVAFLKDPKGPPLWEEDPGAKDVVHLDSEKDFRRLLKKEEKPLLIMFYAPWCSMCKRMMPHFQKAATQLRGHAVLAGMNVYSSEFENIKEEYSVRGFPTICYFEKGRFLFQYDNYGSTAEDIVEWLKNPQPPQPQVPETPWADEGGSVYHLTDEDFDQFVKEHSSVLVMFHAPWCGHCKKMKPEFEKAAEALHGEADSSGVLAAVDATVNKALAERFHISEFPTLKYFKNGEKYAVPVLRTKKKFLEWMQNPEAPPPPEPTWEEQQTSVLHLVGDNFRETLKKKKHTLVMFYAPWCPHCKKVIPHFTATADAFKDDRKIACAAVDCVKDKNQDLCQQEAVKGYPTFHYYHYGKFAEKYDSDRTELGFTNYIRALREGDHERLGKKKEEL

SEQ ID NO: 33379 - protein, 262 aa, Homo sapiens
MARAGPAWLLLAIWVVLPSWLSSAKVSSLIERISDPKDLKKLLRTRNNVLVLYSKSEVAAENHLRLLSTVAQAVKGQGTICWVDCGDAESRKLCKKMKVDLSPKDKKVELFHYQDGAFHTEYNRAVTFKSIVAFLKDPKGPPLWEEDPGAKDVVHLDSEKDFRRLLKKEEKPLLIMFYAPWCSMCKRMMPHFQKAATQLRGHAVLAGMNVYSSEFENIKEEYSVRGFPTICYFEKGRFLFQYDNYGSTAEDIVEWLKKVWPL

SEQ ID NO: 33380 - protein, 440 aa, Homo sapiens
MALLVLGLVSCTFFLAVNGLYSSSDDVIELTPSNFNREVIQSDSLWLVEFYAPWCGHCQRLTPEWKKAATALKDVVKVGAVDADKHHSLGGQYGVQGFPTIKIFGSNKNRPEDYQGGRTGEAIVDAALSALRQLVKDRLGGRSGGYSSGKQGRSDSSSKKDVIELTDDSFDKNVLDSEDVWMVEFYAPWCGHCKNLEPEWAAAASEVKEQTKGKVKLAAVDATVNQVLASRYGIRGFPTIKIFQKGESPVDYDGGRTRSDIVSRALDLFSDNAPPPELLEIINEDIAKRTCEEHQLCVVAVLPHILDTGAAGRNSYLEVLLKLADKYKKKMWGWLWTEAGAQSELETALGIGGFGYPAMAAINARKMKFALLKGSFSEQGINEFLRELSFGRGSTAPVGGGAFPTIVEREPWDGRDGELPVEDDIDLSDVELDDLGKDEL

SEQ ID NO: 33381 - protein, 492 aa, Homo sapiens
MRRDLREKLVWVCRPLAPVEVPANISSDFQPCSPTSPAHSLSRKSPIMYPSTTMANAPGLVSCTFFLAVNGLYSSSDDVIELTPSNFNREVIQSDSLWLVEFYAPWCGHCQRLTPEWKKAATALKDVVKVGAVDADKHHSLGGQYGVQGFPTIKIFGSNKNRPEDYQGGRTGEAIVDAALSALRQLVKDRLGGRSGGYSSGKQGRSDSSSKKDVIELTDDSFDKNVLDSEDVWMVEFYAPWCGHCKNLEPEWAAAASEVKEQTKGKVKLAAVDATVNQVLASRYGIRGFPTIKIFQKGESPVDYDGGRTRSDIVSRALDLFSDNAPPPELLEIINEDIAKRTCEEHQLCVVAVLPHILDTGAAGRNSYLEVLLKLADKYKKKMWGWLWTEAGAQSELETALGIGGFGYPAMAAINARKMKFALLKGSFSEQGINEFLRELSFGRGSTAPVGGGAFPTIVEREPWDGRDGELPVEDDIDLSDVELDDLGKDEL

SEQ ID NO: 33382 - protein, 437 aa, Homo sapiens
MILGLVSCTFFLAVNGLYSSSDDVIELTPSNFNREVIQSDSLWLVEFYAPWCGHCQRLTPEWKKAATALKDVVKVGAVDADKHHSLGGQYGVQGFPTIKIFGSNKNRPEDYQGGRTGEAIVDAALSALRQLVKDRLGGRSGGYSSGKQGRSDSSSKKDVIELTDDSFDKNVLDSEDVWMVEFYAPWCGHCKNLEPEWAAAASEVKEQTKGKVKLAAVDATVNQVLASRYGIRGFPTIKIFQKGESPVDYDGGRTRSDIVSRALDLFSDNAPPPELLEIINEDIAKRTCEEHQLCVVAVLPHILDTGAAGRNSYLEVLLKLADKYKKKMWGWLWTEAGAQSELETALGIGGFGYPAMAAINARKMKFALLKGSFSEQGINEFLRELSFGRGSTAPVGGGAFPTIVEREPWDGRDGELPVEDDIDLSDVELDDLGKDEL

SEQ ID NO: 33383 - protein, 445 aa, Homo sapiens
MYPSTTMANAPGLVSCTFFLAVNGLYSSSDDVIELTPSNFNREVIQSDSLWLVEFYAPWCGHCQRLTPEWKKAATALKDVVKVGAVDADKHHSLGGQYGVQGFPTIKIFGSNKNRPEDYQGGRTGEAIVDAALSALRQLVKDRLGGRSGGYSSGKQGRSDSSSKKDVIELTDDSFDKNVLDSEDVWMVEFYAPWCGHCKNLEPEWAAAASEVKEQTKGKVKLAAVDATVNQVLASRYGIRGFPTIKIFQKGESPVDYDGGRTRSDIVSRALDLFSDNAPPPELLEIINEDIAKRTCEEHQLCVVAVLPHILDTGAAGRNSYLEVLLKLADKYKKKMWGWLWTEAGAQSELETALGIGGFGYPAMAAINARKMKFALLKGSFSEQGINEFLRELSFGRGSTAPVGGGAFPTIVEREPWDGRDGELPVEDDIDLSDVELDDLGKDEL

SEQ ID NO: 33384 - protein, 488 aa, Homo sapiens
MRIITAPASKVSRGSNELMILARRSDRGSPTSPAHSLSRKSPIMYPSTTMANAPGLVSCTFFLAVNGLYSSSDDVIELTPSNFNREVIQSDSLWLVEFYAPWCGHCQRLTPEWKKAATALKDVVKVGAVDADKHHSLGGQYGVQGFPTIKIFGSNKNRPEDYQGGRTGEAIVDAALSALRQLVKDRLGGRSGGYSSGKQGRSDSSSKKDVIELTDDSFDKNVLDSEDVWMVEFYAPWCGHCKNLEPEWAAAASEVKEQTKGKVKLAAVDATVNQVLASRYGIRGFPTIKIFQKGESPVDYDGGRTRSDIVSRALDLFSDNAPPPELLEIINEDIAKRTCEEHQLCVVAVLPHILDTGAAGRNSYLEVLLKLADKYKKKMWGWLWTEAGAQSELETALGIGGFGYPAMAAINARKMKFALLKGSFSEQGINEFLRELSFGRGSTAPVGGGAFPTIVEREPWDGRDGELPVEDDIDLSDVELDDLGKDEL

SEQ ID NO: 33385 - protein, 584 aa, Homo sapiens
MDLLWMPLLLVAACVSAVHSSPEVNAGVSSIHITKPVHILEERSLLVLTPAGLTQMLNQTRFLMVLFHNPSSKQSRNLAEELGKAVEIMGKGKNGIGFGKVDITIEKELQQEFGITKAPELKLFFEGNRSEPISCKGVVESAALVVWLRRQISQKAFLFNSSEQVAEFVISRPLVIVGFFQDLEEEVAELFYDVIKDFPELTFGVITIGNVIGRFHVTLDSVLVFKKGKIVNRQKLINDSTNKQELNRVIKQHLTDFVIEYNTENKDLISELHIMSHMLLFVSKSSESYGIIIQHYKLASKEFQNKILFILVDADEPRNGRVFKYFRVTEVDIPSVQILNLSSDARYKMPSDDITYESLKKFGRSFLSKNATKHQSSEEIPKYWDQGLVKQLVGKNFNVVVFDKEKDVFVMFYAPWSKKCKMLFPLLEELGRKYQNHSTIIIAKIDVTANDIQLMYLDRYPFFRLFPSGSQQAVLYKGEHTLKGFSDFLESHIKTKIEDEDELLSVEQNEVIEEEVLAEEKEVPMMRKGLPEQQSPELENMTKYVSKLEEPAGKKKTSEEVVVVVAKPKGPPVQKKKPKVKEEL

SEQ ID NO: 33386 - protein, 368 aa, Homo sapiens
MAACTARRALAVGSRWWSRSLTGARWPRPLCAAAGAGAFSPASTTTTRRHLSSRNRPEGKVLETVGVFEVPKQNGKYETGQLFLHSIFGYRGVVLFPWQARLYDRDVASAAPEKAENPAGHGSKEVKGKTHTYYQVLIDARDCPHISQRSQTEAVTFLANHDDSRALYAIPGLDYVSHEDILPYTSTDQVPIQHELFERFLLYDQTKAPPFVARETLRAWQEKNHPWLELSDVHRETTENIRVTVIPFYMGMREAQNSHVYWWRYCIRLENLDSDVVQLRERHWRIFSLSGTLETVRGRGVVGREPVLSKEQPAFQYSSHVSLQASSGHMWGTFRFERPDGSHFDVRIPPFSLESNKDEKTPPSGLHW

SEQ ID NO: 33387 - protein, 421 aa, Homo sapiens
MADISLDELIRKRGAAAKGRLNARPGVGGVRSRVGIQQGLLSQSTRTATFQQRFDARQKIGLSDARLKLGVKDAREKLLQKDARFRIKGKVQDAREMLNSRKQQTTVPQKPRQVADAREKISLKRSSPAAFINPPIGTVTPALKLTKTIQVPQQKAMAPLHPHPAGMRINVVNNHQAKQNLYDLDEDDDGIASVPTKQMKFAASGGFLHHMAGLSSSKLSMSKALPLTKVVQNDAYTAPALPSSIRTKALTNMSRTLVNKEEPPKELPAAEPVLSPLEGTKMTVNNLHPRVTEEDIVELFCVCGALKRARLVHPGVAEVVFVKKDDAITAYKKYNNRCLDGQPMKCNLHMNGNVITSDQPILLRLSDSPSMKKESELPRRVNSASSSNPPAEVDPDTILKALFKSSGASVTTQPTEFKIKL

SEQ ID NO: 33388 - protein, 392 aa, Homo sapiens
MADISLDELIRKRGAAAKGRLNARPGVGGVRSRVGIQQGLLSQSTRTATFQQRFDARQKIGLSDARLKLGVKDAREKLLQKDARFRIKGKVQDAREMLNSRKQQTTVPQKPRQVADAREKISLKRSSPAAFINPPIGTVTPALKLTKTIQNLYDLDEDDDGIASVPTKQMKFAASGGFLHHMAGLSSSKLSMSKALPLTKVVQNDAYTAPALPSSIRTKALTNMSRTLVNKEEPPKELPAAEPVLSPLEGTKMTVNNLHPRVTEEDIVELFCVCGALKRARLVHPGVAEVVFVKKDDAITAYKKYNNRCLDGQPMKCNLHMNGNVITSDQPILLRLSDSPSMKKESELPRRVNSASSSNPPAEVDPDTILKALFKSSGASVTTQPTEFKIKL

SEQ ID NO: 33389 - protein, 660 aa, Homo sapiens
MQENLRFASSGDDIKIWDASSMTLVDKFNPHTSPHGISSICWSSNNNFLVTASSSGDKIVVSSCKCKPVPLLELAEGQKQTCVNLNSTSMYLVSGGLNNTVNIWDLKSKRVHRSLKDHKDQVTCVTYNWNDCYIASGSLSGEIILHSVTTNLSSTPFGHGSNQSVRHLKYSLFKKSLLGSVSDNGIVTLWDVNSQSPYHNFDSVHKAPASGICFSPVNELLFVTIGLDKRIILYDTSSKKLVKTLVADTPLTAVDFMPDGATLAIGSSRGKIYQYDLRMLKSPVKTISAHKTSVQCIAFQYSTVLTKSSLNKGCSNKPTTVNKRSVNVNAASGGVQNSGIVREAPATSIATVLPQPMTSAMGKGTVAVQEKAGLPRSINTDTLSKETDSGKNQDFSSFDDTGKSSLGDMFSPIRDDAVVNKGSDESIGKGDGFDFLPQLNSVFPPRKNPVTSSTSVLHSSPLNVFMGSPGKEENENRDLTAESKKIYMGKQESKDSFKQLAKLVTSGAESGNLNTSPSSNQTRNSEKFEKPENEIEAQLICEPPINGSSTPNPKIASSVTAGVASSLSEKIADSIGNNRQNAPLTSIQIRFIQNMIQETLDDFREACHRDIVNLQVEMIKQFHMQLNEMHSLLERYSVNEGLVAEIERLREENKRLRAHF

SEQ ID NO: 33390 - protein, 571 aa, Homo sapiens
MYLVSGGLNNTVNIWDLKSKRVHRSLKDHKDQVTCVTYNWNDCYIASGSLSGEIILHSVTTNLSSTPFGHGSNQSVRHLKYSLFKKSLLGSVSDNGIVTLWDVNSQSPYHNFDSVHKAPASGICFSPVNELLFVTIGLDKRIILYDTSSKKLVKTLVADTPLTAVDFMPDGATLAIGSSRGKIYQYDLRMLKSPVKTISAHKTSVQCIAFQYSTVLTKSSLNKGCSNKPTTVNKRSVNVNAASGGVQNSGIVREAPATSIATVLPQPMTSAMGKGTVAVQEKAGLPRSINTDTLSKETDSGKNQDFSSFDDTGKSSLGDMFSPIRDDAVVNKGSDESIGKGDGFDFLPQLNSVFPPRKNPVTSSTSVLHSSPLNVFMGSPGKEENENRDLTAESKKIYMGKQESKDSFKQLAKLVTSGAESGNLNTSPSSNQTRNSEKFEKPENEIEAQLICEPPINGSSTPNPKIASSVTAGVASSLSEKIADSIGNNRQNAPLTSIQIRFIQNMIQETLDDFREACHRDIVNLQVEMIKQFHMQLNEMHSLLERYSVNEGLVAEIERLREENKRLRAHF

SEQ ID NO: 33391 - protein, 667 aa, Homo sapiens
MHFTGAVMQENLRFASSGDDIKIWDASSMTLVDKFNPHTSPHGISSICWSSNNNFLVTASSSGDKIVVSSCKCKPVPLLELAEGQKQTCVNLNSTSMYLVSGGLNNTVNIWDLKSKRVHRSLKDHKDQVTCVTYNWNDCYIASGSLSGEIILHSVTTNLSSTPFGHGSNQSVRHLKYSLFKKSLLGSVSDNGIVTLWDVNSQSPYHNFDSVHKAPASGICFSPVNELLFVTIGLDKRIILYDTSSKKLVKTLVADTPLTAVDFMPDGATLAIGSSRGKIYQYDLRMLKSPVKTISAHKTSVQCIAFQYSTVLTKSSLNKGCSNKPTTVNKRSVNVNAASGGVQNSGIVREAPATSIATVLPQPMTSAMGKGTVAVQEKAGLPRSINTDTLSKETDSGKNQDFSSFDDTGKSSLGDMFSPIRDDAVVNKGSDESIGKGDGFDFLPQLNSVFPPRKNPVTSSTSVLHSSPLNVFMGSPGKEENENRDLTAESKKIYMGKQESKDSFKQLAKLVTSGAESGNLNTSPSSNQTRNSEKFEKPENEIEAQLICEPPINGSSTPNPKIASSVTAGVASSLSEKIADSIGNNRQNAPLTSIQIRFIQNMIQETLDDFREACHRDIVNLQVEMIKQFHMQLNEMHSLLERYSVNEGLVAEIERLREENKRLRAHF

SEQ ID NO: 33392 - protein, 731 aa, Homo sapiens
MVKPKYKGRSTINPSKASTNPDRVQGAGGQNMRDRATIRRLNMYRQKERRNSRGKIIKPLQYQSTVASGTVARVEPNIKWFGNTRVIKQSSLQKFQEEMDTVMKDPYKVVMKQSKLPMSLLHDRIRPHNLKVHILDTESFETTFGPKSQRKRPNLFASDMQSLIENAEMSTESYDQGKDRDLVTEDTGVRNEAQEEIYKKGQSKRIWGELYKVIDSSDVVVQVLDARDPMGTRSPHIETYLKKEKPWKHLIFVLNKCDLVPTWATKRWVAVLSQDYPTLAFHASLTNPFGKGAFIQLLRQFGKLHTDKKQISVGFIGYPNVGKSSVINTLRSKKVCNVAPIAGETKVWQYITLMRRIFLIDCPGVVYPSEDSETDIVLKGVVQVEKIKSPEDHIGAVLERAKPEYISKTYKIDSWENAEDFLEKLAFRTGKLLKGGEPDLQTVGKMVLNDWQRGRIPFFVKPPNAEPLVAPQLLPSSSLEVVPEAAQNNPGEEVTETAGEGSESIIKEETEENSHCDANTEMQQILTRVRQNFGKINVVPQFSGDDLVPVEVSDLEEELESFSDEEEEEQEQQRDDAEESSSEPEEENVGNDTKAVIKALDEKIAKYQKFLDKAKAKKFSAVRISKGLSEKIFAKPEEQRKTLEEDVDDRAPSKKGKKRKAQREEEQEHSNKAPRALTSKERRRAVRQQRPKKVGVRYYETHNVKNRNRNKKKTNDSEGQKHKRKKFRQKQ

SEQ ID NO: 33393 - protein, 873 aa, Homo sapiens
MSFIMKLHRHFQRTVILLATFCMVSIIISAYYLYSGYKQENELSETASEVDCGDLQHLPYQLMEVKAMKLFDASRTDPTVLVFVESQYSSLGQDIIMILESSRFQYHIEIAPGKGDLPVLIDKMKGKYILIIYENILKYINMDSWNRSLLDKYCVEYGVGVIGFHKTSEKSVQSFQLKGFPFSIYGNLAVKDCCINPHSPLIRVTKSSKLEKGSLPGTDWTVFQINHSAYQPVIFAKVKTPENLSPSISKGAFYATIIHDLGLHDGIQRVLFGNNLNFWLHKLIFIDAISFLSGKRLTLSLDRYILVDIDDIFVGKEGTRMNTNDVKALLDTQNLLRAQITNFTFNLGFSGKFYHTGTEEEDEGDDCLLGSVDEFWWFPHMWSHMQPHLFHNESSLVEQMILNKKFALEHGIPTDMGYAVAPHHSGVYPVHVQLYEAWKKVWNIKITSTEEYPHLKPARYRRGFIHKNIMVLPRQTCGLFTHTIFYKEYPGGPKELDKSIQGGELFFTVVLNPISIFMTHLSNYGNDRLGLYTFVNLANFVKSWTNLRLQTLPPVQLAHKYFELFPDQKDPLWQNPCDDKRHRDIWSKEKTCDRLPKFLVIGPQKTGTTALYLFLVMHPSILSNSPSPKTFEEVQFFNRNNYHRGIDWYMDFFPVPSNVTTDFLFEKSANYFHSEEAPKRAASLVPKAKIITILIDPSDRAYSWYQHQRSHEDPAALKFSFYEVISAGPRAPSELRALQKRCLVPGWYASHIERWLVYFPPFQLLIIDGQQLRTDPATVMDEVQKFLGVLPHYNYSEALTFDSHKGFWCQLLEEGKTKCLGKSKGRKYPPMDSDSRTFLSSYYRDHNVELSKLLHKLGQPLPSWLRQELQKVR

SEQ ID NO: 33394 - protein, 385 aa, Homo sapiens
MSFIMKLHRHFQRTVILLATFCMVSIIISAYYLYSGYKQENELSETASEVDCGDLQHLPYQLMEVKAMKLFDASRTDPTVLVFVESQYSSLGQDIIMILESSRFQYHIEIAPGKGDLPVLIDKMKGKYILIIYENILKYINMDSWNRSLLDKYCVEYGVGVIGFHKTSEKSVQSFQLKGFPFSIYGNLAVKDCCINPHSPLIRVTKSSKLEKGSLPGTDWTVFQINHSAYQPVIFAKVKTPENLSPSISKGAFYATIIHDLGLHDGIQRVLFGNNLNFWLHKLIFIDAISFLSGKRLTLSLDRYILVDIDDIFVGKEGTRMNTNDVKVRLYFLKFQSSVHLPAGIQLSQFVLQLGYPGHGIYWESLGNLGLSLTLNQLRRLCISI

SEQ ID NO: 33395 - protein, 561 aa, Homo sapiens
MSFIMKLHRHFQRTVILLATFCMVSIIISAYYLYSGYKQENELSETASEVDCGDLQHLPYQLMEVKAMKLFDASRTDPTVLVFVESQYSSLGQDIIMILESSRFQYHIEIAPGKGDLPVLIDKMKGKYILIIYENILKYINMDSWNRSLLDKYCVEYGVGVIGFHKTSEKSVQSFQLKGFPFSIYGNLAVKDCCINPHSPLIRVTKSSKLEKGSLPGTDWTVFQINHSAYQPVIFAKVKTPENLSPSISKGAFYATIIHDLGLHDGIQRVLFGNNLNFWLHKLIFIDAISFLSGKRLTLSLDRYILVDIDDIFVGKEGTRMNTNDVKEHGIPTDMGYAVAPHHSGVYPVHVQLYEAWKKVWNIKITSTEEYPHLKPARYRRGFIHKNIMVLPRQTCGLFTHTIFYKEYPGGPKELDKSIQGGELFFTVVLNPISIFMTHLSNYGNDRLGLYTFVNLANFVKSWTNLRLQTLPPVQLAHKYFELFPDQKDPLWQNPCDDKRHRDIWSKEKTCDRLPKFLVIGPQKTGTTALYLFLVMHPSILSNSPSPKTFEEVYGFLPSPI

SEQ ID NO: 33396 - protein, 329 aa, Homo sapiens
MGTAAAAAAAAAAAAAGEGARSPSPAAVSLGLGVAVVSSLVNGSTFVLQKKGIVRAKRRGTSYLTDIVWWAGTIAMAVGQIGNFLAYTAVPTVLVTPLGALGVPFGSILASYLLKEKLNILGKLGCLLSCAGSVVLIIHSPKSESVTTQAELEEKLTNPVFVGYLCIVLLMLLLLIFWIAPAHGPTNIMVYISICSLLGSFTVPSTKGIGLAAQDILHNNPSSQRALCLCLVLLAVLGCSIIVQFRYINKALECFDSSVFGAIYYVVFTTLVLLASAILFREWSNVGLVDFLGMACGFTTVSVGIVLIQVFKEFNFNLGEMNKSNMKTD

SEQ ID NO: 33397 - protein, 254 aa, Homo sapiens
MAVGQIGNFLAYTAVPTVLVTPLGALGVPFGSILASYLLKEKLNILGKLGCLLSCAGSVVLIIHSPKSESVTTQAELEEKLTNPVFVGYLCIVLLMLLLLIFWIAPAHGPTNIMVYISICSLLGSFTVPSTKGIGLAAQDILHNNPSSQRALCLCLVLLAVLGCSIIVQFRYINKALECFDSSVFGAIYYVVFTTLVLLASAILFREWSNVGLVDFLGMACGFTTVSVGIVLIQVFKEFNFNLGEMNKSNMKTD

SEQ ID NO: 33398 - protein, 297 aa, Homo sapiens
MRSWNSLFCLNSSRPPGHIVYPKHQAGHTGKQADHLGSQAFYPGRQHDYLVPPAGTAGIPVQNQPGRPEGVPWMPAPPPPLNCPPGLEYLSQIDMILIHQQIELLEVLFSFESSNMYEIKNSFGQRIYFAAEDTNFCIRNCCGRSRPFTLRITDNVGREVITLERPLRCNCCCCPCCLQEIEIQAPPGVPVGYVTQTWHPCLTKFTIKNQKREDVLKISGPCIVCSCIAGVDFEITSLDEQIVVGRISKHWSGFLREAFTDADNFGIQFPRDLDVKMKAVMIGACFLIDYMFFERTR

SEQ ID NO: 33399 - protein, 224 aa, Homo sapiens
MPAPPPPLNCPPGLEYLSQIDMILIHQQIELLEVLFSFESSNMYEIKNSFGQRIYFAAEDTNFCIRNCCGRSRPFTLRITDNVGREVITLERPLRCNCCCCPCCLQEIEIQAPPGVPVGYVTQTWHPCLTKFTIKNQKREDVLKISGPCIVCSCIAGVDFEITSLDEQIVVGRISKHWSGFLREAFTDADNFGIQFPRDLDVKMKAVMIGACFLIDYMFFERTR

SEQ ID NO: 33400 - protein, 293 aa, Homo sapiens
MKPFQIHLPGPPGHIVYPKHQAGHTGKQADHLGSQAFYPGRQHDYLVPPAGTAGIPVQNQPGRPEGVPWMPAPPPPLNCPPGLEYLSQIDMILIHQQIELLEVLFSFESSNMYEIKNSFGQRIYFAAEDTNFCIRNCCGRSRPFTLRITDNVGREVITLERPLRCNCCCCPCCLQEIEIQAPPGVPVGYVTQTWHPCLTKFTIKNQKREDVLKISGPCIVCSCIAGVDFEITSLDEQIVVGRISKHWSGFLREAFTDADNFGIQFPRDLDVKMKAVMIGACFLIDYMFFERTR

SEQ ID NO: 33401 - protein, 1076 aa, Homo sapiens
MKSRFSTIDLRAVLAELNASLLGMRVNNVYDVDNKTYLIRLQKPDFKATLLLESGIRIHTTEFEWPKNMMPSSFAMKCRKHLKSRRLVSAKQLGVDRIVDFQFGSDEAAYHLIIELYDRGNIVLTDYEYVILNILRFRTDEADDVKFAVRERYPLDHARAAEPLLTLERLTEIVASAPKGELLKRVLNPLLPYGPALIEHCLLENGFSGNVKVDEKLETKDIEKVLVSLQKAEDYMKTTSNFSGKGYIIQKREIKPSLEADKPVEDILTYEEFHPFLFSQHSQCPYIEFESFDKAVDEFYSKIEGQKIDLKALQQEKQALKKLDNVRKDHENRLEALQQAQEIDKLKGELIEMNLQIVDRAIQVVRSALANQIDWTEIGLIVKEAQAQGDPVASAIKELKLQTNHVTMLLRNPYLLSEEEDDDVDGDVNVEKNETEPPKGKKKKQKNKQLQKPQKNKPLLVDVDLSLSAYANAKKYYDHKRYAAKKTQKTVEAAEKAFKSAEKKTKQTLKEVQTVTSIQKARKVYWFEKFLWFISSENYLIIGGRDQQQNEIIVKRYLTPGDIYVHADLHGATSCVIKNPTGEPIPPRTLTEAGTMALCYSAAWDARVITSAWWVYHHQVSKTAPTGEYLTTGSFMIRGKKNFLPPSYLMMGFSFLFKVDESCVWRHQGERKVRVQDEDMETLASCTSELISEEMEQLDGGDTSSDEDKEEHETPVEVELMTQVDQEDITLQSGRDELNEELIQEESSEDEGEYEEVRKDQDSVGEMKDEGEETLNYPDTTIDLSHLQPQRSIQKLASKEESSNSSDSKSQSRRHLSAKERREMKKKKLPSDSGDLEALEGKDKEKESTVHIETHQNTSKNVAAVQPMKRGQKSKMKKMKEKYKDQDEEDRELIMKLLGSAGSNKEEKGKKGKKGKTKDEPVKKQPQKPRGGQRVSDNIKKETPFLEVITHELQDFAVDDPHDDKEEQDLDQQGNEENLFDSLTGQPHPEDVLLFAIPICAPYTTMTNYKYKVKLTPGVQKKGKAAKTALNSFMHSKEATAREKDLFRSVKDTDLSRNIPGKVKVSAPNLLNVKRK

SEQ ID NO: 33402 - protein, 276 aa, Homo sapiens
MPKTCQCYVGTKTTNPSAWPSREMKKKKLPSDSGDLEALEGKDKEKESTVHIETHQNTSKNVAAVQPMKRGQKSKMKKMKEKYKDQDEEDRELIMKLLGSAGSNKEEKGKKGKKGKTKDEPVKKQPQKPRGGQRVSDNIKKETPFLEVITHELQDFAVDDPHDDKEEQDLDQQGNEENLFDSLTGQPHPEDVLLFAIPICAPYTTMTNYKYKVKLTPGVQKKGKAAKTALNSFMHSKEATAREKDLFRSVKDTDLSRNIPGKVKVSAPNLLNVKRK

SEQ ID NO: 33403 - protein, 1055 aa, Homo sapiens
MKSRFSTIDLRAVLAELNASLLGMRVNNVYDVDNKTYLIRLQKPDFKATLLLESGIRIHTTEFEWPKNMMPSSFAMKCRKHLKSRRLVSAKQLGVDRIVDFQFGSDEAAYHLIIELYDRGNIVLTDYEYVILNILRFRTDEADDVKFAVRERYPLDHARAAEPLLTLERLTEIVASAPKGELLKRVLNPLLPYGPALIEHCLLENGFSGNVKVDEKLETKDIEKVLVSLQKAEDYMKTTSNFSGKGYIIQKREIKPSLEADKPVEDILTYEEFHPFLFSQHSQCPYIEFESFDKAVDEFYSKIEGQKIDLKALQQEKQALKKLDNVRKDHENRLEALQQAQEIDKLKGELIEMNLQIVDRAIQVVRSALANQIDWTEIGLIVKEAQAQGDPVASAIKELKLQTNHVTMLLRNPYLLSEEEDDDVDGDVNVEKNETEPPKGKKKKQKNKQLQKPQKNKPLLVDVDLSLSAYANAKKYYDHKRYAAKKTQKTVEAAEKAFKSAEKKTKQTLKEVQTVTSIQKARKVYWFEKFLWFISSENYLIIGGRDQQQNEIIVKRYLTPGEPIPPRTLTEAGTMALCYSAAWDARVITSAWWVYHHQVSKTAPTGEYLTTGSFMIRGKKNFLPPSYLMMGFSFLFKVDESCVWRHQGERKVRVQDEDMETLASCTSELISEEMEQLDGGDTSSDEDKEEHETPVEVELMTQVDQEDITLQSGRDELNEELIQEESSEDEGEYEEVRKDQDSVGEMKDEGEETLNYPDTTIDLSHLQPQRSIQKLASKEESSNSSDSKSQSRRHLSAKERREMKKKKLPSDSGDLEALEGKDKEKESTVHIETHQNTSKNVAAVQPMKRGQKSKMKKMKEKYKDQDEEDRELIMKLLGSAGSNKEEKGKKGKKGKTKDEPVKKQPQKPRGGQRVSDNIKKETPFLEVITHELQDFAVDDPHDDKEEQDLDQQGNEENLFDSLTGQPHPEDVLLFAIPICAPYTTMTNYKYKVKLTPGVQKKGKAAKTALNSFMHSKEATAREKDLFRSVKDTDLSRNIPGKVKVSAPNLLNVKRK

SEQ ID NO: 33404 - protein, 1034 aa, Homo sapiens
MKSRFSTIDLRAVLAELNASLLGMRVNNVYDVDNKTYLIRLQKPDFKATLLLESGIRIHTTEFEWPKNMMPSSFAMKGNIVLTDYEYVILNILRFRTDEADDVKFAVRERYPLDHARAAEPLLTLERLTEIVASAPKGELLKRVLNPLLPYGPALIEHCLLENGFSGNVKVDEKLETKDIEKVLVSLQKAEDYMKTTSNFSGKGYIIQKREIKPSLEADKPVEDILTYEEFHPFLFSQHSQCPYIEFESFDKAVDEFYSKIEGQKIDLKALQQEKQALKKLDNVRKDHENRLEALQQAQEIDKLKGELIEMNLQIVDRAIQVVRSALANQIDWTEIGLIVKEAQAQGDPVASAIKELKLQTNHVTMLLRNPYLLSEEEDDDVDGDVNVEKNETEPPKGKKKKQKNKQLQKPQKNKPLLVDVDLSLSAYANAKKYYDHKRYAAKKTQKTVEAAEKAFKSAEKKTKQTLKEVQTVTSIQKARKVYWFEKFLWFISSENYLIIGGRDQQQNEIIVKRYLTPGDIYVHADLHGATSCVIKNPTGEPIPPRTLTEAGTMALCYSAAWDARVITSAWWVYHHQVSKTAPTGEYLTTGSFMIRGKKNFLPPSYLMMGFSFLFKVDESCVWRHQGERKVRVQDEDMETLASCTSELISEEMEQLDGGDTSSDEDKEEHETPVEVELMTQVDQEDITLQSGRDELNEELIQEESSEDEGEYEEVRKDQDSVGEMKDEGEETLNYPDTTIDLSHLQPQRSIQKLASKEESSNSSDSKSQSRRHLSAKERREMKKKKLPSDSGDLEALEGKDKEKESTVHIETHQNTSKNVAAVQPMKRGQKSKMKKMKEKYKDQDEEDRELIMKLLGSAGSNKEEKGKKGKKGKTKDEPVKKQPQKPRGGQRVSDNIKKETPFLEVITHELQDFAVDDPHDDKEEQDLDQQGNEENLFDSLTGQPHPEDVLLFAIPICAPYTTMTNYKYKVKLTPGVQKKGKAAKTALNSFMHSKEATAREKDLFRSVKDTDLSRNIPGKVKVSAPNLLNVKRK

SEQ ID NO: 33405 - protein, 1051 aa, Homo sapiens
MKSRFSTIDLRAVLAELNASLLGMRVNNVYDVDNKTYLIRLQKPDFKATLLLESGIRIHTTEFEWPKNMMPSSFAMKCRKHLKSRRLVSAKQLGVDRIVDFQFGSDEAAYHLIIELYDRGNIVLTDYEYVILNILRFRTDEADDVKFAVRERYPLDHARAAEPLLTLERLTEIVASAPKGELLKRVLNPLLPYGPALIEHCLLENGFSGNVKVDEKLETKGYIIQKREIKPSLEADKPVEDILTYEEFHPFLFSQHSQCPYIEFESFDKAVDEFYSKIEGQKIDLKALQQEKQALKKLDNVRKDHENRLEALQQAQEIDKLKGELIEMNLQIVDRAIQVVRSALANQIDWTEIGLIVKEAQAQGDPVASAIKELKLQTNHVTMLLRNPYLLSEEEDDDVDGDVNVEKNETEPPKGKKKKQKNKQLQKPQKNKPLLVDVDLSLSAYANAKKYYDHKRYAAKKTQKTVEAAEKAFKSAEKKTKQTLKEVQTVTSIQKARKVYWFEKFLWFISSENYLIIGGRDQQQNEIIVKRYLTPGDIYVHADLHGATSCVIKNPTGEPIPPRTLTEAGTMALCYSAAWDARVITSAWWVYHHQVSKTAPTGEYLTTGSFMIRGKKNFLPPSYLMMGFSFLFKVDESCVWRHQGERKVRVQDEDMETLASCTSELISEEMEQLDGGDTSSDEDKEEHETPVEVELMTQVDQEDITLQSGRDELNEELIQEESSEDEGEYEEVRKDQDSVGEMKDEGEETLNYPDTTIDLSHLQPQRSIQKLASKEESSNSSDSKSQSRRHLSAKERREMKKKKLPSDSGDLEALEGKDKEKESTVHIETHQNTSKNVAAVQPMKRGQKSKMKKMKEKYKDQDEEDRELIMKLLGSAGSNKEEKGKKGKKGKTKDEPVKKQPQKPRGGQRVSDNIKKETPFLEVITHELQDFAVDDPHDDKEEQDLDQQGNEENLFDSLTGQPHPEDVLLFAIPICAPYTTMTNYKYKVKLTPGVQKKGKAAKTALNSFMHSKEATAREKDLFRSVKDTDLSRNIPGKVKVSAPNLLNVKRK

SEQ ID NO: 33406 - protein, 597 aa, Homo sapiens
MPSPQLLVLFGSQTGTAQDVSERLGREARRRRLGCRVQALDSYPVVNLINEPLVIFVCATTGQGDPPDNMKNFWRFIFRKNLPSTALCQMDFAVLGLGDSSYAKFNFVAKKLHRRLLQLGGSALLPVCLGDDQHELGPDAAVDPWLRDLWDRVLGLYPPPPGLTEIPPGVPLPSKFTLLFLQEAPSTGSEGQRVAHPGSQEPPSESKPFLAPMISNQRVTGPSHFQDVRLIEFDILGSGISFAAGDVVLIQPSNSAAHVQRFCQVLGLDPDQLFMLQPREPDVSSPTRLPQPCSMRHLVSHYLDIASVPRRSFFELLACLSLHELEREKLLEFSSAQGQEELFEYCNRPRRTILEVLCDFPHTAAAIPPDYLLDLIPVIRPRAFSIASSLLTHPSRLQILVAVVQFQTRLKEPRRGLCSSWLASLDPGQGPVRVPLWVRPGSLAFPETPDTPVIMVGPGTGVAPFRAAIQERVAQGQTGNFLFFGCRWRDQDFYWEAEWQELEKRDCLTLIPAFSREQEQKVYVQHRLRELGSLVWELLDRQGAYFYLAGNAKSMPADVSEALMSIFQEEGGLCSPDAAAYLARLQQTRRFQTETWA

SEQ ID NO: 33407 - protein, 606 aa, Homo sapiens
MPSPQLLVLFGSQTGTAQDVSERLGREARRRRLGCRVQALDSYPVVNLINEPLVIFVCATTGQGDPPDNMKNFWRFIFRKNLPSTALCQMDFAVLGLGDSSYAKFNFVAKKLHRRLLQLGGSALLPVCLGDDQHELGPDAAVDPWLRDLWDRVLGLYPPPPGLTEIPPGVPLPSKFTLLFLQEAPSTGSEGQRVAHPGSQEPPSESKPFLAPMISNQRVTGPSHFQDVRLIEFDILGSGISFAAGDVVLIQPSNSAAHVQRFCQVLGLDPDQLFMLQPREPDVSSPTRLPQPCSMRHLVSHYLDIASVPRRSFFELLACLSLHELEREKLLEFSSAQGQEELFEYCNRPRRTILEVLCDFPHTAAAIPPDYLLDLIPVIRPRAFSIASSLLTHPSRLQILVAVVQFQTRLKEPRRGLCSSWLASLDPGQGPVRVPLWVRPGSLAFPETPDTPVIMVGPGTGVAPFRAAIQERVAQGQTGNFLFFGCRWRDQDFYWEAEWQELEKRDCLTLIPAFSREQPPALFSALQEQKVYVQHRLRELGSLVWELLDRQGAYFYLAGNAKSMPADVSEALMSIFQEEGGLCSPDAAAYLARLQQTRRFQTETWA

SEQ ID NO: 33408 - protein, 521 aa, Homo sapiens
MPSPQLLVLFGSQTGTAQDVSERLGREARRRRLGCRVQALDSYPVVNLINEPLVIFVCATTGQGDPPDNMKNFWRFIFRKNLPSTALCQMDFAVLGLGDSSYAKFNFVAKKLHRRLLQLGGSALLPVCLGDDQHELGLPSKFTLLFLQEAPSTGSEGQRVAHPGSQEPPSESKPFLAPMISNQRVTGPSHFQDVRLIEFDILGSGISFAAGDVVLIQPSNSAAHVQRFCQVLGLDPDQLFMLQPREPDVSSPTRLPQPCSMRHLVSHYLDIASVPRRSFFELLACLSLHELEREKLLEFSSAQGQEELFEYCNRPRRTILEVLCDFPHTAAAIPPDYLLDLIPVIRPRAFSIASSLLTHPSRLQILVAVVQFQTRLKEPRRGLCSSWLASLDPGQGPVRVPLWVRPGSLAFPETPDTPVIMVGPGTGVAPFRAAIQERVAQGQTGNFLFFGCRWRDQDFYWEAEWQELEKRDCLTLIPAFSREQEQKVYVQHRLRELGSLVWELLDRQATPSPCQRTSRKP

SEQ ID NO: 33409 - protein, 590 aa, Homo sapiens
MPSPQLLVLFGSQTGTAQDVSERLGREARRRRLGCRVQALDSYPVVNLINEPLVIFVCATTGQGDPPDNMKNFWRFIFRKNLPSTALCQMDFAVLGLGDSSYAKFNFVAKKLHRRLLQLGGSALLPVCLGDDQHELGPDAAVDPWLRDLWDRVLGLYPPPPGLTEIPPGVPLPSKFTLLFLQEAPSTGSEGQRVAHPGSQEPPSESKPFLAPMISNQRVTGPSHFQDVRLIEFDILGSGISFAAGDVVLIQPSNSAAHVQRFCQVLGLDPDQLFMLQPREPDVSSPTRLPQPCSMRHLVSHYLDIASVPRRSFFELLACLSLHELEREKLLEFSSAQGQEELFEYCNRPRRTILEVLCDFPHTAAAIPPDYLLDLIPVIRPRAFSIASSLLILVAVVQFQTRLKEPRRGLCSSWLASLDPGQGPVRVPLWVRPGSLAFPETPDTPVIMVGPGTGVAPFRAAIQERVAQGQTGNFLFFGCRWRDQDFYWEAEWQELEKRDCLTLIPAFSREQEQKVYVQHRLRELGSLVWELLDRQGAYFYLAGNAKSMPADVSEALMSIFQEEGGLCSPDAAAYLARLQQTRRFQTETWA

SEQ ID NO: 33410 - protein, 180 aa, Homo sapiens
MRPLTEEETRVMFEKIAKYIGENLQLLVDRPDGTYCFRLHNDRVYYVSEKIMKLAANISGDKLVSLGTCFGKFTKTHKFRLHVTALDYLAPYAKYKVWIKPGAEQSFLYGNHVLKSGLGRITENTSQYQGVVVYSMADIPLGFGVAAKSTQDCRKVDPMAIVVFHQADIGEYVRHEETLT

SEQ ID NO: 33411 - protein, 133 aa, Homo sapiens
MRPLTEEETRVMFEKIAKYIGENLQLLVDRPDGTYCFRLHNDRVYYVSEKIMKLAANISGDKLVSLGTCFGKFTKTHKFRLHVTALDYLAPYAKGFGVAAKSTQDCRKVDPMAIVVFHQADIGEYVRHEETLT

SEQ ID NO: 33412 - protein, 145 aa, Homo sapiens
MELVQVLKRGLQQITGHGGLRGYLRVFFRTNDAKVGTLVGEDKYGNKYYEDNKQFFGRHRWVVYTTEMNGKNTFWDVDGSMVPPEWHRWLHSMTDDPPTTKPLTARKFIWTNHKFNVTGTPEQYVPYSTTRKKIQEWIPPSTPYK

SEQ ID NO: 33413 - protein, 63 aa, Homo sapiens
MELVQVLKRGLQQITGHGGLRGYLRVFFRTNDAKVGTLVGEDKYGNKYYEDNKQFFGIVGFTV

SEQ ID NO: 33414 - protein, 456 aa, Homo sapiens
MPPGPWESCFWVGGLILWLSVGSSGDAPPTPQPKCADFQSANLFEGTDLKVQFLLFVPSNPSCGQLVEGSSDLQNSGFNATLGTKLIIHGFRVLGTKPSWIDTFIRTLLRATNANVIAVDWIYGSTGVYFSAVKNVIKLSLEISLFLNKLLVLGVSESSIHIIGVSLGAHVGGMVGQLFGGQLGQITGLDPAGPEYTRASVEERLDAGDALFVEAIHTDTDNLGIRIPVGHVDYFVNGGQDQPGCPTFFYAGYSYLICDHMRAVHLYISALENSCPLMAFPCASYKAFLAGRCLDCFNPFLLSCPRIGLVEQGGVKIEPLPKEVKVYLLTTSSAPYCMHHSLVEFHLKELRNKDTNIEVTFLSSNITSSSKITIPKQQRYGKGIIAHATPQCQINQVKFKFQSSNRVWKKDRTTIIGKFCTALLPVNDREKMVCLPEPVNLQASVTVSCDLKIACV

SEQ ID NO: 33415 - protein, 376 aa, Homo sapiens
MPPGPWESCFWVGGLILWLSVGSSGDAPPTPQPKCADFQSANLFEGTDLKVQFLLFVPSNPSCGQLVEGSSDLQNSGFNATLGTKLIIHGFRVLGTKPSWIDTFIRTLLRATNANVIAVDWIYGSTGVYFSAVKNVIKLSLEISLFLNKLLVLGVSESSIHIIGVSLGAHVGGMVGQLFGGQLGQITGLDPAGPEYTRASVEERLDAGDALFVEAIHTDTDNLGIRIPVGHVDYFVNGGQDQPGCPTFFYAGYSYLICDHMRAVHLYISALENSCPLMAFPCASYKAFLAGRCLDCFNPFLLSCPRIGLVEQGGVKIEPLPKEVKVYLLTTSSAPYCMHHSLVEFHLKELRNKDTNIEVTFLSSNITSSSKITMYT

SEQ ID NO: 33416 - protein, 440 aa, Homo sapiens
MPPGPWESCFWVGGLILWLSVGSSGDAPPTPQPKCADFQSANLFEGTDLKVQFLLFVPSNPSCGQLVEGSSDLQNSGFNATLGTKLIIHGFRVLGTKPSWIDTFIRTLLRATNANVIAVDWIYGSTGVYFSAVKNVLGVSESSIHIIGVSLGAHVGGMVGQLFGGQLGQITGLDPAGPEYTRASVEERLDAGDALFVEAIHTDTDNLGIRIPVGHVDYFVNGGQDQPGCPTFFYAGYSYLICDHMRAVHLYISALENSCPLMAFPCASYKAFLAGRCLDCFNPFLLSCPRIGLVEQGGVKIEPLPKEVKVYLLTTSSAPYCMHHSLVEFHLKELRNKDTNIEVTFLSSNITSSSKITIPKQQRYGKGIIAHATPQCQINQVKFKFQSSNRVWKKDRTTIIGKFCTALLPVNDREKMVCLPEPVNLQASVTVSCDLKIACV

SEQ ID NO: 33417 - protein, 283 aa, Homo sapiens
MVGQLFGGQLGQITGLDPAGPEYTRASVEERLDAGDALFVEAIHTDTDNLGIRIPVGHVDYFVNGGQDQPGCPTFFYAGYSYLICDHMRAVHLYISALENSCPLMAFPCASYKAFLAGRCLDCFNPFLLSCPRIGLVEQGGVKIEPLPKEVKVYLLTTSSAPYCMHHSLVEFHLKELRNKDTNIEVTFLSSNITSSSKITIPKQQRYGKGIIAHATPQCQINQVKFKFQSSNRVWKKDRTTIIGKFCTALLPVNDREKMVCLPEPVNLQASVTVSCDLKIACV

SEQ ID NO: 33418 - protein, 380 aa, Homo sapiens
MASLPVLQKESVFQSGAHAYRIPALLYLPGQQSLLAFAEQRASKKDEHAELIVLRRGDYDAPTHQVQWQAQEVVAQARLDGHRSMNPCPLYDAQTGTLFLFFIAIPGQVTEQQQLQTRANVTRLCQVTSTDHGRTWSSPRDLTDAAIGPAYREWSTFAVGPGHCLQLHDRARSLVVPAYAYRKLHPIQRPIPSAFCFLSHDHGRTWARGHFVAQDTLECQVAEVETGEQRVVTLNARSHLRARVQAQSTNDGLDFQESQLVKKLVEPPPQGCQGSVISFPSPRSGPGSPAQWLLYTHPTHSWQRADLGAYLNPRPPAPEAWSEPVLLAKGSCAYSDLQSMGTGPDGSPLFGCLYEANDYEEIVFLMFTLKQAFPAEYLPQ

SEQ ID NO: 33419 - protein, 2271 aa, Homo sapiens
MGVPKRKASGGQDGAASSAGAAKRARKEELTGVRFKAQLKDPQGPGPGLEAFVSAAKKLPREDVYDVVEGYIKISVECVEIFQLLSGEKRPESETMLIFQVFEAILLRTASDLSHFHVVGTNIVKKLMNNHMKLICESLYASGYRLARACLSLMTAMVTQGPEAARDVCSHFDLNKKTLYTLVTKRDSKGVYDVRQAYVQFALSFLIAGDDSTIVQVLEVKEFIPCIFSSGIKEDRISTINILLSTLKTKVVHNKNITKTQKVRFFTGQLLNHIASLYNWNGITDVNPENVKVSAEEAGKTMVRELVHNFLMDLCCSLKHGINFYDASLGTFGRGGNLTLLHFLLGLKTAADDDLVADLVVNILKVCPDLLNKYFKEVTFSFIPRAKSTWLNNIKLLNKIYEAQPEISRAFQTREFIPLPRLLAMVMVTTVPLVCNKSMFTQALNLDSTSVRHTALSLISVILKRALKTVDHCLNKEVWQESGVYTAVMMEEFVQLFREALSKILPDLNTVVWVWQSLKKQETKQDDKKGQKRSDGPPAACDAHQCDDAETILLKAVLLQVICLYQKVVPHVVMQYNFDFSKLLKGVISEQGLREEVPPILQHHMLKVALELPASKFLWLKAQEGPDAEIIGGERSVFYLLMKMFVTSSHLQLKSLTKLLIMKILRDTGVFEHTWKELELWLEHLENTMEEDKETVIQFLERILLTLVANPYSYTDKASDFVQEASMLQATMTKQEADDMSIPISHIDDVLDMVDVLVEGSEGLDEEIGFTLSEDMILLTFPFSAVVPAALEARNKLLLGTGNEAAENVVTYLTAVLTDLLHTQRDPLALCLLLQAYDKLEPPCLVPCCQQLSRFNRYYSLWIPEQAREAWLLQAQGSPSPPALPLASSFTALLQAAYESQALRDEHIQVQLQATMPHLSMQQVLLAAKQVLLYLRSTVENFGQLGRSVGPPLLQLFLDLLRRLVVHCEQLDAQNQQRCEAARAEADLFLDMESVASLELANDQTLEEVLVAILRHPTLEGWFLALEQQALPPHTLSPVLVKLLATHFSAGVLQLLAASAPILQNIGQLGLLARYSEAITQSVLKELQNRRAGPATSPPKTPPQLEALQELHPYMEGAQLREVTLALLSLPETHLVTQQPTKSPGKERHLNALGKTLVQLLTCSPQDQLQSGELLWSSEYVRGLGALLPTLAVDELDTVLLHTLQRDPVLAPAVGADLLDYCLARRTQAALSIAALLLQESCTHLLWFEQWCLQAGPGLGLQGDLDDFLPLIHVYLQCRTRSHFTRPAGVSSAVIPVLRKTLWRQLQSRLLSTDSPPASGLYQEILAQLVPFARAKDLSVLMDRLPSLLHTPSSHKRWIVADSISAALEGSAEELCAWRRTLLESCVKWLIVSFSGGQQDDDNTQNQEKEMLLRLNALLHALNEVDPGDWQKFVKKGLKFRYQDHTFLKMLLTAVQLLYSPESSVRTKLIQLPVVYVMLMQHSLFLPTLLTSDGEESPDSQVKEALVDLMLTVVEMCPSVCESSHFAVLLGAYGATLSVLDQKILLLLRAYEQNKLSLINFRVLLWGPAAVEHHKTCRSLGRSLWQQPSVGDILRLLDRDRMMQTILHFPQNRRLLPPEDTQELIFKDKSRVDLDGLYDPCFLLQLFSELTRPEFVVDCRKFLDSNALGLTVTALSSYDPQMRAIAYHVLAAYYSHLEGARFQEQSQLLYLLDVVRNGIRTQDMRLTFTLALFIAKAALQILKPEEHMYLKVSNFLLSHEYLNMDKVPGFYQFFYSSDFEQKTEQKWVFGVLRQGIRDKQCYELCARRGIFHIILSFFHSPLCDEAAQNWILEILQNAAQVARSAYEIIRDYSLLTWILHILESKFLETPLLSNVISLLHTLWVTNLGDKAVEWESQRLCQPSSQEPAKRLALHLVNEFLYVLIVLMKHLRPTLAPVQLTNFFGTLDSVLRYRATVIQAFRDMNRFTVNETVLSTKDVLVLLHKWSLIERDLKLQEDLRAAIEKAQARELMKMLKDKNKPVMPARAKGPRGRKRRPGEAEEMADPELMASTLETCKGLLRSILTYWRPVIPGPDPTQEPVDSASPESDAPGPVYAAASLAVSWVLRSVAEHPLSRAEAAGLIGWLKSHILPHPVVVADLLKDSAVRSSIFRLYSRLCGAEGLAGPVQEVACLFNTVMLQLVAAQGRAGSPFHPAMEALSLSSLSEKDEATQASAAFLVSLYIKDIWLGAQRPDTLLTHVRMVCEAADDAPSSEEEAIVVLCKDAASAASDA

SEQ ID NO: 33420 - protein, 605 aa, Homo sapiens
MMDLELPPPGLPSQQDMDLIDILWRQDIDLGVSREVFDFSQRRKEYELEKQKKLEKERQEQLQKEQEKAFFAQLQLDEETGEFLPIQPAQHIQSETSGSANYSQVAHIPKSDALYFDDCMQLLAQTFPFVDDNEVSSATFQSLVPDIPGHIESPVFIATNQAQSPETSVAQVAPVDLDGMQQDIEQVWEELLSIPELQCLNIENDKLVETTMVPSPEAKLTEVDNYHFYSSIPSMEKEVGNCSPHFLNAFEDSFSSILSTEDPNQLTVNSLNSDATVNTDFGDEFYSAFIAEPSISNSMPSPATLSHSLSELLNGPIDVSDLSLCKAFNQNHPESTAEFNDSDSGISLNTSPSVASPEHSVESSSYGDTLLGLSDSEVEELDSAPGSVKQNGPKTPVHSSGDMVQPLSPSQGQSTHVHDAQCENTPEKELPVSPGHRKTPFTKDKHSSRLEAHLTRDELRAKALHIPFPVEKIINLPVVDFNEMMSKEQFNEAQLALIRDIRRRGKNKVAAQNCRKRKLENIVELEQDLDHLKDEKEKLLKEKGENDKSLHLLKKQLSTLYLEVFSMLRDEDGKPYSPSEYSLQQTRDGNVFLVPKSKKPDVKKN

SEQ ID NO: 33421 - protein, 589 aa, Homo sapiens
MDLIDILWRQDIDLGVSREVFDFSQRRKEYELEKQKKLEKERQEQLQKEQEKAFFAQLQLDEETGEFLPIQPAQHIQSETSGSANYSQVAHIPKSDALYFDDCMQLLAQTFPFVDDNEVSSATFQSLVPDIPGHIESPVFIATNQAQSPETSVAQVAPVDLDGMQQDIEQVWEELLSIPELQCLNIENDKLVETTMVPSPEAKLTEVDNYHFYSSIPSMEKEVGNCSPHFLNAFEDSFSSILSTEDPNQLTVNSLNSDATVNTDFGDEFYSAFIAEPSISNSMPSPATLSHSLSELLNGPIDVSDLSLCKAFNQNHPESTAEFNDSDSGISLNTSPSVASPEHSVESSSYGDTLLGLSDSEVEELDSAPGSVKQNGPKTPVHSSGDMVQPLSPSQGQSTHVHDAQCENTPEKELPVSPGHRKTPFTKDKHSSRLEAHLTRDELRAKALHIPFPVEKIINLPVVDFNEMMSKEQFNEAQLALIRDIRRRGKNKVAAQNCRKRKLENIVELEQDLDHLKDEKEKLLKEKGENDKSLHLLKKQLSTLYLEVFSMLRDEDGKPYSPSEYSLQQTRDGNVFLVPKSKKPDVKKN

SEQ ID NO: 33422 - protein, 582 aa, Homo sapiens
MDLIDILWRQDIDLGVSREVFDFSQRRKEYELEKQKKLEKERQEQLQKEQEKAFFAQLQLDEETGEFLPIQPAQHIQSETSGSANYSQVAHIPKSDALYFDDCMQLLAQTFPFVDDNESLVPDIPGHIESPVFIATNQAQSPETSVAQVAPVDLDGMQQDIEQVWEELLSIPELQCLNIENDKLVETTMVPSPEAKLTEVDNYHFYSSIPSMEKEVGNCSPHFLNAFEDSFSSILSTEDPNQLTVNSLNSDATVNTDFGDEFYSAFIAEPSISNSMPSPATLSHSLSELLNGPIDVSDLSLCKAFNQNHPESTAEFNDSDSGISLNTSPSVASPEHSVESSSYGDTLLGLSDSEVEELDSAPGSVKQNGPKTPVHSSGDMVQPLSPSQGQSTHVHDAQCENTPEKELPVSPGHRKTPFTKDKHSSRLEAHLTRDELRAKALHIPFPVEKIINLPVVDFNEMMSKEQFNEAQLALIRDIRRRGKNKVAAQNCRKRKLENIVELEQDLDHLKDEKEKLLKEKGENDKSLHLLKKQLSTLYLEVFSMLRDEDGKPYSPSEYSLQQTRDGNVFLVPKSKKPDVKKN

SEQ ID NO: 33423 - protein, 75 aa, Homo sapiens
MNPLEMQRKGPPRRWCLQVYPTAPKRQRPSRTGHDDDGGFVEKKRGKCGEKQERSDCYCVCVERSRHGRLHFVMC

SEQ ID NO: 33424 - protein, 1048 aa, Homo sapiens
MSNKTGGKRPATTNSDIPNHNMVSEVPPERPSVRATRTARKAVAFGKRSHSMKRNPNAPVTKAGWLFKQASSGVKQWNKRWFVLVDRCLFYYKDEKEESILGSIPLLSFRVAAVQPSDNISRKHTFKAEHAGVRTYFFSAESPEEQEAWIQAMGEAARVQIPPAQKSVPQAVRHSHEKPDSENVPPSKHHQQPPHNSLPKPEPEAKTRGEGDGRGCEKAERRPERPEVKKEPPVKANGLPAGPEPASEPGSPYPEGPRVPGGGEQPAQPNGWQYHSPSRPGSTAFPSQDGETGGHRRSFPPRTNPDKIAQRKSSMNQLQQWVNLRRGVPPPEDLRSPSRFYPVSRRVPEYYGPYSSQYPDDYQYYPPGVRPESICSMPAYDRISPPWALEDKRHAFRNGGGPAYQLREWKEPASYGRQDATVWIPSPSRQPVYYDELDAASSSLRRLSLQPRSHSVPRSPSQGSYSRARIYSPVRSPSARFERLPPRSEDIYADPAAYVMRRSISSPKVPPYPEVFRDSLHTYKLNEQDTDKLLGKLCEQNKVVREQDRLVQQLRAEKESLESALMGTHQELEMFGSQPAYPEKLRHKKDSLQNQLINIRVELSQATTALTNSTIEYEHLESEVSALHDDLWEQLNLDTQNEVLNRQIQKEIWRIQDVMEGLRKNNPSRGTDTAKHRGGLGPSATYSSNSPASPLSSASLTSPLSPFSLVSGSQGSPTKPGSNEPKANYEQSKKDPHQTLPLDTPRDISLVPTRQEVEAEKQAALNKVGVVPPRTKSPTDDEVTPSAVVRRNASGLTNGLSSQERPKSAVFPGEGKVKMSVEEQIDRMRRHQSGSMREKRRSLQLPASPAPDPSPRPAYKVVRRHRSIHEVDISNLEAALRAEEPGGHAYETPREEIARLRKMELEPQHYDVDINKELSTPDKVLIPERYIDLEPDTPLSPEELKEKQKKVERIKTLIAKSSMQNVVPIGEGDSVDVPQDSESQLQEQEKRIEISCALATEASRRGRMLSVQCATPSPPTSPASPAPPANPLSSESPRGADSSYTMRV

SEQ ID NO: 33425 - protein, 383 aa, Homo sapiens
MAAVAPAGPGDSASAALDELSLNFTYGAPGAGNGSLSGDWYRRNQIHLFGVLLAILGNLVISISLNIQKYSHLQLAQQEHPRPYFKSVLWWGGVLLMAVGETGNFAAYGFAPITLIAPLGCVSVTGSAIISVTFLKDNLRASDLLGTTLAFAGTYLLVNFAPNITQAISARTVQYYLVGWQFLIYVILEILIFCILLYFYKRKGMKHMVILLTLVAILASLTVISVKAVSGMITFSVMDKMQLTYPIFYIMFIIMIASCVFQVKFLNQATKLYNTTTVVPVNHIFFTISAIIAGIIFYQEFLGAPFLTVFIYLFGCFLSFLGVFLVTRNREKEHLQQSYIDFGNIPGKQMLDKIQPDSHSLSYGTLPDGSDSTKSQSGEKKEV

SEQ ID NO: 33426 - protein, 368 aa, Homo sapiens
MAAVAPAGPGDSASAALDELSLNFTYGAPGAGNGSLSGDWYRRNQIHLFGVLLAILGNLVISISLNIQKYSHLQLAQQEHPRPYFKSVLWWGGVLLMAVGETGNFAAYGFAPITLIAPLGCVSVTGSAIISVTFLKDNLRASDLLGTTLAFAGTYLLVNFAPNITQAISARTVQYYLVGWQFLIYVILEILIFCILLYFYKRKGMKHMVILLTLVAILASLTVISVKAVSGMITFSVMDKMQLTYPIFYIMFIIMIASCVFQVKFLNQATKLYNTTTVVPVNHIFFTISAIIAGIIFYQEFLGAPFLTVFIYLFGCFLSFLGVFLVTRNREKEHLQQSYIDFGNIPDTTPERKAWRETNVGQNTTRFT

SEQ ID NO: 33427 - protein, 757 aa, Homo sapiens
MSRKISKESKKVNISSSLESEDISLETTVPTDDISSSEEREGKVRITRQLIERKELLHNIQLLKIELSQKTMMIDNLKVDYLTKIEELEEKLNDALHQKQLLTLRLDNQLAFQQKDASKYQELMKQEMETILLRQKQLEETNLQLREKAGDVRRNLRDFELTEEQYIKLKAFPEDQLSIPEYVSVRFYELVNPLRKEICELQVKKNILAEELSTNKNQLKQLTETYEEDRKNYSEVQIRCQRLALELADTKQLIQQGDYRQENYDKVKSERDALEQEVIELRRKHEILEASHMIQTKERSELSKEVVTLEQTVTLLQKDKEYLNRQNMELSVRCAHEEDRLERLQAQLEESKKAREEMYEKYVASRDHYKTEYENKLHDELEQIRLKTNQEIDQLRNASREMYERENRNLREARDNAVAEKERAVMAEKDALEKHDQLLDRYRELQLSTESKVTEFLHQSKLKSFESERVQLLQEETARNLTQCQLECEKYQKKLEVLTKEFYSLQASSEKRITELQAQNSEHQARLDIYEKLEKELDEIIMQTAEIENEDEAERVLFSYGYGANVPTTAKRRLKQSVHLARRVLQLEKQNSLILKDLEHRKDQVTQLSQELDRANSLLNQTQQPYRYLIESVRQRDSKIDSLTESIAQLEKDVSNLNKEKSALLQTKNQMALDLEQLLNHREELAAMKQILVKMHSKHSENSLLLTKTEPKHVTENQKSKTLNVPKEHEDNIFTPKPTLFTKKEAPEWSKKQKMKT

SEQ ID NO: 33428 - protein, 216 aa, Homo sapiens
MQTAEIENEDEAERVLFSYGYGANVPTTAKRRLKQSVHLARRVLQLEKQNSLILKDLEHRKDQVTQLSQELDRANSLLNQTQQPYRYLIESVRQRDSKIDSLTESIAQLEKDVSNLNKEKSALLQTKNQMALDLEQLLNHREELAAMKQILVKMHSKHSENSLLLTKTEPKHVTENQKSKTLNVPKEHEDNIFTPKPTLFTKKEAPEWSKKQKMKT

SEQ ID NO: 33429 - protein, 103 aa, Homo sapiens
MSRKISKESKKVNISSSLESEDISLETTVPTDDISSSEEREGKVRITRQLIERKELLHNIQLLKIELSQKTMMIDNLKVDYLTKIEELEEKLNDALHQKQQTF

SEQ ID NO: 33430 - protein, 298 aa, Homo sapiens
MSRKISKESKKVNISSSLESEDISLETTVPTDDISSSEEREGKVRITRQLIERKELLHNIQLLKIELSQKTMMIDNLKVDYLTKIEELEEKLNDALHQKQLLTLRLDNQLAFQQKDASKYQELMKQEMETILLRQKQLEETNLQLREKAGDVRRNLRDFELTEEQYIKLKAFPEDQLSIPEYVSVRFYELVNPLRKEICELQVKKNILAEELSTNKNQLKQLTEELAAMKQILVKMHSKHSENSLLLTKTEPKHVTENQKSKTLNVPKEHEDNIFTPKPTLFTKKEAPEWSKKQKMKT

SEQ ID NO: 33431 - protein, 652 aa, Homo sapiens
MSGQSLTDRITAAQHSVTGSAVSKTVCKATTHEIMGPKKKHLDYLIQCTNEMNVNIPQLADSLFERTTNSSWVVVFKSLITTHHLMVYGNERFIQYLASRNTLFNLSNFLDKSGLQGYDMSTFIRRYSRYLNEKAVSYRQVAFDFTKVKRGADGVMRTMNTEKLLKTVPIIQNQMDALLDFNVNSNELTNGVINAAFMLLFKDAIRLFAAYNEGIINLLEKYFDMKKNQCKEGLDIYKKFLTRMTRISEFLKVAEQVGIDRGDIPDLSQAPSSLLDALEQHLASLEGKKIKDSTAASRATTLSNAVSSLASTGLSLTKVDEREKQAALEEEQARLKALKEQRLKELAKKPHTSLTTAASPVSTSAGGIMTAPAIDIFSTPSSSNSTSKLPNDLLDLQQPTFHPSVHPMSTASQVASTWGDPFSATVDAVDDAIPSLNPFLTKSSGDVHLSISSDVSTFTTRTPTHEMFVGFTPSPVAQPHPSAGLNVDFESVFGNKSTNVIVDSGGFDELGGLLKPTVASQNQNLPVAKLPPSKLVSDDLDSSLANLVGNLGIGNGTTKNDVNWSQPGEKKLTGGSNWQPKVAPTTAWNAATMAPPVMAYPATTPTGMIGYGIPPQMGSVPVMTQPTLIYSQPVMRPPNPFGPVSGAQIQFM

SEQ ID NO: 33432 - protein, 632 aa, Homo sapiens
MSGQSLTDRITAAQHSVTGSAVSKTVCKATTHEIMGPKKKHLDYLIQCTNEMNVNIPQLADSLFERTTNSSWVVVFKSLITTHHLMVYGNERFIQYLASRNTLFNLSNFLDKSGLQGYDMSTFIRRYSRYLNEKAVSYRQVAFDFTKVKRGADGVMRTMNTEKLLKTVPIIQNQMDALLDFNVNSNELTNGVINAAFMLLFKDAIRLFAAYNEGIINLLEKYFDMKKNQCKEGLDIYKKFLTRMTRISEFLKVAEQVGIDRGDIPDLSQAPSSLLDALEQHLASLEGKKIKDSTAASRATTLSNAVSSLASTGLSLTKVDEREKQAALEEEQARLKALKEQRLKELAKKPHTSLTTAASPVSTSAGGIMTAPAIDIFSTPSSSNSTSKLPNDLLDLQQPTFHPSVHPMSTASQVASTWGDPFSATVDAVDDAIPSLNPFLTKSSGDVHLSISSDVSTFTTRTPTHEMFVGFTPSPVAQPHPSAGLNVDFESVFGNKSTNVIVDSGGFDELGGLLKPTVASQNQNLPVAKLPPSKLVSDDLDSSLANLVGNLGIGNGTTKNDVNWSQPGEKKLTGGSNWQPKVAPTTAWNAATMPPQMGSVPVMTQPTLIYSQPVMRPPNPFGPVSGAQIQFM

SEQ ID NO: 33433 - protein, 610 aa, Homo sapiens
MSGQSLTDRITAAQHSVTGSAVSKTVCKATTHEIMGPKKKHLDYLIQCTNEMNVNIPQLADSLFERTTNSSWVVVFKSLITTHHLMVYGNERFIQYLASRNTLFNLSNFLDKSGLQGYDMSTFIRRYSRYLNEKAVSYRQVAFDFTKVKRGADGVMRTMNTEKLLKTVPIIQNQMDALLDFNVNSNELTNGVINAAFMLLFKDAIRLFAAYNEGIINLLEKYFDMKKNQCKEGLDIYKKFLTRMTRISEFLKVAEQVGIDRGDIPDLSQAPSSLLDALEQHLASLEGKKIKDSTAASRATTLSNAVSSLASTGLSLTKVDEREKQAALEEEQARLKALKEQRLKELAKKPHTSLTTAASPVSTSAGGIMTAPAIDIFSTPSSSNSTSKLPNDLLDLQQPTFHPSVHPMSTASQVASTWGGFTPSPVAQPHPSAGLNVDFESVFGNKSTNVIVDSGGFDELGGLLKPTVASQNQNLPVAKLPPSKLVSDDLDSSLANLVGNLGIGNGTTKNDVNWSQPGEKKLTGGSNWQPKVAPTTAWNAATMNGMHFPQYAPPVMAYPATTPTGMIGYGIPPQMGSVPVMTQPTLIYSQPVMRPPNPFGPVSGAQIQFM

SEQ ID NO: 33434 - protein, 551 aa, Homo sapiens
MNVNIPQLADSLFERTTNSSWVVVFKSLITTHHLMVYGNERFIQYLASRNTLFNLSNFLDKSGLQGYDMSTFIRRYSRYLNEKAVSYRQVAFDFTKVKRGADGVMRTMNTEKLLKTVPIIQNQMDALLDFNVNSNELTNGVINAAFMLLFKDAIRLFAAYNEGIINLLEKYFDMKKNQCKEGLDIYKKFLTRMTRISEFLKVAEQVGIDRGDIPDLSQAPSSLLDALEQHLASLEGKKIKDSTAASRATTLSNAVSSLASTGLSLTKVDEREKQAALEEEQARLKALKEQRLKELAKKPHTSLTTAASPVSTSAGGIMTAPAIDIFSTPSSSNSTSKLPNDLLDLQQPTFHPSVHPMSTASQVASTWGGFTPSPVAQPHPSAGLNVDFESVFGNKSTNVIVDSGGFDELGGLLKPTVASQNQNLPVAKLPPSKLVSDDLDSSLANLVGNLGIGNGTTKNDVNWSQPGEKKLTGGSNWQPKVAPTTAWNAATMAPPVMAYPATTPTGMIGYGIPPQMGSVPVMTQPTLIYSQPVMRPPNPFGPVSGAQIQFM

SEQ ID NO: 33435 - protein, 645 aa, Homo sapiens
MSGQSLTDRITAAQHSVTGSAVSKTVCKATTHEIMGPKKKHLDYLIQCTNEMNVNIPQLADSLFERTTNSSWVVVFKSLITTHHLMVYGNERFIQYLASRNTLFNLSNFLDKSGLQGYDMSTFIRRYSRYLNEKAVSYRQVAFDFTKVKRGADGVMRTMNTEKLLKTVPIIQNQMDALLDFNVNSNELTNGVINAAFMLLFKDAIRLFAAYNEGIINLLEKYFDMKKNQCKEGLDIYKKFLTRMTRISEFLKVAEQVGIDRGDIPDLSQAPSSLLDALEQHLASLEGKKIKDSTAASRATTLSNAVSSLASTGLSLTKVDEREKQAALEEEQARLKALKEQRLKELAKKPHTSLTTAASPVSTSAGGIMTAPAIDIFSTPSSSNSTSKLPNDLLDLQQPTFHPSVHPMSTASQVASTWGDAVDDAIPSLNPFLTKSSGDVHLSISSDVSTFTTRTPTHEMFVGFTPSPVAQPHPSAGLNVDFESVFGNKSTNVIVDSGGFDELGGLLKPTVASQNQNLPVAKLPPSKLVSDDLDSSLANLVGNLGIGNGTTKNDVNWSQPGEKKLTGGSNWQPKVAPTTAWNAATMAPPVMAYPATTPTGMIGYGIPPQMGSVPVMTQPTLIYSQPVMRPPNPFGPVSGAQIQFM

SEQ ID NO: 33436 - protein, 501 aa, Homo sapiens
MAAPEPAPRRAREREREREDESEDESDILEESPCGRWQKRREQVNQGNMPGLQSTFLAMDTEEGVEVVWNELHFGDRKAFAAHEEKIQTVFEQLVLVDHPNIVKLHKYWLDTSEACARVIFITEYVSSGSLKQFLKKTKKNHKAMNARAWKRWCTQILSALSFLHACSPPIIHGNLTSDTIFIQHNGLIKIGSVWHRIFSNALPDDLRSPIRAEREELRNLHFFPPEYGEVADGTAVDIFSFGMCALEMAVLEIQTNGDTRVTEEAIARARHSLSDPNMREFILCCLARDPARRPSAHSLLFHRVLFEVHSLKLLAAHCFIQHQYLMPENVVEEKTKAMDLHAVLAELPRPRRPPLQWRYSEVSFMELDKFLEDVRNGIYPLMNFAATRPLGLPRVLAPPPEEVQKAKTPTPEPFDSETRKVIQMQCNLERSEDKARWHLTLLLVLEDRLHRQLTYDLLPTDSAQDLASELVHYGFLHEDDRMKLAAFLESTFLKYRGTQA

SEQ ID NO: 33437 - protein, 293 aa, Homo sapiens
MVLQSQNPAVLKLRGPGPGLAAAAGTPPYGHPCMSCVSLRRDMGNSGATSPRTAGPEQRALAHHQPLLPVPQEFILCCLARDPARRPSAHSLLFHRVLFEVHSLKLLAAHCFIQHQYLMPENVVEEKTKAMDLHAVLAELPRPRRPPLQWRYSEVSFMELDKFLEDVRNGIYPLMNFAATRPLGLPRVLAPPPEEVQKAKTPTPEPFDSETRKVIQMQCNLERSEDKARWHLTLLLVLEDRLHRQLTYDLLPTDSAQDLASELVHYGFLHEDDRMKLAAFLESTFLKYRGTQA

SEQ ID NO: 33438 - protein, 324 aa, Homo sapiens
MVLQSQNPAVLKLRGPGPGLAAAAGTPPYGHPCMSCVSLRRDMGNSGATSPRTAGPEQRALAHHQPLLPVPQEFILCCLARDPARRPSAHSLLFHRVLFEVHSLKLLAAHCFIQHQYLMPENVVEEKTKAMDLHAVLAELPRPRRPPLQWRYSEVSFMELDKFLEDVRNGIYPLMNFAATRPLGLPRVLAPPPEEVQKAKTPTPEPFDSETRKVIQMQCNLERSEDKARWHLTLLLVLEDRLHRQLTYDLLPSRLGRGLGRRAVTPGGGWAAASCLALRHCLSGQRPGPRLGARALWLPPRGRPDEAGRLPGEHLPQVPWDPGL

SEQ ID NO: 33439 - protein, 123 aa, Homo sapiens
MPGLQSTFLAMDTEEGVEVVWNELHFGDRKAFAAHEEKIQTVFEQLVLVDHPNIVKLHKYWLDTSEACARVIFITEYVSSGSLKQFLKKTKKNHKAMNARVWGAGWGSHGDRTGLGQPRGLGW

SEQ ID NO: 33440 - protein, 805 aa, Homo sapiens
MNAVGSPEGQELQKLGSGAWDNPAYSGPPSPHGTLRVCTISSTGPLQPQPKKPEDEPQETAYRTQVSSCCLHICQGIRGLWGTTLTENTAENRELYIKTTLRELLVYIVFLVDICLLTYGMTSSSAYYYTKVMSELFLHTPSDTGVSFQAISSMADFWDFAQGPLLDSLYWTKWYNNQSLGHGSHSFIYYENMLLGVPRLRQLKVRNDSCVVHEDFREDILSCYDVYSPDKEEQLPFGPFNGTAWTYHSQDELGGFSHWGRLTSYSGGGYYLDLPGSRQGSAEALRALQEGLWLDRGTRVVFIDFSVYNANINLFCVLRLVVEFPATGGAIPSWQIRTVKLIRYVSNWDFFIVGCEVIFCVFIFYYVVEEILELHIHRLRYLSSIWNILDLVVILLSIVAVGFHIFRTLEVNRLMGKLLQQPNTYADFEFLAFWQTQYNNMNAVNLFFAWIKIFKYISFNKTMTQLSSTLARCAKDILGFAVMFFIVFFAYAQLGYLLFGTQVENFSTFIKCIFTQFRIILGDFDYNAIDNANRILGPAYFVTYVFFVFFVLLNMFLAIINDTYSEVKEELAGQKDELQLSDLLKQGYNKTLLRLRLRKERVSDVQKVLQGGEQEIQFEDFTNTLRELGHAEHEITELTATFTKFDRDGNRILDEKEQEKMRQDLEEERVALNTEIEKLGRSIVSSPQGKSGPEAARAGGWVSGEEFYMLTRRVLQLETVLEGVVSQIDAVGSKLKMLERKGWLAPSPGVKEQAIWKHPQPAPAVTPDPWGVQGGQESEVPYKREEEALEERRLSRGEIPTLQRS

SEQ ID NO: 33441 - protein, 760 aa, Homo sapiens
MNAVGSPEGQELQKLGSGAWDNPAYSGPPSPHGTLRVCTISSTGPLQPQPKKPEDEPQETAYRTQVSSCCLHICQGIRGLWGTTLTENTAENRELYIKTTLRELLVYIVFLVDICLLTYGMTSSSAYYYTKVMSELFLHTPSDTGVSFQAISSMADFWDFAQGPLLDSLYWTKWYNNQSLGHGSHSFIYYENMLLGVPRLRQLKVRNDSCVVHEDFREDILSCYDVYSPDKEEQLPFGPFNGTAWTYHSQDELGGFSHWGRLTSYSGGGYYLDLPGSRQGSAEALRALQEGLWLDRGTRVVFIDFSVYNANINLFCVLRLVVEFPATGGAIPSWQIRTVKLIRYVSNWDFFIVGCEVIFCVFIFYYVVEEILELHIHRLRYLSSIWNILDLVVILLSIVAVGFHIFRTLEVNRLMGKLLQQPNTYADFEFLAFWQTQYNNMNAVNLFFAWIKIFKYISFNKTMTQLSSTLARCAKDILGFAVMFFIVFFAYAQLGYLLFGTQVENFSTFIKCIFTQFRIILGDFDYNAIDNANRILGPAYFVTYVFFVFFVLLNMFLAIINDTYSEVKEELAGQKDELQLSDLLKQGYNKTLLRLRLRKERVSDVQKVLQGGEQEIQFEDFTNTLRELGHAEHEITELTATFTKFDRDGNRILDEKEQEKMRQDLEEERVALNTEIEKLGRSIVSSPQGKSGPEAARAGGWVSGEEFYMLTRRVLQLETVLEGVVSQIDAVGSKLKMLERKGWLAPSPGVRFPIKEKRKP

SEQ ID NO: 33442 - protein, 730 aa, Homo sapiens
MNAVGSPEGQELQKLGSGAWDNPAYSGPPSPHGTLRVCTISSTGPLQPQPKKPEDEPQETAYRTQVSSCCLHICQGIRGLWGTTLTENTAENRELYIKTTLRELLVYIVFLVDICLLTYGMTSSSAYYYTKVMSELFLHTPSDTGVSFQAISSMADFWDFAQGPLLDSLYWTKWYNNQSLGHGSHSFIYYENMLLGVPRLRQLKVRNDSCVVHEDFREDILSCYDVYSPDKEEQLPFGPFNGTALVVEFPATGGAIPSWQIRTVKLIRYVSNWDFFIVGCEVIFCVFIFYYVVEEILELHIHRLRYLSSIWNILDLVVILLSIVAVGFHIFRTLEVNRLMGKLLQQPNTYADFEFLAFWQTQYNNMNAVNLFFAWIKIFKYISFNKTMTQLSSTLARCAKDILGFAVMFFIVFFAYAQLGYLLFGTQVENFSTFIKCIFTQFRIILGDFDYNAIDNANRILGPAYFVTYVFFVFFVLLNMFLAIINDTYSEVKEELAGQKDELQLSDLLKQGYNKTLLRLRLRKERVSDVQKVLQGGEQEIQFEDFTNTLRELGHAEHEITELTATFTKFDRDGNRILDEKEQEKMRQDLEEERVALNTEIEKLGRSIVSSPQGKSGPEAARAGGWVSGEEFYMLTRRVLQLETVLEGVVSQIDAVGSKLKMLERKGWLAPSPGVKEQAIWKHPQPAPAVTPDPWGVQGGQESEVPYKREEEALEERRLSRGEIPTLQRS

SEQ ID NO: 33443 - protein, 685 aa, Homo sapiens
MNAVGSPEGQELQKLGSGAWDNPAYSGPPSPHGTLRVCTISSTGPLQPQPKKPEDEPQETAYRTQVSSCCLHICQGIRGLWGTTLTENTAENRELYIKTTLRELLVYIVFLVDICLLTYGMTSSSAYYYTKVMSELFLHTPSDTGVSFQAISSMADFWDFAQGPLLDSLYWTKWYNNQSLGHGSHSFIYYENMLLGVPRLRQLKVRNDSCVVHEDFREDILSCYVSNWDFFIVGCEVIFCVFIFYYVVEEILELHIHRLRYLSSIWNILDLVVILLSIVAVGFHIFRTLEVNRLMGKLLQQPNTYADFEFLAFWQTQYNNMNAVNLFFAWIKIFKYISFNKTMTQLSSTLARCAKDILGFAVMFFIVFFAYAQLGYLLFGTQVENFSTFIKCIFTQFRIILGDFDYNAIDNANRILGPAYFVTYVFFVFFVLLNMFLAIINDTYSEVKEELAGQKDELQLSDLLKQGYNKTLLRLRLRKERVSDVQKVLQGGEQEIQFEDFTNTLRELGHAEHEITELTATFTKFDRDGNRILDEKEQEKMRQDLEEERVALNTEIEKLGRSIVSSPQGKSGPEAARAGGWVSGEEFYMLTRRVLQLETVLEGVVSQIDAVGSKLKMLERKGWLAPSPGVKEQAIWKHPQPAPAVTPDPWGVQGGQESEVPYKREEEALEERRLSRGEIPTLQRS

SEQ ID NO: 33444 - protein, 776 aa, Homo sapiens
MNAVGSPEGQELQKLGSGAWDNPAYSGPPSPHGTLRVCTISSTGPLQPQPKKPEDEPQETAYRTQVSSCCLHICQGIRGLWGTTLTENTAENRELYIKTTLRELLVYIVFLVDICLLTYGMTSSSAYYYTKVMSELFLHTPSDTGVSFQAISSMADFWDFAQGPLLDSLYWTKWYNNQSLGHGSHSFIYYENMLLGVPRLRQLKVRNDSCVVHEDFREDILSCYDVYSPDKEEQLPFGPFNGTAWTYHSQDELGGFSHWGRLTSYSGGGYYLDLPGSRQGSAEALRALQEGLWLDRGTRVVFIDFSVYNANINLFCVLRLVVEFPATGGAIPSWQIRTVKLIRYVSNWDFFIVGCEVIFCVFIFYYVVEEILELHIHRLRYLSSIWNILDLVVILLSIVAVGFHIFRTLEVNRLMGKLLQQPNTYADFEFLAFWQTQYNNMNAVNLFFAWIKIFKYISFNKTMTQLSSTLARCAKDILGFAVMFFIVFFAYAQLGYLLFGTQVENFSTFIKCIFTQFRIILGDFDYNAIDNANRILGPAYFVTYVFFVFFVLLNMFLAIINDTYSEVKEELAGQKDELQLSDLLKQGYNKTLLRLRLRKERVSDVQKVLQGGEQEIQFEDFTNTLRELGHAEHEITEEERVALNTEIEKLGRSIVSSPQGKSGPEAARAGGWVSGEEFYMLTRRVLQLETVLEGVVSQIDAVGSKLKMLERKGWLAPSPGVKEQAIWKHPQPAPAVTPDPWGVQGGQESEVPYKREEEALEERRLSRGEIPTLQRS

SEQ ID NO: 33445 - protein, 291 aa, Homo sapiens
MACLSPSQLQKFQQDGFLVLEGFLSAEECVAMQQRIGEIVAEMDVPLHCRTEFSTQEEEQLRAQGSTDYFLSSGDKIRFFFEKGVFDEKGNFLVPPEKSINKIGHALHAHDPVFKSITHSFKVQTLARSLGLQMPVVVQSMYIFKQPHFGGEVSPHQDASFLYTEPLGRVLGVWIAVEDATLENGCLWFIPGSHTSGVSRRMVRAPVGSAPGTSFLGSEPARDNSLFVPTPVQRGALVLIHGEVVHKSKQNLSDRSRQAYTFHLMEASGTTWSPENWLQPTAELPFPQLYT

SEQ ID NO: 33446 - protein, 270 aa, Homo sapiens
MACLSPSQLQKFQQDGFLVLEGFLSAEECVAMQQRIGEIVAEMDVPLHCRTEFSTQEEEQLRAQGSTDYFLSSGDKIRFFFEKGVFDEKGNFLVPPEKSINKIGHALHAHDPVFKSITHSFKVQQPHFGGEVSPHQDASFLYTEPLGRVLGVWIAVEDATLENGCLWFIPGSHTSGVSRRMVRAPVGSAPGTSFLGSEPARDNSLFVPTPVQRGALVLIHGEVVHKSKQNLSDRSRQAYTFHLMEASGTTWSPENWLQPTAELPFPQLYT

SEQ ID NO: 33447 - protein, 297 aa, Homo sapiens
MACLSPSQLQKFQQDGFLVLEGFLSAEECVAMQQRIGEIVAEMDVPLHCRTEFSTQEEEQLRAQGSTDYFLSSGDKIRFFFEKGVFDEKGNFLVPPEKSINKIGHALHAHDPVFKSITHSFKVQTLARSLGLQMPVVVQSMYIFKSPLIRTPPSCTRSPWAGCWACGSQWRMPRWRTAVSGSSLAPTPVVCQEGWSGPLLAQRLVPASLGQSQPGITASLCPPQCREGPWSSSMEKWYTRASRTSLTARARPTLSTSWRPLAPPGARRTGSSQQLNCPFPNCTPKGSRRAGALAPPG

SEQ ID NO: 33448 - protein, 910 aa, Homo sapiens
MAATVEGPELEAAAAAGDASEDSDAGSRALPFLGGNRLSLDLYPGGCQQLLHLCVQQPLQLLQVEFLRLSTHEDPQLLEATLAQLPQSLSCLRSLVLKGGQRRDTLGACLRGALTNLPAGLSGLAHLAHLDLSFNSLETLPACVLQMRGLGALLLSHNCLSELPEALGALPALTFLTVTHNRLQTLPPALGALSTLQRLDLSQNLLDTLPPEIGGLGSLLELNLASNRLQSLPASLAGLRSLRLLVLHSNLLASVPADLARLPLLTRLDLRDNQLRDLPPELLDAPFVRLQGNPLGEASPDAPSSPVAALIPEMPRLFLTSDLDSFPVTPQGCSVTLACGVRLQFPAGATATPITIRYRLLLPEPGLVPLGPHDALLSHVLELQPHGVAFQQDVGLWLLFTPPQARRCREVVVRTRNDNSWGDLETYLEEEAPQRLWAHCQVPHFSWFLVVSRPVSNACLVPPEGTLLCSSGHPGVKVIFPPGATEEPRRVSMQVVRMAGRELQALLGEPEAAVSPLLCLSQSGPPSFLQPVTVQLPLPSGITGLSLDRSRLHLLYWAPPAATWDDITAQVVLELTHLYARFQVTHFSWYWLWYTTKNCVGGLARKAWERLRLHRVNLIALQRRRDPEQVLLQCLPRNKVDATLRRLLERYRGPEPSDTVEMFEGEEFFAAFERGIDVDADRPDCVEGRICFVFYSHLKNVKEVYVTTTLDREAQAVRGQVSFYRGAVPVRVPEEAEAARQRKGADALWMATLPIKLPRLRGSEGPRRGAGLSLAPLNLGDAETGFLTQSNLLSVAGRLGLDWPAVALHLGVSYREVQRIRHEFRDDLDEQIRHMLFSWAERQAGQPGAVGLLVQALEQSDRQDVAEEVRAVLELGRRKYQDSIRRMGLAPKDPALPGSSAPQPPEPAQA

SEQ ID NO: 33449 - protein, 893 aa, Homo sapiens
MAATVEGPELEAAAAAGDASEDSDAGSRALPFLGGNRLSLDLYPGGCQQLLHLCVQQPLQLLQVEFLRLSTHEDPQLLEATLAQLPQSLSCLRSLVLKGGQRRDTLGACLRGALTNLPAGLSGLAHLAHLDLSFNSLETLPACVLQMRGLGALLLSHNCLSELPEALGALPALTFLTVTHNRLQTLPPALGALSTLQRLDLSQNLLDTLPPEIGGLGSLLELNLASNRLQSLPASLAGLRSLRLLVLHSNLLASVPADLARLPLLTRLDLRDNQLRDLPPELLDAPFVRLQGNPLGEASPDAPSSPVAALIPEMPRLFLTSDLDSFPVTPQGCSVTLACGVRLQFPAGATATPITIRYRLLLPEPGLVPLGPHDALLSHVLELQPHGVAFQQDVGLWLLFTPPQARRCREVVVRTRNDNSWGDLETYLEEEAPQRLWAHCQVPHFSWFLVVSRPVSNACLVPPEGTLLCSSGHPGVKVIFPPGATEEPRRVSMQVVRMAGRELQALLGEPEAAVSPLLCLSQSGPPSFLQPVTVQLPLPSGITGLSLDRSRLHLLYWAPPAATWDDITAQVVLELTHLYARFQVTHFSWYWLWYTTKNCVGGLARKAWERLRLHRVNLIALQRRRDPEQVLLQCLPRNKVDATLRRLLERYRGPEPSDTVEMFEGEEFFAAFERGIDVDADRPDCVEGRICFVFYSHLKNVKEVSFYRGAVPVRVPEEAEAARQRKGADALWMATLPIKLPRLRGSEGPRRGAGLSLAPLNLGDAETGFLTQSNLLSVAGRLGLDWPAVALHLGVSYREVQRIRHEFRDDLDEQIRHMLFSWAERQAGQPGAVGLLVQALEQSDRQDVAEEVRAVLELGRRKYQDSIRRMGLAPKDPALPGSSAPQPPEPAQA

SEQ ID NO: 33450 - protein, 753 aa, Homo sapiens
MRGLGALLLSHNCLSELPEALGALPALTFLTVTHNRLQTLPPALGALSTLQRLDLSQNLLDTLPPEIGGLGSLLELNLASNRLQSLPASLAGLRSLRLLVLHSNLLASVPADLARLPLLTRLDLRDNQLRDLPPELLDAPFVRLQGNPLGEASPDAPSSPVAALIPEMPRLFLTSDLDSFPVTPQGCSVTLACGVRLQFPAGATATPITIRYRLLLPEPGLVPLGPHDALLSHVLELQPHGVAFQQDVGLWLLFTPPQARRCREVVVRTRNDNSWGDLETYLEEEAPQRLWAHCQVPHFSWFLVVSRPVSNACLVPPEGTLLCSSGHPGVKVIFPPGATEEPRRVSMQVVRMAGRELQALLGEPEAAVSPLLCLSQSGPPSFLQPVTVQLPLPSGITGLSLDRSRLHLLYWAPPAATWDDITAQVVLELTHLYWLWYTTKNCVGGLARKAWERLRLHRVNLIALQRRRDPEQVLLQCLPRNKVDATLRRLLERYRGPEPSDTVEMFEGEEFFAAFERGIDVDADRPDCVEGRICFVFYSHLKNVKEVYVTTTLDREAQAVRGQVSFYRGAVPVRVPEEAEAARQRKGADALWMATLPIKLPRLRGSEGPRRGAGLSLAPLNLGDAETGFLTQSNLLSVAGRLGLDWPAVALHLGVSYREVQRIRHEFRDDLDEQIRHMLFSWAERQAGQPGAVGLLVQALEQSDRQDVAEEVRAVLELGRRKYQDSIRRMGLAPKDPALPGSSAPQPPEPAQA

SEQ ID NO: 33451 - protein, 597 aa, Homo sapiens
MPRLFLTSDLDSFPVTPQGCSVTLACGVRLQFPAGATATPITIRYRLLLPEPGLVPLGPHDALLSHVLELQPHGVAFQQDVGLWLLFTPPQARRCREVVVRTRNDNSWGDLETYLEEEAPQRLWAHCQVPHFSWFLVVSRPVSNACLVPPEGTLLCSSGHPGVKVIFPPGATEEPRRVSMQVVRMAGRELQALLGEPEAAVSPLLCLSQSGPPSFLQPVTVQLPLPSGITGLSLDRSRLHLLYWAPPAATWDDITAQVVLELTHLYARFQVTHFSWYWLWYTTKNCVGGLARKAWERLRLHRVNLIALQRRRDPEQVLLQCLPRNKVDATLRRLLERYRGPEPSDTVEMFEGEEFFAAFERGIDVDADRPDCVEGRICFVFYSHLKNVKEVYVTTTLDREAQAVRGQVSFYRGAVPVRVPEEAEAARQRKGADALWMATLPIKLPRLRGSEGPRRGAGLSLAPLNLGDAETGFLTQSNLLSVAGRLGLDWPAVALHLGVSYREVQRIRHEFRDDLDEQIRHMLFSWAERQAGQPGAVGLLVQALEQSDRQDVAEEVRAVLELGRRKYQDSIRRMGLAPKDPALPGSSAPQPPEPAQA

SEQ ID NO: 33452 - protein, 526 aa, Homo sapiens
MPRLFLTSDLDSFPVTPQGCSVTLACGVRLQFPAGATATPITIRYRLLLPEPGLVPLGPHDALLSHVLELQPHGVAFQQDVGLWLLFTPPQARRCREVVVRTRNDNSWGDLETYLEEEAPQRLWAHCQVPHFSWFLVVSRPVSNACLVPPEGTLLCSSGHPGVKVIFPPGATEEPRRVSMQVVRMAGRELQALLGEPEAAVSPLLCLSQSGPPSFLQPVTVQLPLPSGITGLSLDRSRLHLLYWAPPAATWDDITAQVVLELTHLYARFQVTHFSWSVPPSFLSPPPPVCTALLTPSSPRYWLWYTTKNCVGGLARKAWERLRLHRVNLIALQRRRDPEQVLLQCLPRNKVDATLRRLLERYRGPEPSDTVEMFEGEEFFAAFERGIDVDADRPDCVEGRICFVFYSHLKNVKEVYVTTTLDREAQAVRGQVSFYRGAVPVRVPEEAEAARQRKGADALWMATLPIKLPVGLRDSRGAGQDRGPGVTRVTWWSWGWSPGLNALFPSNRDFEGPRGHGGGLASPWHP

SEQ ID NO: 33453 - protein, 330 aa, Homo sapiens
MQVVRMAGRELQALLGEPEAAVSPLLCLSQSGPPSFLQPVTVQLPLPSGITGLSLDRSRLHLLYWAPPAATWDDITAQVVLELTHLYARFQVTHFSWSVPPSFLSPPPPVCTALLTPSSPRYWLWYTTKNCVGGLARKAWERLRLHRVNLIALQRRRDPEQVLLQCLPRNKVDATLRRLLERYRGPEPSDTVEMFEGEEFFAAFERGIDVDADRPDCVEGRICFVFYSHLKNVKEVSFYRGAVPVRVPEEAEAARQRKGADALWMATLPIKLPVGLRDSRGAGQDRGPGVTRVTWWSWGWSPGLNALFPSNRDFEGPRGHGGGLASPWHP

SEQ ID NO: 33454 - protein, 308 aa, Homo sapiens
MPRLFLTSDLDSFPVTPQGCSVTLACGVRLQFPAGATATPITIRYRLLLPEPGLVPLGPHDALLSHVLELQPHGVAFQQDVGLWLLFTPPQARRCREVVVRTRNDNSWGDLETYLEEEAPQRLWAHCQVPHFSWFLVVSRPVSNACLVPPEGTLLCSSGHPGVKVIFPPGATEEPRRVSMQVVRMAGRELQALLGEPEAAVSPLLCLSQSGPPSFLQPVTVQLPLPSGITGLSLDRSRLHLLYWAPPAATWDDITAQVVLELTHLYARFQVLALVHHQELCGRPGSEGLGAAAAAPCEPHRSAAAPGP

SEQ ID NO: 33455 - protein, 624 aa, Homo sapiens
MAEASRWHRGGASKHKLHYRKEVEITTTLQELLLYFIFLINLCILTFGMVNPHMYYLNKVMSSLFLDTSVPGEERTNFKSIRSITDFWKFMEGPLLEGLYWDSWYNNQQLYNLKNSSRIYYENILLGVPRVRQLKVRNNTCKVYSSFQSLMSECYGKYTSANEDLSNFGLQINTEWRYSTSNTNSPWHWGFLGVYRNGGYIFTLSKSKSETKNKFIDLRLNSWITRGTRVIFIDFSLYNANVNLFCIIRLVAEFPATGGILTSWQFYSVKLLRYVSYYDYFIASCEITFCIFLFVFTTQEVKKIKEFKSAYFKSIWNWLELLLLLLCFVAVSFNTYYNVQIFLLLGQLLKSTEKYSDFYFLACWHIYYNNIIAITIFFAWIKIFKFISFNKTMSQLSSTLSRCVKDIVGFAIMFFIIFFAYAQLGFLVFGSQVDDFSTFQNSIFAQFRIVLGDFNFAGIQQANPILGPIYFITFIFFVFFVLLNMFLAIINDTYSEVKADYSIGRRLDFELGKMIKQSYKNVLEKFRLKKAQKDEDKKTKGSGDLAEQARREGFDENEIQNAEQMKKWKERLEKKYYSMEIQDDYQPVTQEEFRELFLYAVELEKELHYINLKLNQVVRKVSAL

SEQ ID NO: 33456 - protein, 590 aa, Homo sapiens
MAEASRWHRGVTFGMVNPHMYYLNKVMSSLFLDTSVPGEERTNFKSIRSITDFWKFMEGPLLEGLYWDSWYNNQQLYNLKNSSRIYYENILLGVPRVRQLKVRNNTCKVYSSFQSLMSECYGKYTSANEDLSNFGLQINTEWRYSTSNTNSPWHWGFLGVYRNGGYIFTLSKSKSETKNKFIDLRLNSWITRGTRVIFIDFSLYNANVNLFCIIRLVAEFPATGGILTSWQFYSVKLLRYVSYYDYFIASCEITFCIFLFVFTTQEVKKIKEFKSAYFKSIWNWLELLLLLLCFVAVSFNTYYNVQIFLLLGQLLKSTEKYSDFYFLACWHIYYNNIIAITIFFAWIKIFKFISFNKTMSQLSSTLSRCVKDIVGFAIMFFIIFFAYAQLGFLVFGSQVDDFSTFQNSIFAQFRIVLGDFNFAGIQQANPILGPIYFITFIFFVFFVLLNMFLAIINDTYSEVKADYSIGRRLDFELGKMIKQSYKNVLEKFRLKKAQKDEDKKTKGSGDLAEQARREGFDENEIQNAEQMKKWKERLEKKYYSMEIQDDYQPVTQEEFRELFLYAVELEKELHYINLKLNQVVRKVSAL

SEQ ID NO: 33457 - protein, 57 aa, Homo sapiens
MAEASRWHRGGASKHKLHYRKEVEITTTLQELLLYFIFLINLCICYVISIFGHFCAW

SEQ ID NO: 33458 - protein, 23 aa, Homo sapiens
MAEASRWHRGGYVISIFGHFCAW

SEQ ID NO: 33459 - protein, 613 aa, Homo sapiens
MAEASRWHRGGASKHKLHYRKEVEITTTLQELLLYFIFLINLCILTFGMVNPHMYYLNKVMSSLFLDTSVPGEERTNFKSIRSITDFWKFMEGPLLEGLYWDSWYNNQQLYNLKNSSRIYYENILLGVPRVRQLKVRNNTCKVYSSFQSLMSECYGKYTSANEDLSNFGLQINTEWRYSTSNTNSPWHWGFLGVYRNGGYIFTLSKSKSETKNKFIDLRLNSWITRGTRVIFIDFSLYNANVNLFCIIRLVAEFPATGGILTSWQFYSVKLLRYVSYYDYFIASCEITFCIFLFVFTTQEVKKIKEFKSAYFKSIWNWLELLLLLLCFVAVSFNTYYNVQIFLLLGQLLKSTEKYSDFYFLACWHIYYNNIIAITIFFAWIKIFKFISFNKTMSQLSSTLSRCVKDIVGFAIMFFIIFFAYAQLGFLVFGSQVDDFSTFQNSIFAQFRIVLGDFNFAGIQQANPILGPIYFITFIFFVFFVLLNMFLAIINDTYSEVKADYSIGRRLDFELGKMIKQSYKNVLEKFRLKKAQKDEDKKTKGSGDLAEQARREGFDENEIQNAEQMKKWKERLEKKYYSMEIQDDYQPVTQEEFRDGTTTKYKMRFSECLTKRI

SEQ ID NO: 33460 - protein, 523 aa, Homo sapiens
MAEASRWHRGGASKHKLHYRKEVEITTTLQELLLYFIFLINLCILTFGMVNPHMYYLNKVMSSLFLDTSVPGEERTNFKSIRSITDFWKFMEGPLLEGLYWDSWYNNQQLYNLKNSSRIYYENILLGVPRVRQLKVRNNTCKVYSSFQSLMSECYGKYTSANEDLSNFGLQINTEWRYSTSNTNSPWHWGFLGVYRNGGYIFTLSKSKSETKNKFIDLRLNSWITRGTRVIFIDFSLYNANVNLFCIIRLVAEFPATGGILTSWQFYSVKLLRYVSYYDYFIASCEITFCIFLFVFTTQEVKKIKEFKSAYFKSIWNWLELLLLLLCFVAVSFNTYYNVQIFLLLGQLLKSTEKYSDFYFLACWHIYYNNIIAITIFFAWIKNMFLAIINDTYSEVKADYSIGRRLDFELGKMIKQSYKNVLEKFRLKKAQKDEDKKTKGSGDLAEQARREGFDENEIQNAEQMKKWKERLEKKYYSMEIQDDYQPVTQEEFRELFLYAVELEKELHYINLKLNQVVRKVSAL

SEQ ID NO: 33461 - protein, 602 aa, Homo sapiens
MAEASRWHRGGASKHKLHYRKEVEITTTLQELLLYFIFLINLCILTFGMVNPHMYYLNKVMSSLFLDTSVPGEERTNFKSIRSITDFWKFMEGPLLEGLYWDSWYNNQQLYNLKNSSRIYYENILLGVPRVRQLKVRNNTCKVYSSFQSLMSECYGKYTSANEDLSNFGLQINTEWRYSTSNTNSPWHWGFLGVYRNGGYIFTLSKSKSETKNKFIDLRLNSWITRGTRVIFIDFSLYNANVNLFCIIRLVAEFPATGGILTSWQFYSVKLLRYVSYYDYFIASCEITFCIFLFVFTTQEVKKIKEFKSAYFKSIWNWLELLLLLLLKSTEKYSDFYFLACWHIYYNNIIAITIFFAWIKIFKFISFNKTMSQLSSTLSRCVKDIVGFAIMFFIIFFAYAQLGFLVFGSQVDDFSTFQNSIFAQFRIVLGDFNFAGIQQANPILGPIYFITFIFFVFFVLLNMFLAIINDTYSEVKADYSIGRRLDFELGKMIKQSYKNVLEKFRLKKAQKDEDKKTKGSGDLAEQARREGFDENEIQNAEQMKKWKERLEKKYYSMEIQDDYQPVTQEEFRELFLYAVELEKELHYINLKLNQVVRKVSAL

SEQ ID NO: 33462 - protein, 2521 aa, Homo sapiens
MEPHVLGAVLYWLLLPCALLAACLLRFSGLSLVYLLFLLLLPWFPGPTRCGLQGHTGRLLRALLGLSLLFLVAHLALQICLHIVPRLDQLLGPSCSRWETLSRHIGVTRLDLKDIPNAIRLVAPDLGILVVSSVCLGICGRLARNTRQSPHPRELDDDERDVDASPTAGLQEAATLAPTRRSRLAARFRVTAHWLLVAAGRVLAVTLLALAGIAHPSALSSVYLLLFLALCTWWACHFPISTRGFSRLCVAVGCFGAGHLICLYCYQMPLAQALLPPAGIWARVLGLKDFVGPTNCSSPHALVLNTGLDWPVYASPGVLLLLCYATASLRKLRAYRPSGQRKEAAKGYEARELELAELDQWPQERESDQHVVPTAPDTEADNCIVHELTGQSSVLRRPVRPKRAEPREASPLHSLGHLIMDQSYVCALIAMMVWSITYHSWLTFVLLLWACLIWTVRSRHQLAMLCSPCILLYGMTLCCLRYVWAMDLRPELPTTLGPVSLRQLGLEHTRYPCLDLGAMLLYTLTFWLLLRQFVKEKLLKWAESPAALTEVTVADTEPTRTQTLLQSLGELVKGVYAKYWIYVCAGMFIVVSFAGRLVVYKIVYMFLFLLCLTLFQVYYSLWRKLLKAFWWLVVAYTMLVLIAVYTFQFQDFPAYWRNLTGFTDEQLGDLGLEQFSVSELFSSILVPGFFLLACILQLHYFHRPFMQLTDMEHVSLPGTRLPRWAHRQDAVSGTPLLREEQQEHQQQQQEEEEEEEDSRDEGLGVATPHQATQVPEGAAKWGLVAERLLELAAGFSDVLSRVQVFLRRLLELHVFKLVALYTVWVALKEVSVMNLLLVVLWAFALPYPRFRPMASCLSTVWTCVIIVCKMLYQLKVVNPQEYSSNCTEPFPNSTNLLPTEISQSLLYRGPVDPANWFGVRKGFPNLGYIQNHLQVLLLLVFEAIVYRRQEHYRRQHQLAPLPAQAVFASGTRQQLDQDLLGCLKYFINFFFYKFGLEICFLMAVNVIGQRMNFLVTLHGCWLVAILTRRHRQAIARLWPNYCLFLALFLLYQYLLCLGMPPALCIDYPWRWSRAVPMNSALIKWLYLPDFFRAPNSTNLISDFLLLLCASQQWQVFSAERTEEWQRMAGVNTDRLEPLRGEPNPVPNFIHCRSYLDMLKVAVFRYLFWLVLVVVFVTGATRISIFGLGYLLACFYLLLFGTALLQRDTRARLVLWDCLILYNVTVIISKNMLSLLACVFVEQMQTGFCWVIQLFSLVCTVKGYYDPKEMMDRDQDCLLPVEEAGIIWDSVCFFFLLLQRRVFLSHYYLHVRADLQATALLASRGFALYNAANLKSIDFHRRIEEKSLAQLKRQMERIRAKQEKHRQGRVDRSRPQDTLGPKDPGLEPGPDSPGGSSPPRRQWWRPWLDHATVIHSGDYFLFESDSEEEEEAVPEDPRPSAQSAFQLAYQAWVTNAQAVLRRRQQEQEQARQEQAGQLPTGGGPSQEVEPAEGPEEAAAGRSHVVQRVLSTAQFLWMLGQALVDELTRWLQEFTRHHGTMSDVLRAERYLLTQELLQGGEVHRGVLDQLYTSQAEATLPGPTEAPNAPSTVSSGLGAEEPLSSMTDDMGSPLSTGYHTRSGSEEAVTDPGEREAGASLYQGLMRTASELLLDRRLRIPELEEAELFAEGQGRALRLLRAVYQCVAAHSELLCYFIIILNHMVTASAGSLVLPVLVFLWAMLSIPRPSKRFWMTAIVFTEIAVVVKYLFQFGFFPWNSHVVLRRYENKPYFPPRILGLEKTDGYIKYDLVQLMALFFHRSQLLCYGLWDHEEDSPSKEHDKSGEEEQGAEEGPGVPAATTEDHIQVEARVGPTDGTPEPQVELRPRDTRRISLRFRRRKKEGPARKGAAAIEAEDREEEEGEEEKEAPTGREKRPSRSGGRVRAAGRRLQGFCLSLAQGTYRPLRRFFHDILHTKYRAATDVYALMFLADVVDFIIIIFGFWAFGKHSAATDITSSLSDDQVPEAFLVMLLIQFSTMVVDRALYLRKTVLGKLAFQVALVLAIHLWMFFILPAVTERMFNQNVVAQLWYFVKCIYFALSAYQIRCGYPTRILGNFLTKKYNHLNLFLFQGFRLVPFLVELRAVMDWVWTDTTLSLSSWMCVEDIYANIFIIKCSRETEKKYPQPKGQKKKKIVKYGMGGLIILFLIAIIWFPLLFMSLVRSVVGVVNQPIDVTVTLKLGGYEPLFTMSAQQPSIIPFTAQAYEELSRQFDPQPLAMQFISQYSPEDIVTAQIEGSSGALWRISPPSRAQMKRELYNGTADITLRFTWNFQRDLAKGGTVEYANEKHMLALAPNSTARRQLASLLEGTSDQSVVIPNLFPKYIRAPNGPEANPVKQLQPNEEADYLGVRIQLRREQGAGATGFLEWWVIELQECRTDCNLLPMVIFSDKVSPPSLGFLAGYGIMGLYVSIVLVIGKFVRGFFSEISHSIMFEELPCVDRILKLCQDIFLVRETRELELEEELYAKLIFLYRSPETMIKWTREKE

SEQ ID NO: 33463 - protein, 330 aa, Homo sapiens
MELLSTPHSIEINNITCDSFRISWAMEDSDLERVTHYFIDLNKKENKNSNKFKHRDVPTKLVAKAVPLPMTVRGHWFLSPRTEYSVAVQTAVKQSDGEYLVSGWSETVEFCTGDYAKEHLAQLQEKAEQIAGRMLRFSVFYRNHHKEYFQHARTHCGNMLQPYLKDNSGSHGSPTSGMLHGVFFSCNTEFNTGQPPQDSPYGRWRFQIPAQRLFNPSTNLYFADFYCMYTAYHYAILVLAPKGSLGDRFCRDRLPLLDIACNKFLTCSVEDGELVFRHAQDLILEIIYTEPVDLSLGTLGEISGHQLMSLSTADAKKDPSCKTCNISVGR

SEQ ID NO: 33464 - protein, 2752 aa, Homo sapiens
MASEVVCGLIFRLLLPICLAVACAFRYNGLSFVYLIYLLLIPLFSEPTKTTMQGHTGRLLKSLCFISLSFLLLHIIFHITLVSLEAQHRIAPGYNCSTWEKTFRQIGFESLKGADAGNGIRVFVPDIGMFIASLTIWLLCRNIVQKPVTDEAAQSNPEFENEELAEGEKIDSEEALIYEEDFNGGDGVEGELEESTKLKMFRRLASVASKLKEFIGNMITTAGKVVVTILLGSSGMMLPSLTSSVYFFVFLGLCTWWSWCRTFDPLLFSCLCVLLAIFTAGHLIGLYLYQFQFFQEAVPPNDYYARLFGIKSVIQTDCSSTWKIIVNPDLSWYHHANPILLLVMYYTLATLIRIWLQEPLVQDEGTKEEDKALACSPIQITAGRRRSLWYATHYPTDERKLLSMTQDDYKPSDGLLVTVNGNPVDYHTIHPSLPMENGPGKADLYSTPQYRWEPSDESSEKREEEEEEKEEFEEERSREEKRSIKVHAMVSVFQFIMKQSYICALIAMMAWSITYHSWLTFVLLIWSCTLWMIRNRRKYAMISSPFMVVYGNLLLILQYIWSFELPEIKKVPGFLEKKEPGELASKILFTITFWLLLRQHLTEQKALQEKEALLSEVKIGSQENEEKDEELQDIQVEGEPKEEEEEEAKEEKQERKKVEQEEAEEEDEQDIMKVLGNLVVAMFIKYWIYVCGGMFFFVSFEGKIVMYKIIYMVLFLFCVALYQVHYEWWRKILKYFWMSVVIYTMLVLIFIYTYQFENFPGLWQNMTGLKKEKLEDLGLKQFTVAELFTRIFIPTSFLLVCILHLHYFHDRFLELTDLKSIPSKEDNTIYRLAHPEGSLPDLTMMHLTASLEKPEVRKLAEPGEEKLEGYSEKAQKGDLGKDSEESEEDGEEEEESEEEEETSDLRNKWHLVIDRLTVLFLKFLEYFHKLQVFMWWILELHIIKIVSSYIIWVSVKEVSLFNYVFLISWAFALPYAKLRRLASSVCTVWTCVIIVCKMLYQLQTIKPENFSVNCSLPNENQTNIPFNELNKSLLYSAPIDPTEWVGLRKSSPLLVYLRNNLLMLAILAFEVTIYRHQEYYRGRNNLTAPVSRTIFHDITRLHLDDGLINCAKYFINYFFYKFGLETCFLMSVNVIGQRMDFYAMIHACWLIAVLYRRRRKAIAEIWPKYCCFLACIITFQYFICIGIPPAPCRDYPWRFKGASFNDNIIKWLYFPDFIVRPNPVFLVYDFMLLLCASLQRQIFEDENKAAVRIMAGDNVEICMNLDAASFSQHNPVPDFIHCRSYLDMSKVIIFSYLFWFVLTIIFITGTTRISIFCMGYLVACFYFLLFGGDLLLKPIKSILRYWDWLIAYNVFVITMKNILSIGACGYIGTLVHNSCWLIQAFSLACTVKGYQMPAANSPCTLPSGEAGIIWDSICFAFLLLQRRVFMSYYFLHVVADIKASQILASRGAELFQATIVKAVKARIEEEKKSMDQLKRQMDRIKARQQKYKKGKERMLSLTQEPGEGQDMQKLSEEDDEREADKQKAKGKKKQWWRPWVDHASMVRSGDYYLFETDSEEEEEEELKKEDEEPPRRSAFQFVYQAWITDPKTALRQRHKEKKRSAREERKRRRKGSKEGPVEWEDREDEPIKKKSDGPDNIIKRIFNILKFTWVLFLATVDSFTTWLNSISREHIDISTVLRIERCMLTREIKKGNVPTRESIHMYYQNHIMNLSRESGLDTIDEHPGAASGAQTAHRMDSLDSHDSISSEPTQCTMLYSRQGTTETIEEVEAEQEEEAGSTAPEPREAKEYEATGYDVGAMGAEEASLTPEEELTQFSTLDGDVEAPPSYSKAVSFEHLSFGSQDDSAGKNRMAVSPDDSRTDKLGSSILPPLTHELTASELLLKKMFHDDELEESEKFYVGQPRFLLLFYAMYNTLVARSEMVCYFVIILNHMVSASMITLLLPILIFLWAMLSVPRPSRRFWMMAIVYTEVAIVVKYFFQFGFFPWNKNVEVNKDKPYHPPNIIGVEKKEGYVLYDLIQLLALFFHRSILKCHGLWDEDDMTESGMAREESDDELSLGHGRRDSSDSLKSINLAASVESVHVTFPEQQTAVRRKRSGSSSEPSQRSSFSSNRSQRGSTSTRNSSQKGSSVLSIKQKGKRELYMEKLQEHLIKAKAFTIKKTLEIYVPIKQFFYNLIHPEYSAVTDVYVLMFLADTVDFIIIVFGFWAFGKHSAAADITSSLSEDQVPGPFLVMVLIQFGTMVVDRALYLRKTVLGKVIFQVILVFGIHFWMFFILPGVTERKFSQNLVAQLWYFVKCVYFGLSAYQIRCGYPTRVLGNFLTKSYNYVNLFLFQGFRLVPFLTELRAVMDWVWTDTTLSLSSWICVEDIYAHIFILKCWRESEKRYPQPRGQKKKKVVKYGMGGMIIVLLICIVWFPLLFMSLIKSVAGVINQPLDVSVTITLGGYQPIFTMSAQQSQLKVMDQQSFNKFIQAFSRDTGAMQFLENYEKEDITVAELEGNSNSLWTISPPSKQKMIHELLDPNSSFSVVFSWSIQRNLSLGAKSEIATDKLSFPLKNITRKNIAKMIAGNSTESSKTPVTIEKIYPYYVKAPSDSNSKPIKQLLSENNFMDITIILSRDNTTKYNSEWWVLNLTGNRIYNPNSQALELVVFNDKVSPPSLGFLAGYGIMGLYASVVLVIGKFVREFFSGISHSIMFEELPNVDRILKLCTDIFLVRETGELELEEDLYAKLIFLYRSPETMIKWTREKTN

SEQ ID NO: 33465 - protein, 2689 aa, Homo sapiens
MASEVVCGLIFRLLLPICLAVACAFRYNGLSFVYLIYLLLIPLFSEPTKTTMQGHTGRLLKSLCFISLSFLLLHIIFHITLVSLEAQHRIAPGYNCSTWEKTFRQIGFESLKGADAGNGIRVFVPDIGMFIASLTIWLLCRNIVQKPVTDEAAQSNPEFENEELAEGEKIDSEEALIYEEDFNGGDGVEGELEESTKLKMFRRLASVASKLKEFIGNMITTAGKVVVTILLGSSGMMLPSLTSSVYFFVFLGLCTWWSWCRTFDPLLFSCLCVLLAIFTAGHLIGLYLYQFQFFQEAVPPNDYYARLFGIKSVIQTDCSSTWKIIVNPDLSWYHHANPILLLVMYYTLATLIRIWLQEPLVQDEGTKEEDKALACSPIQITAGRRRSLWYATHYPTDERKLLSMTQDDYKPSDGLLVTVNGNPVDYHTIHPSLPMENGPGKADLYSTPQYRWEPSDESSEKREEEEEEKEEFEEERSREEKRSIKVHAMVSVFQFIMKQSYICALIAMMAWSITYHSWLTFVLLIWSCTLWMIRNRRKYAMISSPFMVVYGNLLLILQYIWSFELPEIKKVPGFLEKKEPGELASKILFTITFWLLLRQHLTEQKALQEKEALLSEVKIGSQENEEKDEELQDIQVEGEPKEEEEEEAKEEKQERKKVEQEEAEEEDEQDIMKVLGNLVVAMFIKYWIYVCGGMFFFVSFEGKIVMYKIIYMVLFLFCVALYQVHYEWWRKILKYFWMSVVIYTMLVLIFIYTYQFENFPGLWQNMTGLKKEKLEDLGLKQFTVAELFTRIFIPTSFLLVCILHLHYFHDRFLELTDLKSIPSKEDNTIYRLAHPEGSLPDLTMMHLTASLEKPEVRKLAEPGEEKLEGYSEKAQKGDLGKDSEESEEDGEEEEESEEEEETSDLRNKWHLVIDRLTVLFLKFLEYFHKLQVFMWWILELHIIKIVSSYIIWVSVKEVSLFNYVFLISWAFALPYAKLRRLASSVCTVWTCVIIVCKMLYQLQTIKPENFSVNCSLPNENQTNIPFNELNKSLLYSAPIDPTEWVGLRKSSPLLVYLRNNLLMLAILAFEVTIYRHQEYYRGRNNLTAPVSRTIFHDITRLHLDDGLINCAKYFINYFFYKFGLETCFLMSVNVIGQRMDFYAMIHACWLIAVLYRRRRKAIAEIWPKYCCFLACIITFQYFICIGIPPAPCRDYPWRFKGASFNDNIIKWLYFPDFIVRPNPVFLVYDFMLLLCASLQRQIFEDENKAAVRIMAGDNVEICMNLDAASFSQHNPVPDFIHCRSYLDMSKVIIFSYLFWFVLTIIFITGTTRISIFCMGYLVACFYFLLFGGDLLLKPIKSILRYWDWLIAYNVFVITMKNILSIGACGYIGTLVHNSCWLIQAFSLACTVKGYQMPAANSPCTLPSGEAGIIWDSICFAFLLLQRRVFMSYYFLHVVADIKASQILASRGAELFQATIVKAVKARIEEEKKSMDQLKRQMDRIKARQQKYKKGKERMLSLTQEPGEGQDMQKLSEEDDEREADKQKAKGKKKQWWRPWVDHASMVRSGDYYLFETDSEEEEEEELKKEDEEPPRRSAFQFVYQAWITDPKTALRQRHKEKKRSAREERKRRRKGSKEGPVEWEDREDEPIKKKSDGPDNIIKRIFNILKFTWVLFLATVDSFTTWLNSISREHIDISTVLRIERCMLTREIKKGNVPTRESIHMYYQNHIMNLSRESGLDTIDEHPGAASGAQTAHRMDSLDSHDSISSEPTQCTMLYSRQGTTETIEEVEAEQEEEAGSTAPEPREAKEYEATGYDVGAMGAEEASLTPEEELTQFSTLDGDVEAPPSYSKAVSFEHLSFGSQDDSAGKNRMAVSPDDSRTDKLGSSILPPLTHELTASELLLKKMFHDDELEESEKFYVGQPRFLLLFYAMYNTLVARSEMVCYFVIILNHMVSASMITLLLPILIFLWAMLSVPRPSRRFWMMAIVYTEVAIVVKYFFQFGFFPWNKNVEVNKDKPYHPPNIIGVEKKEGYVLYDLIQLLALFFHRSILKCHGLWDEDDMTESGMAREESDDELSLGHGRRDSSDSLKSINLAASVESVHVTFPEQQTAVRRKRSGSSSEPSQRSSFSSNRSQRGSTSTRNSSQKGSSVLSIKQKGKRELYMEKLQEHLIKAKAFTIKKTLEIYVPIKQFFYNLIHPEYSAVTDVYVLMFLADTVDFIIIVFGFWAFGKHSAAADITSSLSEDQVPGPFLVMVLIQFGTMVVDRALYLRKTVLGKVIFQVILVFGIHFWMFFILPGVTERKFSQNLVAQLWYFVKCVYFGLSAYQIRCGYPTRVLGNFLTKSYNYVNLFLFQGFRLVPFLTELRAVMDWVWTDTTLSLSSWICVEDIYAHIFILKCWRESEKPIFTMSAQQSQLKVMDQQSFNKFIQAFSRDTGAMQFLENYEKEDITVAELEGNSNSLWTISPPSKQKMIHELLDPNSSFSVVFSWSIQRNLSLGAKSEIATDKLSFPLKNITRKNIAKMIAGNSTESSKTPVTIEKIYPYYVKAPSDSNSKPIKQLLSENNFMDITIILSRDNTTKYNSEWWVLNLTGNRIYNPNSQALELVVFNDKVSPPSLGFLAGYGIMGLYASVVLVIGKFVREFFSGISHSIMFEELPNVDRILKLCTDIFLVRETGELELEEDLYAKLIFLYRSPETMIKWTREKTN

SEQ ID NO: 33466 - protein, 709 aa, Homo sapiens
MTESGMAREESDDELSLGHGRRDSSDSLKSINLAASVESVHVTFPEQQTAVRRKRSGSSSEPSQRSSFSSNRSQRGSTSTRNSSQKGSSVLSIKQKGKRELYMEKLQEHLIKAKAFTIKKTLEIYVPIKQFFYNLIHPEYSAVTDVYVLMFLADTVDFIIIVFGFWAFGKHSAAADITSSLSEDQVPGPFLVMVLIQFGTMVVDRALYLRKTVLGKVIFQVILVFGIHFWMFFILPGVTERKFSQNLVAQLWYFVKCVYFGLSAYQIRCGYPTRVLGNFLTKSYNYVNLFLFQGFRLVPFLTELRAVMDWVWTDTTLSLSSWICVEDIYAHIFILKCWRESEKRYPQPRGQKKKKVVKYGMGGMIIVLLICIVWFPLLFMSLIKSVAGVINQPLDVSVTITLGGYQPIFTMSAQQSQLKVMDQQSFNKFIQAFSRDTGAMQFLENYEKEDITVAELEGNSNSLWTISPPSKQKMIHELLDPNSSFSVVFSWSIQRNLSLGAKSEIATDKLSFPLKNITRKNIAKMIAGNSTESSKTPVTIEKIYPYYVKAPSDSNSKPIKQLLSENNFMDITIILSRDNTTKYNSEWWVLNLTGNRIYNPNSQALELVVFNDKVSPPSLGFLAGYGIMGLYASVVLVIGKFVREFFSGISHSIMFEELPNVDRILKLCTDIFLVRETGELELEEDLYAKLIFLYRSPETMIKWTREKTN

SEQ ID NO: 33467 - protein, 2777 aa, Homo sapiens
MASEVVCGLIFRLLLPICLAVACAFRYNGLSFVYLIYLLLIPLFSEPTKTTMQGHTGRLLKSLCFISLSFLLLHIIFHITLVSLEAQHRIAPGYNCSTWEKTFRQIGFESLKGADAGNGIRVFVPDIGMFIASLTIWLLCRNIVQKPVTDEAAQSNPEFENEELAEGEKIDSEEALIYEEDFNGGDGVEGELEESTKLKMFRRLASVASKLKEFIGNMITTAGKVVVTILLGSSGMMLPSLTSSVYFFVFLGLCTWWSWCRTFDPLLFSCLCVLLAIFTAGHLIGLYLYQFQFFQEAVPPNDYYARLFGIKSVIQTDCSSTWKIIVNPDLSWYHHANPILLLVMYYTLATLIRIWLQEPLVQDEGTKEEDKALACSPIQITAGRRRSLWYATHYPTDERKLLSMTQDDYKPSDGLLVTVNGNPVDYHTIHPSLPMENGPGKADLYSTPQYRWEPSDESSEKREEEEEEKEEFEEERSREEKRSIKVHAMVSVFQFIMKQSYICALIAMMAWSITYHSWLTFVLLIWSCTLWMIRNRRKYAMISSPFMVVYGNLLLILQYIWSFELPEIKKVPGFLEKKEPGELASKILFTITFWLLLRQHLTEQKALQEKEALLSEVKIGSQENEEKDEELQDIQVEGEPKEEEEEEAKEEKQERKKVEQEEAEEEDEQDIMKVLGNLVVAMFIKYWIYVCGGMFFFVSFEGKIVMYKIIYMVLFLFCVALYQVHYEWWRKILKYFWMSVVIYTMLVLIFIYTYQFENFPGLWQNMTGLKKEKLEDLGLKQFTVAELFTRIFIPTSFLLVCILHLHYFHDRFLELTDLKSIPSKEDNTIYSHAKVNGRVYLIINSIKKKLPIHQNELAHPEGSLPDLTMMHLTASLEKPEVRKLAEPGEEKLEGYSEKAQKGDLGKDSEESEEDGEEEEESEEEEETSDLRNKWHLVIDRLTVLFLKFLEYFHKLQVFMWWILELHIIKIVSSYIIWVSVKEVSLFNYVFLISWAFALPYAKLRRLASSVCTVWTCVIIVCKMLYQLQTIKPENFSVNCSLPNENQTNIPFNELNKSLLYSAPIDPTEWVGLRKSSPLLVYLRNNLLMLAILAFEVTIYRHQEYYRGRNNLTAPVSRTIFHDITRLHLDDGLINCAKYFINYFFYKFGLETCFLMSVNVIGQRMDFYAMIHACWLIAVLYRRRRKAIAEIWPKYCCFLACIITFQYFICIGIPPAPCRDYPWRFKGASFNDNIIKWLYFPDFIVRPNPVFLVYDFMLLLCASLQRQIFEDENKAAVRIMAGDNVEICMNLDAASFSQHNPVPDFIHCRSYLDMSKVIIFSYLFWFVLTIIFITGTTRISIFCMGYLVACFYFLLFGGDLLLKPIKSILRYWDWLIAYNVFVITMKNILSIGACGYIGTLVHNSCWLIQAFSLACTVKGYQMPAANSPCTLPSGEAGIIWDSICFAFLLLQRRVFMSYYFLHVVADIKASQILASRGAELFQATIVKAVKARIEEEKKSMDQLKRQMDRIKARQQKYKKGKERMLSLTQEPGEGQDMQKLSEEDDEREADKQKAKGKKKQWWRPWVDHASMVRSGDYYLFETDSEEEEEEELKKEDEEPPRRSAFQFVYQAWITDPKTALRQRHKEKKRSAREERKRRRKGSKEGPVEWEDREDEPIKKKSDGPDNIIKRIFNILKFTWVLFLATVDSFTTWLNSISREHIDISTVLRIERCMLTREIKKGNVPTRESIHMYYQNHIMNLSRESGLDTIDEHPGAASGAQTAHRMDSLDSHDSISSEPTQCTMLYSRQGTTETIEEVEAEQEEEAGSTAPEPREAKEYEATGYDVGAMGAEEASLTPEEELTQFSTLDGDVEAPPSYSKAVSFEHLSFGSQDDSAGKNRMAVSPDDSRTDKLGSSILPPLTHELTASELLLKKMFHDDELEESEKFYVGQPRFLLLFYAMYNTLVARSEMVCYFVIILNHMVSASMITLLLPILIFLWAMLSVPRPSRRFWMMAIVYTEVAIVVKYFFQFGFFPWNKNVEVNKDKPYHPPNIIGVEKKEGYVLYDLIQLLALFFHRSILKCHGLWDEDDMTESGMAREESDDELSLGHGRRDSSDSLKSINLAASVESVHVTFPEQQTAVRRKRSGSSSEPSQRSSFSSNRSQRGSTSTRNSSQKGSSVLSIKQKGKRELYMEKLQEHLIKAKAFTIKKTLEIYVPIKQFFYNLIHPEYSAVTDVYVLMFLADTVDFIIIVFGFWAFGKHSAAADITSSLSEDQVPGPFLVMVLIQFGTMVVDRALYLRKTVLGKVIFQVILVFGIHFWMFFILPGVTERKFSQNLVAQLWYFVKCVYFGLSAYQIRCGYPTRVLGNFLTKSYNYVNLFLFQGFRLVPFLTELRAVMDWVWTDTTLSLSSWICVEDIYAHIFILKCWRESEKRYPQPRGQKKKKVVKYGMGGMIIVLLICIVWFPLLFMSLIKSVAGVINQPLDVSVTITLGGYQPIFTMSAQQSQLKVMDQQSFNKFIQAFSRDTGAMQFLENYEKEDITVAELEGNSNSLWTISPPSKQKMIHELLDPNSSFSVVFSWSIQRNLSLGAKSEIATDKLSFPLKNITRKNIAKMIAGNSTESSKTPVTIEKIYPYYVKAPSDSNSKPIKQLLSENNFMDITIILSRDNTTKYNSEWWVLNLTGNRIYNPNSQALELVVFNDKVSPPSLGFLAGYGIMGLYASVVLVIGKFVREFFSGISHSIMFEELPNVDRILKLCTDIFLVRETGELELEEDLYAKLIFLYRSPETMIKWTREKTN

SEQ ID NO: 33468 - protein, 104 aa, Homo sapiens
MAGKAHRLSAEERDQLLPNLRAVGWNELEGRDAIFKQFHFKDFNRAFGFMTRVALQAEKLDHHPEWFNVYNKVHITLSTHECAGLSERDINLASFIEQVAVSMT

SEQ ID NO: 33469 - protein, 641 aa, Homo sapiens
MLSGIEAAAGEYEDSELRCRVAVEELSPGGQPRRRQALRTAELSLGRNERRELMLRLQAPGPAGRPRCFPLRAARLFTRFAEAGRSTLRLPAHDTPGAGAVQLLLSDCPPDRLRRFLRTLRLKLAAAPGPGPASARAQLLGPRPRDFVTISPVQPEERRLRAATRVPDTTLVKRPVEPQAGAEPSTEAPRWPLPVKRLSLPSTKPQLSEEQAAVLRAVLKGQSIFFTGSAGTGKSYLLKRILGSLPPTGTVATASTGVAACHIGGTTLHAFAGIGSGQAPLAQCVALAQRPGVRQGWLNCQRLVIDEISMVEADLFDKLEAVARAVRQQNKPFGGIQLIICGDFLQLPPVTKGSQPPRFCFQSKSWKRCVPVTLELTKVWRQADQTFISLLQAVRLGRCSDEVTRQLQATASHKVGRDGIVATRLCTHQDDVALTNERRLQELPGKVHRFEAMDSNPELASTLDAQCPVSQLLQLKLGAQVMLVKNLSVSRGLVNGARGVVVGFEAEGRGLPQVRFLCGVTEVIHADRWTVQATGGQLLSRQQLPLQLAWAMSIHKSQGMTLDCVEISLGRVFASGQAYVALSRARSLQGLRVLDFDPMAVRCDPRVLHFYATLRRGRSLSLESPDDDEAASDQENMDPIL

SEQ ID NO: 33470 - protein, 266 aa, Homo sapiens
MLSGIEAAAGEYEDSELRCRVAVEELSPGGQPRRRQALRTAELSLGRNERRELMLRLQAPGPAGRPRCFPLRAARLFTRFAEAGRSTLRLPAHDTPGAGAVQLLLSDCPPDRLRRFLRTLRLKLAAAPGPGPASARAQLLGPRPRDFVTISPVQPEERRLRAATRVPDTTLVKRPVEPQAGAEPSTEAPRWPLPVKRLSLPSTKPQLSEEQAAVLRAVLKGQSIFFTGSAGSGGREEVGGQWWGGIEEQGDLSNFAPVQEQGSHIC

SEQ ID NO: 33471 - protein, 707 aa, Homo sapiens
MLSGIEAAAGEYEDSELRCRVAVEELSPGGQPRRRQALRTAELSLGRNERRELMLRLQAPGPAGRPRCFPLRAARLFTRFAEAGRSTLRLPAHDTPGAGAVQLLLSDCPPDRLRRFLRTLRLKLAAAPGPGPASARAQLLGPRPRDFVTISPVQPEERRLRAATRVPDTTLVKRPVEPQAGAEPSTEAPRWPLPVKRLSLPSTKPQLSEEQAAVLRAVLKGQSIFFTGSAGTGKSYLLKRILGSLPPTGTVATASTGVAACHIGGTTLHAFAGIGSGQAPLAQCVALAQRPGVRQGWLNCQRLVIDEISMVEADLFDKLEAVARAVRQQNKPFGGIQLIICGDFLQLPPVTKGSQPPRFCFQSKSWKRCVPVTLELTKVWRQADQTFISLLQAVRLGRCSDEVTRQLQATASHKVGRDGIVATRLCTHQDDVALTNERRLQELPGKVHRFEAMDSNPELASTLDAQCPVSQLLQLKLGAQVMLVKNLSVSRGLVNGARGVVVGFEAEGRGLPQVRFLCGVTEVIHADRWTVQATGGQLLSRQQLPLQLAWAMSIHKSQGMTLDCVEISLGRVFASGQAYVALSRARSLQGLRVLDFDPMAVRCDPRVLHFYATLRRGRSLSLAAEGRGNEDRCSGSSIRALGGDWWGLRLGAASKQRTELRCVSTARPSLAQPRTNTLQSLTKEHKLQNVHPYFKLLFQGINSVWGH

SEQ ID NO: 33472 - protein, 588 aa, Homo sapiens
MLRLQAPGPAGRPRCFPLRAARLFTRFAEAGRSTLRLPAHDTPGAGAVQLLLSDCPPDRLRRFLRTLRLKLAAAPGPGPASARAQLLGPRPRDFVTISPVQPEERRLRAATRVPDTTLVKRPVEPQAGAEPSTEAPRWPLPVKRLSLPSTKPQLSEEQAAVLRAVLKGQSIFFTGSAGTGKSYLLKRILGSLPPTGTVATASTGVAACHIGGTTLHAFAGIGSGQAPLAQCVALAQRPGVRQGWLNCQRLVIDEISMVEADLFDKLEAVARAVRQQNKPFGGIQLIICGDFLQLPPVTKGSQPPRFCFQSKSWKRCVPVTLELTKVWRQADQTFISLLQAVRLGRCSDEVTRQLQATASHKVGRDGIVATRLCTHQDDVALTNERRLQELPGKVHRFEAMDSNPELASTLDAQCPVSQLLQLKLGAQVMLVKNLSVSRGLVNGARGVVVGFEAEGRGLPQVRFLCGVTEVIHADRWTVQATGGQLLSRQQLPLQLAWAMSIHKSQGMTLDCVEISLGRVFASGQAYVALSRARSLQGLRVLDFDPMAVRCDPRVLHFYATLRRGRSLSLESPDDDEAASDQENMDPIL

SEQ ID NO: 33473 - protein, 303 aa, Homo sapiens
MGRPLLLPLLPLLLPPAFLQPSGSTGSGPSYLYGVTQPKHLSASMGGSVEIPFSFYYPWELATAPDVRISWRRGHFHRQSFYSTRPPSIHKDYVNRLFLNWTEGQKSGFLRISNLQKQDQSVYFCRVELDTRSSGRQQWQSIEGTKLSITQAVTTTTQRPSSMTTTWRLSSTTTTTGLRVTQGKRRSDSWHISLETAVGVAVAVTVLGIMILGLICLLRWRRRKGQQRTKATTPAREPFQNTEEPYENIRNEGQNTDPKLNPKDDGIVYASLALSSSTSPRAPPSHRPLKSPQNETLYSVLKA

SEQ ID NO: 33474 - protein, 299 aa, Homo sapiens
MGRPLLLPLLPLLLPPAFLQPSGSTGSGPSYLYGVTQPKHLSASMGGSVEIPFSFYYPWELATAPDVRISWRRGHFHRQSFYSTRPPSIHKDYVNRLFLNWTEGQKSGFLRISNLQKQDQSVYFCRVELDTRSSGRQQWQSIEGTKLSITQAVTTTTQRPSSMTTTWRLSSTTTTTGLRVTQGKRRSDSWHISLETAVGVAVAVTVLGIMILGLICLLRWRRRKGQQRTKATTPAREPFQNTEEPYENIRNEGQNTDPKLNPKLHLTQSTSQPPSPQEPPERDPVLCLKGLTNGQPSQD

SEQ ID NO: 33475 - protein, 230 aa, Homo sapiens
MGRPLLLPLLPLLLPPAFLQPSGSTGSGPSYLYGVTQPKHLSASMGGSVEIPFSFYYPWELATAPDVRISWRRGHFHRQSFYSTRPPSIHKDYVNRLFLNWTEGQKSGFLRISNLQKQDQSVYFCRVELDTRSSGRQQWQSIEGTKLSITQGQQRTKATTPAREPFQNTEEPYENIRNEGQNTDPKLNPKDDGIVYASLALSSSTSPRAPPSHRPLKSPQNETLYSVLKA

SEQ ID NO: 33476 - protein, 175 aa, Homo sapiens
MGRPLLLPLLPLLLPPAFLQPSGSTGSGPSYLYGVTQPKHLSASMGGSVEIPFSFYYPWELATAPDVRISWRRGHFHRQSFYSTRPPSIHKDYVNRLFLNWTEGQKSGFLRISNLQKQDQSVYFCRVELDTRSSGRQQWQSIEGTKLSITQGNPSKTQRSHMRISGMKDKIQIPS

SEQ ID NO: 33477 - protein, 227 aa, Homo sapiens
MGRPLLLPLLLLLQPPAFLQPGGSTGSGPSYLYGVTQPKHLSASMGGSVEIPFSFYYPWELAIVPNVRISWRRGHFHGQSFYSTRPPSIHKDYVNRLFLNWTEGQESGFLRISNLRKEDQSVYFCRVELDTRRSGRQQLQSIKGTKLTITQAVTTTTTWRPSSTTTIAGLRVTESKGHSESWHLSLDTAIRVALAVAVLKTVILGLLCLLLLWWRRRKGSRAPSSDF

SEQ ID NO: 33478 - protein, 149 aa, Homo sapiens
MGRPLLLPLLLLLQPPAFLQPGLCEPALSELDRGSGERLPQDLKPAEGGPVCVFLPSRAGHPEIREAAVAVHQGDQTHHHPGCHNHHHLEAQQHNHHSRPQGHRKQRALRIMAPKSGHCHQGCIGCRCAQNCHFGTAVPPPPVVEEKER

SEQ ID NO: 33479 - protein, 271 aa, Homo sapiens
MGRASYGGSPVGHQSSSDHPRAKTCRSPVRDGPRTLCGVPTVALSLHFLREASSGSRTCGRRTSLCTSAKSSWTYRSGRLSWQSIKGTHLTITQALRQPLHRAPLLPGQLCWSPRPLEKNKAMGRPLLLPLLLLLQPPAFLQPGLCEPALSELDRGSGERLPQDLKPAEGGPVCVFLPSRAGHPEIREAAVAVHQGDQTHHHPGCHNHHHLEAQQHNHHSRPQGHRKQRALRIMAPKSGHCHQGCIGCRCAQNCHFGTAVPPPPVVEEKER

SEQ ID NO: 33480 - protein, 191 aa, Homo sapiens
MCFSRADAADNYPFGTCQQRKLFPHFHPPNLIGNKFVPLRGSPHRGPGCYFSDGYGLAYDLSKIPTSIKGYTLGARTAVRFKPIQKEMTPHAGRYQKVSPQQEKHKQNFAPFNVLVPRFKNYPKDTYYPSPGAYNPEKKPPPKIAWPMKFGSPDWAQVPCLQKRTLKAELSTDKDFRKHRNRVAYLSLYYN

SEQ ID NO: 33481 - protein, 150 aa, Homo sapiens
MCFSRADAADNYPFGTCQQRKLFPHFHPPNLIGNKFVPLRGSPHRGPGCYFSDGYGLAYDLSKIPTSIKGYTLGARTAVRFKPIQKEMTPHAGRYQKVSPQQEKHKQNFAPFNVLVPRFKNYPKDTYYPRYVSSLLVHFNKKSNRRKRST

SEQ ID NO: 33482 - protein, 158 aa, Homo sapiens
MCFSRADAADNYPFGTCQQRKLFPHFHPPNLIGNKFVPLRGSPHRGPGCYFSDEMTPHAGRYQKVSPQQEKHKQNFAPFNVLVPRFKNYPKDTYYPSPGAYNPEKKPPPKIAWPMKFGSPDWAQVPCLQKRTLKAELSTDKDFRKHRNRVAYLSLYYN

SEQ ID NO: 33483 - protein, 313 aa, Homo sapiens
MLLSKINSLAHLRAAPCNDLHATKLAPGKEKEPLESQYQVGPLLGSGGFGSVYSGIRVSDNLPVAIKHVEKDRISDWGELPNGTRVPMEVVLLKKVSSGFSGVIRLLDWFERPDSFVLILERPEPVQDLFDFITERGALQEELARSFFWQVLEAVRHCHNCGVLHRDIKDENILIDLNRGELKLIDFGSGALLKDTVYTDFDGTRVYSPPEWIRYHRYHGRSAAVWSLGILLYDMVCGDIPFEHDEEIIRGQVFFRQRVSSECQHLIRWCLALRPSDRPTFEEIQNHPWMQDVLLPQETAEIHLHSLSPGPSK

SEQ ID NO: 33484 - protein, 404 aa, Homo sapiens
MPHEPHEPLTPPFSALPDPAGAPSRRQSRQRPQLSSDSPSAFRASRSHSRNATRSHSHSHSPRHSLRHSPGSGSCGSSSGHRPCADILEVGMLLSKINSLAHLRAAPCNDLHATKLAPGKEKEPLESQYQVGPLLGSGGFGSVYSGIRVSDNLPVAIKHVEKDRISDWGELPNGTRVPMEVVLLKKVSSGFSGVIRLLDWFERPDSFVLILERPEPVQDLFDFITERGALQEELARSFFWQVLEAVRHCHNCGVLHRDIKDENILIDLNRGELKLIDFGSGALLKDTVYTDFDGTRVYSPPEWIRYHRYHGRSAAVWSLGILLYDMVCGDIPFEHDEEIIRGQVFFRQRVSSECQHLIRWCLALRPSDRPTFEEIQNHPWMQDVLLPQETAEIHLHSLSPGPSK

SEQ ID NO: 33485 - protein, 311 aa, Homo sapiens
MLTKPLQGPPAPPGTPTPPPGGKDREAFEAEYRLGPLLGKGGFGTVFAGHRLTDRLQVAIKVIPRNRVLGWSPLSDSVTCPLEVALLWKVGAGGGHPGVIRLLDWFETQEGFMLVLERPLPAQDLFDYITEKGPLGEGPSRCFFGQVVAAIQHCHSRGVVHRDIKDENILIDLRRGCAKLIDFGSGALLHDEPYTDFDGTRVYSPPEWISRHQYHALPATVWSLGILLYDMVCGDIPFERDQEILEAELHFPAHVSPDCCALIRRCLAPKPSSRPSLEEILLDPWMQTPAEDVPLNPSKGGPAPLAWSLLP

SEQ ID NO: 33486 - protein, 326 aa, Homo sapiens
MLLSKFGSLAHLCGPGGVDHLPVKILQPAKADKESFEKAYQVGAVLGSGGFGTVYAGSRIADGLPVAVKHVVKERVTEWGSLGGATVPLEVVLLRKVGAAGGARGVIRLLDWFERPDGFLLVLERPEPAQDLFDFITERGALDEPLARRFFAQVLAAVRHCHSCGVVHRDIKDENLLVDLRSGELKLIDFGSGALLKDTVYTDFDGTRVYSPPEWIRYHRYHGRSATVWSLGVLLYDMVCGDIPFEQDEEILRGRLLFRRRVSPECQQLIRWCLSLRPSERPSLDQIAAHPWMLGADGGVPESCDLRLCTLDPDDVASTTSSSESL

SEQ ID NO: 33487 - protein, 479 aa, Homo sapiens
MSFQAPRRLLELAGQSLLRDQALAISVLDELPRELFPRLFVEAFTSRCCEVLKVMVQAWPFPCLPLGSLMKTPDLEILHYVVDGIDCLLAQKVRPRRWKLQVLEMRDVDENFWTIWSGARPLSCSPEAMSKRQTVEDCPRTGEKQPLKVFMDVCLKEKSVDEDLSFFSGWVQHRRRSVHLCCTKVVNYSMNILNFRNILETVYPDSIQVLEIWNMCWPCMVAEVSRYLSQMKNLRKLFISDGCGYLPSFESQGQLVAEFSSVFLRLEYLQMLYMRRIRFFEGYLDQLIRCLKSPLETLALTYGSLDEEDLKCLPWYPSLSQLKQLNLSHGTLRFIRLEPLRALLEKVAATLQTLFLVDCGIGDSKLRVILPALSRCSNLTTFCFHGNDTSMDGLKDLLRHTGRLSNLSLETYPAPRESLDNRGRVISELLTPLQAELMRILREVREPNRIFFGPVSCPCCGMSPTEQLEFNFCLRGRPA

SEQ ID NO: 33488 - protein, 127 aa, Homo sapiens
MGDKPIWEQIGSSFIQHYYQLFDNDRTQLGAIYIDASCLTWEGQQFQGKAAIVEKLSSLPFQKIQHSITAQDHQPTPDSCIISMVVGQLKADEDPIMGFHQMFLLKNINDAWVCTNDMFRLALHNFG

SEQ ID NO: 33489 - protein, 1606 aa, Homo sapiens
MSEDSRGDSRAESAKDLEKQLRLRVCVLSELQKTERDYVGTLEFLVSAFLHRMNQCAASKVDKNVTEETVKMLFSNIEDILAVHKEFLKVVEECLHPEPNAQQEVGTCFLHFKDKFRIYDEYCSNHEKAQKLLLELNKIRTIRTFLLNCMLLGGRKNTDVPLEGYLVTPIQRICKYPLILKELLKRTPRKHSDYAAVMEALQAMKAVCSNINEAKRQMEKLEVLEEWQSHIEGWEGSNITDTCTEMLMCGVLLKISSGNIQERVFFLFDNLLVYCKRKHRRLKNSKASTDGHRYLFRGRINTEVMEVENVDDGTADFHSSGHIVVNGWKIHNTAKNKWFVCMAKTPEEKHEWFEAILKERERRKGLKLGMEQDTWVMISEQGEKLYKMMCRQGNLIKDRKRKLTTFPKCFLGSEFVSWLLEIGEIHRPEEGVHLGQALLENGIIHHVTDKHQFKPEQMLYRFRYDDGTFYPRNEMQDVISKGVRLYCRLHSLFTPVIRDKDYHLRTYKSVVMANKLIDWLIAQGDCRTREEAMIFGVGLCDNGFMHHVLEKSEFKDEPLLFRFFSDEEMEGSNMKHRLMKHDLKVVENVIAKSLLIKSNEGSYGFGLEDKNKVPIIKLVEKGSNAEMAGMEVGKKIFAINGDLVFMRPFNEVDCFLKSCLNSRKPLRVLVSTKPRETVKIPDSADGLGFQIRGFGPSVVHAVGRGTVAAAAGLHPGQCIIKVNGINVSKETHASVIAHVTACRKYRRPTKQDSIQWVYNSIESAQEDLQKSHSKPPGDEAGDAFDCKVEEVIDKFNTMAIIDGKKEHVSLTVDNVHLEYGVVYEYDSTAGIKCNVVEKMIEPKGFFSLTAKILEALAKSDEHFVQNCTSLNSLNEVIPTDLQSKFSALCSERIEHLCQRISSYKKFSRVLKNRAWPTFKQAKSKISPLHSSDFCPTNCHVNVMEVSYPKTSTSLGSAFGVQLDSRKHNSHDKENKSSEQGKLSPMVYIQHTITTMAAPSGLSLGQQDGHGLRYLLKEEDLETQDIYQKLLGKLQTALKEVEMCVCQIDDLLSSITYSPKLERKTSEGIIPTDSDNEKGERNSKRVCFNVAGDEQEDSGHDTISNRDSYSDCNSNRNSIASFTSICSSQCSSYFHSDEMDSGDELPLSVRISHDKQDKIHSCLEHLFSQVDSITNLLKGQAVVRAFDQTKYLTPGRGLQEFQQEMEPKLSCPKRLRLHIKQDPWNLPSSVRTLAQNIRKFVEEVKCRLLLALLEYSDSETQLRRDMVFCQTLVATVCAFSEQLMAALNQMFDNSKENEMETWEASRRWLDQIANAGVLFHFQSLLSPNLTDEQAMLEDTLVALFDLEKVSFYFKPSEEEPLVANVPLTYQAEGSRQALKVYFYIDSYHFEQLPQRLKNGGGFKIHPVLFAQALESMEGYYYRDNVSVEEFQAQINAASLEKVKQYNQKLRAFYLDKSNSPPNSTSKAAYVDKLMRPLNALDELYRLVASFIRSKRTAACANTACSASGVGLLSVSSELCNRLGACHIIMCSSGVHRCTLSVTLEQAIILARSHGLPPRYIMQATDVMRKQGARVQNTAKNLGVRDRTPQSAPRLYKLCEPPPPAGEE

SEQ ID NO: 33490 - protein, 979 aa, Homo sapiens
MSEDSRGDSRAESAKDLEKQLRLRVCVLSELQKTERDYVGTLEFLVSAFLHRMNQCAASKVDKNVTEETVKMLFSNIEDILAVHKEFLKVVEECLHPEPNAQQEVGTCFLHFKDKFRIYDEYCSNHEKAQKLLLELNKIRTIRTFLLNCMLLGGRKNTDVPLEGYLVTPIQRICKYPLILKELLKRTPRKHSDYAAVMEALQAMKAVCSNINEAKRQMEKLEVLEEWQSHIEGWEGSNITDTCTEMLMCGVLLKISSGNIQERVFFLFDNLLVYCKRKHRRLKNSKASTDGHRYLFRGRINTEVMEVENVDDGTADFHSSGHIVVNGWKIHNTAKNKWFVCMAKTPEEKHEWFEAILKERERRKGLKLGMEQDTWVMISEQGEKLYKMMCRQGNLIKDRKRKLTTFPKCFLGSEFVSWLLEIGEIHRPEEGVHLGQALLENGIIHHVTDKHQFKPEQMLYRFRYDDGTFYPRNEMQDVISKGVRLYCRLHSLFTPVIRDKDYHLRTYKSVVMANKLIDWLIAQGDCRTREEAMIFGVGLCDNGFMHHVLEKSEFKDEPLLFRFFSDEEMEGSNMKHRLMKHDLKVVENVIAKSLLIKSNEGSYGFGLEDKNKVPIIKLVEKGSNAEMAGMEVGKKIFAINGDLVFMRPFNEVDCFLKSCLNSRKPLRVLVSTKPRETVKIPDSADGLGFQIRGFGPSVVHAVGRGTVAAAAGLHPGQCIIKVNGINVSKETHASVIAHVTACRKYRRPTKQDSIQWVYNSIESAQEDLQKSHSKPPGDEAGDAFDCKVEEVIDKFNTMAIIDGKKEHVSLTVDNVHLEYGVVYEYDSTAGIKCNVVEKMIEPKGFFSLTAKILEALAKSDEHFVQNCTSLNSLNEVIPTDLQSKFSALCSERIEHLCQRISSYKKVQASERFYNFTARHAVWEHSFDLHSVSSTFPVPVTMEFLLLPPPLLGISQDGRQHCIPEDLPSQEMLLAERAPV

SEQ ID NO: 33491 - protein, 984 aa, Homo sapiens
MSEDSRGDSRAESAKDLEKQLRLRVCVLSELQKTERDYVGTLEFLVSKDKFRIYDEYCSNHEKAQKLLLELNKIRTIRTFLLNCMLLGGRKNTDVPLEGYLVTPIQRICKYPLILKELLKRTPRKHSDYAAVMEALQAMKAVCSNINEAKRQMEKLEVLEEWQSHIEGWEGSNITDTCTEMLMCGVLLKISSGNIQERVFFLFDNLLVYCKRKHRRLKNSKASTDGHRYLFRGRINTEVMEVENVDDGTADFHSSGHIVVNGWKIHNTAKNKWFVCMAKTPEEKHEWFEAILKERERRKGLKLGMEQDTWVMISEQGEKLYKMMCRQGNLIKDRKRKLTTFPKCFLGSEFVSWLLEIGEIHRPEEGVHLGQALLENGIIHHVTDKHQFKPEQMLYRFRYDDGTFYPRNEMQDVISKGVRLYCRLHSLFTPVIRDKDYHLRTYKSVVMANKLIDWLIAQGDCRTREEAMIFGVGLCDNGFMHHVLEKSEFKDEPLLFRFFSDEEMEGSNMKHRLMKHDLKVVENVIAKSLLIKSNEGSYGFGLEDKNKVPIIKLVEKGSNAEMAGMEVGKKIFAINGDLVFMRPFNEVDCFLKSCLNSRKPLRVLVSTKPRETVKIPDSADGLGFQIRGFGPSVVHAVGRGTVAAAAGLHPGQCIIKVNGINVSKETHASVIAHVTACRKYRRPTKQDSIQWVYNSIESAQEDLQKSHSKPPGDEAGDAFDCKVEEVIDKFNTMAIIDGKKEHVSLTVDNVHLEYGVVYEYDSTAGIKCNVVEKMIEPKGFFSLTAKILEALAKSDEHFVQNCTSLNSLNEVIPTDLQSKFSALCSERIEHLCQRISSYKKFSRVLKNRAWPTFKQAKSKISPLHSSDFCPTNCHVNVMEVSYPKTSTSLGSAFGVQLDSRKHNSHDKENKSSEQGKLSPMVYIQHTITTMAAPSGLSLGQQDGHGLRYLLKEEDLETQDIYQKLLGKLQTALKEVEMCVCQIDE

SEQ ID NO: 33492 - protein, 382 aa, Homo sapiens
MVRWKLQVLDLQDVCENFWMVWSEAMARGCFLNAKRNKKPVQDCPRMRGRQPLTVFVELWLKNRTLDEHLTCLLLWVKQRKDLLHLCCKKLKILGMPFRNIRSILKMVNLDCIQEVEVNCKWVLPILTQFTPYLGHMRNLQKLVLSHMDVSRYVSPEQKKEIVTQFTTQFLKLHCLQKLYMNSVSFLEGHLDQLLSCLKTSLKVLTITNCVLLESDLKHLSQCPSISQLKTLDLSGIRLTNYSLVPLQILLEKVAATLEYLDLDDCGIIDSQVNAILPALSRCFELNTFSFCGNPISMATLENLLSHTIILKNLCLELYPAPRESYGADGTLCWSRFTQIRAELMKRVRDLRHPKRILFGTDYCPDCGNRSFYDLEADQYCC

SEQ ID NO: 33493 - protein, 478 aa, Homo sapiens
MKMSIRTPPRLLELAGRSLLRDQALAMSTLEELPTELFPPLFMEAFSRRCCEALKLMVQAWPFRRLPLRPLIKMPCLEAFQAVLDGLDALLTQGVCPRRWKLQVLDLQDVCENFWMVWSEAMARGSFLNAKRNKTPVQDCPRMRGQQPLTVFVELWLKNRTLDEYLTYLLLWVKQRKDLLHLCCKKLKILGMPFRNIRSILKMVNLDCIQEVEVNCKWVLPILTQFTPYLGHMRNLQKLVLSHMDVSRYVSPEQKKEIVTQFTTQFLKLHCLQKLYMNSVSFLEGHLDQLLSCLKTSLKVLTITNCVLLESDLKHLSQCPSISQLKTLDLSGIRLTNYSLVPLQILLEKVAATLEYLDLDDCGIIDSQVNAILPALSRCFELNAFSFCGNPISMATLENLLSHTIILKNLCVEVYPAPRESYGADGTLCWNRFAQIRAELMNRVRDLRHPKRIFFCIDNCPDCGNRSFYDLEADQYCC

SEQ ID NO: 33494 - protein, 474 aa, Homo sapiens
MSLQAPSRLLELAGQSLLRNQFLTIFTLDELPREVFPLMFMEAFSMRRFEALKLMVQAWPFLRLPLGSLMKTPHLETLQAVLRGLDTLVAQKVRPRRWKLQVLDLQDVDENFWTIWSGARVLSCSPEAMSKRQTVEDCPRMGEHQPLKVFIDLCLKESTLDECLSYLFGWIHYRRGLVHLCCSKVQNYSMPTSSFRNLLERIYPDSIQELEVWKKCSLNKTGKFAPYLSQMSNLRELFLAFGYERELYVSVQWPCIPDLDSPFLCLYYPQMLYIKKISNIKEHLEHLLRYLKNPLGAFIFSDAYLADRDMECLSQYPSLSQLKELRLIHILMWTTNLQPLGALLEKVAATLKTLVLKDCRIQDPQLRVLLPALSHCSQLTTFNFHGNETSMNALKDLLRHTRGLSKLGLELYPAPLESLDYKGHVNWEILTPIRAELMRTLREVRQPKRIFFGPVPCPTCGSWPSEKVDFHLCS

SEQ ID NO: 33495 - protein, 57 aa, Homo sapiens
MLCAHFSDQGPAHLTTSKSAFLSNKKTSTLKHLLGETRSDGSACNSGISGGRGRKIP

SEQ ID NO: 33496 - protein, 114 aa, Homo sapiens
MLSGARCRLASALRGTRAPPSAVARRCLHASGSRPLADRGKKTEEPPRDFDPALLEFLVCPLSKKPLRYEASTNELINEELGIAYPIIDGIPNMIPQAARMTRQSKKQEEVEQR

SEQ ID NO: 33497 - protein, 90 aa, Homo sapiens
MDRRRMALRPGSRRPTAFFFHSRWLVPNLLAFFLGLSGAGPIHLPMPWPNGRRHRVLDPHTQLSTHEAPGRWKPVAPRTMKACPQVLLEW

SEQ ID NO: 33498 - protein, 919 aa, Homo sapiens
MWLAAAAPSLARRLLFLGPPPPPLLLLVFSRSSRRRLHSLGLAAMPEKRPFERLPADVSPINYSLCLKPDLLDFTFEGKLEAAAQVRQATNQIVMNCADIDIITASYAPEGDEEIHATGFNYQNEDEKVTLSFPSTLQTGTGTLKIDFVGELNDKMKGFYRSKYTTPSGEVRYAAVTQFEATDARRAFPCWDEPAIKATFDISLVVPKDRVALSNMNVIDRKPYPDDENLVEVKFARTPVMSTYLVAFVVGEYDFVETRSKDGVCVRVYTPVGKAEQGKFALEVAAKTLPFYKDYFNVPYPLPKIDLIAIADFAAGAMENWGLVTYRETALLIDPKNSCSSSRQWVALVVGHELAHQWFGNLVTMEWWTHLWLNEGFASWIEYLCVDHCFPEYDIWTQFVSADYTRAQELDALDNSHPIEVSVGHPSEVDEIFDAISYSKGASVIRMLHDYIGDKDFKKGMNMYLTKFQQKNAATEDLWESLENASGKPIAAVMNTWTKQMGFPLIYVEAEQVEDDRLLRLSQKKFCAGGSYVGEDCPQWMVPITISTSEDPNQAKLKILMDKPEMNVVLKNVKPDQWVKLNLGTVGFYRTQYSSAMLESLLPGIRDLSLPPVDRLGLQNDLFSLARAGIISTVEVLKVMEAFVNEPNYTVWSDLSCNLGILSTLLSHTDFYEEIQEFVKDVFSPIGERLGWDPKPGEGHLDALLRGLVLGKLGKAGHKATLEEARRRFKDHVEGKQILSADLRSPVYLTVLKHGDGTTLDIMLKLHKQADMQEEKNRIERVLGATLLPDLIQKVLTFALSEEVRPQDTVSVIGGVAGGSKHGRKAAWKFIKDNWEELYNRYQGGFLISRLIKLSVEGFAVDKMAGEVKAFFESHPAPSAERTIQQCCENILLNAAWLKRDAESIHQYLLQRKASPPTV

SEQ ID NO: 33499 - protein, 839 aa, Homo sapiens
MPEKRPFERLPADVSPINYSLCLKPDLLDFTFEGKLEAAAQVRQATNQIVMNCADIDIITASYAPEGDEEIHATGFNYQNEDEKVTLSFPSTLQTGTGTLKIDFVGELNDKMKGFYRSKYTTPSGEVRYAAVTQFENVIDRKPYPDDENLVEVKFARTPVMSTYLVAFVVGEYDFVETRSKDGVCVRVYTPVGKAEQGKFALEVAAKTLPFYKDYFNVPYPLPKIDLIAIADFAAGAMENWGLVTYRETALLIDPKNSCSSSRQWVALVVGHELAHQWFGNLVTMEWWTHLWLNEGFASWIEYLCVDHCFPEYDIWTQFVSADYTRAQELDALDNSHPIEVSVGHPSEVDEIFDAISYSKGASVIRMLHDYIGDKDFKKGMNMYLTKFQQKNAATEDLWESLENASGKPIAAVMNTWTKQMGFPLIYVEAEQVEDDRLLRLSQKKFCAGGSYVGEDCPQWMVPITISTSEDPNQAKLKILMDKPEMNVVLKNVKPDQWVKLNLGTVGFYRTQYSSAMLESLLPGIRDLSLPPVDRLGLQNDLFSLARAGIISTVEVLKVMEAFVNEPNYTVWSDLSCNLGILSTLLSHTDFYEEIQEFVKDVFSPIGERLGWDPKPGEGHLDALLRGLVLGKLGKAGHKATLEEARRRFKDHVEGKQILSADLRSPVYLTVLKHGDGTTLDIMLKLHKQADMQEEKNRIERVLGATLLPDLIQKVLTFALSEEVRPQDTVSVIGGVAGGSKHGRKAAWKFIKDNWEELYNRYQGGFLISRLIKLSVEGFAVDKMAGEVKAFFESHPAPSAERTIQQCCENILLNAAWLKRDAESIHQYLLQRKASPPTV

SEQ ID NO: 33500 - protein, 178 aa, Homo sapiens
MSEVRLPPLRALDDFVLGSARLAAPDPCDPQRWCHRVINNLLYYQTNYLLCFGIGLALAGYVRPLHTLLSALVVAVALGVLVWAAETRAAVRRCRRSHPAACLAAVLAVGLLVLWVAGGACTFLFSIAGPVLLILVHASLRLRNLKNKIENKIESIGLKRTPMGLLLEALGQEQEAGS

SEQ ID NO: 33501 - protein, 257 aa, Homo sapiens
MSILFYVIFLAYLRGIQGNNMDQRSLPEDSLNSLIIKLIQADILKNKLSKQMVDVKENYQSTLPKAEAPREPERGGPAKSAFQPVIAMDTELLRQQRRYNSPRVLLSDSTPLEPPPLYLMEDYVGSPVVANRTSRRKRYAEHKSHRGEYSVCDSESLWVTDKSSAIDIRGHQVTVLGEIKTGNSPVKQYFYETRCKEARPVKNGCRGIDDKHWNSQCKTSQTYVRALTSENNKLVGWRWIRIDTSCVCALSRKIGRT

SEQ ID NO: 33502 - protein, 270 aa, Homo sapiens
MVTFATILQVNKVMSILFYVIFLAYLRGIQGNNMDQRSLPEDSLNSLIIKLIQADILKNKLSKQMVDVKENYQSTLPKAEAPREPERGGPAKSAFQPVIAMDTELLRQQRRYNSPRVLLSDSTPLEPPPLYLMEDYVGSPVVANRTSRRKRYAEHKSHRGEYSVCDSESLWVTDKSSAIDIRGHQVTVLGEIKTGNSPVKQYFYETRCKEARPVKNGCRGIDDKHWNSQCKTSQTYVRALTSENNKLVGWRWIRIDTSCVCALSRKIGRT

SEQ ID NO: 33503 - protein, 2012 aa, Homo sapiens
MATPLAVNSAASLWGPYKDIWHKVGNALWRRQPEAVHLLDKILKKHKPDFISLFKNPPKNVQQHEKVQKASTEGVAIQGQQGTRLLPEQLIKEAFILSDLFDIGELAAVELLLAGEHQQPHFPGLTRGLVAVLLYWDGKRCIANSLKALIQSRRGKTWTLELSPELASMTTRFTDELMEQGLTYKVLTLVSQIDVNNEFEKLQRERGLGSEKHRKEVSDLIKECRQSLAESLFAWACQSPLGKEDTLLLIGHLERVTVEANGSLDAVNLALLMALLYCFDISFIEQSTEERDDMIHQLPLLTEKQYIATIHSRLQDSQLWKLPGLQATVRLAWALALRGISQLPDVTALAEFTEADEAMAELAIADNVFLFLMESVVVSEYFYQEEFYIRRVHNLITDFLALMPMKVKQLRNRADEDARMIHMSMQMGNEPPISLRRDLEHLMLLIGELYKKNPFHLELALEYWCPTEPLQTPTIMGSYLGVAHQRPPQRQVVLSKFVRQMGDLLPPTIYIPYLKMLQGLANGPQCAHYCFSLLKVNGSSHVENIQGAGGSPVSWEHFFHSLMLYHEHLRKDLPSADSVQYRHLPSRGITQKEQDGLIAFLQLTSTIITWSENARLALCEHPQWTPVVVILGLLQCSIPPVLKAELLKTLAAFGKSPEIAASLWQSLEYTQILQTVRIPSQRQAIGIEVELNEIESRCEEYPLTRAFCQLISTLVESSFPSNLGAGLRPPGFDPYLQFLRDSVFLRFRTRAYRRAAEKWEVAEVVLEVFYKLLRDYEPQLEDFVDQFVELQGEEIIAYKPPGFSLMYHLLNESPMLELALSLLEEGVKQLDTYAPFPGKKHLEKAVQHCLALLNLTLQKENLFMDLLRESQLALIVCPLEQLLQGINPRTKKADNVVNIARYLYHGNTNPELAFESAKILCCISCNSNIQIKLVGDFTHDQSISQKLMAGFVECLDCEDAEEFVRLEEGSELEKKLVAIRHETRIHILNLLITSLECNPPNLALYLLGFELKKPVSTTNLQDPGVLGCPRTCLHAILNILEKGTEGRTGPVAVRESPQLAELCYQVIYQLCACSDTSGPTMRYLRTSQDFLFSQLQYLPFSNKEYEISMLNQMSWLMKTASIELRVTSLNRQRSHTQRLLHLLLDDMPVKPYSDGEGGIEDENRSVSGFLHFDTATKVRRKILNILDSIDFSQEIPEPLQLDFFDRAQIEQVIANCEHKNLRGQTVCNVKLLHRVLVAEVNALQGMAAIGQRPLLMEEISTVLQYVVGRNKLLQCLHAKRHALESWRQLVEIILTACPQDLIQAEDRQLIIRDILQDVHDKILDDEAAQELMPVVAGAVFTLTAHLSQAVLTEQKETSVLGPAEAHYAFMLDSCFTSPPPEENPLVGFASIGDSSLYIILKKLLDFILKTGGGFQRVRTHLYGSLLYYLQIAQRPDEPDTLEAAKKTMWERLTAPEDVFSKLQRENIAIIESYGAALMEVVCRDACDGHEIGRMLALALLDRIVSVDKQQQWLLYLSNSGYLKVLVDSLVEDDRTLQSLLTPQPPLLKALYTYESKMAFLTRVAKIQQGALELLRSGVIVRLAQCQVYDMRPETDPQSMFGMRDPPMFIPTPVDRYRQILLPALQLCQVILTSSMAQHLQAAGQVLQFLISHSDTIQAILRCQDVSAGSLQELALLTGIISKAALPGILSELDVDVNEGSLMELQGHIGRFQRQCLGLLSRFGGSDRLRQFKFQDDNVEGDKVSKKDEIELAMQQICANVMEYCQSLMLQSSPTFQHAVCLFTPSLSETVNRDGPRQDTQAPVVPYWRLPGLGIIIYLLKQSANDFFSYYDSHRQSVSKLQNVEQLPPDEIKELCQSVMPAGVDKISTAQKYVLARRRLVKVINNRAKLLSLCSFIIETCLFILWRHLEYYLLHCMPTDSQDSLFASRTLFKSRRLQDSFASETNLDFRSGLAIVSQHDLDQLQADAINAFGESLQKKLLDIEGLYSKVRSRYSFIQALVRRIRGLLRISRN

SEQ ID NO: 33504 - protein, 406 aa, Homo sapiens
MALDGPEQMELEEGKAGSGLRQYYLSKIEELQLIVNDKSQNLRRLQAQRNELNAKVRLLREELQLLQEQGSYVGEVVRAMDKKKVLVKVHPEGKFVVDVDKNIDINDVTPNCRVALRNDSYTLHKILPNKVDPLVSLMMVEKVPDSTYEMIGGLDKQIKEIKEVIELPVKHPELFEALGIAQPKGVLLYGPPGTGKTLLARAVAHHTDCTFIRVSGSELVQKFIGEGARMVRELFVMAREHAPSIIFMDEIDSIGSSRLEGGSGGDSEVQRTMLELLNQLDGFEATKNIKVIMATNRIDILDSALLRPGRIDRKIEFPPPNEEARLDILKIHSRKMNLTRGINLRKIAELMPGASGAEVKGVCTEAGMYALRERRVHVTQEDFEMAVAKVMQKDSEKNMSIKKLWK

SEQ ID NO: 33505 - protein, 398 aa, Homo sapiens
MELEEGKAGSGLRQYYLSKIEELQLIVNDKSQNLRRLQAQRNELNAKVRLLREELQLLQEQGSYVGEVVRAMDKKKVLVKVHPEGKFVVDVDKNIDINDVTPNCRVALRNDSYTLHKILPNKVDPLVSLMMVEKVPDSTYEMIGGLDKQIKEIKEVIELPVKHPELFEALGIAQPKGVLLYGPPGTGKTLLARAVAHHTDCTFIRVSGSELVQKFIGEGARMVRELFVMAREHAPSIIFMDEIDSIGSSRLEGGSGGDSEVQRTMLELLNQLDGFEATKNIKVIMATNRIDILDSALLRPGRIDRKIEFPPPNEEARLDILKIHSRKMNLTRGINLRKIAELMPGASGAEVKGVCTEAGMYALRERRVHVTQEDFEMAVAKVMQKDSEKNMSIKKLWK

SEQ ID NO: 33506 - protein, 185 aa, Homo sapiens
MAAQKDQQKDAEAEGLSGTTLLPKLIPSGAGREWLERRRATIRPWSTFVDQQRFSRPRNLGELCQRLVRNVEYYQSNYVFVFLGLILYCVVTSPMLLVALAVFFGACYILYLRTLESKLVLFGREVSPAHQYALAGGISFPFFWLAGAGSAVFWVLGATLVVIGSHAAFHQIEAVDGEELQMEPV

SEQ ID NO: 33507 - protein, 225 aa, Homo sapiens
MQCLLLLPFLLLGTVSALHLENDAPHLESLETQADLGQDLDSSKEQERDLALTEEVIQAEGEEVKASACQDNFEDEEAMESDPAALDKDFQCPREEDIVEVQGSPRCKICRYLLVRTPKTFAEAQNVCSRCYGGNLVSIHDFNFNYRIQCCTSTVNQAQVWIGGNLRGWFLWKRFCWTDGSHWNFAYWSPGQPGNGQGSCVALCTKGGYWRRAQCDKQLPFVCSF

SEQ ID NO: 33508 - protein, 499 aa, Homo sapiens
MSLADELLADLEEAAEEEEGGSYGEEEEEPAIEDVQEETQLDLSGDSVKTIAKLWDSKMFAEIMMKIEEYISKQAKASEVMGPVEAAPEYRVIVDANNLTVEIENELNIIHKFIRDKYSKRFPELESLVPNALDYIRTVKELGNSLDKCKNNENLQQILTNATIMVVSVTASTTQGQQLSEEELERLEEACDMALELNASKHRIYEYVESRMSFIAPNLSIIIGASTAAKIMGVAGGLTNLSKMPACNIMLLGAQRKTLSGFSSTSVLPHTGYIYHSDIVQSLPPDLRRKAARLVAAKCTLAARVDSFHESTEGKVGYELKDEIERKFDKWQEPPPVKQVKPLPAPLDGQRKKRGGRRYRKMKERLGLTEIRKQANRMSFGEIEEDAYQEDLGFSLGHLGKSGSGRVRQTQVNEATKARISKTLQRTLQKQSVVYGGKSTIRDRSSGTASSVAFTPLQGLEIVNPQAAEKKVAEANQKYFSSMAEFLKVKGEKSGLMST

SEQ ID NO: 33509 - protein, 364 aa, Homo sapiens
MSLADELLADLEEAAEEEEGGSYGEEEEEPAIEDVQEETQLDLSGDSVKTIAKLWDSKMFAEIMMKIEEYISKQAKASEVMGPVEAAPEYRVIVDANNLTVEIENELNIIHKFIRDKYSKRFPELESLVPNALDYIRTVKELGNSLDKCKNNENLQQILTNATIMVVSVTASTTQGQQLSEEELERLEEACDMALELNASKHRIYEYVESRMSFIAPNLSIIIGASTAAKIMGVAGGLTNLSKMPACNIMLLGAQRKTLSGFSSTSVLPHTGYIYHSDIVQSLPPDLRRKAARLVAAKCTLAARVDSFHESTEGKVGYELKDEIERKFDKWQRRRWLRPTRSISPAWLSSSRSRARRVALCPPE

SEQ ID NO: 33510 - protein, 278 aa, Homo sapiens
MGPVEAAPEYRVIVDANNLTVEIENELNIIHKFIRDKYSKRFPELESLVPNALDYIRTVKELGNSLDKCKNNENLQQILTNATIMVVSVTASTTQGQQLSEEELERLEEACDMALELNASKHRIYEYVESRMSFIAPNLSIIIGASTAAKIMGVAGGLTNLSKMPACNIMLLGAQRKTLSGFSSTSVLPHTGYIYHSDIVQSLPPDLRRKAARLVAAKCTLAARVDSFHESTEGKVGYELKDEIERKFDKWQEPPPVKQVKPLPAPLDGQRKKRGGRR

SEQ ID NO: 33511 - protein, 491 aa, Homo sapiens
MSLADELLADLEEAAEEEEGGSYGEEEEEPAIEDVQEETQLDLSGDSVKTIAKLWDSKMFAEIMMKIEEYISKQAKASEVMGPVEAAPEYRVIVDANNLTVEIENELNIIHKFIRDKYSKRFPELESLVPNALDYIRTVKELGNSLDKCKNNENLQQILTNATIMVVSVTASTTQGQQLSEEELERLEEACDMALELNASKHRIYEYVESRMSFIAPNLSIIIGASTAAKIMGVAGGLTNLSKMPACNIMLLGAQRKTLSGFSSTSVLPHTGYIYHSDIVQSLPPDLRRKAARLVAAKCTLAARVDSFHESTEGKVGYELKDEIERKFDKWQEPPPVKQVKPLPAPLDGQRKKRGGRRYRKMKERLGLTEIRKQANRMSFGEIEEDAYQEDLGFSLGHLGKSGSGRVRQTQVNEATKARISKTLQVWARPRWGWGPRDTRWGEPRSQPPCPPHSGPCRSRASYMAGSPPSATAPRARPPAWPSPHSRAWRL

SEQ ID NO: 33512 - protein, 1404 aa, Homo sapiens
MAWKTLPIYLLLLLSVFVIQQVSSQDLSSCAGRCGEGYSRDATCNCDYNCQHYMECCPDFKRVCTAELSCKGRCFESFERGRECDCDAQCKKYDKCCPDYESFCAEVHNPTSPPSSKKAPPPSGASQTIKSTTKRSPKPPNKKKTKKVIESEEITEEHSVSENQESSSSSSSSSSSSTIRKIKSSKNSAANRELQKKLKVKDNKKNRTKKKPTPKPPVVDEAGSGLDNGDFKVTTPDTSTTQHNKVSTSPKITTAKPINPRPSLPPNSDTSKETSLTVNKETTVETKETTTTNKQTSTDGKEKTTSAKETQSIEKTSAKDLAPTSKVLAKPTPKAETTTKGPALTTPKEPTPTTPKEPASTTPKEPTPTTIKSAPTTPKEPAPTTTKSAPTTPKEPAPTTTKEPAPTTPKEPAPTTTKEPAPTTTKSAPTTPKEPAPTTPKKPAPTTPKEPAPTTPKEPTPTTPKEPAPTTKEPAPTTPKEPAPTAPKKPAPTTPKEPAPTTPKEPAPTTTKEPSPTTPKEPAPTTTKSAPTTTKEPAPTTTKSAPTTPKEPSPTTTKEPAPTTPKEPAPTTPKKPAPTTPKEPAPTTPKEPAPTTTKKPAPTTPKEPAPTTPKETAPTTPKKLTPTTPEKLAPTTPEKPAPTTPEELAPTTPEEPTPTTPEEPAPTTPKAAAPNTPKEPAPTTPKEPAPTTPKEPAPTTPKETAPTTPKGTAPTTLKEPAPTTPKKPAPKELAPTTTKEPTSTTSDKPAPTTPKGTAPTTPKEPAPTTPKEPAPTTPKGTAPTTLKEPAPTTPKKPAPKELAPTTTKGPTSTTSDKPAPTTPKETAPTTPKEPAPTTPKKPAPTTPETPPPTTSEVSTPTTTKEPTTIHKSPDESTPELSAEPTPKALENSPKEPGVPTTKTPAATKPEMTTTAKDKTTERDLRTTPETTTAAPKMTKETATTTEKTTESKITATTTQVTSTTTQDTTPFKITTLKTTTLAPKVTTTKKTITTTEIMNKPEETAKPKDRATNSKATTPKPQKPTKAPKKPTSTKKPKTMPRVRKPKTTPTPRKMTSTMPELNPTSRIAEAMLQTTTRPNQTPNSKLVEVNPKSEDAGGAEGETPHMLLRPHVFMPEVTPDMDYLPRVPNQGIIINPMLSDETNICNGKPVDGLTTLRNGTLVAFRGHYFWMLSPFSPPSPARRITEVWGIPSPIDTVFTRCNCEGKTFFFKDSQYWRFTNDIKDAGYPKPIFKGFGGLTGQIVAALSTAKYKNWPESVYFFKRGGSIQQYIYKQEPVQKCPGRRPALNYPVYGETTQVRRRRFERAIGPSQTHTIRIQYSPARLAYQDKGVLHNEVKVSILWRGLPNVVTSAISLPNIRKPDGYDYYAFSKDQYYNIDVPSRTARAITTRSGQTLSKVWYNCP

SEQ ID NO: 33513 - protein, 1363 aa, Homo sapiens
MAWKTLPIYLLLLLSVFVIQQVSSQELSCKGRCFESFERGRECDCDAQCKKYDKCCPDYESFCAEVHNPTSPPSSKKAPPPSGASQTIKSTTKRSPKPPNKKKTKKVIESEEITEEHSVSENQESSSSSSSSSSSSTIRKIKSSKNSAANRELQKKLKVKDNKKNRTKKKPTPKPPVVDEAGSGLDNGDFKVTTPDTSTTQHNKVSTSPKITTAKPINPRPSLPPNSDTSKETSLTVNKETTVETKETTTTNKQTSTDGKEKTTSAKETQSIEKTSAKDLAPTSKVLAKPTPKAETTTKGPALTTPKEPTPTTPKEPASTTPKEPTPTTIKSAPTTPKEPAPTTTKSAPTTPKEPAPTTTKEPAPTTPKEPAPTTTKEPAPTTTKSAPTTPKEPAPTTPKKPAPTTPKEPAPTTPKEPTPTTPKEPAPTTKEPAPTTPKEPAPTAPKKPAPTTPKEPAPTTPKEPAPTTTKEPSPTTPKEPAPTTTKSAPTTTKEPAPTTTKSAPTTPKEPSPTTTKEPAPTTPKEPAPTTPKKPAPTTPKEPAPTTPKEPAPTTTKKPAPTTPKEPAPTTPKETAPTTPKKLTPTTPEKLAPTTPEKPAPTTPEELAPTTPEEPTPTTPEEPAPTTPKAAAPNTPKEPAPTTPKEPAPTTPKEPAPTTPKETAPTTPKGTAPTTLKEPAPTTPKKPAPKELAPTTTKEPTSTTSDKPAPTTPKGTAPTTPKEPAPTTPKEPAPTTPKGTAPTTLKEPAPTTPKKPAPKELAPTTTKGPTSTTSDKPAPTTPKETAPTTPKEPAPTTPKKPAPTTPETPPPTTSEVSTPTTTKEPTTIHKSPDESTPELSAEPTPKALENSPKEPGVPTTKTPAATKPEMTTTAKDKTTERDLRTTPETTTAAPKMTKETATTTEKTTESKITATTTQVTSTTTQDTTPFKITTLKTTTLAPKVTTTKKTITTTEIMNKPEETAKPKDRATNSKATTPKPQKPTKAPKKPTSTKKPKTMPRVRKPKTTPTPRKMTSTMPELNPTSRIAEAMLQTTTRPNQTPNSKLVEVNPKSEDAGGAEGETPHMLLRPHVFMPEVTPDMDYLPRVPNQGIIINPMLSDETNICNGKPVDGLTTLRNGTLVAFRGHYFWMLSPFSPPSPARRITEVWGIPSPIDTVFTRCNCEGKTFFFKDSQYWRFTNDIKDAGYPKPIFKGFGGLTGQIVAALSTAKYKNWPESVYFFKRGGSIQQYIYKQEPVQKCPGRRPALNYPVYGETTQVRRRRFERAIGPSQTHTIRIQYSPARLAYQDKGVLHNEVKVSILWRGLPNVVTSAISLPNIRKPDGYDYYAFSKDQYYNIDVPSRTARAITTRSGQTLSKVWYNCP

SEQ ID NO: 33514 - protein, 1311 aa, Homo sapiens
MAWKTLPIYLLLLLSVFVIQQVSSQDLSSCAGRCGEGYSRDATCNCDYNCQHYMECCPDFKRVCTAELSCKGRCFESFERGRECDCDAQCKKYDKCCPDYESFCAEVKDNKKNRTKKKPTPKPPVVDEAGSGLDNGDFKVTTPDTSTTQHNKVSTSPKITTAKPINPRPSLPPNSDTSKETSLTVNKETTVETKETTTTNKQTSTDGKEKTTSAKETQSIEKTSAKDLAPTSKVLAKPTPKAETTTKGPALTTPKEPTPTTPKEPASTTPKEPTPTTIKSAPTTPKEPAPTTTKSAPTTPKEPAPTTTKEPAPTTPKEPAPTTTKEPAPTTTKSAPTTPKEPAPTTPKKPAPTTPKEPAPTTPKEPTPTTPKEPAPTTKEPAPTTPKEPAPTAPKKPAPTTPKEPAPTTPKEPAPTTTKEPSPTTPKEPAPTTTKSAPTTTKEPAPTTTKSAPTTPKEPSPTTTKEPAPTTPKEPAPTTPKKPAPTTPKEPAPTTPKEPAPTTTKKPAPTTPKEPAPTTPKETAPTTPKKLTPTTPEKLAPTTPEKPAPTTPEELAPTTPEEPTPTTPEEPAPTTPKAAAPNTPKEPAPTTPKEPAPTTPKEPAPTTPKETAPTTPKGTAPTTLKEPAPTTPKKPAPKELAPTTTKEPTSTTSDKPAPTTPKGTAPTTPKEPAPTTPKEPAPTTPKGTAPTTLKEPAPTTPKKPAPKELAPTTTKGPTSTTSDKPAPTTPKETAPTTPKEPAPTTPKKPAPTTPETPPPTTSEVSTPTTTKEPTTIHKSPDESTPELSAEPTPKALENSPKEPGVPTTKTPAATKPEMTTTAKDKTTERDLRTTPETTTAAPKMTKETATTTEKTTESKITATTTQVTSTTTQDTTPFKITTLKTTTLAPKVTTTKKTITTTEIMNKPEETAKPKDRATNSKATTPKPQKPTKAPKKPTSTKKPKTMPRVRKPKTTPTPRKMTSTMPELNPTSRIAEAMLQTTTRPNQTPNSKLVEVNPKSEDAGGAEGETPHMLLRPHVFMPEVTPDMDYLPRVPNQGIIINPMLSDETNICNGKPVDGLTTLRNGTLVAFRGHYFWMLSPFSPPSPARRITEVWGIPSPIDTVFTRCNCEGKTFFFKDSQYWRFTNDIKDAGYPKPIFKGFGGLTGQIVAALSTAKYKNWPESVYFFKRGGSIQQYIYKQEPVQKCPGRRPALNYPVYGETTQVRRRRFERAIGPSQTHTIRIQYSPARLAYQDKGVLHNEVKVSILWRGLPNVVTSAISLPNIRKPDGYDYYAFSKDQYYNIDVPSRTARAITTRSGQTLSKVWYNCP

SEQ ID NO: 33515 - protein, 1270 aa, Homo sapiens
MAWKTLPIYLLLLLSVFVIQQVSSQELSCKGRCFESFERGRECDCDAQCKKYDKCCPDYESFCAEVKDNKKNRTKKKPTPKPPVVDEAGSGLDNGDFKVTTPDTSTTQHNKVSTSPKITTAKPINPRPSLPPNSDTSKETSLTVNKETTVETKETTTTNKQTSTDGKEKTTSAKETQSIEKTSAKDLAPTSKVLAKPTPKAETTTKGPALTTPKEPTPTTPKEPASTTPKEPTPTTIKSAPTTPKEPAPTTTKSAPTTPKEPAPTTTKEPAPTTPKEPAPTTTKEPAPTTTKSAPTTPKEPAPTTPKKPAPTTPKEPAPTTPKEPTPTTPKEPAPTTKEPAPTTPKEPAPTAPKKPAPTTPKEPAPTTPKEPAPTTTKEPSPTTPKEPAPTTTKSAPTTTKEPAPTTTKSAPTTPKEPSPTTTKEPAPTTPKEPAPTTPKKPAPTTPKEPAPTTPKEPAPTTTKKPAPTTPKEPAPTTPKETAPTTPKKLTPTTPEKLAPTTPEKPAPTTPEELAPTTPEEPTPTTPEEPAPTTPKAAAPNTPKEPAPTTPKEPAPTTPKEPAPTTPKETAPTTPKGTAPTTLKEPAPTTPKKPAPKELAPTTTKEPTSTTSDKPAPTTPKGTAPTTPKEPAPTTPKEPAPTTPKGTAPTTLKEPAPTTPKKPAPKELAPTTTKGPTSTTSDKPAPTTPKETAPTTPKEPAPTTPKKPAPTTPETPPPTTSEVSTPTTTKEPTTIHKSPDESTPELSAEPTPKALENSPKEPGVPTTKTPAATKPEMTTTAKDKTTERDLRTTPETTTAAPKMTKETATTTEKTTESKITATTTQVTSTTTQDTTPFKITTLKTTTLAPKVTTTKKTITTTEIMNKPEETAKPKDRATNSKATTPKPQKPTKAPKKPTSTKKPKTMPRVRKPKTTPTPRKMTSTMPELNPTSRIAEAMLQTTTRPNQTPNSKLVEVNPKSEDAGGAEGETPHMLLRPHVFMPEVTPDMDYLPRVPNQGIIINPMLSDETNICNGKPVDGLTTLRNGTLVAFRGHYFWMLSPFSPPSPARRITEVWGIPSPIDTVFTRCNCEGKTFFFKDSQYWRFTNDIKDAGYPKPIFKGFGGLTGQIVAALSTAKYKNWPESVYFFKRGGSIQQYIYKQEPVQKCPGRRPALNYPVYGETTQVRRRRFERAIGPSQTHTIRIQYSPARLAYQDKGVLHNEVKVSILWRGLPNVVTSAISLPNIRKPDGYDYYAFSKDQYYNIDVPSRTARAITTRSGQTLSKVWYNCP

SEQ ID NO: 33516 - protein, 933 aa, Homo sapiens
MAWKTLPIYLLLLLSVFVIQQVSSQELSCKGRCFESFERGRECDCDAQCKKYDKCCPDYESFCAEVHNPTSPPSSKKAPPPSGASQTIKSTTKRSPKPPNKKKTKKVIESEEITEEHSVSENQESSSSSSSSSSSSTIRKIKSSKNSAANRELQKKLKVKDNKKNRTKKKPTPKPPVVDEAGSGLDNGDFKVTTPDTSTTQHNKVSTSPKITTAKPINPRPSLPPNSDTSKETSLTVNKETTVETKETTTTNKQTSTDGKEKTTSAKETQSIEKTSAKDLAPTSKVLAKPTPKAETTTKGPALTTPKEPTPTTPKEPASTTPKEPTPTTIKSAPTTPKEPAPTTTKSAPTTPKEPAPTTTKEPAPTTPKEPAPTTPETPPPTTSEVSTPTTTKEPTTIHKSPDESTPELSAEPTPKALENSPKEPGVPTTKTPAATKPEMTTTAKDKTTERDLRTTPETTTAAPKMTKETATTTEKTTESKITATTTQVTSTTTQDTTPFKITTLKTTTLAPKVTTTKKTITTTEIMNKPEETAKPKDRATNSKATTPKPQKPTKAPKKPTSTKKPKTMPRVRKPKTTPTPRKMTSTMPELNPTSRIAEAMLQTTTRPNQTPNSKLVEVNPKSEDAGGAEGETPHMLLRPHVFMPEVTPDMDYLPRVPNQGIIINPMLSDETNICNGKPVDGLTTLRNGTLVAFRGHYFWMLSPFSPPSPARRITEVWGIPSPIDTVFTRCNCEGKTFFFKDSQYWRFTNDIKDAGYPKPIFKGFGGLTGQIVAALSTAKYKNWPESVYFFKRGGSIQQYIYKQEPVQKCPGRRPALNYPVYGETTQVRRRRFERAIGPSQTHTIRIQYSPARLAYQDKGVLHNEVKVSILWRGLPNVVTSAISLPNIRKPDGYDYYAFSKDQYYNIDVPSRTARAITTRSGQTLSKVWYNCP

SEQ ID NO: 33517 - protein, 1361 aa, Homo sapiens
MAWKTLPIYLLLLLSVFVIQQVSSQDLSSCAGRCGEGYSRDATCNCDYNCQHYMECCPDFKRVCTAELSCKGRCFESFERGRECDCDAQCKKYDKCCPDYESFCAEVHNPTSPPSSKKAPPPSGASQTIKSTTKRSPKPPNKKKTKKVIESEEITEVKDNKKNRTKKKPTPKPPVVDEAGSGLDNGDFKVTTPDTSTTQHNKVSTSPKITTAKPINPRPSLPPNSDTSKETSLTVNKETTVETKETTTTNKQTSTDGKEKTTSAKETQSIEKTSAKDLAPTSKVLAKPTPKAETTTKGPALTTPKEPTPTTPKEPASTTPKEPTPTTIKSAPTTPKEPAPTTTKSAPTTPKEPAPTTTKEPAPTTPKEPAPTTTKEPAPTTTKSAPTTPKEPAPTTPKKPAPTTPKEPAPTTPKEPTPTTPKEPAPTTKEPAPTTPKEPAPTAPKKPAPTTPKEPAPTTPKEPAPTTTKEPSPTTPKEPAPTTTKSAPTTTKEPAPTTTKSAPTTPKEPSPTTTKEPAPTTPKEPAPTTPKKPAPTTPKEPAPTTPKEPAPTTTKKPAPTTPKEPAPTTPKETAPTTPKKLTPTTPEKLAPTTPEKPAPTTPEELAPTTPEEPTPTTPEEPAPTTPKAAAPNTPKEPAPTTPKEPAPTTPKEPAPTTPKETAPTTPKGTAPTTLKEPAPTTPKKPAPKELAPTTTKEPTSTTSDKPAPTTPKGTAPTTPKEPAPTTPKEPAPTTPKGTAPTTLKEPAPTTPKKPAPKELAPTTTKGPTSTTSDKPAPTTPKETAPTTPKEPAPTTPKKPAPTTPETPPPTTSEVSTPTTTKEPTTIHKSPDESTPELSAEPTPKALENSPKEPGVPTTKTPAATKPEMTTTAKDKTTERDLRTTPETTTAAPKMTKETATTTEKTTESKITATTTQVTSTTTQDTTPFKITTLKTTTLAPKVTTTKKTITTTEIMNKPEETAKPKDRATNSKATTPKPQKPTKAPKKPTSTKKPKTMPRVRKPKTTPTPRKMTSTMPELNPTSRIAEAMLQTTTRPNQTPNSKLVEVNPKSEDAGGAEGETPHMLLRPHVFMPEVTPDMDYLPRVPNQGIIINPMLSDETNICNGKPVDGLTTLRNGTLVAFRGHYFWMLSPFSPPSPARRITEVWGIPSPIDTVFTRCNCEGKTFFFKDSQYWRFTNDIKDAGYPKPIFKGFGGLTGQIVAALSTAKYKNWPESVYFFKRGGSIQQYIYKQEPVQKCPGRRPALNYPVYGETTQVRRRRFERAIGPSQTHTIRIQYSPARLAYQDKGVLHNEVKVSILWRGLPNVVTSAISLPNIRKPDGYDYYAFSKDQYYNIDVPSRTARAITTRSGQTLSKVWYNCP

SEQ ID NO: 33518 - protein, 416 aa, Homo sapiens
MLLILLSVALLALSSAQNLNEDVSQEESPSLIAGNPQGAPPQGGNKPQGPPSPPGKPQGPPPQGGNQPQGPPPPPGKPQGPPPQGGNKPQGPPPPGKPQGPPPQGDKSRSPRSPPGKPQGPPPQGGNQPQGPPPPPGKPQGPPPQGGNKPQGPPPPGKPQGPPPQGDNKSRSSRSPPGKPQGPPPQGGNQPQGPPPPPGKPQGPPPQGGNKPQGPPPPGKPQGPPPQGDNKSQSARSPPGKPQGPPPQGGNQPQGPPPPPGKPQGPPPQGGNKSQGPPPPGKPQGPPPQGGSKSRSSRSPPGKPQGPPPQGGNQPQGPPPPPGKPQGPPPQGGNKPQGPPPPGKPQGPPPQGGSKSRSARSPPGKPQGPPQQEGNNPQGPPPPAGGNPQQPQAPPAGQPQGPPRPPQGGRPSRPPQ

SEQ ID NO: 33519 - protein, 309 aa, Homo sapiens
MLLILLSVALLALSSAQSLNEDVSQEESPSVISGKPEGRRPQGGNQPQRTPPPPGKPEGRPPQGGNQSQGPPPRPGKPEGPPPQGGNQSQGPPPRPGKPEGQPPQGGNQSQGPPPRPGKPEGPPPQGGNQSQGPPPRPGKPEGPPPQGGNQSQGPPPHPGKPEGPPPQGGNQSQGPPPRPGKPEGPPPQGGNQSQGPPPRPGKPEGPPPQGGNQSQGPPPRPGKPEGSPSQGGNKPQGPPPHPGKPQGPPPQEGNKPQRPPPPGRPQGPPPPGGNPQQPLPPPAGKPQGPPPPPQGGRPHRPPQGQPPQ

SEQ ID NO: 33520 - protein, 310 aa, Homo sapiens
MLLILLSVALLALSSAESSSEDVSQEESLFLISGKPEGRRPQGGNQPQRPPPPPGKPQGPPPQGGNQSQGPPPPPGKPEGRPPQGGNQSQGPPPHPGKPERPPPQGGNQSQGPPPHPGKPESRPPQGGHQSQGPPPTPGKPEGPPPQGGNQSQGTPPPPGKPEGRPPQGGNQSQGPPPHPGKPERPPPQGGNQSHRPPPPPGKPERPPPQGGNQSQGPPPHPGKPEGPPPQEGNKSRSARSPPGKPQGPPQQEGNKPQGPPPPGKPQGPPPAGGNPQQPQAPPAGKPQGPPPPPQGGRPPRPAQGQQPPQ

SEQ ID NO: 33521 - protein, 620 aa, Homo sapiens
MRRSEVLAEESIVCLQKALNHLREIWELIGIPEDQRLQRTEVVKKHIKELLDMMIAEEESLKERLIKSISVCQKELNTLCSELHVEPFQEEGETTILQLEKDLRTQVELMRKQKKERKQELKLLQEQDQELCEILCMPHYDIDSASVPSLEELNQFRQHVTTLRETKASRREEFVSIKRQIILCMEALDHTPDTSFERDVVCEDEDAFCLSLENIATLQKLLRQLEMQKSQNEAVCEGLRTQIRELWDRLQIPEEEREAVATIMSGSKAKVRKALQLEVDRLEELKMQNMKKVIEAIRVELVQYWDQCFYSQEQRQAFAPFCAEDYTESLLQLHDAEIVRLKNYYEVHKELFEGVQKWEETWRLFLEFERKASDPNRFTNRGGNLLKEEKQRAKLQKMLPKLEEELKARIELWEQEHSKAFMVNGQKFMEYVAEQWEMHRLEKERAKQERQLKNKKQTETEMLYGSAPRTPSKRRGLAPNTPGKARKLNTTTMSNATANSSIRPIFGGTVYHSPVSRLPPSGSKPVAASTCSGKKTPRTGRHGANKENLELNGSILSGGYPGSAPLQRNFSINSVASTYSEFAKDPSLSDSSTVGLQRELSKASKSDATSGILNSTNIQS

SEQ ID NO: 33522 - protein, 576 aa, Homo sapiens
MRRSEVLAEESIVCLQKALNHLREIWELIGIPEDQRLQRTEVVKKHIKELLDMMIAEEESLKERLIKSISVCQKELNTLCSELHVEPFQEEGETTILQLEKDLRTQVELMRKQKKERKQELKLLQEQDQELCEILCMPHYDIDSASVPSLEELNQFRQHVTTLRETKASRREEFVSIKRQIILCMEALDHTPDTSFERDVVCEDEDAFCLSLENIATLQKLLRQLEMQKSQNEAVCEGLRTQIRELWDRLQIPEEEREAVATIMSGSKAKVRKALQLEVDRLEELKMQNMKKVIEAIRVELVQYWDQCFYSQEQRQAFAPFCAEDYTESLLQLHDAEIVRLKNYYEVHKELFEGVQKWEETWRLFLEFERKASDPNRFTNRGGNLLKEEKQRAKLQKFMEYVAEQWEMHRLEKERAKQERQLKNKKQTETEMLYGSAPRTPSKRRGLAPNTPGKARKLNTTTMSNATANSSIRPIFGGTVYHSPVSRLPPSGSKPVAASTCSGKKTPRTGRHGANKENLELNGSILSGGYPGSAPLQRNFSINSVASTYSEFARELSKASKSDATSGILNSTNIQS

SEQ ID NO: 33523 - protein, 525 aa, Homo sapiens
MRRSEVLAEESIVCLQKALNHLREIWELIGIPEDQRLQRTEVVKKHIKEEGETTILQLEKDLRTQVELMRKQKKERKQELKLLQEQDQELCEILCMPHYDIDSASVPSLEELNQFRQHVTTLRETKASRREEFVSIKRQIILCMEALDHTPDTSFERDVVCEDEDAFCLSLENIATLQKLLRQLEMQKSQNEAVCEGLRTQIRELWDRLQIPEEEREAVATIMSGSKAKVRKALQLEVDRLEELKMQNMKKVIEAIRVELVQYWDQCFYSQEQRQAFAPFCAEDYTESLLQLHDAEIVRLKNYYEVHKELFEGVQKWEETWRLFLEFERKASDPNRFTNRGGNLLKEEKQRAKLQKMLPKLEEELKARIELWEQEHSKAFMVNGQKFMEYVAEQWEMHRLEKERAKQERQLKNKKQTETEMLYGSAPRTPSKRRGLAPNTPGKARKLNTTTMSNATANSSIRPIFGGTVYHSPVSRLPPSGSKPVAASTCSGKKTPRTGRHGANKENLELNGSILSARTFKGFQI

SEQ ID NO: 33524 - protein, 606 aa, Homo sapiens
MRRSEVLAEESIVCLQKALNHLREIWELIGIPEDQRLQRTEVVKKHIKELLDMMIAEEESLKERLIKSISVCQKELNTLCSELHVEPFQEEGETTILQLEKDLRTQVELMRKQKKERKQELKLLQEQDQELCEILCMPHYDIDSASVPSLEELNQFRQHVTTLRETKASRREEFVSIKRQIILCMEALDHTPDTSFERDVVCEDEDAFCLSLENIATLQKLLRQLEMQKSQNEAVCEGLRTQIRELWDRLQIPEEEREAVATIMSGSKAKVRKALQLEVDRLEELKMQNMKKVIEAIRVELVQYWDQCFYSQEQRQAFAPFCAEDYTESLLQLHDAEIVRLKNYYEVHKELFEGVQKWEETWRLFLEFERKASDPNRFTNRGGNLLKEEKQRAKLQKMLPKLEEELKARIELWEQEHSKAFMVNGQKFMEYVAEQWEMHRLEKERAKQERQLKNKKQTETEMLYGSAPRTPSKRRGLAPNTPGKARKLNTTTMSNATANSSIRPIFGGTVYHSPVSRLPPSGSKPVAASTCSGKKTPRTGRHGANKENLELNGSILSGGYPGSAPLQRNFSINSVASTYSEFARELSKASKSDATSGILNSTNIQS

SEQ ID NO: 33525 - protein, 435 aa, Homo sapiens
MPVTHRKSDASDMNSDTSPSCRLRAFSRGGSLESRSSSSRSRSFTLDDESLKYLTHEEKDVLLFFEETIDSLDEDFEEPVLCDGGVCCLCSPSLEESTSSPSEPEDVIDLVQPAPGAGEAEGLPEGTQAAGPAPAGKEHRKQDAETPPPPDPPAPETLLAPPPLPSTPDPPRRELRAPSPPVEHPRLLRSVPTPLVMAQKISERMAGNEALSPTSPFREGRPGEWRTPAARGPRSGDPGPGPSHPAQPKAPRFPSNIIVTNGAAREPRRTLSRAAVSVQERRAQVLATIHGHAGAFPAAGDAGEGAPGGGSSPERVARGRGLPGPAESLRAGGQAPRGPALANGFPSAHEALKSAPSSFAPAGKSLCFRPGPALPSTRARQSFPGPRQPNGAQDWRRADSLPRPQGITVQFAGRGSSEEARREALRKLGLLRESS

SEQ ID NO: 33526 - protein, 341 aa, Homo sapiens
MPVTHRKSDASDMNSDTSPSCRLRAFSRGGSLESRSSSSRSRSFTLDDESLKYLTHEEKDVLLFFEETIDSLDEDFEEPVLCDGGVCCLCSPSLEESTSSPSEPEDVIDLVQPAPGAGEAEGLPEGTQAAGPAPAGKEHRKQDAETPPPPDPPAPETLLAPPPLPSTPDPPRRELRAPSPPVEHPRLLRSVPTPLVMAQKISERMAGNEALSPTSPFREGRPGEWRTPAARGPRSGDPGPGPSHPALANGFPSAHEALKSAPSSFAPAGKSLCFRPGPALPSTRARQSFPGPRQPNGAQDWRRADSLPRPQGITVQFAGRGSSEEARREALRKLGLLRESS

SEQ ID NO: 33527 - protein, 1007 aa, Homo sapiens
MAAAETQSLREQPEMEDANSEKSINEENGEVSEDQSQNKHSRHKKKKHKHRSKHKKHKHSSEEDKDKKHKHKHKHKKHKRKEIIDASDKEGMSPAKRTKLDDLALLEDLEKQRALIKAELDNELMEGKVQSGMGLILQGYESGSEEEGEIHEKARNGNRSSTRSSSTKGKLELVDNKITTKKRSKSRSKERTRHRSDKKKSKGGIEIVKEKTTRSKSKERKKSKSPSKRSKSQDQARKSKSPTLRRRSQEKIGKARSPTDDKVKIEDKSKSKDRKKSPIINESRSRDRGKKSRSPVDLRGKSKDRRSRSKERKSKRSETDKEKKPIKSPSKDASSGKENRSPSRRPGRSPKRRSLSPKPRDKSRRSRSPLLNDRRSKQSKSPSRTLSPGRRAKSRSLERKRREPERRRLSSPRTRPRDDILSRRERSKDASPINRWSPTRRRSRSPIRRRSRSPLRRSRSPRRRSRSPRRRDRGRRSRSRLRRRSRSRGGRRRRSRSKVKEDKFKGSLSEGMKVEQESSSDDNLEDFDVEEEDEEALIEQRRIQRQAIVQKYKYLAEDSNMSVPSEPSSPQSSTRTRSPSPDDILERVAADVKEYERENVDTFEASVKAKHNLMTVEQNNGSSQKKLLAPDMFTESDDMFAAYFDSARLRAAGIGKDFKENPNLRDNWTDAEGYYRVNIGEVLDKRYNVYGYTGQGVFSNVVRARDNARANQEVAVKIIRNNELMQKTGLKELEFLKKLNDADPDDKFHCLRLFRHFYHKQHLCLVFEPLSMNLREVLKKYGKDVGLHIKAVRSYSQQLFLALKLLKRCNILHADIKPDNILVNESKTILKLCDFGSASHVADNDITPYLVSRFYRAPEIIIGKSYDYGIDMWSVGCTLYELYTGKILFPGKTNNHMLKLAMDLKGKMPNKMIRKGVFKDQHFDQNLNFMYIEVDKVTEREKVTVMSTINPTKDLLADLIGCQRLPEDQRKKVHQLKDLLDQILMLDPAKRISINQALQHAFIQEKI

SEQ ID NO: 33528 - protein, 878 aa, Homo sapiens
MEVKGPSGRSFCCESEGQFKSCLKRHTPSLLLPSSWKGNSGSCLMAEALHRTSPTPNSCPLPLPLCRMSGVLCSRNLFTFKFSLFQLDSGASGEPGHSLGLTLGFSYCGNCQTAVVSAQPEGMASNGAYPVLGPGVTANPGTSLSVFTALPFTTPAPGPAHGPLLVTAGAPPGGPLVLSTFPSTPLVTEQDGCGPSGAGASNVFVQMRTEVGPVKAAQAQTLVLTQAPLVWQAPGALCGGVVCPPPLLLAAAPVVPVMAAQVVGGTQACEGGWSQGLPLPPPPPPAAQLPPIVSQGNAGPWPQGAHGESSLASSQAKAPPDDSCNPRSVYENFRLWQHYKPLARRHLPQSPDTEALSCFLIPVLRSLARRKPTMTLEEGLWRAMREWQHTSNFDRMIFYEMAEKFLEFEAEEEMQIQKSQWMKGPQCLPPPATPRLEPRGPPAPEVVKQPVYLPSKAGPKAPTACLPPPRPQRPVTKARRPPPRPHRRAETKARLPPPRPQRPAETKVPEEIPPEVVQEYVDIMEELLGPSLGATGEPEKQREEGKVKQPQEEDWTPPDPGLLSYIDKLCSQKDFVTKVEAVIHPQFLEELLSPDPQMDFLALSQDLEQEEGLTLAQLVEKRLPPLKEKQHARAAPSRGTARLDSSSSKFAAGQGAERDVPDPQQGVGMETCPPQMTARDSQGRGRAHTGMARSEDSVVLLGCQDSPGLRAAWPTSPPQDHRPTCPGVGTKDALDLPGGSPVRESHGLAQGSSEEEELPSLAFLLGSQHKLLPWWLPQSPVPASGLLSPEKWGPQGTHQSPSAERRGLNLAPSPANKAKKRPLFGSLSPAEKTPYPGPGLRVSGEQSLTWGLGGPSQSQKRKGDPLVSRKEKKQHCSQ

SEQ ID NO: 33529 - protein, 629 aa, Homo sapiens
MEVKGPSGRSFCCESEGQFKSCLKRHTPSLLLPSSWKGNSGSCLMAEALHRTSPTPNSCPLPLPLCRMSGVLCSRNLFTFKFSLFQLDSGASGEPGHSLGLTLGFSYCGNCQTAVVSAQPEGMASNGAYPVLGPGVTANPGTSLSVFTALPFTTPAPGPAHGPLLVTAGAPPGGPLVLSTFPSTPLVTEQDGCGPSGAGASNVFVQMRTEVGPVKAAQAQTLVLTQAPLVWQAPGALCGGVVCPPPLLLAAAPVVPVMAAQVVGGTQACEGGWSQGLPLPPPPPPAAQLPPIVSQGNAGPWPQGAHGESSLASSQAKAPPDDSCNPRSVYENFRLWQHYKPLARRHLPQSPDTEALSCFLIPVLRSLARRKPTMTLEEGLWRAMREWQHTSNFDRMIFYEMAEKFLEFEAEEEMQIQKSQWMKGPQCLPPPATPRLEPRGPPAPEVVKQPVYLPSKAGPKAPTACLPPPRPQRPVTKARRPPPRPHRRAETKARLPPPRPQRPAETKVPEEIPPEVVQEYVDIMEELLGPSLGATGEPEKQREEGKVKQPQEEDWTPPDPGLLSYIDKLCSQKDFVTKVEAVIHPQFLEELLSPDPQMDFLALSQDLEQEEGLTLAQGAPSDAPGTDRC

SEQ ID NO: 33530 - protein, 806 aa, Homo sapiens
MFQEPVYFQIFLFQLDSGASGEPGHSLGLTLGFSHCGNCQTAVVSAQPEGMASNGAYPALGPGVTANPGTSLSVFTALPFTTPAPGPAHGPLLVTAGAPPGGPLVLSNFPSTPLVTEQDGCGPSGAGASNVFVQMRTEVGPVKAAQAQTLVLTQTPLVWQAPGALCGGVVCPPPLLLAAAPVVPVMAAQVVGGTQACEGGWSQGLPLPPPPPPAAQLPPIVSQGNAGPWPQGAHGEGSLASSQAKAPPDDSCNPRSVYENFRLWQHYKPLARRHLPQSPDTEALSCFLIPVLRSLARRKPTMTLEEGLWRAMREWQHTSNFDRMIFYEMAEKFLEFEAEEEMQIQKSQWMKGPQCLPPPATPRLEPRGPPAPEVVKQPVYLPSKAGPKAPTACLPPPRPQRPVTKARRPPPRPHRRAETKARLPPPRPQRPAETKVPEEIPPEVVQEYVDIMEELLGPSLGATGEPEKQREEGEVKQPQEEDWTPPDPGLLSYTDKLCSQKDFVTKVEAVIHPQFLEELLSPDPQMDFLALSQELEQEEGLTLAQLVEKRLLPLKEKQHARAAPSRGTARLDSSSSKFAAGQGAERDVPDPQQGVGMETCPPQTTARDSQGRGRAHTGMARSKDSVVLLGCQDSPGLRAARPTSPPQDHRPTCPGVGTKDALDLPGGSPVRESHGLAQGSSEEEELPSLAFLLGSQHKLLPWWLPQSPVPASGLLSPEKWGPQGTHQSPSAERRGLNLAPSPANKAKKRPLFGSLSPAEKTPHPGPGLRVSGEQSLTWGLGGPSQSQKRKGDPLVSRKEKKQRCSQ

SEQ ID NO: 33531 - protein, 878 aa, Homo sapiens
MEVKGPSGRSFCCESEGQFKSCLKRHTPSLLLPSSWKGNSGSCLMAEALHRTSPTPNSCPLPLPLCRMSGVLCSRNLFTFKFSLFQLDSGASGEPGHSLGLTLGFSYCGNCQTAVVSAQPEGMASNGAYPVLGPGVTANPGTSLSVFTALPFTTPAPGPAHGPLLVTAGAPPGGPLVLSTFPSTPLVTEQDGCSPSGAGASNVFVQMRTEVGPVKAAQAQTLVLTQAPLVWQAPGALCGGVVCPPPLLLAAAPVVPVMAAQVVGGTQACEGGWSQGLPLPPPPPPAAQLPPIVSQGNAGPWPQGAHGESSLASSQAKAPPDDSCNPRSVYENFRLWQHYKPLARRHLPQSPDTEALSCFLIPVLRSLARRKPTMTLEEGLWRAMREWQHTSNFDRMIFYEMAEKFLEFEAEEEMQIQKSQWMKGPQCLPPPATPRLEPRGPPAPEVVKQPVYLPSKAGPKAQTACLPPPRPQRPVTKARRPPPQPHRRAETKARLPPPRPQRPAETKVPEEIPPEVVQEYVDIMEELLGPSLGATGEPEKQREEGKVKQPQEEDWTPPDPGLLSYIDKLCSQKDFVTKVEAVIHPQFLEELLSPDPQMDFLALSQDLEQEEGLTLAQLVEKRLPPLKEKQHSRAAPSRGTARLDSSSSKFAAGQGAERDVPDPQEGVGMETCPPQTTARDSQGRGRAHTGMARSEDSVVLLGCQDSPGLRAARPTSPPQDHRPTCPGVGTKDALDLPGGSPVRESHGLAQGSSEEEELPSLAFLLGSQHKLLPWWLPQSPVPASGLLSPEKWGPQGTHQSPSAERRGLNLAPSPANKAKKQPLFGSLSPAEKTPHRGPGLRVSGEQSLTWGLGGPSQSQKRKGDPLVSRKEKKQHCSQ

SEQ ID NO: 33532 - protein, 756 aa, Homo sapiens
MASNGAYPVLGPGVTVNPGTSLSVFTALPFATPAPGPAHRPPLVTAVVPPAGPLVLSAFPSTPLVAGQDGRGPSGAGASNVFVQMRTEVGPVKPPQAQTLILTQAPLVWQAPGTLCGGVMCPPPLLLAAAPGVPVTSAQVVGGTQACEGGWSHGLPLPPPPPAAQVAPIVSPGNARPWPQGAHGEGSLAPSQAKARPDDSCKPKSVYENFRLWQHYKPLARRHLPQSPDTEALSCFLIPVLRSLARRKPTMTLEEGLWQAMREWQHTSNFDRMIFYEMAEKFLEFEAEEEMQIQKSQWMKGPQSLPPPAPPRLEPRGPPAPEVVKQPVYLPSKDGPKAPTACLPPPRPQRPAETKAHLPPPRPQRPAETNAHLPPPRPQRPAETKVPEEIPPEVVQEYVDIMEELLGSHPGDTGEPEGQREKGKVEQPQEEDGITSDPGLLSYIDKLCSQEDFVTKVEAVIHPRFLEELLSPDPQMDFLALSQELEQEEGLTLAQLVEKRLLSLKEKGCGRAAPRHGTARLDSSPSEFAAGQEAAREVPDPQQRVSVETSPPQTAAQDPQGQGRVRTGMARSEDPAVLLGCQDSPRLKAVRPTSPPQDHRPTCPGLGTKDALGLPGESPVKESHGLAKGSSEETELPGMVYVVGSHHRLRPWRLSQSPVPSSGLLSPGGRGPQGALQSPSAQKRGLSPSPSPASKSKKRPLFGSPSPAEKTPHPGPGLRVSGEQSLAWGLGGPSQSQKRKGDPLASRRKKKRHCSQ

SEQ ID NO: 33533 - protein, 257 aa, Homo sapiens
MSTSQPGACPCQGAASRPAILYALLSSSLKAVPRPRSRCLCRQHRPVQLCAPHRTCREALDVLAKTVAFLRNLPSFWQLPPQDQRRLLQGCWGPLFLLGLAQDAVTFEVAEAPVPSILKKILLEEPSSSGGSGQLPDRPQPSLAAVQWLQCCLESFWSLELSPKEYACLKGTILFNPDVPGLQAASHIGHLQQEAHWVLCEVLEPWCPAAQGRLTRVLLTASTLKSIPTSLLGDLFFRPIIGDVDIAGLLGDMLLLR

SEQ ID NO: 33534 - protein, 741 aa, Homo sapiens
MASNGAYPVLGPGVTVNPGTSLSVFTALPFATPSPGPTHRPPLVTAVVPPAGPLVLSAFPSTPLVAGQDGRGPSGAGASNVFVQMRTEVGPVKPPQAQTLILTQAPLVWQAPGTLCGGVMCPPPLLLAAAPGVPVTSAQVVGGTQACEGGWSHGLPLPPPPPAAQVAPIVSPGNAGPWPQGAHGEGSLAPSQAKARPDDSCKPKSVYENFRLWQHYKPLARRHLPQSPDTEALSCFLIPVLRSLARRKPTMTLEEGLWRAMREWQHTSNFDRMIFYEMAAKFLEFEAEEEMQIQKSQWMKGPQSLPPPAPPRLEPRGPPAPEVVKQPVYLPSKDGPKAPTACLPPPRPQRPAETKAHLPPPRPPRPAETKVPEEIPPEVVQEYVDIMEELLGSHPGDTGEPEGQREKGKVEQPQEEDGMTSDPGLLSYIDKLCSQEDFVTKVEAVIHPRFLEELLSPDPQMDFLALSQELEQEEGLTLAQLVEKRLLSLKEKGCGRAAPRHGTARLDSSPSEFAAGQEAAREVPDPQQRVSVETSPPQTAAQDPQGQGRVRTGMARSEDPAVLLGCQDSPRLKAVRPTSPPQDHRPTCPGLGTKDALGLPGESPVKESHGLAKGSSEETELPGMVYVVGSHHRLRPWRLSQSPVPSSGLLSPGGRGPQGALQSPSAQKRGLSPSPSPASKSKKRPLFGSPSPAEKTPHPGPGLRVSGEQSLAWGLGGPSQSQKRKGDPLASRRKKKRHCSQ

SEQ ID NO: 33535 - protein, 492 aa, Homo sapiens
MASNGAYPVLGPGVTVNPGTSLSVFTALPFATPSPGPTHRPPLVTAVVPPAGPLVLSAFPSTPLVAGQDGRGPSGAGASNVFVQMRTEVGPVKPPQAQTLILTQAPLVWQAPGTLCGGVMCPPPLLLAAAPGVPVTSAQVVGGTQACEGGWSHGLPLPPPPPAAQVAPIVSPGNAGPWPQGAHGEGSLAPSQAKARPDDSCKPKSVYENFRLWQHYKPLARRHLPQSPDTEALSCFLIPVLRSLARRKPTMTLEEGLWRAMREWQHTSNFDRMIFYEMAAKFLEFEAEEEMQIQKSQWMKGPQSLPPPAPPRLEPRGPPAPEVVKQPVYLPSKDGPKAPTACLPPPRPQRPAETKAHLPPPRPPRPAETKVPEEIPPEVVQEYVDIMEELLGSHPGDTGEPEGQREKGKVEQPQEEDGMTSDPGLLSYIDKLCSQEDFVTKVEAVIHPRFLEELLSPDPQMDFLALSQELEQEEGLTLAQGAPSDALGTDRC

SEQ ID NO: 33536 - protein, 241 aa, Homo sapiens
MLSSTAMYSAPGRDLGMEPHRAAGPLQLRFSPYVFNGGTILAIAGEDFAIVASDTRLSEGFSIHTRDSPKCYKLTDKTVIGCSGFHGDCLTLTKIIEARLKMYKHSNNKAMTTGAIAAMLSTILYSRRFFPYYVYNIIGGLDEEGKGAVYSFDPVGSYQRDSFKAGGSASAMLQPLLDNQVGFKNMQNVEHVPLSLDRAMRLVKDVFISAAERDVYTGDALRICIVTKEGIREETVSLRKD

SEQ ID NO: 33537 - protein, 579 aa, Homo sapiens
MEVNAGGVIAYISSSSSASSPASCHSEGSENSFQSSSSSVPSSPNSSNSDTNGNPKNGDLANIEGILKNDRIDCSMKTSKSSAPGMTKSHSGVTKFSGMVLLCKVCGDVASGFHYGVHACEGCKGFFRRSIQQNIQYKKCLKNENCSIMRMNRNRCQQCRFKKCLSVGMSRDAVRFGRIPKREKQRMLIEMQSAMKTMMNSQFSGHLQNDTLVEHHEQTALPAQEQLRPKPQLEQENIKSSSPPSSDFAKEEVIGMVTRAHKDTFMYNQEQQENSAESMQPQRGERIPKNMEQYNLNHDHCGNGLSSHFPCSESQQHLNGQFKGRNIMHYPNGHAICIANGHCMNFSNAYTQRVCDRVPIDGFSQNENKNSYLCNTGGRMHLVCPMSKSPYVDPHKSGHEIWEEFSMSFTPAVKEVVEFAKRIPGFRDLSQHDQVNLLKAGTFEVLMVRFASLFDAKERTVTFLSGKKYSVDDLHSMGAGDLLNSMFEFSEKLNALQLSDEEMSLFTAVVLVSADRSGIENVNSVEALQETLIRALRTLIMKNHPNEASIFTKLLLKLPDLRSLNNMHSEELLAFKVHP

SEQ ID NO: 33538 - protein, 238 aa, Homo sapiens
MSRLGLPEEPVRNSLLDDAKARLRKYDIGGKYSHLPYNKYSVLLPLVAKEGKLHLLFTVRSEKLRRAPGEVCFPGGKRDPTDMDDAATALREAQEEVGLRPHQVEVVCCLVPCLIDTDTLITPFVGLIDHNFQAQPNPAEVKDVFLVPLAYFLHPQVHDQHYVTRLGHRFINHIFEYTNPEDGVTYQIKGMTANLAVLVAFIILEKKPTFEVQFNLNDVLASSEELFLKVHKKATSRL

SEQ ID NO: 33539 - protein, 185 aa, Homo sapiens
MSRLGLPEEPVRNSLLDDAKARLRKYDIGGKYSHLPYNKYSVLLPLVAKEGKLHLLFTVRSEKTDTLITPFVGLIDHNFQAQPNPAEVKDVFLVPLAYFLHPQVHDQHYVTRLGHRFINHIFEYTNPEDGVTYQIKGMTANLAVLVAFIILEKKPTFEVQFNLNDVLASSEELFLKVHKKATSRL

SEQ ID NO: 33540 - protein, 170 aa, Homo sapiens
MSRLGLPEEPVRNSLLDDAKARLRKYDIGGKYSHLPYNKYSVLLPLVAKEGKLHLLFTVRSEKLRRAPGEVCFPGGKRDPTDMDDAATALREAQEEVGLRPHQVEVVCCLVPCLIDRWGSRYVDEAGLELLASSDPPTSASQSAGITDRYIDNSICGFNRPQLPGPAESC

SEQ ID NO: 33541 - protein, 385 aa, Homo sapiens
MSKPAGSTSRILDIPCKVCGDRSSGKHYGVYACDGCSGFFKRSIRRNRTYVCKSGNQGGCPVDKTHRNQCRACRLKKCLEVNMNKDAVQHERGPRTSTIRKQVALYFRGHKEENGAAAHFPSAALPAPAFFTAVTQLEPHGLELAAVSTTPERQTLVSLAQPTPKYPHEVNGTPMYLYEVATESVCESAARLLFMSIKWAKSVPAFSTLSLQDQLMLLEDAWRELFVLGIAQWAIPVDANTLLAVSGMNGDNTDSQKLNKIISEIQALQEVVARFRQLRLDATEFACLKCIVTFKAVPTHSGSELRSFRNAAAIAALQDEAQLTLNSYIHTRYPTQPCRFGKLLLLLPALRSISPSTIEEVFFKKTIGNVPITRLLSDMYKSSDI

SEQ ID NO: 33542 - protein, 422 aa, Homo sapiens
MFRAGAEGAEKEPSPRPECRADPGPGLGFPLGSGLPWPSLLESPGGRILDIPCKVCGDRSSGKHYGVYACDGCSGFFKRSIRRNRTYVCKSGNQGGCPVDKTHRNQCRACRLKKCLEVNMNKDAVQHERGPRTSTIRKQVALYFRGHKEENGAAAHFPSAALPAPAFFTAVTQLEPHGLELAAVSTTPERQTLVSLAQPTPKYPHEVNGTPMYLYEVATESVCESAARLLFMSIKWAKSVPAFSTLSLQDQLMLLEDAWRELFVLGIAQWAIPVDANTLLAVSGMNGDNTDSQKLNKIISEIQALQEVVARFRQLRLDATEFACLKCIVTFKAVPTHSGSELRSFRNAAAIAALQDEAQLTLNSYIHTRYPTQPCRFGKLLLLLPALRSISPSTIEEVFFKKTIGNVPITRLLSDMYKSSDI

SEQ ID NO: 33543 - protein, 139 aa, Homo sapiens
MTHSLVCPETVSRVSSVLNRNTRQFGKKHLFDQDEETCWNSDQGPSQWVTLEFPQLIRVSQLQIQFQGGFSSRRGCLEGSQGTQALHKIVDFYPEDNNSLQTFPIPAAEVDRLKVTFEDATDFFGRVVIYHLRVLGEKV

SEQ ID NO: 33544 - protein, 167 aa, Homo sapiens
MTHSLVCPETVSRVSSVLNRNTRQFGKKHLFDQDEETCWNSDQGPSQWVTLEFPQLIRVSQLQIQFQGGFSSRRGCLEGSQGTQALHKIVDFYPEDNNSLQTFPIPAAEVDRLKVTFEDATDFFGRVVIYHLRVLGEKGTNRDPCRDLHYRAKLGEPRTHPRNLNFP

SEQ ID NO: 33545 - protein, 360 aa, Homo sapiens
MPKFKQRRRKLKAKAERLFKKKEASHFQSKLITPPPPPPSPERVGISSIDISQSRSWLTSSWNFNFPNIRDAIKLWTNRVWSIYSWCQNCITQSLEVLKDTIFPSRICHRELYSVKQQFCILESKLCKLQEALKTISESSSCPSCGQTCHMSGKLTNVPACVLITPGDSKAVLPPTLPQPASHFPPPPPPPPLPPPPPPLAPVLLRKPSLAKALQAGPLKKDGPMQITVKDLLTVKLKKTQSLDEKRKLIPSPKARNPLVTVSDLQHVTLKPNSKVLSTRVTNVLITPGKSQMDLRKLLRKVDVERSPGGTPLTNKENMETGTGLTPVMTQALRRKFQLAHPRSPTPTLPLSTSSFDEQN

SEQ ID NO: 33546 - protein, 347 aa, Homo sapiens
MNPLAQPVIYSTIFAGTLITALSSHWFFTWVGLEMNMLAFIPVLTKKMNPRSTEAAIKYFLTQATASMILLMAILFNNMLSGQWTMTNTTNQYSSLMIMMAMAMKLGMAPFHFWVPEVTQGTPLTSGLLLLTWQKLAPISIMYQISPSLNVSLLLTLSILSIMAGSWGGLNQTQLRKILAYSSITHMGWMMAVLPYNPNMTILNLTIYIILTTTAFLLLNLNSSTTTLLLSRTWNKLTWLTPLIPSTLLSLGGLPPLTGFLPKWAIIEEFTKNNSLIIPTIMATITLLNLYFYLRLIYSTSITLLPMSNNVKMKWQFEHTKPTPFLPTLIALTTLLLPISPFMLMIL

SEQ ID NO: 33547 - protein, 695 aa, Homo sapiens
MEEKPGQPQPQHHHSHHHPHHHPQQQQQQPHHHHHYYFYNHSHNHHHHHHHQQPHQYLQHGAEGSPKAQPKPLKHEQKHTLQQHQETPKKKTGYGELNGNAGEREISLKNLSSDEATNPISRVLNGNQQVVDTSLKQTVKANTFGKAGIKTKNFIQKNSMDKKNGKSYENKSGENQSVDKSDTIPIPNGVVTNNSGYITNGYMGKGADNDGSGSESGYTTPKKRKARRNSAKGCENLNIVQDKIMQQETSVPTLKQGLETFKPDYSEQKGNRVDGSKPIWKYETGPGGTSRGKPAVGDMLRKSSDSKPGVSSKKFDDRPKGKHASAVASKEDSWTLFKPPPVFPVDNSSAKIVPKISYASKVKENLNKTIQNSSVSPTSSSSSSSSTGETQTQSSSRLSQVPMSALKSVTSANFSNGPVLAGTDGNVYPPGGQPLLTTAANTLTPISSGTDSVLQDMSLTSAAVEQIKTSLFIYPSNMQTMLLSTAQVDLPSQTDQQNLGDIFQNQWGLSFINEPSAGPETVTGKSSEHKVMEVTFQGEYPATLVSQGAEIIPSGTEHPVFPKAYELEKRTSPQVLGSILKSGTTSESGALSLEPSHIGDLQKADTSSQGALVFLSKDYEIESQNPLASPTNTLLGSAKEQRYQRGLERNDSWGSFDLRAAIVYHTKEMESIWNLQKQDPKRIITYNEAMDSPDQ

SEQ ID NO: 33548 - protein, 120 aa, Homo sapiens
MEEKPGQPQPQHHHSHHHPHHHPQQQQQQPHHHHHYYFYNHSHNHHHHHHHQQPHQYLQHGAEGSPKAQPKPLKHEQKHTLQQHQETPKKKTEMESIWNLQKQDPKRIITYNEAMDSPDQ

SEQ ID NO: 33549 - protein, 247 aa, Homo sapiens
MPGRSSSNSGSTGFISFSGVESALSSLKNFQACINSGMDTASSVALDLVESQTEVSSEYSMDKAMVEFATLDRQLNHYVKAVQSTINHVKEERPEKIPDLKLLVEKKFLALQSKNSDADFQNNEKFVQFKQQLKELKKQCGLQADREADGTEGVDEDIIVTQSQTNFTCPITKEEMKKPVKNKVCGHTYEEDAIVRMIESRQKRKKKAYCPQIGCSHTDIRKSDLIQDEALRRAIENHNKKRHRHSE

SEQ ID NO: 33550 - protein, 115 aa, Homo sapiens
MPTDHEEPCGPSHKSFCLNGGLCYVIPTIPSPFCRCVENYTGARCEEVFLPGSSIQTKSNLFEAFVALAVLVTLIIGAFYFLCRKGHFQRASSVQYDINLVETSSTSAHHSHEQH

SEQ ID NO: 33551 - protein, 640 aa, Homo sapiens
MSERKEGRGKGKGKKKERGSGKKPESAAGSQSPALPPRLKEMKSQESAAGSKLVLRCETSSEYSSLRFKWFKNGNELNRKNKPQNIKIQKKPGKSELRINKASLADSGEYMCKVISKLGNDSASANITIVESNEIITGMPASTEGAYVSSESPIRISVSTEGANTSSSTSTSTTGTSHLVKCAEKEKTFCVNGGECFMVKDLSNPSRYLCKCQPGFTGARCTENVPMKVQNQEKAEELYQKRVLTITGICIALLVVGIMCVVAYCKTKKQRKKLHDRLRQSLRSERNNMMNIANGPHHPNPPPENVQLVNQYVSKNVISSEHIVEREAETSFSTSHYTSTAHHSTTVTQTPSHSWSNGHTESILSESHSVIVMSSVENSRHSSPTGGPRGRLNGTGGPRECNSFLRHARETPDSYRDSPHSERYVSAMTTPARMSPVDFHTPSSPKSPPSEMSPPVSSMTVSMPSMAVSPFMEEERPLLLVTPPRLREKKFDHHPQQFSSFHHNPAHDSNSLPASPLRIVEDEEYETTQEYEPAQEPVKKLANSRRAKRTKPNGHIANRLEVDSNTSSQSSNSESETEDERVGEDTPFLGIQNPLAASLEATPAFRLADSRTNPAGRFSTQEEIQARLSSVIANQDPIAV

SEQ ID NO: 33552 - protein, 648 aa, Homo sapiens
MSERKEGRGKGKGKKKERGSGKKPESAAGSQSPALPPRLKEMKSQESAAGSKLVLRCETSSEYSSLRFKWFKNGNELNRKNKPQNIKIQKKPGKSELRINKASLADSGEYMCKVISKLGNDSASANITIVESNEIITGMPASTEGAYVSSESPIRISVSTEGANTSSSTSTSTTGTSHLVKCAEKEKTFCVNGGECFMVKDLSNPSRYLCKCQPGFTGARCTENVPMKVQNQEKHLGIEFIEAEELYQKRVLTITGICIALLVVGIMCVVAYCKTKKQRKKLHDRLRQSLRSERNNMMNIANGPHHPNPPPENVQLVNQYVSKNVISSEHIVEREAETSFSTSHYTSTAHHSTTVTQTPSHSWSNGHTESILSESHSVIVMSSVENSRHSSPTGGPRGRLNGTGGPRECNSFLRHARETPDSYRDSPHSERYVSAMTTPARMSPVDFHTPSSPKSPPSEMSPPVSSMTVSMPSMAVSPFMEEERPLLLVTPPRLREKKFDHHPQQFSSFHHNPAHDSNSLPASPLRIVEDEEYETTQEYEPAQEPVKKLANSRRAKRTKPNGHIANRLEVDSNTSSQSSNSESETEDERVGEDTPFLGIQNPLAASLEATPAFRLADSRTNPAGRFSTQEEIQARLSSVIANQDPIAV

SEQ ID NO: 33553 - protein, 462 aa, Homo sapiens
MSERKEGRGKGKGKKKERGSGKKPESAAGSQSPALPPRLKEMKSQESAAGSKLVLRCETSSEYSSLRFKWFKNGNELNRKNKPQNIKIQKKPGKSELRINKASLADSGEYMCKVISKLGNDSASANITIVESNEIITGMPASTEGAYVSSESPIRISVSTEGANTSSSTSTSTTGTSHLVKCAEKEKTFCVNGGECFMVKDLSNPSRYLCKCQPGFTGARCTENVPMKVQNQEKAEELYQKRVLTITGICIALLVVGIMCVVAYCKTKKQRKKLHDRLRQSLRSERNNMMNIANGPHHPNPPPENVQLVNQYVSKNVISSEHIVEREAETSFSTSHYTSTAHHSTTVTQTPSHSWSNGHTESILSESHSVIVMSSVENSRHSSPTGGPRGRLNGTGGPRECNSFLRHARETPDSYRDSPHSERHNLIAELRRNKAHRSKCMQIQLSATHLRSSSIPHLGFIL

SEQ ID NO: 33554 - protein, 247 aa, Homo sapiens
MSERKEGRGKGKGKKKERGSGKKPESAAGSQSPALPPRLKEMKSQESAAGSKLVLRCETSSEYSSLRFKWFKNGNELNRKNKPQNIKIQKKPGKSELRINKASLADSGEYMCKVISKLGNDSASANITIVESNEIITGMPASTEGAYVSSESPIRISVSTEGANTSSSTSTSTTGTSHLVKCAEKEKTFCVNGGECFMVKDLSNPSRYLCKCQPGFTGARCTENVPMKVQNQESAQMSLLVIAAKTT

SEQ ID NO: 33555 - protein, 645 aa, Homo sapiens
MSERKEGRGKGKGKKKERGSGKKPESAAGSQSPALPPRLKEMKSQESAAGSKLVLRCETSSEYSSLRFKWFKNGNELNRKNKPQNIKIQKKPGKSELRINKASLADSGEYMCKVISKLGNDSASANITIVESNEIITGMPASTEGAYVSSESPIRISVSTEGANTSSSTSTSTTGTSHLVKCAEKEKTFCVNGGECFMVKDLSNPSRYLCKCPNEFTGDRCQNYVMASFYKHLGIEFMEAEELYQKRVLTITGICIALLVVGIMCVVAYCKTKKQRKKLHDRLRQSLRSERNNMMNIANGPHHPNPPPENVQLVNQYVSKNVISSEHIVEREAETSFSTSHYTSTAHHSTTVTQTPSHSWSNGHTESILSESHSVIVMSSVENSRHSSPTGGPRGRLNGTGGPRECNSFLRHARETPDSYRDSPHSERYVSAMTTPARMSPVDFHTPSSPKSPPSEMSPPVSSMTVSMPSMAVSPFMEEERPLLLVTPPRLREKKFDHHPQQFSSFHHNPAHDSNSLPASPLRIVEDEEYETTQEYEPAQEPVKKLANSRRAKRTKPNGHIANRLEVDSNTSSQSSNSESETEDERVGEDTPFLGIQNPLAASLEATPAFRLADSRTNPAGRFSTQEEIQARLSSVIANQDPIAV

SEQ ID NO: 33556 - protein, 637 aa, Homo sapiens
MSERKEGRGKGKGKKKERGSGKKPESAAGSQSPALPPRLKEMKSQESAAGSKLVLRCETSSEYSSLRFKWFKNGNELNRKNKPQNIKIQKKPGKSELRINKASLADSGEYMCKVISKLGNDSASANITIVESNEIITGMPASTEGAYVSSESPIRISVSTEGANTSSSTSTSTTGTSHLVKCAEKEKTFCVNGGECFMVKDLSNPSRYLCKCPNEFTGDRCQNYVMASFYKAEELYQKRVLTITGICIALLVVGIMCVVAYCKTKKQRKKLHDRLRQSLRSERNNMMNIANGPHHPNPPPENVQLVNQYVSKNVISSEHIVEREAETSFSTSHYTSTAHHSTTVTQTPSHSWSNGHTESILSESHSVIVMSSVENSRHSSPTGGPRGRLNGTGGPRECNSFLRHARETPDSYRDSPHSERYVSAMTTPARMSPVDFHTPSSPKSPPSEMSPPVSSMTVSMPSMAVSPFMEEERPLLLVTPPRLREKKFDHHPQQFSSFHHNPAHDSNSLPASPLRIVEDEEYETTQEYEPAQEPVKKLANSRRAKRTKPNGHIANRLEVDSNTSSQSSNSESETEDERVGEDTPFLGIQNPLAASLEATPAFRLADSRTNPAGRFSTQEEIQARLSSVIANQDPIAV

SEQ ID NO: 33557 - protein, 241 aa, Homo sapiens
MSERKEGRGKGKGKKKERGSGKKPESAAGSQSPALPPRLKEMKSQESAAGSKLVLRCETSSEYSSLRFKWFKNGNELNRKNKPQNIKIQKKPGKSELRINKASLADSGEYMCKVISKLGNDSASANITIVESNEIITGMPASTEGAYVSSESPIRISVSTEGANTSSSTSTSTTGTSHLVKCAEKEKTFCVNGGECFMVKDLSNPSRYLCKCPNEFTGDRCQNYVMASFYSTSTPFLSLPE

SEQ ID NO: 33558 - protein, 422 aa, Homo sapiens
MRWRRAPRRSGRPGPRAQRPGSAARSSPPLPLLPLLLLLGTAALAPGAAAGNEAAPAGASVCYSSPPSVGSVQELAQRAAVVIEGKVHPQRRQQGALDRKAAAAAGEAGAWGGDREPPAAGPRALGPPAEEPLLAANGTVPSWPTAPVPSAGEPGEEAPYLVKVHQVWAVKAGGLKKDSLLTVRLGTWGHPAFPSCGRLKEDSRYIFFMEPDANSTSRAPAAFRASFPPLETGRNLKKEVSRVLCKRCALPPRLKEMKSQESAAGSKLVLRCETSSEYSSLRFKWFKNGNELNRKNKPQNIKIQKKPGKSELRINKASLADSGEYMCKVISKLGNDSASANITIVESNATSTSTTGTSHLVKCAEKEKTFCVNGGECFMVKDLSNPSRYLCKCPNEFTGDRCQNYVMASFYSTSTPFLSLPE

SEQ ID NO: 33559 - protein, 296 aa, Homo sapiens
MEIYSPDMSEVAAERSSSPSTQLSADPSLDGLPAAEDMPEPQTEDGRTPGLVGLAVPCCACLEAERLRGCLNSEKICIVPILACLVSLCLCIAGLKWVFVDKIFEYDSPTHLDPGGLGQDPIISLDATAASAVWVSSEAYTSPVSRAQSESEVQVTVQGDKAVVSFEPSAAPTPKNRIFAFSFLPSTAPSFPSPTRNPEVRTPKSATQPQTTETNLQTAPKLSTSTSTTGTSHLVKCAEKEKTFCVNGGECFMVKDLSNPSRYLCKCPNEFTGDRCQNYVMASFYSTSTPFLSLPE

SEQ ID NO: 33560 - protein, 590 aa, Homo sapiens
MGKGRAGRVGTTALPPRLKEMKSQESAAGSKLVLRCETSSEYSSLRFKWFKNGNELNRKNKPQNIKIQKKPGKSELRINKASLADSGEYMCKVISKLGNDSASANITIVESNATSTSTTGTSHLVKCAEKEKTFCVNGGECFMVKDLSNPSRYLCKCPNEFTGDRCQNYVMASFYKHLGIEFMEAEELYQKRVLTITGICIALLVVGIMCVVAYCKTKKQRKKLHDRLRQSLRSERNNMMNIANGPHHPNPPPENVQLVNQYVSKNVISSEHIVEREAETSFSTSHYTSTAHHSTTVTQTPSHSWSNGHTESILSESHSVIVMSSVENSRHSSPTGGPRGRLNGTGGPRECNSFLRHARETPDSYRDSPHSERYVSAMTTPARMSPVDFHTPSSPKSPPSEMSPPVSSMTVSMPSMAVSPFMEEERPLLLVTPPRLREKKFDHHPQQFSSFHHNPAHDSNSLPASPLRIVEDEEYETTQEYEPAQEPVKKLANSRRAKRTKPNGHIANRLEVDSNTSSQSSNSESETEDERVGEDTPFLGIQNPLAASLEATPAFRLADSRTNPAGRFSTQEEIQARLSSVIANQDPIAV

SEQ ID NO: 33561 - protein, 420 aa, Homo sapiens
MSERKEGRGKGKGKKKERGSGKKPESAAGSQSPALPPRLKEMKSQESAAGSKLVLRCETSSEYSSLRFKWFKNGNELNRKNKPQNIKIQKKPGKSELRINKASLADSGEYMCKVISKLGNDSASANITIVESNEIITGMPASTEGAYVSSESPIRISVSTEGANTSSSTSTSTTGTSHLVKCAEKEKTFCVNGGECFMVKDLSNPSRYLCKCPNEFTGDRCQNYVMASFYKAEELYQKRVLTITGICIALLVVGIMCVVAYCKTKKQRKKLHDRLRQSLRSERNNMMNIANGPHHPNPPPENVQLVNQYVSKNVISSEHIVEREAETSFSTSHYTSTAHHSTTVTQTPSHSWSNGHTESILSESHSVIVMSSVENSRHSSPTGGPRGRLNGTGGPRECNSFLRHARETPDSYRDSPHSER

SEQ ID NO: 33562 - protein, 609 aa, Homo sapiens
MSRSAAASGGPRRPERHLPPAPCGAPGPPETCRTEPDGAGTMNKLRQSLRRRKPAYVPEASRPHQWQADEDAVRKGTCSFPVRYLGHVEVEESRGMHVCEDAVKKLKAMGRKSVKSVLWVSADGLRVVDDKTKDLLVDQTIEKVSFCAPDRNLDKAFSYICRDGTTRRWICHCFLALKDSGERLSHAVGCAFAACLERKQRREKECGVTAAFDASRTSFAREGSFRLSGGGRPAEREAPDKKKAEAAAAPTVAPGPAQPGHVSPTPATTSPGEKGEAGTPVAAGTTAAAIPRRHAPLEQLVRQGSFRGFPALSQKNSPFKRQLSLRLNELPSTLQRRTDFQVKGTVPEMEPPGAGDSDSINALCTQISSSFASAGAPAPGPPPATTGTSAWGEPSVPPAAAFQPGHKRTPSEAERWLEEVSQVAKAQQQQQQQQQQQQQQQQQQQQAASVAPVPTMPPALQPFPAPVGPFDAAPAQVAVFLPPPHMQPPFVPAYPGLGYPPMPRVPVVGITPSQMVANAFCSAAQLQPQPATLLGKAGAFPPPAIPSAPGSQARPRPNGAPWPPEPAPAPAPELDPFEAQWAALEGKATVEKPSNPFSGDLQKTFEIEL

SEQ ID NO: 33563 - protein, 160 aa, Homo sapiens
MRTAAGAVSPDSRPETRRQTRKNEEAAWGPRVCRAEREDNRKCPPSILKRSRPEHHRPEAKPQRTSRRVWFREPPAVTVHYIADKNATATVRVPGRPRPHGGSLLLQLCVCVLLVLALGLYCGRAKPVATALEDLRARLLGLVLHLRHVALTCWRGLLRL

SEQ ID NO: 33564 - protein, 720 aa, Homo sapiens
MSEGAAAASPPGAASAAAASAEEGTAAAAAAAAAGGGPDGGGEGAAEPPRELRCSDCIVWNRQQTWLCVVPLFIGFIGLGLSLMLLKWIVVGSVKEYVPTDLVDSKGMGQDPFFLSKPSSFPKAMETTTTTTSTTSPATPSAGGAASSRTPNRISTRLTTITRAPTRFPGHRVPIRASPRSTTARNTAAPATVPSTTAPFFSSSTLGSRPPVPGTPSTQAMPSWPTAAYATSSYLHDSTPSWTLSPFQDAASSSSSSSSSATTTTPETSTSPKFHTTTYSTERSEHFKPCRDKDLAYCLNDGECFVIETLTGSHKHCRCKEGYQGVRCDQFLPKTDSILSDPTDHLGIEFMESEEVYQRQVLSISCIIFGIVIVGMFCAAFYFKSKKQAKQIQEQLKVPQNGKSYSLKASSTMAKSENLVKSHVQLQNYSKVERHPVTALEKMMESSFVGPQSFPEVPSPDRGSQSVKHHRSLSSCCSPGQRSGMLHRNAFRRTPPSPRSRLGGIVGPAYQQLEESRIPDQDTIPCQGIEVRKTISHLPIQLWCVERPLDLKYSSSGLKTQRNTSINMQLPSRETNPYFNSLEQKDLVGYSSTRASSVPIIPSVGLEETCLQMPGISEVKSIKWCKNSYSADVVNVSIPVSDCLIAEQQEVKILLETVQEQIRILTDARRSEDYELASVETEDSASENTAFLPLSPTAKSEREAQFVLRNEIQRDSALTK

SEQ ID NO: 33565 - protein, 713 aa, Homo sapiens
MSEGAAAASPPGAASAAAASAEEGTAAAAAAAAAGGGPDGGGEGAAEPPRELRCSDCIVWNRQQTWLCVVPLFIGFIGLGLSLMLLKWIVVGSVKEYVPTDLVDSKGMGQDPFFLSKPSSFPKAMETTTTTTSTTSPATPSAGGAASSRTPNRISTRLTTITRAPTRFPGHRVPIRASPRSTTARNTAAPATVPSTTAPFFSSSTLGSRPPVPGTPSTQAMPSWPTAAYATSSYLHDSTPSWTLSPFQDAASSSSSSSSSATTTTPETSTSPKFHTTTYSTERSEHFKPCRDKDLAYCLNDGECFVIETLTGSHKHCRCKEGYQGVRCDQFLPKTDSILSDPTDHLGIEFMESEEVYQRQVLSISCIIFGIVIVGMFCAAFYFKSKKQAKQIQEQLKVPQNGKSYSLKASSTMAKSENLVKSHVQLQNYSKVERHPVTALEKMMESSFVGPQSFPEVPSPDRGSQSVKHHSPGQRSGMLHRNAFRRTPPSPRSRLGGIVGPAYQQLEESRIPDQDTIPCQGIEVRKTISHLPIQLWCVERPLDLKYSSSGLKTQRNTSINMQLPSRETNPYFNSLEQKDLVGYSSTRASSVPIIPSVGLEETCLQMPGISEVKSIKWCKNSYSADVVNVSIPVSDCLIAEQQEVKILLETVQEQIRILTDARRSEDYELASVETEDSASENTAFLPLSPTAKSEREAQFVLRNEIQRDSALTK

SEQ ID NO: 33566 - protein, 499 aa, Homo sapiens
MECGIPPTLVCVGRGGGLHTINIIIWYYFPSAWRTCFNISSSVGLLLTNSYKFYTTTYSTERSEHFKPCRDKDLAYCLNDGECFVIETLTGSHKHCRCKEGYQGVRCDQFLPKTDSILSDPTDHLGIEFMESEEVYQRQVLSISCIIFGIVIVGMFCAAFYFKSKKQAKQIQEQLKVPQNGKSYSLKASSTMAKSENLVKSHVQLQNYSKVERHPVTALEKMMESSFVGPQSFPEVPSPDRGSQSVKHHRSLSSCCSPGQRSGMLHRNAFRRTPPSPRSRLGGIVGPAYQQLEESRIPDQDTIPCQGIEVRKTISHLPIQLWCVERPLDLKYSSSGLKTQRNTSINMQLPSRETNPYFNSLEQKDLVGYSSTRASSVPIIPSVGLEETCLQMPGISEVKSIKWCKNSYSADVVNVSIPVSDCLIAEQQEVKILLETVQEQIRILTDARRSEDYELASVETEDSASENTAFLPLSPTAKSEREAQFVLRNEIQRDSALTK

SEQ ID NO: 33567 - protein, 696 aa, Homo sapiens
MSEGAAAASPPGAASAAAASAEEGTAAAAAAAAAGGGPDGGGEGAAEPPRELRCSDCIVWNRQQTWLCVVPLFIGFIGLGLSLMLLKWIVVGSVKEYVPTDLVDSKGMGQDPFFLSKPSSFPKAMETTTTTTSTTSPATPSAGGAASSRTPNRISTRLTTITRAPTRFPGHRVPIRASPRSTTARNTAAPATVPSTTAPFFSSSTLGSRPPVPGTPSTQAMPSWPTAAYATSSYLHDSTPSWTLSPFQDAASSSSSSSSSATTTTPETSTSPKFHTTTYSTERSEHFKPCRDKDLAYCLNDGECFVIETLTGSHKHCRCKEGYQGVRCDQFLPKTDSILSDPTDHLGIEFMESEEVYQRQVLSISCIIFGIVIVGMFCAAFYFKSKKQAKQIQEQLKVPQNGKSYSLKASSTMAKSENLVKSHVQLQNYSKVERHPVTALEKMMESSFVGPQSFPEVPSPDRGSQSVKHHRSLSSCCSPGQRSGMLHRNAFRRTPPSPRSRLGGIVGPAYQQLEESRIPDQDTIPCQGYSSSGLKTQRNTSINMQLPSRETNPYFNSLEQKDLVGYSSTRASSVPIIPSVGLEETCLQMPGISEVKSIKWCKNSYSADVVNVSIPVSDCLIAEQQEVKILLETVQEQIRILTDARRSEDYELASVETEDSASENTAFLPLSPTAKSEREAQFVLRNEIQRDSALTK

SEQ ID NO: 33568 - protein, 385 aa, Homo sapiens
MSGDSSGRGPEGRGRGRDPHRDRTRSRSRSRSPLSPRSRRGSARERREAPERPSLEDTEPSDSGDEMMDPASLEAEADQGLCRQIRHQYRALINSVQQNREDILNAGDKLTEVLEEANTLFNEVSRAREAVLDAHFLVLASDLGKEKAKQLRSDLSSFDMLRYVETLLTHMGVNPLEAEELIRDEDSPDFEFIVYDSWKITGRTAENTFNKTHTFHFLLGSIYGECPVPKPRVDRPRKVPVIQEERAMPAQLRRMEESHQEATEKEVERILGLLQTYFREDPDTPMSFFDFVVDPHSFPRTVENIFHVSFIIRDGFARIRLDQDRLPVIEPVSINEENEGFEHNTQVRNQGIIALSYRDWEEIVKTFEISEPVITPSQRQQKPSA

SEQ ID NO: 33569 - protein, 316 aa, Homo sapiens
MSGDSSGRGPEGRGRGRDPHRDRTRSRSRSRSPLSPRSRRGSARERREAPERPSLEDTEPSDSGDEMMDPASLEAEADQGLCRQIRHQYRALINSVQQNREDILNAGDKLTEVLEEANTLFNEVSRAREAVLDAHFLVLASDLGKEKAKQLRSDLSSFDMLRYVETLLTHMGVNPLEAEELIRDEDSPDFEFIVYDSWKITGRTAENTFNKTHTFHFLLGSIYGECPVPKPRVDRPRKVPVIQEERAMPAQLRRMEESHQEATEKEVERILGLLQTYFREDRDSLTLSPRLECSGTISTHCNLHLLDSSNSPASAS

SEQ ID NO: 33570 - protein, 418 aa, Homo sapiens
MRLNSSAPGTPGTPAADPFQRAQAGLEEALLAPGFGNASGNASERVLAAPSSELDVNTDIYSKVLVTAVYLALFVVGTVGNTVTAFTLARKKSLQSLQSTVHYHLGSLALSDLLTLLLAMPVELYNFIWVHHPWAFGDAGCRGYYFLRDACTYATALNVASLSVERYLAICHPFKAKTLMSRSRTKKFISAIWLASALLAVPMLFTMGEQNRSADGQHAGGLVCTPTIHTATVKVVIQVNTFMSFIFPMVVISVLNTIIANKLTVMVRQAAEQGQVCTVGGEHSTFSMAIEPGRVQALRHGVRVLRAVVIAFVVCWLPYHVRRLMFCYISDEQWTPFLYDFYHYFYMVTNALFYVSSTINPILYNLVSANFRHIFLATLACLCPVWRRRRKRPAFSRKADSVSSNHTLSSNATRETLY

SEQ ID NO: 33571 - protein, 248 aa, Homo sapiens
MKLTFFLGLLALISCFTPSESQRFSRRPYLPGQLPPPPLYRPRWVPPSPPPPYDSRLNSPLSLPFVPGRVPPSSFSRFSQAVILSQLFPLESIRQPRLFPGYPNLHFPLRPYYVGPIRILKPPFPPIPFFLAIYLPISNPEPQINITTADTTITTNPPTTATATTSTSTKPTMTISSSTVPISSTPEPATSISAATPAASTENTTQILANRPHTVLLNATVQVTTSNQTILSSPAFKSFWQKLFAIFG

SEQ ID NO: 33572 - protein, 331 aa, Homo sapiens
MGGEQEEERFDGMLLAMAQQHEGGVQELVNTFFSFLRRKTDFFIGGEEGMAEKLITQTFSHHNQLAQKTRREKRARQEAERREKAERAARLAKEAKSETSGPQIKELTDEEAERLQLEIDQKKDAENHEAQLKNGSLDSPGKQDTEEDEEEDEKDKGKLKPNLGNGADLPNYRWTQTLSELDLAVPFCVNFRLKGKDMVVDIQRRHLRVGLKGQPAIIDGELYNEVKVEESSWLIEDGKVVTVHLEKINKMEWWSRLVSSDPEINTKKINPENSKLSDLDSETRSMVEKMMYDQRQKSMGLPTSDEQKKQEILKKFMDQHPEMDFSKAKFN

SEQ ID NO: 33573 - protein, 134 aa, Homo sapiens
MLLVLLSVVLLALSSAQSTDNDVNYEDFTFTIPDVEDSSQRPDQGPQRPPPEGLLPRPPGDSGNQDDGPQQRPPKPGGHHRHPPPPPFQNQQRPPRRGHRQLSLPRFPSVSLQEASSFFQRDRPARHPQEQPLW

SEQ ID NO: 33574 - protein, 65 aa, Homo sapiens
MLLVLLSVVLLALSSAQSTDNDVNYEDFTFTIPACRKHHHSSRGTDQQDIPRSNHSGNLEFSGRK

SEQ ID NO: 33575 - protein, 52 aa, Homo sapiens
MEKVQYLTRSAIRRASTIEMPQQARQKLQNLFINFCLILICLLLICIIVMLL

SEQ ID NO: 33576 - protein, 822 aa, Homo sapiens
MSSWIRWHGPAMARLWGFCWLVVGFWRAAFACPTSCKCSASRIWCSDPSPGIVAFPRLEPNSVDPENITEIFIANQKRLEIINEDDVEAYVGLRNLTIVDSGLKFVAHKAFLKNSNLQHINFTRNKLTSLSRKHFRHLDLSELILVGNPFTCSCDIMWIKTLQEAKSSPDTQDLYCLNESSKNIPLANLQIPNCGLPSANLAAPNLTVEEGKSITLSCSVAGDPVPNMYWDVGNLVSKHMNETSHTQGSLRITNISSDDSGKQISCVAENLVGEDQDSVNLTVHFAPTITFLESPTSDHHWCIPFTVKGNPKPALQWFYNGAILNESKYICTKIHVTNHTEYHGCLQLDNPTHMNNGDYTLIAKNEYGKDEKQISAHFMGWPGIDDGANPNYPDVIYEDYGTAANDIGDTTNRSNEIPSTDVTDKTGREHLSVYAVVVIASVVGFCLLVMLFLLKLARHSKFGMKGPASVISNDDDSASPLHHISNGSNTPSSSEGGPDAVIIGMTKIPVIENPQYFGITNSQLKPDTFVQHIKRHNIVLKRELGEGAFGKVFLAECYNLCPEQDKILVAVKTLKDASDNARKDFHREAELLTNLQHEHIVKFYGVCVEGDPLIMVFEYMKHGDLNKFLRAHGPDAVLMAEGNPPTELTQSQMLHIAQQIAAGMVYLASQHFVHRDLATRNCLVGENLLVKIGDFGMSRDVYSTDYYRVGGHTMLPIRWMPPESIMYRKFTTESDVWSLGVVLWEIFTYGKQPWYQLSNNEVIECITQGRVLQRPRTCPQEVYELMLGCWQREPHMRKNIKGIHTLLQNLAKASPVYLDILG

SEQ ID NO: 33577 - protein, 477 aa, Homo sapiens
MSSWIRWHGPAMARLWGFCWLVVGFWRAAFACPTSCKCSASRIWCSDPSPGIVAFPRLEPNSVDPENITEIFIANQKRLEIINEDDVEAYVGLRNLTIVDSGLKFVAHKAFLKNSNLQHINFTRNKLTSLSRKHFRHLDLSELILVGNPFTCSCDIMWIKTLQEAKSSPDTQDLYCLNESSKNIPLANLQIPNCGLPSANLAAPNLTVEEGKSITLSCSVAGDPVPNMYWDVGNLVSKHMNETSHTQGSLRITNISSDDSGKQISCVAENLVGEDQDSVNLTVHFAPTITFLESPTSDHHWCIPFTVKGNPKPALQWFYNGAILNESKYICTKIHVTNHTEYHGCLQLDNPTHMNNGDYTLIAKNEYGKDEKQISAHFMGWPGIDDGANPNYPDVIYEDYGTAANDIGDTTNRSNEIPSTDVTDKTGREHLSVYAVVVIASVVGFCLLVMLFLLKLARHSKFGMKGFVLFHKIPLDG

SEQ ID NO: 33578 - protein, 537 aa, Homo sapiens
MSSWIRWHGPAMARLWGFCWLVVGFWRAAFACPTSCKCSASRIWCSDPSPGIVAFPRLEPNSVDPENITEIFIANQKRLEIINEDDVEAYVGLRNLTIVDSGLKFVAHKAFLKNSNLQHINFTRNKLTSLSRKHFRHLDLSELILVGNPFTCSCDIMWIKTLQEAKSSPDTQDLYCLNESSKNIPLANLQIPNCGLPSANLAAPNLTVEEGKSITLSCSVAGDPVPNMYWDVGNLVSKHMNETSHTQGSLRITNISSDDSGKQISCVAENLVGEDQDSVNLTVHFAPTITFLESPTSDHHWCIPFTVKGNPKPALQWFYNGAILNESKYICTKIHVTNHTEYHGCLQLDNPTHMNNGDYTLIAKNEYGKDEKQISAHFMGWPGIDDGANPNYPDVIYEDYGTAANDIGDTTNRSNEIPSTDVTDKTGREHLSVYAVVVIASVVGFCLLVMLFLLKLARHSKFGMKGPASVISNDDDSASPLHHISNGSNTPSSSEGGPDAVIIGMTKIPVIENPQYFGITNSQLKPDTWPRGSPKTA

SEQ ID NO: 33579 - protein, 838 aa, Homo sapiens
MSSWIRWHGPAMARLWGFCWLVVGFWRAAFACPTSCKCSASRIWCSDPSPGIVAFPRLEPNSVDPENITEIFIANQKRLEIINEDDVEAYVGLRNLTIVDSGLKFVAHKAFLKNSNLQHINFTRNKLTSLSRKHFRHLDLSELILVGNPFTCSCDIMWIKTLQEAKSSPDTQDLYCLNESSKNIPLANLQIPNCGLPSANLAAPNLTVEEGKSITLSCSVAGDPVPNMYWDVGNLVSKHMNETSHTQGSLRITNISSDDSGKQISCVAENLVGEDQDSVNLTVHFAPTITFLESPTSDHHWCIPFTVKGNPKPALQWFYNGAILNESKYICTKIHVTNHTEYHGCLQLDNPTHMNNGDYTLIAKNEYGKDEKQISAHFMGWPGIDDGANPNYPDVIYEDYGTAANDIGDTTNRSNEIPSTDVTDKTGREHLSVYAVVVIASVVGFCLLVMLFLLKLARHSKFGMKDFSWFGFGKVKSRQGVGPASVISNDDDSASPLHHISNGSNTPSSSEGGPDAVIIGMTKIPVIENPQYFGITNSQLKPDTFVQHIKRHNIVLKRELGEGAFGKVFLAECYNLCPEQDKILVAVKTLKDASDNARKDFHREAELLTNLQHEHIVKFYGVCVEGDPLIMVFEYMKHGDLNKFLRAHGPDAVLMAEGNPPTELTQSQMLHIAQQIAAGMVYLASQHFVHRDLATRNCLVGENLLVKIGDFGMSRDVYSTDYYRVGGHTMLPIRWMPPESIMYRKFTTESDVWSLGVVLWEIFTYGKQPWYQLSNNEVIECITQGRVLQRPRTCPQEVYELMLGCWQREPHMRKNIKGIHTLLQNLAKASPVYLDILG

SEQ ID NO: 33580 - protein, 553 aa, Homo sapiens
MSSWIRWHGPAMARLWGFCWLVVGFWRAAFACPTSCKCSASRIWCSDPSPGIVAFPRLEPNSVDPENITEIFIANQKRLEIINEDDVEAYVGLRNLTIVDSGLKFVAHKAFLKNSNLQHINFTRNKLTSLSRKHFRHLDLSELILVGNPFTCSCDIMWIKTLQEAKSSPDTQDLYCLNESSKNIPLANLQIPNCGLPSANLAAPNLTVEEGKSITLSCSVAGDPVPNMYWDVGNLVSKHMNETSHTQGSLRITNISSDDSGKQISCVAENLVGEDQDSVNLTVHFAPTITFLESPTSDHHWCIPFTVKGNPKPALQWFYNGAILNESKYICTKIHVTNHTEYHGCLQLDNPTHMNNGDYTLIAKNEYGKDEKQISAHFMGWPGIDDGANPNYPDVIYEDYGTAANDIGDTTNRSNEIPSTDVTDKTGREHLSVYAVVVIASVVGFCLLVMLFLLKLARHSKFGMKDFSWFGFGKVKSRQGVGPASVISNDDDSASPLHHISNGSNTPSSSEGGPDAVIIGMTKIPVIENPQYFGITNSQLKPDTWPRGSPKTA

SEQ ID NO: 33581 - protein, 735 aa, Homo sapiens
MSSWIRWHGPAMARLWGFCWLVVGFWRAAFACPTSCKCSASRIWCSDPSPGIVAFPRLEPNSVDPENITEIFIANQKRLEIINEDDVEAYVGLRNLTIVDSGLKFVAHKAFLKNSNLQHINFTRNKLTSLSRKHFRHLDLSELILVGNPFTCSCDIMWIKTLQEAKSSPDTQDLYCLNESSKNIPLANLQIPNCGLPSANLAAPNLTVEEGKSITLSCSVAGDPVPNMYWDVGNLVSKHMNETSHTQGSLRITNISSDDSGKQISCVAENLVGEDQDSVNLTVHFAPTITFLESPTSDHHWCIPFTVKGNPKPALQWFYNGAILNESKYICTKIHVTNHTEYHGCLQLDNPTHMNNGDYTLIAKNEYGKDEKQISAHFMGWPGIDDGANPNYPDVIYEDYGTAANDIGDTTNRSNEIPSTDVTDKTGREHLSVYAVVVIASVVGFCLLVMLFLLKLARHSKFGMKGPASVISNDDDSASPLHHISNGSNTPSSSEGGPDAVIIGMTKIPVIENPQYFGITNSQLKPDTFVQHIKRHNIVLKRELGEGAFGKVFLAECYNLCPEQDKILVAVKTLKDASDNARKDFHREAELLTNLQHEHIVKFYGVCVEGDPLIMVFEYMKHGDLNKFLRAHGPDAVLMAEGNPPTELTQSQMLHIAQQIAAGMVYLASQHFVHRDLATRNCLVGENLLVKIGDFGMSRDVYSTDYYRVSSCADQRPQGPLSLRDPCCICLLRLS

SEQ ID NO: 33582 - protein, 321 aa, Homo sapiens
MWIKTLQEAKSSPDTQDLYCLNESSKNIPLANLQIPNCGLPSANLAAPNLTVEEGKSITLSCSVAGDPVPNMYWDVGNLVSKHMNETSHTQGSLRITNISSDDSGKQISCVAENLVGEDQDSVNLTVHFAPTITFLESPTSDHHWCIPFTVKGNPKPALQWFYNGAILNESKYICTKIHVTNHTEYHGCLQLDNPTHMNNGDYTLIAKNEYGKDEKQISAHFMGWPGIDDGANPNYPDVIYEDYGTAANDIGDTTNRSNEIPSTDVTDKTGREHLSVYAVVVIASVVGFCLLVMLFLLKLARHSKFGMKGFVLFHKIPLDG

SEQ ID NO: 33583 - protein, 165 aa, Homo sapiens
MMRCCRRRCCCRQPPHALRPLLLLPLVLLPPLAAAAAGPNRCDTIYQGFAECLIRLGDSMGRGGELETICRSWNDFHACASQVLSGCPEEAAAVWESLQQEARQAPRPNNLHTLCGAPVHVRERGTGSETNQETLRATAPALPMAPAPPLLAAALALAYLLRPLA

SEQ ID NO: 33584 - protein, 195 aa, Homo sapiens
MSSCSNVCGSRQAQAAAEGGYQRYGVRSYLHQFYEDCTASIWEYEDDFQIQRSPNRWSSVFWKVGLISGTVFVILGLTVLAVGFLVPPKIEAFGEADFVVVDTHAVQFNSALDMYKLAGAVLFCIGGTSMAGCLLMSVFVKSYSKEEKFLQQKFKERIADIKAHTQPVTKAPGPGETKIPVTLSRVQNVQPLLAT

SEQ ID NO: 33585 - protein, 382 aa, Homo sapiens
MGAFLDKPKMEKHNAQGQGNGLRYGLSSMQGWRVEMEDAHTAVIGLPSGLESWSFFAVYDGHAGSQVAKYCCEHLLDHITNNQDFKGSAGAPSVENVKNGIRTGFLEIDEHMRVMSEKKHGADRSGSTAVGVLISPQHTYFINCGDSRGLLCRNRKVHFFTQDHKPSNPLEKERIQNAGGSVMIQRVNGSLAVSRALGDFDYKCVHGKGPTEQLVSPEPEVHDIERSEEDDQFIILACDGIWDVMGNEELCDFVRSRLEVTDDLEKVCNEVVDTCLYKGSRDNMSVILICFPNAPKVSPEAVKKEAELDKYLECRVEEIIKKQGEGVPDLVHVMRTLASENIPSLPPGGELASKRNVIEAVYNRLNPYKNDDTDSTSTDDMW

SEQ ID NO: 33586 - protein, 324 aa, Homo sapiens
MGAFLDKPKMEKHNAQGQGNGLRYGLSSMQGWRVEMEDAHTAVIGLPSGLESWSFFAVYDGHAGSQVAKYCCEHLLDHITNNQDFKGSAGAPSVENVKNGIRTGFLEIDEHMRVMSEKKHGADRSGSTAVGVLISPQHTYFINCGDSRGLLCRNRKVHFFTQDHKPSNPLEKERIQNAGGSVMIQRVNGSLAVSRALGDFDYKCVHGKGPTEQLVSPEPEVHDIERSEEDDQFIILACDGIWDVMGNEELCDFVRSRLEVTDDLEKVCNEVVDTCLYKGSRDNMSVILICFPNAPKVSPEAVKKEAELDKYLECRVEGGSFNKK

SEQ ID NO: 33587 - protein, 455 aa, Homo sapiens
MFCSGRKWVAEATICTKLMKREKRRMGKRRAKKAKREEKKKGGERRRNEKRGNQMKRMCERKKYETDLEDQDIMGAFLDKPKMEKHNAQGQGNGLRYGLSSMQGWRVEMEDAHTAVIGLPSGLESWSFFAVYDGHAGSQVAKYCCEHLLDHITNNQDFKGSAGAPSVENVKNGIRTGFLEIDEHMRVMSEKKHGADRSGSTAVGVLISPQHTYFINCGDSRGLLCRNRKVHFFTQDHKPSNPLEKERIQNAGGSVMIQRVNGSLAVSRALGDFDYKCVHGKGPTEQLVSPEPEVHDIERSEEDDQFIILACDGIWDVMGNEELCDFVRSRLEVTDDLEKVCNEVVDTCLYKGSRDNMSVILICFPNAPKVSPEAVKKEAELDKYLECRVEEIIKKQGEGVPDLVHVMRTLASENIPSLPPGGELASKRNVIEAVYNRLNPYKNDDTDSTSTDDMW

SEQ ID NO: 33588 - protein, 236 aa, Homo sapiens; identical to SEQ ID NO: 32974

SEQ ID NO: 33589 - protein, 230 aa, Homo sapiens
MCVTYHNGTGYCKCPEGFLGEYCQHRDPCEKNRCQNGGTCVAQAMLGKATCRCASGFTGEDCQYSTSHPCFVSRPCLNGGTCHMLSRDTYECTCQVGFTGKECQWTDACLSHPCANGSTCTTVANQFSCKCLTGFTGQKCETDVNECDIPGHCQHGGTCLNLPGSYQCQCLQGFTGQYCDSLYVPCAPSPCVNGGTCRQTGDFTFECNCLPATWPIFPKLLSLQEKESYC

SEQ ID NO: 33590 - protein, 249 aa, Homo sapiens
MCRDGYEPCVNEGMCVTYHNGTGYCKCPEGFLGEYCQHRDPCEKNRCQNGGTCVAQAMLGKATCRCASGFTGEDCQYSTSHPCFVSRPCLNGGTCHMLSRDTYECTCQVGFTGKECQWTDACLSHPCANGSTCTTVANQFSCKCLTGFTGQKCETDVNECDIPGHCQHGGTCLNLPGSYQCQCLQGFTGQYCDSLYVPCAPSPCVNGGTCRQTGDFTFECNCLPETVRRGTELWERDREVWNGKEHDEN

SEQ ID NO: 33591 - protein, 429 aa, Homo sapiens
MGLYAAAAGVLAGVESRQGSIKGLVYSSNFQNVKQLYALVCETQRYSAVLDAVIASAGLLRAEKKLRPHLAKVLVYELLLGKGFRGGGGRWKALLGRHQARLKAELARLKVHRGVSRNEDLLEVGSRPGPASQLPRFVRVNTLKTCSDDVVDYFKRQGFSYQGRASSLDDLRALKGKHFLLDPLMPELLVFPAQTDLHEHPLYRAGHLILQDRASCLPAMLLDPPPGSHVIDACAAPGNKTSHLAALLKNQGKIFAFDLDAKRLASMATLLARAGVSCCELAEEDFLAVSPSDPRYHEVHYILLDPSCSGSGMPSRQLEEPGAGTPSPVRLHALAGFQQRALCHALTFPSLQRLVYSTCSLCQEENEDVVRDALQQNPGAFRLAPALPAWPHRGLSTFPGAEHCLRASPETTLSSGFFVAVIERVEVPR

SEQ ID NO: 33592 - protein, 466 aa, Homo sapiens
MGLYAAAAGVLAGVESRQGSIKGLVYSSNFQNVKQLYALVCETQRYSAVLDAVIASAGLLRAEKKLRPHLAKVLVYELLLGKGFRGGGGRWKALLGRHQARLKAELARLKVHRGVSRNEDLLEVGSRPGPASQLPRFVRVNTLKTCSDDVVDYFKRQGFSYQGRASSLDDLRALKGKHFLLDPLMPELLVFPAQTDLHEHPLYRAGHLILQDRASCLPAMLLDPPPGSHVIDACAAPGNKTSHLAALLKNQGKIFAFDLDAKRLASMATLLARAGVSCCELAEEDFLAVSPSDPRYHEVHYILLDPSCSGSGMPSRQLEEPGAGTPSPVRLHALAGFQQRALCHALTFPSLQRLVYSTCSLCQEENEDVVRDALQQNPGAFRLAPALPAWPHRGLSTFPGAEHCLRASPETTLSSGFFVAVIERVEVPSSASQAKASAPERTPSPAPKRKKRQQRAAAGACTPPCT

SEQ ID NO: 33593 - protein, 324 aa, Homo sapiens
MLRAFLFLSLFPHSQVLVYELLLGKGFRGGGGRWKALLGRHQARLKAELARLKVHRGVSRNEDLLEVGSRPGPASQLPRFVRVNTLKTCSDDVVDYFKRQGFSYQGRASSLDDLRALKGKHFLLDPLMPELLVFPAQTDLHEHPLYRAGHLILQDRASCLPAMLLDPPPGSHVIDACAAPGNKTSHLAALLKNQGSLPLTWMPSGWHPWPRCWPGLASLAVNWLRRTSWRSPPRIHATMRSTTSCWILPAVARVCRADSWRSPGQAHLARCVCMPWQGSSSEPCATRSLSLPCSGSSTPRAPSARRRMKTWCEMRCSRTRAPSG

SEQ ID NO: 33594 - protein, 470 aa, Homo sapiens
MGLYAAAAGVLAGVESRQGSIKGLVYSSNFQNVKQLYALVCETQRYSAVLDAVIASAGLLRAEKKLRPHLAKVLVYELLLGKGFRGGGGRWKALLGRHQARLKAELARLKVHRGVSRNEDLLEVGSRPGPASQLPRFVRVNTLKTCSDDVVDYFKRQGFSYQGRASSLDDLRALKGKHFLLDPLMPELLVFPAQTDLHEHPLYRAGHLILQDRASCLPAMLLDPPPGSHVIDACAAPGNKTSHLAALLKNQGKIFAFDLDAKRLASMATLLARAGVSCCELAEEDFLAVSPSDPRYHEVHYILLDPSCSGSGMPSRQLEEPGAGTPSPVRLHALAGFQQRALCHALTFPSLQRLVYSTCSLCQEENEDVVRDALQQNPGAFRLAPALPAWPHRGLSTFPGAEHCLRASPETTLSSGFFVAVIERVEVPSLTGQSISTRTHTQPSPKEKEETAKSRSRCLHTALHIAEAPG

SEQ ID NO: 33595 - protein, 391 aa, Homo sapiens
MGLYAAAAGVLAGVESRQGSIKGLVYSSNFQNVKQLYALVCETQRYSAVLDAVIASAGLLRAEKKLRPHLAKVHRGVSRNEDLLEVGSRPGPASQLPRFVRVNTLKTCSDDVVDYFKRQGFSYQGRASSLDDLRALKGKHFLLDPLMPELLVFPAQTDLHEHPLYRAGHLILQDRASCLPAMLLDPPPGSHVIDACAAPGNKTSHLAALLKNQGKIFAFDLDAKRLASMATLLARAGVSCCELAEEDFLAVSPSDPRYHEVHYILLDPSCSGSGMPSRQLEEPGAGTPSPVRLHALAGFQQRALCHALTFPSLQRLVYSTCSLCQEENEDVVRDALQQNPGAFRLAPALPAWPHRGLSTFPGAEHCLRASPETTLSSGFFVAVIERVEVPR

SEQ ID NO: 33596 - protein, 1391 aa, Homo sapiens
MPSSLLGAAMPASTSAAALQEALENAGRLIDRQLQEDRMYPDLSELLMVSAPNNPTVSGMSDMDYPLQGPGLLSVPNLPEISSIRRVPLPPELVEQFGHMQCNCMMGVFPPISRAWLTIDSDIFMWNYEDGGDLAYFDGLSETILAVGLVKPKAGIFQPHVRHLLVLATPVDIVILGLSYANLQTGSGVLNDSLSGGMQLLPDPLYSLPTDNTYLLTITSTDNGRIFLAGKDGCLYEVAYQAEAGWFSQRCRKINHSKSSLSFLVPSLLQFTFSEDDPILQIAIDNSRNILYTRSEKGVIQVYDLGQDGQGMSRVASVSQNAIVSAAGNIARTIDRSVFKPIVQIAVIENSESLDCQLLAVTHAGVRLYFSTCPFRQPLARPNTLTLVHVRLPPGFSASSTVEKPSKVHRALYSKGILLMAASENEDNDILWCVNHDTFPFQKPMMETQMTAGVDGHSWALSAIDELKVDKIITPLNKDHIPITDSPVVVQQHMLPPKKFVLLSAQGSLMFHKLRPVDQLRHLLVSNVGGDGEEIERFFKLHQEDQACATCLILACSTAACDREVSAWATRAFFRYGGEAQMRFPTTLPPPSNVGPILGSPVYSSSPVPSGSPYPNPSFLGTPSHGIQPPAMSTPVCALGNPATQATNMSCVTGPEIVYSGKHNGICIYFSRIMGNIWDASLVVERIFKSGNREITAIESSVPCQLLESVLQELKGLQEFLDRNSQFAGGPLGNPNTTAKVQQRLIGFMRPENGNPQQMQQELQRKFHEAQLSEKISLQAIQQLVRKSYQALALWKLLCEHQFTIIVAELQKELQEQLKITTFKDLVIRDKELTGALIASLINCYIRDNAAVDGISLHLQDICPLLYSTDDAICSKANELLQRSRQVQNKTEKERMLRESLKEYQKISNQVDLSNVCAQYRQVRFYEGVVELSLTAAEKKDPQGLGLHFYKHGEPEEDIVGLQAFQERLNSYKCITDTLQELVNQSKAAPQSPSVPKKPGPPVLSSDPNMLSNEEAGHHFEQMLKLSQRSKDELFSIALYNWLIQVDLADKLLQVASPFLEPHLVRMAKVDQNRVRYMDLLWRYYEKNRSFSNAARVLSRLADMHSTEISLQQRLEYIARAILSAKSSTAISSIAADGEFLHELEEKMEVARIQLQIQETLQRQYSHHSSVQDAVSQLDSELMDITKLYGEFADPFKLAECKLAIIHCAGYSDPILVQTLWQDIIEKELSDSVTLSSSDRMHALSLKIVLLGKIYAGTPRFFPLDFIVQFLEQQVCTLNWDVGFVIQTMNEIGVPLPRLLEVYDQLFKSRDPFWNRMKKPLHLLDCIHVLLIRYVENPSQVLNCERRRFTNLCLDAVCGYLVELQSMSSSVAVQAITGNFKSLQAKLERLH

SEQ ID NO: 33597 - protein, 1332 aa, Homo sapiens
MSDMDYPLQGPGLLSVPNLPEISSIRRVPLPPELVEQFGHMQCNCMMGVFPPISRAWLTIDSDIFMWNYEDGGDLAYFDGLSETILAVGLVKPKAGIFQPHVRHLLVLATPVDIVILGLSYANLQTGSGVLNDSLSGGMQLLPDPLYSLPTDNTYLLTITSTDNGRIFLAGKDGCLYEVAYQAEAGWFSQRCRKINHSKSSLSFLVPSLLQFTFSEDDPILQIAIDNSRNILYTRSEKGVIQVYDLGQDGQGMSRVASVSQNAIVSAAGNIARTIDRSVFKPIVQIAVIENSESLDCQLLAVTHAGVRLYFSTCPFRQPLARPNTLTLVHVRLPPGFSASSTVEKPSKVHRALYSKGILLMAASENEDNDILWCVNHDTFPFQKPMMETQMTAGVDGHSWALSAIDELKVDKIITPLNKDHIPITDSPVVVQQHMLPPKKFVLLSAQGSLMFHKLRPVDQLRHLLVSNVGGDGEEIERFFKLHQEDQACATCLILACSTAACDREVSAWATRAFFRYGGEAQMRFPTTLPPPSNVGPILGSPVYSSSPVPSGSPYPNPSFLGTPSHGIQPPAMSTPVCALGNPATQATNMSCVTGPEIVYSGKHNGICIYFSRIMGNIWDASLVVERIFKSGNREITAIESSVPCQLLESVLQELKGLQEFLDRNSQFAGGPLGNPNTTAKVQQRLIGFMRPENGNPQQMQQELQRKFHEAQLSEKISLQAIQQLVRKSYQALALWKLLCEHQFTIIVAELQKELQEQLKITTFKDLVIRDKELTGALIASLINCYIRDNAAVDGISLHLQDICPLLYSTDDAICSKANELLQRSRQVQNKTEKERMLRESLKEYQKISNQVDLSNVCAQYRQVRFYEGVVELSLTAAEKKDPQGLGLHFYKHGEPEEDIVGLQAFQERLNSYKCITDTLQELVNQSKAAPQSPSVPKKPGPPVLSSDPNMLSNEEAGHHFEQMLKLSQRSKDELFSIALYNWLIQVDLADKLLQVASPFLEPHLVRMAKVDQNRVRYMDLLWRYYEKNRSFSNAARVLSRLADMHSTEISLQQRLEYIARAILSAKSSTAISSIAADGEFLHELEEKMEVARIQLQIQETLQRQYSHHSSVQDAVSQLDSELMDITKLYGEFADPFKLAECKLAIIHCAGYSDPILVQTLWQDIIEKELSDSVTLSSSDRMHALSLKIVLLGKIYAGTPRFFPLDFIVQFLEQQVCTLNWDVGFVIQTMNEIGVPLPRLLEVYDQLFKSRDPFWNRMKKPLHLLDCIHVLLIRYVENPSQVLNCERRRFTNLCLDAVCGYLVELQSMSSSVAVQAITGNFKSLQAKLERLH

SEQ ID NO: 33598 - protein, 204 aa, Homo sapiens
MMPSCNRSCSCSRGPSVEDGKWYGVRSYLHLFYEDCAGTALSDDPEGPPVLCPRRPWPSLCWKISLSSGTLLLLLGVAALTTGYAVPPKLEGIGEGEFLVLDQRAADYNQALGTCRLAGTALCVAAGVLLAICLFWAMIGWLSQDTKAEPLDPEADSHVEVFGDEPEQQLSPIFRNASGQSWFSPPASPFGQSSVQTIQPKRDS

SEQ ID NO: 33599 - protein, 428 aa, Homo sapiens [sequence omitted]

SEQ ID NO: 33600 - protein, 116 aa, Homo sapiens
MSFSEQQCKQPCVPPPCLPKTQEQCQAKAEEVCLPTCQHPCQDKCLVQAQEVCLSQCQESSQEKCPQQGQEPYLPPCQDQCPPQCAEPCQELFQTKCVEVCPQKVQEKCSSPGKGK

SEQ ID NO: 33601 - protein, 1643 aa, Homo sapiens
MSSTLHSVFFTLKVSILLGSLLGLCLGLEFMGLPNQWARYLRWDASTRSDLSFQFKTNVSTGLLLYLDDGGVCDFLCLSLVDGRVQLRFSMDCAETAVLSNKQVNDSSWHFLMVSRDRLRTVLMLDGEGQSGELQPQRPYMDVVSDLFLGGVPTDIRPSALTLDGVQAMPGFKGLILDLKYGNSEPRLLGSRGVQMDAEGPCGERPCENGGICFLLDGHPTCDCSTTGYGGKLCSEDVSQDPGLSHLMMSEQAREENVATFRGSEYLCYDLSQNPIQSSSDEITLSFKTWQRNGLILHTGKSADYVNLALKDGAVSLVINLGSGAFEAIVEPVNGKFNDNAWHDVKVTRNLRQVTISVDGILTTTGYTQEDYTMLGSDDFFYVGGSPSTADLPGSPVSNNFMGCLKEVVYKNNDIRLELSRLARIADTKMKIYGEVVFKCENVATLDPINFETPEAYISLPKWNTKRMGSISFDFRTTEPNGLILFTHGKPQERKDARSQKNTKVDFFAVELLDGNLYLLLDMGSGTIKVKATQKKANDGEWYHVDIQRDGRSGTISVNSRRTPFTASGESEILDLEGDMYLGGLPENRAGLILPTELWTAMLNYGYVGCIRDLFIDGRSKNIRQLAEMQNAAGVKSSCSRMSAKQCDSYPCKNNAVCKDGWNRFICDCTGTGYWGRTCEREASILSYDGSMYMKIIMPMVMHTEAEDVSFRFMSQRAYGLLVATTSRDSADTLRLELDGGRVKLMVNLDCIRINCNSSKGPETLYAGQKLNDNEWHTVRVVRRGKSLKLTVDDDVAEGTMVGDHTRLEFHNIETGIMTEKRYISVVPSSFIGHLQSLMFNGLLYIDLCKNGDIDYCELKARFGLRNIIADPVTFKTKSSYLSLATLQAYTSMHLFFQFKTTSPDGFILFNSGDGNDFIAVELVKGYIHYVFDLGNGPNVIKGNSDRPLNDNQWHNVVITRDNSNTHSLKVDTKVVTQVINGAKNLDLKGDLYMAGLAQGMYSNLPKLVASRDGFQGCLASVDLNGRLPDLINDALHRSGQIERGCEGPSTTCQEDSCANQGVCMQQWEGFTCDCSMTSYSGNQCNDPGATYIFGKSGGLILYTWPANDRPSTRSDRLAVGFSTTVKDGILVRIDSAPGLGDFLQLHIEQGKIGVVFNIGTVDISIKEERTPVNDGKYHVVRFTRNGGNATLQVDNWPVNEHYPTGRQLTIFNTQAQIAIGGKDKGRLFQGQLSGLYYDGLKVLNMAAENNPNIKINGSVRLVGEVPSILGTTQTTSMPPEMSTTVMETTTTMATTTTRKNRSTASIQPTSDDLVSSAECSSDDEDFVECEPSTTGGELVIPLLVEDPLATPPIATRAPSITLPPTFRPLLTIIETTKDSLSMTSEAGLPCLSDQGSDGCDDDGLVISGYGSGETFDSNLPPTDDEDFYTTFSLVTDKSLSTSIFEGGYKAHAPKWESKDFRPNKVSETSRTTTTSLSPELIRFTASSSSGMVPKLPAGKMNNRDLKPQPDIVLLPLPTAYELDSTKLKSPLITSPMFRNVPTANPTEPGIRRVPGASEVIRESSSTTGMVVGIVAAAALCILILLYAMYKYRNRDEGSYQVDETRNYISNSAQSNGTLMKEKQQSSKSGHKKQKNKDREYYV

SEQ ID NO: 33602 - protein, 1061 aa, Homo sapiens
MLGSDDFFYVGGSPSTADLPGSPVSNNFMGCLKEVVYKNNDIRLELSRLARIADTKMKIYGEVVFKCENVATLDPINFETPEAYISLPKWNTKRMGSISFDFRTTEPNGLILFTHGKPQERKDARSQKNTKVDFFAVELLDGNLYLLLDMGSGTIKVKATQKKANDGEWYHVDIQRDGRSGTISVNSRRTPFTASGESEILDLEGDMYLGGLPENRAGLILPTELWTAMLNYGYVGCIRDLFIDGRSKNIRQLAEMQNAAGVKSSCSRMSAKQCDSYPCKNNAVCKDGWNRFICDCTGTGYWGRTCEREASILSYDGSMYMKIIMPMVMHTEAEDVSFRFMSQRAYGLLVATTSRDSADTLRLELDGGRVKLMVNLDCIRINCNSSKGPETLYAGQKLNDNEWHTVRVVRRGKSLKLTVDDDVAEGTMVGDHTRLEFHNIETGIMTEKRYISVVPSSFIGHLQSLMFNGLLYIDLCKNGDIDYCELKARFGLRNIIADPVTFKTKSSYLSLATLQAYTSMHLFFQFKTTSPDGFILFNSGDGNDFIAVELVKGYIHYVFDLGNGPNVIKGNSDRPLNDNQWHNVVITRDNSNTHSLKVDTKVVTQVINGAKNLDLKGDLYMAGLAQGMYSNLPKLVASRDGFQGCLASVDLNGRLPDLINDALHRSGQIERGCEGPSTTCQEDSCANQGVCMQQWEGFTCDCSMTSYSGNQCNDPGATYIFGKSGGLILYTWPANDRPSTRSDRLAVGFSTTVKDGILVRIDSAPGLGDFLQLHIEQGKIGVVFNIGTVDISIKEERTPVNDGKYHVVRFTRNGGNATLQVDNWPVNEHYPTGRQLTIFNTQAQIAIGGKDKGRLFQGQLSGLYYDGLKVLNMAAENNPNIKINGSVRLVGEVPSILGTTQTTSMPPEMSTTVMETTTTMATTTTRKNRSTASIQPTSDDLVSSAECSSDDEDFVECEPSTANPTEPGIRRVPGASEVIRESSSTTGMVVGIVAAAALCILILLYAMYKYRNRDEGSYQVDETRNYISNSAQSNGTLMKEKQQSSKSGHKKQKNKDREYYV

SEQ ID NO: 33603 - protein, 1392 aa, Homo sapiens
MSSTLHSVFFTLKVSILLGSLLGLCLGLEFMGLPNQWARYLRWDASTRSDLSFQFKTNVSTGLLLYLDDGGVCDFLCLSLVDGRVQLRFSMDCAETAVLSNKQVNDSSWHFLMVSRDRLRTVLMLDGEGQSGELQPQRPYMDVVSDLFLGGVPTDIRPSALTLDGVQAMPGFKGLILDLKYGNSEPRLLGSRGVQMDAEGPCGERPCENGGICFLLDGHPTCDCSTTGYGGKLCSEGLSHLMMSEQGRSKAREENVATFRGSEYLCYDLSQNPIQSSSDEITLSFKTWQRNGLILHTGKSADYVNLALKDGAVSLVINLGSGAFEAIVEPVNGKFNDNAWHDVKVTRNLRQVTISVDGILTTTGYTQEDYTMLGSDDFFYVGGSPSTADLPGSPVSNNFMGCLKEVVYKNNDIRLELSRLARIADTKMKIYGEVVFKCENVATLDPINFETPEAYISLPKWNTKRMGSISFDFRTTEPNGLILFTHGKPQERKDARSQKNTKVDFFAVELLDGNLYLLLDMGSGTIKVKATQKKANDGEWYHVDIQRDGRSGTISVNSRRTPFTASGESEILDLEGDMYLGGLPENRAGLILPTELWTAMLNYGYVGCIRDLFIDGRSKNIRQLAEMQNAAGVKSSCSRMSAKQCDSYPCKNNAVCKDGWNRFICDCTGTGYWGRTCEREASILSYDGSMYMKIIMPMVMHTEAEDVSFRFMSQRAYGLLVATTSRDSADTLRLELDGGRVKLMVNLGKGPETLYAGQKLNDNEWHTVRVVRRGKSLKLTVDDDVAEGTMVGDHTRLEFHNIETGIMTEKRYISVVPSSFIGHLQSLMFNGLLYIDLCKNGDIDYCELKARFGLRNIIADPVTFKTKSSYLSLATLQAYTSMHLFFQFKTTSPDGFILFNSGDGNDFIAVELVKGYIHYVFDLGNGPNVIKGNSDRPLNDNQWHNVVITRDNSNTHSLKVDTKVVTQVINGAKNLDLKGDLYMAGLAQGMYSNLPKLVASRDGFQGCLASVDLNGRLPDLINDALHRSGQIERGCEGPSTTCQEDSCANQGVCMQQWEGFTCDCSMTSYSGNQCNDPGATYIFGKSGGLILYTWPANDRPSTRSDRLAVGFSTTVKDGILVRIDSAPGLGDFLQLHIEQGKIGVVFNIGTVDISIKEERTPVNDGKYHVVRFTRNGGNATLQVDNWPVNEHYPTGNTDNERFQMVKQKIPFKYNRPVEEWLQEKGRQLTIFNTQAQIAIGGKDKGRLFQGQLSGLYYDGLKVLNMAAENNPNIKINGSVRLVGEVPSILGTTQTTSMPPEMSTTVMETTTTMATTTTRKNRSTASIQPTSDDLVSSAECSSDDEDFVECEPSTGRSARSSNAARSLRAALTWTWRLTYTFTPIIFISCVVHS

SEQ ID NO: 33604 - protein, 690 aa, Homo sapiens
MAPWPELGDAQPNPDKYLEGAAGQQPTAPDKSKETNKTDNTEAPVTKIELLPSYSTATLIDEPTEVDDPWNLPTLQDSGIKWSERDTKGKILCFFQGIGRLILLLGFLYFFVCSLDILSSAFQLVGGKMAGQFFSNSSIMSNPLLGLVIGVLVTVLVQSSSTSTSIVVSMVSSSLLTVRAAIPIIMGANIGTSITNTIVALMQVGDRSEFRRAFAGATVHDFFNWLSVLVLLPVEVATHYLEIITQLIVESFHFKNGEDAPDLLKVITKPFTKLIVQLDKKVISQIAMNDEKAKNKSLVKIWCKTFTNKTQINVTVPSTANCTSPSLCWTDGIQNWTMKNVTYKENIAKCQHIFVNFHLPDLAVGTILLILSLLVLCGCLIMIVKILGSVLKGQVATVIKKTINTDFPFPFAWLTGYLAILVGAGMTFIVQSSSVFTSALTPLIGIGVITIERAYPLTLGSNIGTTTTAILAALASPGNALRSSLQIALCHFFFNISGILLWYPIPFTRLPIRMAKGLGNISAKYRWFAVFYLIIFFFLIPLTVFGLSLAGWRVLVGVGVPVVFIIILVLCLRLLQSRCPRVLPKKLQNWNFLPLWMRSLKPWDAVVSKFTGCFQMRCCCCCRVCCRACCLLCDCPKCCRCSKCCEDLEEAQEGQDVPVKAPETFDNITISREAQGEVPASDSKTECTAL

SEQ ID NO: 33605 - protein, 689 aa, Homo sapiens
MAPWPELGDAQPNPDKYLEGAAGQQPTAPDKSKETNKNNTEAPVTKIELLPSYSTATLIDEPTEVDDPWNLPTLQDSGIKWSERDTKGKILCFFQGIGRLILLLGFLYFFVCSLDILSSAFQLVGGKMAGQFFSNSSIMSNPLLGLVIGVLVTVLVQSSSTSTSIVVSMVSSSLLTVRAAIPIIMGANIGTSITNTIVALMQVGDRSEFRRAFAGATVHDFFNWLSVLVLLPVEVATHYLEIITQLIVESFHFKNGEDAPDLLKVITKPFTKLIVQLDKKVISQIAMNDEKAKNKSLVKIWCKTFTNKTQINVTVPSTANCTSPSLCWTDGIQNWTMKNVTYKENIAKCQHIFVNFHLPDLAVGTILLILSLLVLCGCLIMIVKILGSVLKGQVATVIKKTINTDFPFPFAWLTGYLAILVGAGMTFIVQSSSVFTSALTPLIGIGVITIERAYPLTLGSNIGTTTTAILAALASPGNALRSSLQIALCHFFFNISGILLWYPIPFTRLPIRMAKGLGNISAKYRWFAVFYLIIFFFLIPLTVFGLSLAGWRVLVGVGVPVVFIIILVLCLRLLQSRCPRVLPKKLQNWNFLPLWMRSLKPWDAVVSKFTGCFQMRCCCCCRVCCRACCLLCDCPKCCRCSKCCEDLEEAQEGQDVPVKAPETFDNITISREAQGEVPASDSKTECTAL

SEQ ID NO: 33606 - protein, 916 aa, Homo sapiens
MVQKESQATLEERESELSSNPAASAGASLEPPAAPAPGEDNPAGAGGAAVAGAAGGARRFLCGVVEGFYGRPWVMEQRKELFRRLQKWELNTYLYAPKDDYKHRMFWREMYSVEEAEQLMTLISAAREYEIEFIYAISPGLDITFSNPKEVSTLKRKLDQVSQFGCRSFALLFDDIDHNMCAADKEVFSSFAHAQVSITNEIYQYLGEPETFLFCPTEYCGTFCYPNVSQSPYLRTVGEKLLPGIEVLWTGPKVVSKEIPVESIEEVSKIIKRAPVIWDNIHANDYDQKRLFLGPYKGRSTELIPRLKGVLTNPNCEFEANYVAIHTLATWYKSNMNGVRKDVVMTDSEDSTVSIQIKLENEGSDEDIETDVLYSPQMALKLALTEWLQEFGVPHQYSSRQVAHSGAKASVVDGTPLVAAPSLNATTVVTTVYQEPIMSQGAALSGEPTTLTKEEEKKQPDEEPMDMVVEKQEETDHKNDNQILSEIVEAKMAEELKPMDTDKESIAESKSPEMSMQEDCISDIAPMQTDEQTNKEQFVPGPNEKPLYTAEPVTLEDLQLLADLFYLPYEHGPKGAQMLREFQWLRANSSVVSVNCKGKDSEKIEEWRSRAAKFEEMCGLVMGMFTRLSNCANRTILYDMYSYVWDIKSIMSMVKSFVQWLGCRSHSSAQFLIGDQEPWAFRGGLAGEFQRLLPIDGANDLFFQPPPLTPTSKVYTIRPYFPKDEASVYKICREMYDDGVGLPFQSQPDLIGDKLVGGLLSLSLDYCFVLEDEDGICGYALGTVDVTPFIKKCKISWIPFMQEKYTKPNGDKELSEAEKIMLSFHEEQEVLPETFLANFPSLIKMDIHKKVTDPSVAKSMMACLLSSLKANGSRGAFCEVRPDDKRILEFYSKLGCFEIAKMEGFPKDVVILGRSL

SEQ ID NO: 33607 - protein, 849 aa, Homo sapiens
MVQKESQATLEERESELSSNPAASAGASLEPPAAPAPGEDNPAGAGGAAVAGAAGGARRFLCGVVEGFYGRPWVMEQRKELFRRLQKWELNTYLYAPKDDYKHRMFWREMYSVEEAEQLMTLISAAREYEIEFIYAISPGLDITFSNPKEVSTLKRKLDQVSQFGCRSFALLFDDIDHNMCAADKEVFSSFAHAQVSITNEIYQYLGEPETFLFCPTEYCGTFCYPNVSQSPYLRTVGEKLLPGIEVLWTGPKVVSKEIPVESIEEVSKIIKRAPVIWDNIHANDYDQKRLFLGPYKGRSTELIPRLKGVLTNPNCEFEANYVAIHTLATWYKSNMNGVRKDVVMSRQVAHSGAKASVVDGTPLVAAPSLNATTVVTTVYQEPIMSQGAALSGEPTTLTKEEEKKQPDEEPMDMVVEKQEETDHKNDNQILSEIVEAKMAEELKPMDTDKESIAESKSPEMSMQEDCISDIAPMQTDEQTNKEQFVPGPNEKPLYTAEPVTLEDLQLLADLFYLPYEHGPKGAQMLREFQWLRANSSVVSVNCKGKDSEKIEEWRSRAAKFEEMCGLVMGMFTRLSNCANRTILYDMYSYVWDIKSIMSMVKSFVQWLGCRSHSSAQFLIGDQEPWAFRGGLAGEFQPPPLTPTSKVYTIRPYFPKDEASVYKICREMYDDGVGLPFQSQPDLIGDKLVGGLLSLSLDYCFVLEDEDGICGYALGTVDVTPFIKKCKISWIPFMQEKYTKPNGDKELSEAEKIMLSFHEEQEVLPETFLANFPSLIKMDIHKKVTDPSVAKSMMACLLSSLKANGSRGAFCEVRPDDKRILEFYSKLGCFEIAKMEGFPKDVVILGRSL

SEQ ID NO: 33608 - protein, 677 aa, Homo sapiens
MVQKESQATLEERESELSSNPAASAGASLEPPAAPAPGEDNPAGAGGAAVAGAAGGARRFLCGVVEGFYGRPWVMEQRKELFRRLQKWELNTYLYAPKDDYKHRMFWREMYSVEEAEQLMTLISAAREYEIEFIYAISPGLDITFSNPKEVSTLKRKLDQVSQFGCRSFALLFDDIDHNMCAADKEVFSSFAHAQVSITNEIYQYLGEPETFLFCPTEYCGTFCYPNVSQSPYLRTVGEKLLPGIEVLWTGPKVVSKEIPVESIEEVSKIIKRAPVIWDNIHANDYDQKRLFLGPYKGRSTELIPRLKGVLTNPNCEFEANYVAIHTLATWYKSNMNGVRKDVVMTDSEDSTVSIQIKLENEGSDEDIETDVLYSPQMALKLALTEWLQEFGVPHQYSSRQVAHSGAKASVVDGTPLVAAPSLNATTVVTTVYQEPIMSQGAALSGEPTTLTKEEEKKQPDEEPMDMVVEKQEETDHKNDNQILSEIVEAKMAEELKPMDTDKESIAESKSPEMSMQEDCISDIAPMQTDEQTNKEQFVPGPNEKPLYTAEPVTLEDLQLLADLFYLPYEHGPKGAQMLREFQWLRANSSVVSVNCKGKDSEKIEEWRSRAAKFEEMCGLVMGMFTRLSNCANRTILYDMYSYVWDIKSIMSMVKSFVQWLGRCTRNNLFSSNILSL

SEQ ID NO: 33609 - protein, 863 aa, Homo sapiens
MVQKESQATLEERESELSSNPAASAGASLEPPAAPAPGEDNPAGAGGAAVAGAAGGARRFLCGVVEGFYGRPWVMEQRKELFRRLQKWELNTYLYAPKDDYKHRMFWREMYSVEEAEQLMTLISAAREYEIEFIYAISPGLDITFSNPKEVSTLKRKLDQVSQFGCRSFALLFDDIDHNMCAADKEVFSSFAHAQVSITNEIYQYLGEPETFLFCPTEYCGTFCYPNVSQSPYLRTVGEKLLPGIEVLWTGPKVVSKEIPVESIEEVSKIIKRAPVIWDNIHANDYDQKRLFLGPYKGRSTELIPRLKGVLTNPNCEFEANYVAIHTLATWYKSNMNGVRKDVVMSRQVAHSGAKASVVDGTPLVAAPSLNATTVVTTVYQEPIMSQGAALSGEPTTLTKEEEKKQPDEEPMDMVVEKQEETDHKNDNQILSEIVEAKMAEELKPMDTDKESIAESKSPEMSMQEDCISDIAPMQTDEQTNKEQFVPGPNEKPLYTAEPVTLEDLQLLADLFYLPYEHGPKGAQMLREFQWLRANSSVVSVNCKGKDSEKIEEWRSRAAKFEEMCGLVMGMFTRLSNCANRTILYDMYSYVWDIKSIMSMVKSFVQWLGCRSHSSAQFLIGDQEPWAFRGGLAGEFQRLLPIDGANDLFFQPPPLTPTSKVYTIRPYFPKDEASVYKICREMYDDGVGLPFQSQPDLIGDKLVGGLLSLSLDYCFVLEDEDGICGYALGTVDVTPFIKKCKISWIPFMQEKYTKPNGDKELSEAEKIMLSFHEEQEVLPETFLANFPSLIKMDIHKKVTDPSVAKSMMACLLSSLKANGSRGAFCEVRPDDKRILEFYSKLGCFEIAKMEGFPKDVVILGRSL

SEQ ID NO: 33610 - protein, 323 aa, Homo sapiens
MNPENWTQVTSFVLLGFPSSHLIQFLVFLGLMVTYIVTATGKLLIIVLSWIDQRLHIQMYFFLRNFSFLELLLVTVVVPKMLVVILTGDHTISFVSCIIQSYLYFFLGTTDFFLLAVMSLDRYLAICRPLRYETLMNGHVCSQLVLASWLAGFLWVLCPTVLMASLPFCGPNGIDHFFRDSWPLLRLSCGDTHLLKLVAFMLSTLVLLGSLALTSVSYACILATVLRAPTAAERRKAFSTCASHLTVVVIIYGSSIFLYIRMSEAQSKLLNKGASVLSCIITPLLNPFIFTLRNDKVQQALREALGWPRLTAVMKLRVTSQRK

SEQ ID NO: 33611 - protein, 310 aa, Homo sapiens
MDPGNHSSVTESILAGLSEQPELQLRLFLLFLGICVVTVVGNLGMITLIGLSSHLHTPMYYFLSSLSFIDFCHSTVITPKMLVNFATEKNIISYPECMAQLYLFSIFAIAECHMLAAMAYDCYVAICSPLLYNVIMSYHHCFWLTVGVYILGILGSTIHTSFMLRLFLCKTNVINHYFCDLFPLLGLSCSSTYINELLVLVLSAFNILMPALTILASYIFIIASILRIHSTEGRSKAFSTCSSHILAVAVFFGSAAFMYLQPSSVSSMDQRKVSSVFYTTIVPMLNPLIYSLRNKDVKLAVKKILHQTAC

SEQ ID NO: 33612 - protein, 319 aa, Homo sapiens
MERGNQTEVGNFLLLGFAEDSDMQLLLHGLFLSMYLVTIIGNLLIILTISSDSHLHTPMYFFLSNLSFADICFTSTTVPKMLVNIQTQSKMITFAGCLTQIFFFIAFGCLDNLLLTMTAYDRFVAICYPLHYTVIMNPRLCGLLVLGSWCISVMGSLLETLTILRLSFCTNMEIPHFFCDPSEVLKLACSDTFINNIVMYFVTIVLGVFPLCGILFSYSQIFSSVLRVSARGQHKAFSTCGSHLSVVSLFYGTGLGVYLSSAVTPPSRTSLAASVMYTMVTPMLNPFIYSLRNKDMKGSLGRLLLRATSLKEGTIAKLS

SEQ ID NO: 33613 - protein, 312 aa, Homo sapiens
MEVKNCCMVTEFILLGIPHTEGLEMTLFVLFLPFYACTLLGNVSILVAVMSSARLHTPMYFFLGNLSVFDMGFSSVTCPKMLLYLMGLSRLISYKDCVCQLFFFHFLGSIECFLFTVMAYDRFTAICYPLRYTVIMNPRICVALAVGTWLLGCIHSSILTSLTFTLPYCGPNEVDHFFCDIPALLPLACADTSLAQRVSFTNVGLISLVCFLLILLSYTRITISILSIRTTEGRRRAFSTCSAHLIAILCAYGPIITVYLQPTPNPMLGTVVQILMNLVGPMLNPLIYTLRNKEVKTALKTILHRTGHVPES

SEQ ID NO: 33614 - protein, 252 aa, Homo sapiens
MQLTRCCFVFLVQGSLYLVICGQDDGPPGSEDPERDDHEGQPRPRVPRKRGHISPKSRPMANSTLLGLLAPPGEAWGILGQPPNRPNHSPPPSAKVKKIFGWGDFYSNIKTVALNLLVTGKIVDHGNGTFSVHFQHNATGQGNISISLVPPSKAVEFHQEQQIFIEAKASKIFNCRMEWEKVERGRRTSLCTHDPAKICSRDHAQSSATWSCSQPFKVVCVYIAFYSTDYRLVQKVCPDYNYHSDTPYYPSG

SEQ ID NO: 33615 - protein, 315 aa, Homo sapiens
MLGLNHTSMSEFILVGFSAFPHLQLMLFLLFLLMYLFTLLGNLLIMATVWSERSLHTPMYLFLCVLSVSEILYTVAIIPRMLADLLSTQRSIAFLACASQMFFSFSFGFTHSFLLTVMGYDRYVAICHPLRYNVLMSPRGCACLVGCSWAGGSVMGMVVTSAIFQLTFCGSHEIQHFLCHVPPLLKLACGNNVPAVALGVGLVCIMALLGCFLLILLSYAFIVADILKIPSAEGRNKAFSTCASHLIVVIVHYGFASVIYLKPKGPHSQEGDTLMATTYAVLTPFLSPIIFSLRNKELKVAMKRTFLSTLYSSGT

SEQ ID NO: 33616 - protein, 359 aa, Homo sapiens
MDMLQDLESLQFEYGVPEEDRIWLYLQGRSRGLMIEACAHATFFCKLLYNLRASLNKNQSSRHLSIGSLNSATPEEFKVGIIGGGHLGKQLAGTLLQLGPIPAESLRISTRRPETLGELQKLGIKCFYHNADLVSWADVIFLCCLPSQLPNICVEIYTSLEKASIVYSFVAAIPLPRLKLLLNHTNILRPQYQYDEDSVSVWGANKGVIAALQDPTILQATCPYSPAGGIILNIKWLEGVFYAALNICTARNMAHSQVLQLLSELFLSVHFEDCGKDTASCPKLQLTDFVSKAYGKNLSQERPFPWFDLTAVQLKETPFSQHLSSSPVLQDHLTHLYCASFGISLTKEQPVISTGFPSQ

SEQ ID NO: 33617 - protein, 250 aa, Homo sapiens
MDMLQDLESLQFEYGVPEEDRIWLYLQGRSRGLMIEACAHATFFCKLLYNLRASLNKNQSSRHLSIGSLNSATPEEFKVGIIGGGHLGKQLAGTLLQLGPIPAESLRISTRRPETLGELQKLGIKCFYHNADLVSWADVIFLCCLPSQLPNICVEIYTSLEKASIVYSFVAAIPLPRLKLLLNHTNILRPQYQYDEDSVSVWGANKGVIAALQDPTILQATCPYSPAGHGSTYFWHSFENYFPVGPLLSY

SEQ ID NO: 33618 - protein, 315 aa, Homo sapiens
MAPENFTRVTEFILTGVSSCPELQIPLFLVFLVLYVLTMAGNLGIITLTSVDSRLQNPMYFFLRHLAIINLGNSTVIAPKMLMNFLVKKKTTSFYECATQLGGFLFFIVSEVMMLAVMAYDRYVAICNPLLYMVVVSRRLCLLLVSLTYLYGFSTAIVVSPCIFSVSYCSSNIINHFYCDIAPLLALSCSDTYIPETIVFISAATNLVFSMITVLVSYFNIVLSILRIRSPEGRKKAFSTCASHMIAVTVFYGTMLFMYLQPQTNHSLDTDKMASVFYTLVIPMLNPLIYSLRNNDVNVALKKFMENPCYSFKSM

SEQ ID NO: 33619 - protein, 310 aa, Homo sapiens
MGDNITSIREFLLLGFPVGPRIQMLLFGLFSLFYVFTLLGNGTILGLISLDSRLHAPMYFFLSHLAVVDIAYACNTVPRMLVNLLHPAKPISFAGRMMQTFLFSTFAVTECLLLVVMSYDLYVAICHPLRYLAIMTWRVCITLAVTSWTTGVLLSLIHLVLLLPLPFCRPQKIYHFFCEILAVLKLACADTHINENMVLAGAISGLVGPLSTIVVSYMCILCAILQIQSREVQRKAFRTCFSHLCVIGLVYGTAIIMYVGPRYGNPKEQKKYLLLFHSLFNPMLNPLICSLRNSEVKNTLKRVLGVERAL

SEQ ID NO: 33620 - protein, 318 aa, Homo sapiens
MCSGNQTSQNQTASTDFTLTGLFAESKHAALLYTVTFLLFLMALTGNALLILLIHSEPRLHTPMYFFISQLALMDLMYLCVTVPKMLVGQVTGDDTISPSGCGIQMFFYLTLAGAEVFLLAAMAYDRYAAVCRPLHYPLLMNQRVCQLLVSACWVLGMVDGLLLTPITMSFPFCQSRKILSFFCETPALLKLSCSDVSLYKTLMYLCCILMLLAPIMVISSSYTLILHLIHRMNSAAGHRKALATCSSHMIIVLLLFGASFYTYMLPSSYHTAEQDMMVSAFYTIFTPVLNPLIYSLRNKDVTRALRSMMQSRMNQEK

SEQ ID NO: 33621 - protein, 302 aa, Homo sapiens
MDIPQNITEFFMLGLSQNSEVQRVLFVVFLLIYVVTVCGNMLIVVTITSSPTLASPVYFFLANLSFIDTFYSSSMAPKLIADSLYEGRTISYECCMAQLFGAHFLGGVEIILLTVMAYDRYVAICKPLHNTTIMTRHLCAMLVGVAWLGGFLHSLVQLLLVLWLPFCGPNVINHFACDLYPLLEVACTNTYVIGLLVVANSGLICLLNFLMLAASYIVILYSLRSHSADGRCKALSTCGAHFIVVALFFVPCIFTYVHPFSTLPIDKNMALFYGILTPMLNPLIYTLRNEEVKNAMRKLFTW

SEQ ID NO: 33622 - protein, 315 aa, Homo sapiens
MGRWVNQSYTDGFFLLGIFSHSQTDLVLFSAVMVVFTVALCGNVLLIFLIYLDAGLHTPMYFFLSQLSLMDLMLVCNIVPKMAANFLSGRKSISFVGCGIQIGFFVSLVGSEGLLLGLMAYDRYVAVSHPLHYPILMNQRVCLQITGSSWAFGIIDGVIQMVAAMGLPYCGSRSVDHFFCEVQALLKLACADTSLFDTLLFACCVFMLLLPFSIIMASYACILGAVLRIRSAQAWKKALATCSSHLTAVTLFYGAAMFMYLRPRRYRAPSHDKVASIFYTVLTPMLNPLIYSLRNGEVMGALRKGLDRCRIGSQH

SEQ ID NO: 33623 - protein, 314 aa, Homo sapiens
MENNTEVTEFILVGLTDDPELQIPLFIVFLFIYLITLVGNLGMIELILLDSCLHTPMYFFLSNLSLVDFGYSSAVTPKVMVGFLTGDKFILYNACATQFFFFVAFITAESFLLASMAYDRYAALCKPLHYTTTMTTNVCACLAIGSYICGFLNASIHTGNTFRLSFCRSNVVEHFFCDAPPLLTLSCSDNYISEMVIFFVVGFNDLFSILVILISYLFIFITIMKMRSPEGRQKAFSTCASHLTAVSIFYGTGIFMYLRPNSSHFMGTDKMASVFYAIVIPMLNPLVYSLRNKEVKSAFKKTVGKAKASIGFIF

SEQ ID NO: 33624 - protein, 100 aa, Homo sapiens
MRALTLLALLALAALCIAGQAGAKPSGAESSKGAAFVSKQEGSEVVKRPRRYLYQWLGAPVPYPDPLEPRREVCELNPDCDELADHIGFQEAYRRFYGPV

SEQ ID NO: 33625 - protein, 325 aa, Homo sapiens
MFLYLCFIFQRTCSEEMEEENATLLTEFVLTGFLHQPDCKIPLFLAFLVIYLITIMGNLGLIVLIWKDPHLHIPMYLFLGSLAFVDASLSSTVTPKMLINFLAKSKMISLSECMVQFFSLVTTVTTECFLLATMAYDRYVAICKALLYPVIMTNELCIQLLVLSFIGGLLHALIHEAFSFRLTFCNSNIIQHFYCDIIPLLKISCTDSSINFLMVFIFAGSVQVFTIGTILISYTIILFTILEKKSIKGIRKAVSTCGAHLLSVSLYYGPLTFKYLGSASPQADDQDMMESLFYTVIVPLLNPMIYSLRNKQVIASFTKMFKSNV

SEQ ID NO: 33626 - protein, 314 aa, Homo sapiens
MDVGNKSTMSEFVLLGLSNSWELQMFFFMVFSLLYVATMVGNSLIVITVIVDPHLHSPMYFLLTNLSIIDMSLASFATPKMITDYLTGHKTISFDGCLTQIFFLHLFTGTEIILLMAMSFDRYIAICKPLHYASVISPQVCVALVVASWIMGVMHSMSQVIFALTLPFCGPYEVDSFFCDLPVVFQLACVDTYVLGLFMISTSGIIALSCFIVLFNSYVIVLVTVKHHSSRGSSKALSTCTAHFIVVFLFFGPCIFIYMWPLSSFLTDKILSVFYTIFTPTLNPIIYTLRNQEVKIAMRKLKNRFLNFNKAMPS

SEQ ID NO: 33627 - protein, 309 aa, Homo sapiens
MENSTEVTEFILLGLTDDPNLQIPLLLAFLFIYLITLLGNGGMMVIIHSDSHLHTPMYFFLSNLSLVDLGYSSAVAPKTVAALRSGDKAISYDGCAAQFFFFVGFATVECYLLASMAYDRHAAVCRPLHYTTTMTAGVCALLATGSYVSGFLNASIHAAGTFRLSFCGSNEINHFFCDIPPLLALSCSDTRISKLVVFVAGFNVFFTLLVILISYFFICITIQRMHSAEGQKKVFSTCASHLTALSIFYGTIIFMYLQPNSSQSVDTDKIASVFYTVVIPMLNPLIYSLRNKEVKSALWKILNKLYPQY

SEQ ID NO: 33628 - protein, 320 aa, Homo sapiens
MNSENLTRAAVAPAEFVLLGITNRWDLRVALFLTCLPVYLVSLLGNMGMALLIRMDARLHTPMYFFLANLSLLDACYSSAIGPKMLVDLLLPRATIPYTACALQMFVFAGLADTECCLLAAMAYDRYVAIRNPLLYTTAMSQRLCLALLGASGLGGAVSAFVHTTLTFRLSFCRSRKINSFFCDIPPLLAISCSDTSLNELLLFAICGFIQTATVLAITVSYGFIAGAVIHMRSVEGSRRAASTGGSHLTAVAMMYGTLIFMYLRPSSSYALDTDKMASVFYTLVIPSLNPLIYSLRNKEVKEALRQTWSRFHCPGQGSQ

SEQ ID NO: 33629 - protein, 313 aa, Homo sapiens
MSIINTSYVEITTFFLVGMPGLEYAHIWISIPICSMYLIAILGNGTILFIIKTEPSLHGPMYYFLSMLAMSDLGLSLSSLPTVLSIFLFNAPETSSSACFAQEFFIHGFSVLESSVLLIMSFDRFLAIHNPLRYTSILTTVRVAQIGIVFSFKSMLLVLPFPFTLRSLRYCKKNQLSHSYCLHQDVMKLACSDNRIDVIYGFFGALCLMVDFILIAVSYTLILKTVPGIASKKEELKALNTCVSHICAVIIFYLPIINLAVVHRFAGHVSPLINVLMANVLLLVPPLMKPIVYCVKTKQIRVRVVAKLCQWKI

SEQ ID NO: 33630 - protein, 314 aa, Homo sapiens
MPTVNHSGTSHTVFHLLGIPGLQDQHMWISIPFFISYVTALLGNSLLIFIILTKRSLHEPMYLFLCMLAGADIVLSTCTIPQALAIFWFRAGDISLDRCITQLFFIHSTFISESGILLVMAFDHYIAICYPLRYTTILTNALIKKICVTVSLRSYGTIFPIIFLLKRLTFCQNNIIPHTFCEHIGLAKYACNDIRINIWYGFSILMSTVVLDVVLIFISYMLILHAVFHMPSPDACHKALNTFGSHVCIIILFYGSGIFTILTQRFGRHIPPCIHIPLANVCILAPPMLNPIIYGIKTKQIQEQVVQFLFIKQK

SEQ ID NO: 33631 - protein, 316 aa, Homo sapiens
MELRNSTLGSGFILVGILNDSGSPELLYATFTILYMLALTSNGLLLLAITIEARLHMPMYLLLGQLSLMDLLFTSVVTPKALADFLRRENTISFGGCALQMFLALTMGSAEDLLLAFMAYDRYVAICHPLKYMTLMSPRVCWIMVATSWILASLIAIGHTMYTMHLPFCVSWEIRHLLCEIPPLLKLACADTSRYELIIYVTGVTFLLLPISAIVASYTLVLFTVLRMPSNEGRKKALVTCSSHLIVVGMFYGAATFMYVLPSSFHSPKQDNIISVFYTIVTPALNPLIYSLRNKEVMRALRRVLGKYILLAHSTL

SEQ ID NO: 33632 - protein, 416 aa, Homo sapiens
MMPQLQFKDAFWCRDFTAHTGYEVLLQRLLDGRKMCKDMEELLRQRAQAEERYGKELVQIARKAGGQTEINSLRASFDSLKQQMENVGSSHIQLALTLREELRSLEEFRERQKEQRKKYEAVMDRVQKSKLSLYKKAMESKKTYEQKCRDADDAEQAFERISANGHQKQVEKSQNKARQCKDSATEAERVYRQSIAQLEKVRAEWEQEHRTTCEAFQLQEFDRLTILRNALWVHSNQLSMQCVKDDELYEEVRLTLEGCSIDADIDSFIQAKSTGTEPPAPVPYQNYYDREVTPLTSSPGIQPSCGMIKRFSGLLHGSPKTTSLAASAASTETLTPTPERNEGVYTAIAVQEIQGNPASPAQEYRALYDYTAQNPDELDLSAGDILEVILEGEDGWWTVERNGQRGFVPGSYLEKL

SEQ ID NO: 33633 - protein, 397 aa, Homo sapiens
MMPQLQFKDAFWCRDFTAHTGYEVLLQRLLDGRKMCKDMEELLRQRAQAEERYGKELVQIARKAGGQTEINSLRASFDSLKQQMENVGSSHIQLALTLREELRSLEEFRERQKEQRKKYEAVMDRVQKSKLSLYKKAMESKKTYEQKCRDADDAEQAFERISANGHQKQVEKSQNKARQCKDSATEAERVYRQSIAQLEKVRAEWEQEHRTTCEAFQLQEFDRLTILRNALWVHSNQLSMQCVKDDELYEEVRLTLEGCSIDADIDSFIQAKSTGTEPPGEVRLADSAASRFSGLLHGSPKTTSLAASAASTETLTPTPERNEGVYTAIAVQEIQGNPASPAQEYRALYDYTAQNPDELDLSAGDILEVILEGEDGWWTVERNGQRGFVPGSYLEKL

SEQ ID NO: 33634 - protein, 205 aa, Homo sapiens
MSIMSYNGGAVMAMKGKNCVAIAADRRFGIQAQMVTTDFQKIFPMGDRLYIGLAGLATDVQTVAQRLKFRLNLYELKEGRQIKPYTLMSMVANLLYEKRFGPYYTEPVIAGLDPKTFKPFICSLDLIGCPMVTDDFVVSGTCAEQMYGMCESLWEPNMDPDHLFETISQAMLNAVDRDAVSGMGVIVHIIEKDKITTRTLKARMD

SEQ ID NO: 33635 - protein, 528 aa, Homo sapiens
MQGPWVLLLLGLRLQLSLGVIPAEEENPAFWNRQAAEALDAAKKLQPIQKVAKNLILFLGDGLGVPTVTATRILKGQKNGKLGPETPLAMDRFPYLALSKTYNVDRQVPDSAATATAYLCGVKANFQTIGLSAAARFNQCNTTRGNEVISVMNRAKQAGKSVGVVTTTRVQHASPAGTYAHTVNRNWYSDADMPASARQEGCQDIATQLISNMDIDVILGGGRKYMFPMGTPDPEYPADASQNGIRLDGKNLVQEWLAKHQGAWYVWNRTELMQASLDQSVTHLMGLFEPGDTKYEIHRDPTLDPSLMEMTEAALRLLSRNPRGFYLFVEGGRIDHGHHEGVAYQALTEAVMFDDAIERAGQLTSEEDTLTLVTADHSHVFSFGGYTLRGSSIFGLAPSKAQDSKAYTSILYGNGPGYVFNSGVRPDVNESESGSPDYQQQAAVPLSSETHGGEDVAVFARGPQAHLVHGVQEQSFVAHVMAFAACLEPYTACDLAPPACTTDAAHPVAASLPLLAGTLLLLGASAAP

SEQ ID NO: 33636 - protein, 524 aa, Homo sapiens
MISPFLVLAIGTCLTNSLVPEKEKDPKYWRDQAQETLKYALELQKLNTNVAKNVIMFLGDGMGVSTVTAARILKGQLHHNPGEETRLEMDKFPFVALSKTYNTNAQVPDSAGTATAYLCGVKANEGTVGVSAATERSRCNTTQGNEVTSILRWAKDAGKSVGIVTTTRVNHATPSAAYAHSADRDWYSDNEMPPEALSQGCKDIAYQLMHNIRDIDVIMGGGRKYMYPKNKTDVEYESDEKARGTRLDGLDLVDTWKSFKPRYKHSHFIWNRTELLTLDPHNVDYLLGLFEPGDMQYELNRNNVTDPSLSEMVVVAIQILRKNPKGFFLLVEGGRIDHGHHEGKAKQALHEAVEMDRAIGQAGSLTSSEDTLTVVTADHSHVFTFGGYTPRGNSIFGLAPMLSDTDKKPFTAILYGNGPGYKVVGGERENVSMVDYAHNNYQAQSAVPLRHETHGGEDVAVFSKGPMAHLLHGVHEQNYVPHVMAYAACIGANLGHCAPASSAGSLAAGPLLLALALYPLSVLF

SEQ ID NO: 33637 - protein, 447 aa, Homo sapiens
MPWSFRSSTPTWLRMSSCSWEMTYNTNAQVPDSAGTATAYLCGVKANEGTVGVSAATERSRCNTTQGNEVTSILRWAKDAGKSVGIVTTTRVNHATPSAAYAHSADRDWYSDNEMPPEALSQGCKDIAYQLMHNIRDIDVIMGGGRKYMYPKNKTDVEYESDEKARGTRLDGLDLVDTWKSFKPRYKHSHFIWNRTELLTLDPHNVDYLLGLFEPGDMQYELNRNNVTDPSLSEMVVVAIQILRKNPKGFFLLVEGGRIDHGHHEGKAKQALHEAVEMDRAIGQAGSLTSSEDTLTVVTADHSHVFTFGGYTPRGNSIFGLAPMLSDTDKKPFTAILYGNGPGYKVVGGERENVSMVDYAHNNYQAQSAVPLRHETHGGEDVAVFSKGPMAHLLHGVHEQNYVPHVMAYAACIGANLGHCAPASSAGSLAAGPLLLALALYPLSVLF

SEQ ID NO: 33638 - protein, 469 aa, Homo sapiens
MFLGDGMGVSTVTAARILKGQLHHNPGEETRLEMDKFPFVALSKTYNTNAQVPDSAGTATAYLCGVKANEGTVGVSAATERSRCNTTQGNEVTSILRWAKDAGKSVGIVTTTRVNHATPSAAYAHSADRDWYSDNEMPPEALSQGCKDIAYQLMHNIRDIDVIMGGGRKYMYPKNKTDVEYESDEKARGTRLDGLDLVDTWKSFKPRYKHSHFIWNRTELLTLDPHNVDYLLGLFEPGDMQYELNRNNVTDPSLSEMVVVAIQILRKNPKGFFLLVEGGRIDHGHHEGKAKQALHEAVEMDRAIGQAGSLTSSEDTLTVVTADHSHVFTFGGYTPRGNSIFGLAPMLSDTDKKPFTAILYGNGPGYKVVGGERENVSMVDYAHNNYQAQSAVPLRHETHGGEDVAVFSKGPMAHLLHGVHEQNYVPHVMAYAACIGANLGHCAPASSAGSLAAGPLLLALALYPLSVLF

SEQ ID NO: 33639 - protein, 263 aa, Homo sapiens
MFRNQYDNDVTVWSPQGRIHQIEYAMEAVKQGSATVGLKSKTHAVLVALKRAQSELAAHQKKILHVDNHIGISIAGLTADARLLCNFMRQECLDSRFVFDRPLPVSRLVSLIGSKTQIPTQRYGRRPYGVGLLIAGYDDMGPHIFQTCPSANYFDCRAMSIGARSQSARTYLERHMSEFMECNLNELVKHGLRALRETLPAEQDLTTKNVSIGIVGKDLEFTIYDDDDVSPFLEGLEERPQRKAQPAQPADEPAEKADEPMEH

SEQ ID NO: 33640 - protein, 269 aa, Homo sapiens
MQLSKVKFRNQYDNDVTVWSPQGRIHQIEYAMEAVKQGSATVGLKSKTHAVLVALKRAQSELAAHQKKILHVDNHIGISIAGLTADARLLCNFMRQECLDSRFVFDRPLPVSRLVSLIGSKTQIPTQRYGRRPYGVGLLIAGYDDMGPHIFQTCPSANYFDCRAMSIGARSQSARTYLERHMSEFMECNLNELVKHGLRALRETLPAEQDLTTKNVSIGIVGKDLEFTIYDDDDVSPFLEGLEERPQRKAQPAQPADEPAEKADEPMEH

SEQ ID NO: 33641 - protein, 1445 aa, Homo sapiens
MRRLLEPCWWILFLKITSSVLHYVVCFPALTEGYVGALHENRHGSAVQIRRRKASGDPYWAYSGAYGPEHWVTSSVSCGGRHQSPIDILDQYARVGEEYQELQLDGFDNESSNKTWMKNTGKTVAILLKDDYFVSGAGLPGRFKAEKVEFHWGHSNGSAGSEHSINGRRFPVEMQIFFYNPDDFDSFQTAISENRIIGAMAIFFQVSPRDNSALDPIIHGLKGVVHHEKETFLDPFVLRDLLPASLGSYYRYTGSLTTPPCSEIVEWIVFRRPVPISYHQLEAFYSIFTTEQQDHVKSVEYLRNNFRPQQRLHDRVVSKSAVRDSWNHDMTDFLENPLGTEASKVCSSPPIHMKVQPLNQTALQVSWSQPETIYHPPIMNYMISYSWTKNEDEKEKTFTKDSDKDLKATISHVSPDSLYLFRVQAVCRNDMRSDFSQTMLFQANTTRIFQGTRIVKTGVPTASPASSADMAPISSGSSTWTSSGIPFSFVSMATGMGPSSSGSQATVASVVTSTLLAGLGFGGGGISSFPSTVWPTRLPTAASASKQAARPVLATTEALASPGPDGDSSPTKDGEGTEEGEKDEKSESEDGEREHEEDGEKDSEKKEKSGVTHAAEERNQTEPSPTPSSPNRTAEGGHQTIPGHEQDHTAVPTDQTGGRRDAGPGLDPDMVTSTQVPPTATEEQYAGSDPKRPEMPSKKPMSRGDRFSEDSRFITVNPAEKNTSGMISRPAPGRMEWIIPLIVVSALTFVCLILLIAVLVYWRGCNKIKSKGFPRRFREVPSSGERGEKGSRKCFQTAHFYVEDSSSPRVVPNESIPIIPIPDDMEAIPVKQFVKHIGELYSNNQHGFSEDFEEVQRCTADMNITAEHSNHPENKHKNRYINILAYDHSRVKLRPLPGKDSKHSDYINANYVDGYNKAKAYIATQGPLKSTFEDFWRMIWEQNTGIIVMITNLVEKGRRKCDQYWPTENSEEYGNIIVTLKSTKIHACYTVRRFSIRNTKVKKGQKGNPKGRQNERVVIQYHYTQWPDMGVPEYALPVLTFVRRSSAARMPETGPVLVHCSAGVGRTGTYIVIDSMLQQIKDKSTVNVLGFLKHIRTQRNYLVQTEEQYIFIHDALLEAILGKETEVSSNQLHSYVNSILIPGVGGKTRLEKQFKLVTQCNAKYVECFSAQKECNKEKNRNSSVVPSERARVGLAPLPGMKGTDYINASYIMGYYRSNEFIITQHPLPHTTKDFWRMIWDHNAQIIVMLPDNQSLAEDEFVYWPSREESMNCEAFTVTLISKDRLCLSNEEQIIIHDFILEATQDDYVLEVRHFQCPKWPNPDAPISSTFELINVIKEEALTRDGPTIVHDEYGAVSAGMLCALTTLSQQLENENAVDVFQVAKMINLMRPGVFTDIEQYQFIYKAMLSLVSTKENGNGPMTVDKNGAVLIADESDPAESMESLV

SEQ ID NO: 33642 - protein, 1416 aa, Homo sapiens
MRRLLEPCWWILFLKITSSVLHYVVCFPALTEGYVGALHENRHGSAVQIRRRKASGDPYWAYSGAYGPEHWVTSSVSCGGRHQSPIDILDQYARVGEEYQELQLDGFDNESSNKTWMKNTGKTVAILLKDDYFVSGAGLPGRFKAEKVEFHWGHSNGSAGSEHSINGRRFPVEMQIFFYNPDDFDSFQTAISENRIIGAMAIFFQVSPRDNSALDPIIHGLKGVVHHEKETFLDPFVLRDLLPASLGSYYRYTGSLTTPPCSEIVEWIVFRRPVPISYHQLEAFYSIFTTEQQDHVKSVEYLRNNFRPQQRLHDRVVSKSAVRDSWNHDMTDFLENPLGTEASKVCSSPPIHMKVQPLNQTALQVSWSQPETIYHPPIMNYMISYSWTKNEDEKEKTFTKDSDKDLKATISHVSPDSLYLFRVQAVCRNDMRSDFSQTMLFQANTTRIFQGTRIVKTGVPTASPASSADMAPISSGSSTWTSSGIPFSFVSMATGMGPSSSGSQATVASVVTSTLLAGLGFGGGGISSFPSTVWPTRLPTAASASKQAARPVLATTEALASPGPDGDSSPTKDGEGTEEGEKDEKSESEDGEREHEEDGEKDSEKKEKSGVTHAAEERNQTEPSPTPSSPNRTAEGGHQTIPGHEQDHTAVPTDQTGGRRDAGPGLDPDMVTSTQVPPTATEEQYAGSDPKRPEMPSKKPMSRGDRFSEDSRFITVNPAEKNTSGMISRPAPGRMEWIIPLIVVSALTFVCLILLIAVLVYWRKCFQTAHFYVEDSSSPRVVPNESIPIIPIPDDMEAIPVKQFVKHIGELYSNNQHGFSEDFEEVQRCTADMNITAEHSNHPENKHKNRYINILAYDHSRVKLRPLPGKDSKHSDYINANYVDGYNKAKAYIATQGPLKSTFEDFWRMIWEQNTGIIVMITNLVEKGRRKCDQYWPTENSEEYGNIIVTLKSTKIHACYTVRRFSIRNTKVKKGQKGNPKGRQNERVVIQYHYTQWPDMGVPEYALPVLTFVRRSSAARMPETGPVLVHCSAGVGRTGTYIVIDSMLQQIKDKSTVNVLGFLKHIRTQRNYLVQTEEQYIFIHDALLEAILGKETEVSSNQLHSYVNSILIPGVGGKTRLEKQFKLVTQCNAKYVECFSAQKECNKEKNRNSSVVPSERARVGLAPLPGMKGTDYINASYIMGYYRSNEFIITQHPLPHTTKDFWRMIWDHNAQIIVMLPDNQSLAEDEFVYWPSREESMNCEAFTVTLISKDRLCLSNEEQIIIHDFILEATQDDYVLEVRHFQCPKWPNPDAPISSTFELINVIKEEALTRDGPTIVHDEYGAVSAGMLCALTTLSQQLENENAVDVFQVAKMINLMRPGVFTDIEQYQFIYKAMLSLVSTKENGNGPMTVDKNGAVLIADESDPAESMESLV

SEQ ID NO: 33643 - protein, 212 aa, Homo sapiens
MGPGPRLLLPLVLCVGLGALVFSSGAEGFRKRGPSVTAKVFFDVRIGDKDVGRIVIGLFGKVVPKTVENFVALATGEKGYGYKGSKFHRVIKDFMIQGGDITTGDGTGGVSIYGETFPDENFKLKHYGIGWVSMANAGPDTNGSQFFITLTKPTWLDGKHVVFGKVIDGMTVVHSIELQATDGHDRPLTNCSIINSGKIDVKTPFVVEIADW

SEQ ID NO: 33644 - protein, 550 aa, Homo sapiens
MAGLGASLHVWGWLMLGSCLLARAQLDSDGTITIEEQIVLVLKAKVQCELNITAQLQEGEGNCFPEWDGLICWPRGTVGKISAVPCPPYIYDFNHKGVAFRHCNPNGTWDFMHSLNKTWANYSDCLRFLQPDISIGKQEFFERLYVMYTVGYSISFGSLAVAILIIGYFRRLHCTRNYIHMHLFVSFMLRATSIFVKDRVVHAHIGVKELESLIMQDDPQNSIEATSVDKSQYIGCKIAVVMFIYFLATNYYWILVEGLYLHNLIFVAFFSDTKYLWGFILIGWGFPAAFVAAWAVARATLADARCWELSAGDIKWIYQAPILAAIGLNFILFLNTVRVLATKIWETNAVGHDTRKQYRKLAKSTLVLVLVFGVHYIVFVCLPHSFTGLGWEIRMHCELFFNSFQGFFVSIIYCYCNGEVQAEVKKMWSRWNLSVDWKRTPPCGSRRCGSVLTTVTHSTSSQSQVAASTRMVLISGKAAKIASRQPDSHITLPGYVWSNSEQDCLPHSFHEETKEDSGRQGDDILMEKPSRPMESNPDTEGCQGETEDVL

SEQ ID NO: 33645 - protein, 156 aa, Homo sapiens
MAVGKFLLGSLLLLSLQLGQGWGPDARGVPVADGEFSSEQVAKAGGTWLGTHRPLARLRRALSGPCQLWSLTLSVAELGLGYASEEKVIFRYCAGSCPRGARTQHGLALARLQGQGRAHGGPCCRPTRYTDVAFLDDRHRWQRLPQLSAAACGCGG

SEQ ID NO: 33646 - protein, 254 aa, Homo sapiens
MASLLKVDQEVKLKVDSFRERITSEAEDLVANFFPKKLLELDSFLKEPILNIHDLTQIHSDMNLPVPDPILLTNSHDGLDGPTYKKRRLDECEEAFQGTKVFVMPNGMLKSNQQLVDIIEKVKPEIRLLIEKCNTVKMWVQLLIPRIEDGNNFGVSIQEETVAELRTVESEAASYLDQISRYYITRAKLVSKIAKYPHVEDYRRTVTEIDEKEYISLRLIISELRNQYVTLHDMILKNIEKIKRPRSSNAETLY

SEQ ID NO: 33647 - protein, 267 aa, Homo sapiens
MASLLKVDQEVKLKVDSFRERITSEAEDLVANFFPKKLLELDSFLKEPILNIHDLTQIHSDMNLPVPDPILLTNSHDGLDGPTYKKRRLDECEEAFQGTKVFVMPNGMLKSNQQLVDIIEKVKPEIRLLIEKCNTPSGKGPHICFDLQVKMWVQLLIPRIEDGNNFGVSIQEETVAELRTVESEAASYLDQISRYYITRAKLVSKIAKYPHVEDYRRTVTEIDEKEYISLRLIISELRNQYVTLHDMILKNIEKIKRPRSSNAETLY

SEQ ID NO: 33648 - protein, 265 aa, Homo sapiens
MEKWILKKIKYLQSGGLSASYYSYKVDSFRERITSEAEDLVANFFPKKLLELDSFLKEPILNIHDLTQIHSDMNLPVPDPILLTNSHDGLDGPTYKKRRLDECEEAFQGTKVFVMPNGMLKSNQQLVDIIEKVKPEIRLLIEKCNTVKMWVQLLIPRIEDGNNFGVSIQEETVAELRTVESEAASYLDQISRYYITRAKLVSKIAKYPHVEDYRRTVTEIDEKEYISLRLIISELRNQYVTLHDMILKNIEKIKRPRSSNAETLY

SEQ ID NO: 33649 - protein, 212 aa, Homo sapiens
MAAPPQLRALLVVVNALLRKRRYHAALAVLKGFRNGAVYGAKIRAPHALVMTFLFRNGSLQEKLWAILQATYIHSWNLARFVFTYKGLRALQSYIQGKTYPAHAFLAAFLGGILVFGENNNINSQINMYLLSRVLFALSRLAVEKGYIPEPRWDPFPLLTAVVWGLVLWLFEYHRSTLQPSLQSSMTYLYEDSNVWHDISDFLVYNKSRPSN

SEQ ID NO: 33650 - protein, 71 aa, Homo sapiens
MAAPPQLRALLVVVNALLRKRRYHAALAVLKGFRNGAVYGAKIRAPHALVMTFLFRNGRSTCTCCHASCLP

SEQ ID NO: 33651 - protein, 332 aa, Homo sapiens
MLAVHFDKPGGPENLYVKEVAKPSPGEGEVLLKVAASALNRADLMQRQGQYDPPPGASNILGLEASGHVAELGPGCQGHWKIGDTAMALLPGGGQAQYVTVPEGLLMPIPEGLTLTQAAAIPEAWLTAFQLLHLVGNVQAGDYVLIHAGLSGVGTAAIQLTRMAGAIPLVTAGSQKKLQMAEKLGAAAGFNYKKEDFSEATLKFTKGAGVNLILDCIGGSYWEKNVNCLALDGRWVLYGLMGGGDINGPLFSKLLFKRGSLITSLLRSRDNKYKQMLVNAFTEQILPHFSTEGPQRLLPVLDRIYPVTEIQEAHKYMEANKNIGKIVLELPQ

SEQ ID NO: 33652 - protein, 248 aa, Homo sapiens
MLAVHFDKPGGPENLYVKEVAKPSPGEGEVLLKVAASALNRADLMQRQGQYDPPPGASNILGLEASGHVAELGPGCQGHWKIGDTAMALLPGGGQAQYVTVPEGLLMPIPEGLTLTQAAAIPEAWLTAFQLLHLVGNVQAGDYVLIHAGLSGVGTAAIQLTRMAGAIPLVTAGSQKKLQMAEKLGAAAGFNYKKEDFSEATLKFTKVQANAGECFHGANSASLLHGGPPTSAAGSGQNLPSDRNPGGP

SEQ ID NO: 33653 - protein, 960 aa, Homo sapiens
MSRLIVKNLPNGMKEERFRQLFAAFGTLTDCSLKFTKDGKFRKFGFIGFKSEEEAQKAQKHFNKSFIDTSRITVEFCKSFGDPAKPRAWSKHAQKPSQPKQPPKDSTTPEIKKDEKKKKVAGQLEKLKEDTEFQEFLSVHQRRAQAATWANDGLDAEPSKGKSKPASDYLNFDSDSGQESEEEGAGEDLEEEASLEPKAAVQKELSDMDYLKSKMVKAGSSSSSEEEESEDEAVHCDEGSEAEEEDSSATPVLQERDSKGAGQEQGMPAGKKRPPEARAETEKPANQKEPTTCHTVKLRGAPFNVTEKNVMEFLAPLKPVAIRIVRNAHGNKTGYIFVDFSNEEEVKQALKCNREYMGGRYIEVFREKNVPTTKGAPKNTTKSWQGRILGENEEEEDLAESGRLFVRNLPYTSTEEDLEKLFSKYGPLSELHYPIDSLTKKPKGFAFITFMFPEHAVKAYSEVDGQVFQGRMLHVLPSTIKKEASEDASALGSSSYKKKKEAQDKANSASSHNWNTLFMGPNAVADAIAQKYNATKSQVFDHETKGSVAVRVALGETQLVQEVRRFLIDNGVSLDSFSQAAAERSKTVILVKNLPAGTLAAQLQETFGHFGSLGRVLLPEGGITAIVEFLEPLEARKAFRHLAYSKFHHVPLYLEWAPVGVFSSTAPQKKKLQDTPSEPMEKDPAEPETVPDGETPEDENPTEEGADNSSAKMEEEEEEEEEEEESLPGCTLFIKNLNFDTTEEKLKEVFSKVGTVKSCSISKKKNKAGVLLSMGFGFVEYRKPEQAQKALKQLQGHVVDGHKLEVRISERATKPAVTLARKKQVPRKQTTSKILVRNIPFQAHSREIRELFSTFGELKTVRLPKKMTGTGTHRGFGFVDFLTKQDAKRAFNALCHSTHLYGRRLVLEWADSEVTLQALRRKTAAHFHEPPKKKRSVVLDEILEQLEGSDSDSEEQTLQL

SEQ ID NO: 33654 - protein, 980 aa, Homo sapiens
MKSLKAKFRKSDTNEWNKNDDRLLQAVENGDAEKVASLLGKKGASATKHDSEGKTAFHLAAAKGHVECLRVMITHGVDVTAQDTTGHSALHLAAKNSHHECIRKLLQSKCPAESVDSSGKTALHYAAAQGCLQAVQILCEHKSPINLKDLDGNIPLLLAVQNGHSEICHFLLDHGADVNSRNKSGRTALMLACEIGSSNAVEALIKKGADLNLVDSLGYNALHYSKLSENAGIQSLLLSKISQDADLKTPTKPKQHDQVSKISSERSGTPKKRKAPPPPISPTQLSDVSSPRSITSTPLSGKESVFFAEPPFKAEISSIRENKDRLSDSTTGADSLLDISSEADQQDLLSLLQAKVASLTLHNKELQDKLQAKSPKEAEADLSFDSYHSTQTDLGPSLGKPGETSPPDSKSSPSVLIHSLGKSTTDNDVRIQQLQEILQDLQKRLESSEAERKQLQVELQSRRAELVCLNNTEISENSSDLSQKLKETQSKYEEAMKEVLSVQKQMKLGLVSPESMDNYSHFHELRVTEEEINVLKQDLQNALEESERNKEKVRELEEKLVEREKGTVIKPPVEEYEEMKSSYCSVIENMNKEKAFLFEKYQEAQEEIMKLKDTLKSQMTQEASDEAEDMKEAMNRMIDELNKQVSELSQLYKEAQAELEDYRKRKSLEDVTAEYIHKAEHEKLMQLTNVSRAKAEDALSEMKSQYSKVLNELTQLKQLVDAQKENSVSITEHLQVITTLRTAAKEMEEKISNLKEHLASKEVEVAKLEKQLLEEKAAMTDAMVPRSSYEKLQSSLESEVSVLASKLKESVKEKEKVHSEVVQIRSEVSQVKREKENIQTLLKSKEQEVNELLQKFQQAQEELAEMKRYAESSSKLEEDKDKKINEMSKEVTKLKEALNSLSQLSYSTSSSKRQSQQLEALQQQVKQLQNQLAECKKQHQEVISVYRMHLLYAVQGQMDEDVQKVLKQILTMCKNQSQKK

SEQ ID NO: 33655 - protein, 983 aa, Homo sapiens
MQPTYLPWLSAKEKKTNEWNKNDDRLLQAVENGDAEKVASLLGKKGASATKHDSEGKTAFHLAAAKGHVECLRVMITHGVDVTAQDTTGHSALHLAAKNSHHECIRKLLQSKCPAESVDSSGKTALHYAAAQGCLQAVQILCEHKSPINLKDLDGNIPLLLAVQNGHSEICHFLLDHGADVNSRNKSGRTALMLACEIGSSNAVEALIKKGADLNLVDSLGYNALHYSKLSENAGIQSLLLSKISQDADLKTPTKPKQHDQVSKISSERSGTPKKRKAPPPPISPTQLSDVSSPRSITSTPLSGKESVFFAEPPFKAEISSIRENKDRLSDSTTGADSLLDISSEADQQDLLSLLQAKVASLTLHNKELQDKLQAKSPKEAEADLSFDSYHSTQTDLGPSLGKPGETSPPDSKSSPSVLIHSLGKSTTDNDVRIQQLQEILQDLQKRLESSEAERKQLQVELQSRRAELVCLNNTEISENSSDLSQKLKETQSKYEEAMKEVLSVQKQMKLGLVSPESMDNYSHFHELRVTEEEINVLKQDLQNALEESERNKEKVRELEEKLVEREKGTVIKPPVEEYEEMKSSYCSVIENMNKEKAFLFEKYQEAQEEIMKLKDTLKSQMTQEASDEAEDMKEAMNRMIDELNKQVSELSQLYKEAQAELEDYRKRKSLEDVTAEYIHKAEHEKLMQLTNVSRAKAEDALSEMKSQYSKVLNELTQLKQLVDAQKENSVSITEHLQVITTLRTAAKEMEEKISNLKEHLASKEVEVAKLEKQLLEEKAAMTDAMVPRSSYEKLQSSLESEVSVLASKLKESVKEKEKVHSEVVQIRSEVSQVKREKENIQTLLKSKEQEVNELLQKFQQAQEELAEMKRYAESSSKLEEDKDKKINEMSKEVTKLKEALNSLSQLSYSTSSSKRQSQQLEALQQQVKQLQNQLAECKKQHQEVISVYRMHLLYAVQGQMDEDVQKVLKQILTMCKNQSQKK

SEQ ID NO: 33656 - protein, 972 aa, Homo sapiens
MEAKTNEWNKNDDRLLQAVENGDAEKVASLLGKKGASATKHDSEGKTAFHLAAAKGHVECLRVMITHGVDVTAQDTTGHSALHLAAKNSHHECIRKLLQSKCPAESVDSSGKTALHYAAAQGCLQAVQILCEHKSPINLKDLDGNIPLLLAVQNGHSEICHFLLDHGADVNSRNKSGRTALMLACEIGSSNAVEALIKKGADLNLVDSLGYNALHYSKLSENAGIQSLLLSKISQDADLKTPTKPKQHDQVSKISSERSGTPKKRKAPPPPISPTQLSDVSSPRSITSTPLSGKESVFFAEPPFKAEISSIRENKDRLSDSTTGADSLLDISSEADQQDLLSLLQAKVASLTLHNKELQDKLQAKSPKEAEADLSFDSYHSTQTDLGPSLGKPGETSPPDSKSSPSVLIHSLGKSTTDNDVRIQQLQEILQDLQKRLESSEAERKQLQVELQSRRAELVCLNNTEISENSSDLSQKLKETQSKYEEAMKEVLSVQKQMKLGLVSPESMDNYSHFHELRVTEEEINVLKQDLQNALEESERNKEKVRELEEKLVEREKGTVIKPPVEEYEEMKSSYCSVIENMNKEKAFLFEKYQEAQEEIMKLKDTLKSQMTQEASDEAEDMKEAMNRMIDELNKQVSELSQLYKEAQAELEDYRKRKSLEDVTAEYIHKAEHEKLMQLTNVSRAKAEDALSEMKSQYSKVLNELTQLKQLVDAQKENSVSITEHLQVITTLRTAAKEMEEKISNLKEHLASKEVEVAKLEKQLLEEKAAMTDAMVPRSSYEKLQSSLESEVSVLASKLKESVKEKEKVHSEVVQIRSEVSQVKREKENIQTLLKSKEQEVNELLQKFQQAQEELAEMKRYAESSSKLEEDKDKKINEMSKEVTKLKEALNSLSQLSYSTSSSKRQSQQLEALQQQVKQLQNQLAECKKQHQEVISVYRMHLLYAVQGQMDEDVQKVLKQILTMCKNQSQKK

SEQ ID NO: 33657 - protein, 951 aa, Homo sapiens
MKSLKAKFRKSDTNEWNKNDDRLLQAVENGDAEKVASLLGKKGASATKHDSEGKTAFHLAAAKGHVECLRVMITHGVDVTAQDTTGHSALHLAAKNSHHECIRKLLQSKCPAESVDSSGKTALHYAAAQGCLQAVQILCEHKSPINLKDLDGNIPLLLAVQNGHSEICHFLLDHGADVNSRNKSGRTALMLACEIGSSNAVEALIKKGADLNLVDSLGYNALHYSKLSENAGIQSLLLSKISQDADLKTPTKPKQLSDVSSPRSITSTPLSGKESVFFAEPPFKAEISSIRENKDRLSDSTTGADSLLDISSEADQQDLLSLLQAKVASLTLHNKELQDKLQAKSPKEAEADLSFDSYHSTQTDLGPSLGKPGETSPPDSKSSPSVLIHSLGKSTTDNDVRIQQLQEILQDLQKRLESSEAERKQLQVELQSRRAELVCLNNTEISENSSDLSQKLKETQSKYEEAMKEVLSVQKQMKLGLVSPESMDNYSHFHELRVTEEEINVLKQDLQNALEESERNKEKVRELEEKLVEREKGTVIKPPVEEYEEMKSSYCSVIENMNKEKAFLFEKYQEAQEEIMKLKDTLKSQMTQEASDEAEDMKEAMNRMIDELNKQVSELSQLYKEAQAELEDYRKRKSLEDVTAEYIHKAEHEKLMQLTNVSRAKAEDALSEMKSQYSKVLNELTQLKQLVDAQKENSVSITEHLQVITTLRTAAKEMEEKISNLKEHLASKEVEVAKLEKQLLEEKAAMTDAMVPRSSYEKLQSSLESEVSVLASKLKESVKEKEKVHSEVVQIRSEVSQVKREKENIQTLLKSKEQEVNELLQKFQQAQEELAEMKRYAESSSKLEEDKDKKINEMSKEVTKLKEALNSLSQLSYSTSSSKRQSQQLEALQQQVKQLQNQLAECKKQHQEVISVYRMHLLYAVQGQMDEDVQKVLKQILTMCKNQSQKK

SEQ ID NO: 33658 - protein, 236 aa, Homo sapiens
MHTTQKDTTYTKIFVGGLPYHTTDASLRKYFEVFGEIEEAVVITDRQTGKSRGYGFVTMADRAAAERACKDPNPIIDGRKANVNLAYLGAKPRIMQPGFAFGVQQLHPALIQRPFGIPAHYVYPQAFVQPGVVIPHVQPTAAAASTTPYIDYTGAAYAQYSAAAAAAAAAAAYDQYPYAASPAAAGYVTAGGYGYAVQQPITAAAPGTAAAAAAAAAAAAAFGQYQPQQLQTDRMQ

SEQ ID NO: 33659 - protein, 191 aa, Homo sapiens
MYVCLCVSVAKVTMADRAAAERACKDPNPIIDGRKANVNLAYLGAKPRIMQPGFAFGVQQLHPALIQRPFGIPAHYVYPQAFVQPGVVIPHVQPTAAAASTTPYIDYTGAAYAQYSAAAAAAAAAAAYDQYPYAASPAAAGYVTAGGYGYAVQQPITAAAPGTAAAAAAAAAAAAAFGQYQPQQLQTDRMQ

SEQ ID NO: 33660 - protein, 178 aa, Homo sapiens
MADRAAAERACKDPNPIIDGRKANVNLAYLGAKPRIMQPGFAFGVQQLHPALIQRPFGIPAHYVYPQAFVQPGVVIPHVQPTAAAASTTPYIDYTGAAYAQYSAAAAAAAAAAAYDQYPYAASPAAAGYVTAGGYGYAVQQPITAAAPGTAAAAAAAAAAAAAFGQYQPQQLQTDRMQ

SEQ ID NO: 33661 - protein, 1047 aa, Homo sapiens
MMAAEAGSEEGGPVTAGAGGGGAAAGSSAYPAVCRVKIPAALPVAAAPYPGLVETGVAGTLGGGAALGSEFLGAGSVAGALGGAGLTGGGTAAGVAGAAAGVAGAAVAGPSGDMALTKLPTSLLAETLGPGGGFPPLPPPPYLPPLGAGLGTVDEGDSLDGPEYEEEEVAIPLTAPPTNQWYHGKLDRTIAEERLRQAGKSGSYLIRESDRRPGSFVLSFLSQMNVVNHFRIIAMCGDYYIGGRRFSSLSDLIGYYSHVSCLLKGEKLLYPVAPPEPVEDRRRVRAILPYTKVPDTDEISFLKGDMFIVHNELEDGWMWVTNLRTDEQGLIVEDLVEEVGREEDPHEGKIWFHGKISKQEAYNLLMTVGQVCSFLVRPSDNTPGDYSLYFRTNENIQRFKICPTPNNQFMMGGRYYNSIGDIIDHYRKEQIVEGYYLKEPVPMQDQEQVLNDTVDGKEIYNTIRRKTKDAFYKNIVKKGYLLKKGKGKRWKNLYFILEGSDAQLIYFESEKRATKPKGLIDLSVCSVYVVHDSLFGRPNCFQIVVQHFSEEHYIFYFAGETPEQAEDWMKGLQAFCNLRKSSPGTSNKRLRQVSSLVLHIEEAHKLPVKHFTNPYCNIYLNSVQVAKTHAREGQNPVWSEEFVFDDLPPDINRFEITLSNKTKKSKDPDILFMRCQLSRLQKGHATDEWFLLSSHIPLKGIEPGSLRVRARYSMEKIMPEEEYSEFKELILQKELHVVYALSHVCGQDRTLLASILLRIFLHEKLESLLLCTLNDREISMEDEATTLFRATTLASTLMEQYMKATATQFVHHALKDSILKIMESKQSCELSPSKLEKNEDVNTNLTHLLNILSELVEKIFMASEILPPTLRYIYGCLQKSVQHKWPTNTTMRTRVVSGFVFLRLICPAILNPRMFNIISDSPSPIAARTLILVAKSVQNLANLVEFGAKEPYMEGVNPFIKSNKHRMIMFLDELGNVPELPDTTEHSRTDLSRDLAALHEICVAHSDELRTLSNERGAQQHVLKKLLAITELLQQKQNQYTKTNDVR

SEQ ID NO: 33662 - protein, 870 aa, Homo sapiens
MKGWYHGKLDRTIAEERLRQAGKSGSYLIRESDRRPGSFVLSFLSQMNVVNHFRIIAMCGDYYIGGRRFSSLSDLIGYYSHVSCLLKGEKLLYPVAPPEPVEDRRRVRAILPYTKVPDTDEISFLKGDMFIVHNELEDGWMWVTNLRTDEQGLIVEDLVEEVGREEDPHEGKIWFHGKISKQEAYNLLMTVGQVCSFLVRPSDNTPGDYSLYFRTNENIQRFKICPTPNNQFMMGGRYYNSIGDIIDHYRKEQIVEGYYLKEPVPMQDQEQVLNDTVDGKEIYNTIRRKTKDAFYKNIVKKGYLLKKGKGKRWKNLYFILEGSDAQLIYFESEKRATKPKGLIDLSVCSVYVVHDSLFGRPNCFQIVVQHFSEEHYIFYFAGETPEQAEDWMKGLQAFCNLRKSSPGTSNKRLRQVSSLVLHIEEAHKLPVKHFTNPYCNIYLNSVQVAKTHAREGQNPVWSEEFVFDDLPPDINRFEITLSNKTKKSKDPDILFMRCQLSRLQKGHATDEWFLLSSHIPLKGIEPGSLRVRARYSMEKIMPEEEYSEFKELILQKELHVVYALSHVCGQDRTLLASILLRIFLHEKLESLLLCTLNDREISMEDEATTLFRATTLASTLMEQYMKATATQFVHHALKDSILKIMESKQSCELSPSKLEKNEDVNTNLTHLLNILSELVEKIFMASEILPPTLRYIYGCLQKSVQHKWPTNTTMRTRVVSGFVFLRLICPAILNPRMFNIISDSPSPIAARTLILVAKSVQNLANLVEFGAKEPYMEGVNPFIKSNKHRMIMFLDELGNVPELPDTTEHSRTDLSRDLAALHEICVAHSDELRTLSNERGAQQHVLKKLLAITELLQQKQNQYTKTNDVR

SEQ ID NO: 33663 - protein, 539 aa, Homo sapiens
MMAAEAGSEEGGPVTAGAGGGGAAAGSSAYPAVCRVKIPAALPVAAAPYPGLVETGVAGTLGGGAALGSEFLGAGSVAGALGGAGLTGGGTAAGVAGAAAGVAGAAVAGPSGDMALTKLPTSLLAETLGPGGGFPPLPPPPYLPPLGAGLGTVDEGDSLDGPEYEEEEVAIPLTAPPTNQWYHGKLDRTIAEERLRQAGKSGSYLIRESDRRPGSFVLSFLSQMNVVNHFRIIAMCGDYYIGGRRFSSLSDLIGYYSHVSCLLKGEKLLYPVAPPEPVEDRRRVRAILPYTKVPDTDEISFLKGDMFIVHNELEDGWMWVTNLRTDEQGLIVEDLVEEVGREEDPHEGKIWFHGKISKQEAYNLLMTVGQVCSFLVRPSDNTPGDYSLYFRTNENIQRFKICPTPNNQFMMGGRYYNSIGDIIDHYRKEQIVEGYYLKEPVPMQDQEQVLNDTVDGKEIYNTIRRKTKDAFYKNIVKKGYLLKKGKGKRWKNLYFILEGSDAQLIYFESEKRATKPKGLIDLSVCSVYVVHDSLFGRCS

SEQ ID NO: 33664 - protein, 880 aa, Homo sapiens
MRTGYSSVPSKLRWYHGKLDRTIAEERLRQAGKSGSYLIRESDRRPGSFVLSFLSQMNVVNHFRIIAMCGDYYIGGRRFSSLSDLIGYYSHVSCLLKGEKLLYPVAPPEPVEDRRRVRAILPYTKVPDTDEISFLKGDMFIVHNELEDGWMWVTNLRTDEQGLIVEDLVEEVGREEDPHEGKIWFHGKISKQEAYNLLMTVGQVCSFLVRPSDNTPGDYSLYFRTNENIQRFKICPTPNNQFMMGGRYYNSIGDIIDHYRKEQIVEGYYLKEPVPMQDQEQVLNDTVDGKEIYNTIRRKTKDAFYKNIVKKGYLLKKGKGKRWKNLYFILEGSDAQLIYFESEKRATKPKGLIDLSVCSVYVVHDSLFGRPNCFQIVVQHFSEEHYIFYFAGETPEQAEDWMKGLQAFCNLRKSSPGTSNKRLRQVSSLVLHIEEAHKLPVKHFTNPYCNIYLNSVQVAKTHAREGQNPVWSEEFVFDDLPPDINRFEITLSNKTKKSKDPDILFMRCQLSRLQKGHATDEWFLLSSHIPLKGIEPGSLRVRARYSMEKIMPEEEYSEFKELILQKELHVVYALSHVCGQDRTLLASILLRIFLHEKLESLLLCTLNDREISMEDEATTLFRATTLASTLMEQYMKATATQFVHHALKDSILKIMESKQSCELSPSKLEKNEDVNTNLTHLLNILSELVEKIFMASEILPPTLRYIYGCLQKSVQHKWPTNTTMRTRVVSGFVFLRLICPAILNPRMFNIISDSPSPIAARTLILVAKSVQNLANLVEFGAKEPYMEGVNPFIKSNKHRMIMFLDELGNVPELPDTTEHSRTDLSRDLAALHEICVAHSDELRTLSNERGAQQHVLKKLLAITELLQQKQNQYTKTNDVR

SEQ ID NO: 33665 - protein, 321 aa, Homo sapiens
MKEDCLPSSHVPISDSKSIQKSELLGLLKTYNCYHEGKSFQLRHREEEGTLIIEGLLNIAWGLRRPIRLQMQDDREQVHLPSTSWMPRRPSCPLKEPSPQNGNITAQGPSIQPVHKAESSTDSSGPLEEAEEAPQLMRTKSDASCMSQRRPKCRAPGEAQRIRRHRFSINGHFYNHKTSVFTPAYGSVTNVRVNSTMTTLQVLTLLLNKFRVEDGPSEFALYIVHESGERTKLKDCEYPLISRILHGPCEKIARIFLMEADLGVEVPHEVAQYIKFEMPVLDSFVEKLKEEEEREIIKLTMKFQALRLTMLQRLEQLVEAK

SEQ ID NO: 33666 - protein, 330 aa, Homo sapiens
MKEDCLPSSHVPISDSKSIQKSELLGLLEEGTLIIEGLLNIAWGLRRPIRLQMQDDREQVHLPSTSWMPRRPSCPLGCWSLLLGLSSLSLPAAISALQLSVFRKEPSPQNGNITAQGPSIQPVHKAESSTDSSGPLEEAEEAPQLMRTKSDASCMSQRRPKCRAPGEAQRIRRHRFSINGHFYNHKTSVFTPAYGSVTNVRVNSTMTTLQVLTLLLNKFRVEDGPSEFALYIVHESGERTKLKDCEYPLISRILHGPCEKIARIFLMEADLGVEVPHEVAQYIKFEMPVLDSFVEKLKEEEEREIIKLTMKFQALRLTMLQRLEQLVEAK

SEQ ID NO: 33667 - protein, 251 aa, Homo sapiens
MQDDREQVHLPSTSWMPRRPSCPLKEPSPQNGNITAQGPSIQPVHKAESSTDSSGPLEEAEEAPQLMRTKSDASCMSQRRPKCRAPGEAQRIRRHRFSINGHFYNHKTSVFTPAYGSVTNVRVNSTMTTLQVLTLLLNKFRVEDGPSEFALYIVHESGERTKLKDCEYPLISRILHGPCEKIARIFLMEADLGVEVPHEVAQYIKFEMPVLDSFVEKLKEEEEREIIKLTMKFQALRLTMLQRLEQLVEAK

SEQ ID NO: 33668 - protein, 121 aa, Homo sapiens
MKEDCLPSSHVPISDSKSIQKSELLGLLKTYNCYHEGKSFQLRHREEEGTLIIEGLLNIAWGLRRPIRLQMQDDREQVHLPSTSWMPRRPSCPLAPGGGRGGPPADADQERRQLHEPEEAQ

SEQ ID NO: 33669 - protein, 281 aa, Homo sapiens
MKLAAMIKKMCPSDSELSIPAKNCYRMVILGSSKVGKTAIVSRFLTGRFEDAYTPTIEDFHRKFYSIRGEVYQLDILDTSGNHPFPAMRRLSILTGDVFILVFSLDNRDSFEEVQRLRQQILDTKSCLKNKTKENVDVPLVICGNKGDRDFYREVDQREIEQLVGDDPQRCAYFEISAKKNSSLDQMFRALFAMAKLPSEMSPDLHRKVSVQYCDVLHKKALRNKKLLRAGSGGGGGDPGDAFGIVAPFARRPSVHSDLMYIREKASAGSQAKDKERCVIS

SEQ ID NO: 33670 - protein, 122 aa, Homo sapiens
MKLAAMIKKMCPSDSELSIPAKNCYRMVILGSSKVGKTAIVSRFLTGRFEDAYTPTIEDFHRKFYSIRGEVYQLDILDTSGNHPFPAMRRLSILTDPRHQVLPQEQNQGERGRAPGHLRQQG

SEQ ID NO: 33671 - protein, 495 aa, Homo sapiens
MRVGAEYQARIPEFDPGATKYTDKDNGGMLVWSPYHSIPDAKLDEYIAIAKEKHGYNVEQALGMLFWHKHNIEKSLADLPNFTPFPDEWTVEDKVLFEQAFSFHGKSFHRIQQMLPDKTIASLVKYYYSWKKTRSRTSLMDRQARKLANRHNQGDSDDDVEETHPMDGNDSDYDPKKEAKKEGNTEQPVQTSKIGLGRREYQSLQHRHHSQRSKCRPPKGMYLTQEDVVAVSCSPNAANTILRQLDMELISLKRQVQNAKQVNSALKQKMEGGIEEFKPPESNQKINARWTTEEQLLAVQGVRKYGKDFQAIADVIGNKTVGQVKNFFVNYRRRFNLEEVLQEWEAEQGTQASNGDASTLGEETKSASNVPSGKSTDEEEEAQTPQAPRTLGPSPPAPSSTPTPTAPIATLNQPPPLLRPTLPAAPALHRQPPPLQQQARFIQPRPTLNQPPPPLIRPANSMPPRLNPRPVLSTVGGQQPPSLIGIQTDSQSSLH

SEQ ID NO: 33672 - protein, 436 aa, Homo sapiens
MPGMMEKGPELLGKNRSANGSAKSPAGGGGSGASSTNGGLHYSEPESGCSSDDEHDVGMRVGAEYQARIPEFDPGATKYTDKDNGGMLVWSPYHSIPDAKLDEYIAIAKEKHGYNVEQALGMLFWHKHNIEKSLADLPNFTPFPDEWTVEDKVLFEQAFSFHGKSFHRIQQMLPDKTIASLVKYYYSWKKTRSRTSLMDRQARKLANRHNQGDSDDDVEETHPMDGNDSDYDPKKEAKKEGNTEQPVQTSKIGLGRREYQSLQHRHHSQRSKCRPPKGMYLTQEDVVAVSCSPNAANTILRQLDMELISLKRQVQNAKQVNSALKQKMEGGIEEFKPPESNQKINARWTTEEQLLAVQGTDPTGSSDTGSITSCPIIHSNTNSPYCHSEPASTTSSSNTACCPGSSPAASSTPAAGSVHPAPANFKSASTTSYSPC

SEQ ID NO: 33673 - protein, 553 aa, Homo sapiens
MPGMMEKGPELLGKNRSANGSAKSPAGGGGSGASSTNGGLHYSEPESGCSSDDEHDVGMRVGAEYQARIPEFDPGATKYTDKDNGGMLVWSPYHSIPDAKLDEYIAIAKEKHGYNVEQALGMLFWHKHNIEKSLADLPNFTPFPDEWTVEDKVLFEQAFSFHGKSFHRIQQMLPDKTIASLVKYYYSWKKTRSRTSLMDRQARKLANRHNQGDSDDDVEETHPMDGNDSDYDPKKEAKKEGNTEQPVQTSKIGLGRREYQSLQHRHHSQRSKCRPPKGMYLTQEDVVAVSCSPNAANTILRQLDMELISLKRQVQNAKQVNSALKQKMEGGIEEFKPPESNQKINARWTTEEQLLAVQGVRKYGKDFQAIADVIGNKTVGQVKNFFVNYRRRFNLEEVLQEWEAEQGTQASNGDASTLGEETKSASNVPSGKSTDEEEEAQTPQAPRTLGPSPPAPSSTPTPTAPIATLNQPPPLLRPTLPAAPALHRQPPPLQQQARFIQPRPTLNQPPPPLIRPANSMPPRLNPRPVLSTVGGQQPPSLIGIQTDSQSSLH

SEQ ID NO: 33674 - protein, 449 aa, Homo sapiens
MPGMMEKGPELLGKNRSANGSAKSPAGGGGSGASSTNGGLHYSEPESGCSSDDEHDVGMRVGAEYQARIPEFDPGATKYTDKDNGGMLVWSPYHSIPDAKLDEYIAIAKEKHGYNVEQALGMLFWHKHNIEKSLADLPNFTPFPDEWTVEDKVLFEQAFSFHGKSFHRIQQMLPDKTIASLVKYYYSWKKTRSRTSLMDRQARKLANRHNQGDSDDDVEETHPMDGNDSDYDPKKEAKKEGNTEQPVQTSKIGLGRREYQSLQHRHHSQRSKCRPPKGMYLTQEDVVAVSCSPNAANTILRQLDMELISLKRQVQNAKQVNSALKQKMEGGIEEFKPPESNQKINARWTTEEQLLAVQGVRKYGKDFQAIADVIGNKTVGQVKNFFVNYRRRFNLEEVLQEWEAEQGTQASNGDASTLGEETKSASNVPSGKSTDEEEEVCLCMEFELI

SEQ ID NO: 33675 - protein, 1393 aa, Homo sapiens
MACSIVQFCYFQDLQAARDFLFPHLREEILSGALRRDPSKSTDWEDDGWGAWEENEPQEPEEEGNTCKTQKTSWLQDCVLSLSPTNDLMVIAREQKAVFLVPKWKYSDKGKEEMQFAVGWSGSLNVEEGECVTSALCIPLASQKRSSTGRPDWTCIVVGFTSGYVRFYTENGVLLLAQLLNEDPVLQLKCRTYEIPRHPGVTEQNEELSILYPAAIVTIDGFSLFQSLRACRNQVAKAAASGNENIQPPPLAYKKWGLQDIDTIIDHASVGIMTLSPFDQMKTASNIGGFNAAIKNSPPAMSQYITVGSNPFTGFFYALEGSTQPLLSHVALAVASKLTSALFNAASGWLGWKSKHEEEAVQKQKPKVEPATPLAVRFGLPDSRRHGESICLSPCNTLAAVTDDFGRVILLDVARGIAIRMWKGYRDAQIGWIQTVEDLHERVPEKADFSPFGNSQGPSRVAQFLVIYAPRRGILEVWSTQQGPRVGAFNVGKHCRLLYPGYKIMGLNNVTSQSWQPQTYQICLVDPVSGSVKTVNVPFHLALSDKKSERAKDMHLVKKLAALLKTKSPNLDLVETEIKELILDIKYPATKKQALESILASERLPFSCLRNITQTLMDTLKSQELESVDEGLLQFCANKLKLLQLYESVSQLNSLDFHLDTPFSDNDLALLLRLDEKELLKLQALLEKYKQENTRTNVRFSDDKDGVLPVKTFLEYLEYEKDVLNIKKISEEEYVALGSFFFWKCLHGESSTEDMCHTLESAGLSPQLLLSLLLSVWLSKEKDILDKPQSICCLHTMLSLLSKMKVAIDETWDSQSVSPWWQQMRTACIQSENNGAALLSAHVGHSVAAQISNNMTEKKFSQTVLGADSEALTDSWEALSLDTEYWKLLLKQLEDCLILQTLLHSKGNTQTSKVSSLQAEPLPRLSVKKLLEGGKGGIADSVAKWIFKQDFSPEVLKLANEERDAENPDEPKEGVNRSFLEVSEMEMDLGAIPDLLHLAYEQFPCSLELDVLHAHCCWEYVVQWNKDPEEARFFVRSIEHLKQIFNAHVQNGIALMMWNTFLVKRFSAATYLMDKVGKSPKDRLCRRDVGMSDTAMTSFLGSCLDLLQILMEADVSRDEIQVPVLDTEDAWLSVEGPISIVELALEQKHIHYPLVEHHSILCSILYAVMRFSLKTVKPLSLFDSKGKNAFFKDLTSIQLLPSGEMDPNFISVRQQFLLKVVSAAVQAQHSATKVKDPTEEATPTPFGKDQDWPALAVDLAHHLQVSEDVVRRHYVGELYNYGVDHLGEEAILQVHDKEVLASQLLVLTGQRLAHALLHTQTKEGMELLARLPPTLCTWLKAMDPQDLQNTEVPIATTAKLVNKVIELLPEKHGQYGLALHLIEAVEAISLPSL

SEQ ID NO: 33676 - protein, 206 aa, Homo sapiens
MACSIVQFCYFQDLQAARDFLFPHLREEILSGALRRDPSKSTDWEDDGWGAWEENEPQEPEEEGNTCKTQKTSWLQDCVLSLSPTNDLMVIAREQKAVFLVPKWKYSDKGKEEMQFAVGWSGSLNVEEGECVTSALCIPLASQKRSSTGRPDWTCIVVGFTSGYVRFYTENGVLLLAQLLNEDPVLQLKCRTYEIPRHPGVTEQVV

SEQ ID NO: 33677 - protein, 217 aa, Homo sapiens
MHFSSSARAADENFDYLFKIILIGDSNVGKTCVVQHFKSGVYTETQQNTIGVDFTVRSLDIDGKKVKMQVWDTAGQERFRTITQSYYRSAHAAIIAYDLTRRSTFESIPHWIHEIEKYGAANVVIMLIGNKCDLWEKRHVLFEDACTLAEKYGLLAVLETSAKESKNIEEVFVLMAKELIARNSLHLYGESALNGLPLDSSPVLMAQGPSEKTHCTC

SEQ ID NO: 33678 - protein, 264 aa, Homo sapiens
MHFSSSARAADENFDYLFKIILIGDSNVGKTCVVQHFKSGVYTETQQNTIGVDFTVRSLDIDGKKVKNSSASIITFASIQIHGQTQKMSPQIWTKSSHYLWEPLIWTLLPVLLQMQVWDTAGQERFRTITQSYYRSAHAAIIAYDLTRRSTFESIPHWIHEIEKYGAANVVIMLIGNKCDLWEKRHVLFEDACTLAEKYGLLAVLETSAKESKNIEEVFVLMAKELIARNSLHLYGESALNGLPLDSSPVLMAQGPSEKTHCTC

SEQ ID NO: 33679 - protein, 583 aa, Homo sapiens
MLKEELEGLNISVGIYQNTEEAFTVPLIPLGLKETKDIDFSVILKDFILEHYSEDGYLYEDEITDLMDPRQACRTPSRDEARVELLMTYFIQLGFAWIRFKKYNTSPRIFFYRYDSLNGVLVSQQNLLLEKASVLFNTGALYTQIGTWRYWQMQAGLQSAIDAFQRAAGVLNYLKETFTHTPSYDMSPAMLSVLVKMMLTQAQESVFEKISLPGIRNEFFMLVKVAQEAAKVGEVYQQLHAAMSQALVKENIPYSWASLACVKAHHYTALAHYFTAILLIDHQVKPGMDLDHQEKCLSQLYDHMPEGLTPLATLKNDQQRRQLGKSHLHRAMAHHEESVREASLCKKLRSIEVLQKVLCAAQERSRLTYAQHQEDDDLLNLIHAPSVVAKTEQEPKGPLSVFLANKQWMPPRSNRFTAEEGDLGFTLRGNAPVEVHFLDPYCSALVAGARGGDYIVSIQLVDCKWLTVSEVMKLLKSFGEDEIEMKVVSLLDSTSSMHNKSATYSVGMQKTYSMICLAIDDDNKTDKTQKISKKLSFLSWGTNKNRQKSASTLCLPSVGAARPQVKKKLPSPFSLLNSDSSSY

SEQ ID NO: 33680 - protein, 166 aa, Homo sapiens
MAQTNSFFMLISSLMFLSLSQGQESQTELPNPRISCPEGTNAYRSYCYYFNEDPETWVDADLYCQNMNSGNLVSVLTQAEGAFVASLIKESSTDDSNVWIGLHDPKKNRRWHWSSGSLVSYKSWDTGSPSSANAGYCASLTSCSGFKKWKDESCEKKFSFVCKFKN

SEQ ID NO: 33681 - protein, 496 aa, Homo sapiens
MGTQKVTPALIFAITVATIGSFQFGYNTGVINAPEKIIKEFINKTLTDKGNAPPSEVLLTSLWSLSVAIFSVGGMIGSFSVGLFVNRFGRRNSMLIVNLLAVTGGCFMGLCKVAKSVEMLILGRLVIGLFCGLCTGFVPMYIGEISPTALRGAFGTLNQLGIVVGILVAQIFGLEFILGSEELWPLLLGFTILPAILQSAALPFCPESPRFLLINRKEEENAKQILQRLWGTQDVSQDIQEMKDESARMSQEKQVTVLELFRVSSYRQPIIISIVLQLSQQLSGINAVFYYSTGIFKDAGVQEPIYATIGAGVVNTIFTVVSLFLVERAGRRTLHMIGLGGMAFCSTLMTVSLLLKDNYNGMSFVCIGAILVFVAFFEIGPGPIPWFIVAELFSQGPRPAAMAVAGCSNWTSNFLVGLLFPSAAHYLGAYVFIIFTGFLITFLAFTFFKVPETRGRTFEDITRAFEGQAHGADRSGKDGVMEMNSIEPAKETTTNV

SEQ ID NO: 33682 - protein, 477 aa, Homo sapiens
MTPEDPEETQPLLGPPGGSAPRGRRVFLAAFAAALGPLSFGFALGYSSPAIPSLQRAAPPAPRLDDAAASWFGAVVTLGAAAGGVLGGWLVDRAGRKLSLLLCSVPFVAGFAVITAAQDVWMLLGGRLLTGLACGVASLVAPVYISEIAYPAVRGLLGSCVQLMVVVGILLAYLAGWVLEWRWLAVLGCVPPSLMLLLMCFMPETPRFLLTQHRRQEAMAALRFLWGSEQGWEDPPIGAEQSFHLALLRQPGIYKPFIIGVSLMAFQQLSGVNAVMFYAETIFEEAKFKDSSLASVVVGVIQVLFTAVAALIMDRAGRRLLLVLSGVVMVFSTSAFGAYFKLTQGGPGNSSHVAISAPVSAQPVDASVGLAWLAVGSMCLFIAGFAVGWGPIPWLLMSEIFPLHVKGVATGICVLTNWLMAFLVTKEFSSLMEVLRPYGAFWLASAFCIFSVLFTLFCVPETKGKTLEQITAHFEGR

SEQ ID NO: 33683 - protein, 690 aa, Homo sapiens
MGSSGLGKAATLDELLCTCIEMFDDNGELDNSYLPRIVLLMHRWYLSSTELAEKLLCMYRNATGESCNEFRLKICYFMRYWILKFPAEFNLDLGLIRMTEEFREVASQLGYEKHVSLIDISSIPSYDWMRRVTQRKKVSKKGKACLLFDHLEPIELAEHLTFLEHKSFRRISFTDYQSYVIHGCLENNPTLERSIALFNGISKWVQLMVLSKPTPQQRAEVITKFINVAKKLLQLKNFNTLMAVVGGLSHSSISRLKETHSHLSSEVTKNWNEMTELVSSNGNYCNYRKAFADCDGFKIPILGVHLKDLIAVHVIFPDWTEENKVNIVKMHQLSVTLSELVSLQNASHHLEPNMDLINLLTLSLDLYHTEDDIYKLSLVLEPRNSKSQPTSPTTPNKPVVPLEWALGVMPKPDPTVINKHIRKLVESVFRNYDHDHDGYISQEDFESIAANFPFLDSFCVLDKDQDGLISKDEMMAYFLRAKSQLHCKMGPGFIHNFQEMTYLKPTFCEHCAGFLWGIIKQGYKCKDCGANCHKQCKDLLVLACRRFARAPSLSSGHGSLPGSPSLPPAQDEVFEFPGVTAGHRDLDSRAITLVTGSSRKISVRLQRATTSQATQTEPVWSEAGWGDSGSHTFPKMKSKFHDKAAKDKGFAKWENEKPRVHAGVDVVDRGTEFELDQDEGEETRQDGEDG

SEQ ID NO: 33684 - protein, 689 aa, Homo sapiens
MGSSGLGKAATLDELLCTCIEMFDDNGELDNSYLPRIVLLMHRWYLSSTELAEKLLCMYRNATGESCNEFRLKICYFMRYWILKFPAEFNLDLGLIRMTEEFREVASQLGYEKHVSLIDISSIPSYDWMRRVTQRKKVSKKGKACLLFDHLEPIELAEHLTFLEHKSFRRISFTDYQSYVIHGCLENNPTLERSIALFNGISKWVQLMVLSKPTPQQRAEVITKFINVAKKLLQLKNFNTLMAVVGGLSHSSISRLKETHSHLSSEVTKNWNEMTELVSSNGNYCNYRKAFADCDGFKIPILGVHLKDLIAVHVIFPDWTEENKVNIVKMHQLSVTLSELVSLQNASHHLEPNMDLINLLTLSLDLYHTEDDIYKLSLVLEPRNSKSPTSPTTPNKPVVPLEWALGVMPKPDPTVINKHIRKLVESVFRNYDHDHDGYISQEDFESIAANFPFLDSFCVLDKDQDGLISKDEMMAYFLRAKSQLHCKMGPGFIHNFQEMTYLKPTFCEHCAGFLWGIIKQGYKCKDCGANCHKQCKDLLVLACRRFARAPSLSSGHGSLPGSPSLPPAQDEVFEFPGVTAGHRDLDSRAITLVTGSSRKISVRLQRATTSQATQTEPVWSEAGWGDSGSHTFPKMKSKFHDKAAKDKGFAKWENEKPRVHAGVDVVDRGTEFELDQDEGEETRQDGEDG

SEQ ID NO: 33685 - protein, 532 aa, Homo sapiens
MELDLSPPHLSSSPEDLCPAPGTPPGTPRPPDTPLPEEVKRSQPLLIPTTGRKLREEERRATSLPSIPNPFPELCSPPSQSPILGGPSSARGLLPRDASRPHVVKVYSEDGACRSVEVAAGATARHVCEMLVQRAHALSDETWGLVECHPHLALERGLEDHESVVEVQAAWPVGGDSRFVFRKNFAKYELFKSSPHSLFPEKMVSSCLDAHTGISHEDLIQNFLNAGSFPEIQGFLQLRGSGRKLWKRFFCFLRRSGLYYSTKGTSKDPRHLQYVADVNESNVYVVTQGRKLYGMPTDFGFCVKPNKLRNGHKGLRIFCSEDEQSRTCWLAAFRLFKYGVQLYKNYQQAQSRHLHPSCLGSPPLRSASDNTLVAMDFSGHAGRVIENPREALSVALEEAQAWRKKTNHRLSLPMPASGTSLSAAIHRTQLWFHGRISREESQRLIGQQGLVDGLFLVRESQRNPQGFVLSLCHLQKVKHYLILPSEEEGRLYFSMDDGQTRFTDLLQLVEFHQLNRGILPCLLRHCCTRVAL

SEQ ID NO: 33686 - protein, 447 aa, Homo sapiens
MELDLSPPHLSSSPEDLCPAPGTPPGTPRPPDTPLPEEVKRSQPLLIPTTGRKLREEERRATSLPSIPNPFPELCSPPSQSPILGGPSSARGLLPRDASRPHVVKVYSEDGACRSVEVAAGATARHVCEMLVQRAHALSDETWGLVECHPHLALERGLEDHESVVEVQAAWPVGGDSRFVFRKNFAKYELFKSSPHSLFPEKMVSSCLDAHTGISHEDLIQNFLNAGSFPEIQGFLQLRGSGRKLWKRFFCFLRRSGLYYSTKGTSKDPRHLQYVADVNESNVYVVTQGRKLYGMPTDFGFCVKPNKLRNGHKGLRIFCSEDEQSRTCWLAAFRLFKYGVQLYKNYQQAQSRHLHPSCLGSPPLRSASDNTLVAMDFSGHAGRVIENPREALSVALEEAQAWRKKTNHRLSLPMPASGTSLSAACSWSGRVSGTPRALSSLCATCRK

SEQ ID NO: 33687 - protein, 555 aa, Homo sapiens
MGKWRPGQGHTTGSVKPLSCSDAMELDLSPPHLSSSPEDLCPAPGTPPGTPRPPDTPLPEEVKRSQPLLIPTTGRKLREEERRATSLPSIPNPFPELCSPPSQSPILGGPSSARGLLPRDASRPHVVKVYSEDGACRSVEVAAGATARHVCEMLVQRAHALSDETWGLVECHPHLALERGLEDHESVVEVQAAWPVGGDSRFVFRKNFAKYELFKSSPHSLFPEKMVSSCLDAHTGISHEDLIQNFLNAGSFPEIQGFLQLRGSGRKLWKRFFCFLRRSGLYYSTKGTSKDPRHLQYVADVNESNVYVVTQGRKLYGMPTDFGFCVKPNKLRNGHKGLRIFCSEDEQSRTCWLAAFRLFKYGVQLYKNYQQAQSRHLHPSCLGSPPLRSASDNTLVAMDFSGHAGRVIENPREALSVALEEAQAWRKKTNHRLSLPMPASGTSLSAAIHRTQLWFHGRISREESQRLIGQQGLVDGLFLVRESQRNPQGFVLSLCHLQKVKHYLILPSEEEGRLYFSMDDGQTRFTDLLQLVEFHQLNRGILPCLLRHCCTRVAL

SEQ ID NO: 33688 - protein, 498 aa, Homo sapiens
MELDLSPPHLSSSPEDLCPAPGTPPGTPRPPDTPLPEEVKRSQPLLIPILGGPSSARGLLPRDASRPHVVKVYSEDGACRSVEVAAGATARHVCEMLVQRAHALSDETWGLVECHPHLALERGLEDHESVVEVQAAWPVGGDSRFVFRKNFAKYELFKSSPHSLFPEKMVSSCLDAHTGISHEDLIQNFLNAGSFPEIQGFLQLRGSGRKLWKRFFCFLRRSGLYYSTKGTSKDPRHLQYVADVNESNVYVVTQGRKLYGMPTDFGFCVKPNKLRNGHKGLRIFCSEDEQSRTCWLAAFRLFKYGVQLYKNYQQAQSRHLHPSCLGSPPLRSASDNTLVAMDFSGHAGRVIENPREALSVALEEAQAWRKKTNHRLSLPMPASGTSLSAAIHRTQLWFHGRISREESQRLIGQQGLVDGLFLVRESQRNPQGFVLSLCHLQKVKHYLILPSEEEGRLYFSMDDGQTRFTDLLQLVEFHQLNRGILPCLLRHCCTRVAL

SEQ ID NO: 33689 - protein, 669 aa, Homo sapiens
MGTALVYHEDMTATRLLWDDPECEIERPERLTAALDRLRQRGLEQRCLRLSAREASEEELGLVHSPEYVSLVRETQVLGKEELQALSGQFDAIYFHPSTFHCARLAAGAGLQLVDAVLTGAVQNGLALVRPPGHHGQRAAANGFCVFNNVAIAAAHAKQKHGLHRILVVDWDVHHGQGIQYLFEDDPSVLYFSWHRYEHGRFWPFLRESDADAVGRGQGLGFTVNLPWNQVGMGNADYVAAFLHLLLPLAFEFDPELVLVSAGFDSAIGDPEGQMQATPECFAHLTQLLQVLAGGRVCAVLEGGYHLESLAESVCMTVQTLLGDPAPPLSGPMAPCQSALESIQSARAAQAPHWKSLQQQDVTAVPMSPSSHSPEGRPPPLLPGGPVCKAAASAPSSLLDQPCLCPAPSVRTAVALTTPDITLVLPPDVIQQEASALREETEAWARPHESLAREEALTALGKLLYLLDGMLDGQVNSGIAATPASAAAATLDVAVRRGLSHGAQRLLCVALGQLDRPPDLAHDGRSLWLNIRGKEAAALSMFHVSTPLPVMTGGFLSCILGLVLPLAYGFQPDLVLVALGPGHGLQGPHAALLAAMLRGLAGGRVLALLEENSTPQLAGILARVLNGEAPPSLGPSSVASPEDVQALMYLRGQLEPQWKMLQCHPHLVA

SEQ ID NO: 33690 - protein, 649 aa, Homo sapiens
MGTALVYHEDMTATRLLWDDPECEIERPERLTAALDRLRQRGLEQRCLRLSAREASEEELGLVHSPEYVSLVRETQVLGKEELQALSGQFDAIYFHPSTFHCARLAAGAGLQLVDAVLTGAVQNGLALVRPPGHHGQRAAANGFCVFNNVAIAAAHAKQKHGLHRILVVDWDVHHGQGIQYLFEDDPSVLYFSWHRYEHGRFWPFLRESDADAVGRGQGLGFTVNLPWNQVGMGNADYVAAFLHLLLPLAFEGQMQATPECFAHLTQLLQVLAGGRVCAVLEGGYHLESLAESVCMTVQTLLGDPAPPLSGPMAPCQSALESIQSARAAQAPHWKSLQQQDVTAVPMSPSSHSPEGRPPPLLPGGPVCKAAASAPSSLLDQPCLCPAPSVRTAVALTTPDITLVLPPDVIQQEASALREETEAWARPHESLAREEALTALGKLLYLLDGMLDGQVNSGIAATPASAAAATLDVAVRRGLSHGAQRLLCVALGQLDRPPDLAHDGRSLWLNIRGKEAAALSMFHVSTPLPVMTGGFLSCILGLVLPLAYGFQPDLVLVALGPGHGLQGPHAALLAAMLRGLAGGRVLALLEENSTPQLAGILARVLNGEAPPSLGPSSVASPEDVQALMYLRGQLEPQWKMLQCHPHLVA

SEQ ID NO: 33691 - protein, 658 aa, Homo sapiens
MGTALVYHEDMTATRLLWDDPECEIERPERLTAALDRLRQRGLEQRCLRLSAREASEEELGLVHSPEYVSLVRETQVLGKEELQALSGQFDAIYFHPSTFHCARLAAGAGLQLVDAVLTGAVQNGLALVRPPGHHGQRAAANGFCVFNNVAIAAAHAKQKHGLHRILVVDWDVHHGQGIQYLFEDDPSVLYFSWHRYEHGRFWPFLRESDADAVGRGQGLGFTVNLPWNQVGMGNADYVAAFLHLLLPLAFEFDPELVLVSAGFDSAIGDPEGQMQATPECFAHLTQLLQVLAGGRVCAVLEGGYHLESLAESVCMTVQTLLGDPAPPLSGPMAPCQSALESIQSARAAQAPHWKSLQQQDVTAVPMSPSSHSPEGRPPPLLPGGPVCKAAASAPSSLLDQPCLCPAPSVRTAVALTTPDITLVLPPDVIQQEASALREETEAWARPHESLAREEALTALGKLLYLLDGMLDGQVNSGIAATPASAAAATLDVAVRRGLSHGAQRLLCVALGQLDRPPDLAHDGRSLWLNIRGKEAAALSMFHVSTPLPVMTGGFLSCILGLVLPLAYGFQPDLVLVALGPGHGLQGPHAALLAAMLRGLAGGRVLALLEEVSWAGWRCCGVGRGKGPVTASVFAPGPELHTPASRDPGPGAEWRGTS

SEQ ID NO: 33692 - protein, 396 aa, Homo sapiens
MGTALVYHEDMTATRLLWDDPECEIERPERLTAALDRLRQRGLEQRCLRLSAREASEEELGLVHSPEYVSLVRETQVLGKEELQALSGQFDAIYFHPSTFHCARLAAGAGLQLVDAVLTGAVQNGLALVRPPGHHGQRAAANGFCVFNNVAIAAAHAKQKHGLHRILVVDWDVHHGQGIQYLFEDDPSVLYFSWHRYEHGRFWPFLRESDADAVGRGQGLGFTVNLPWNQVGMGNADYVAAFLHLLLPLAFEGGYHLESLAESVCMTVQTLLGDPAPPLSGPMAPCQSALESIQSARAAQAPHWKSLQQQDVTAVPMSPSSHSPEGRPPPLLPGGPVCKAAASAPSSLLDQPCLCPAPSVRTAVALTTPDITLVLPPDVIQQEASALREETEAWAR

SEQ ID NO: 33693 - protein, 163 aa, Homo sapiens
MAAAVVLAAGLRAARRAVAATGVRGGQVRGAAGVTDGNEVAKAQQATPGGAAPTIFSRILDKSLPADILYEDQQCLVFRDVAPQAPVHFLVIPKKPIPRISQAEEEDQQLLGHLLLVAKQTAKAEGLGDGYRLVINDGKLGAQSVYHLHIHVLGGRQLQWPPG

SEQ ID NO: 33694 - protein, 251 aa, Homo sapiens
MAHRLQIRLLTWDVKDTLLRLRHPLGEAYATKARAHGLEVEPSALEQGFRQAYRAQSHSFPNYGLSHGLTSRQWWLDVVLQTFHLAGVQDAQAVAPIAEQLYKDFSHPCTWQVLDGAEDTLRECRTRGLRLAVISNFDRRLEGILGGLGLREHFDFVLTSEAAGWPKPDPRIFQEALRLAHMEPVVAAHVGDNYLCDYQGPRAVGMHSFLVVGPQALDPVVRDSVPKEHILPSLAHLLPALDCLEGSTPGL

SEQ ID NO: 33695 - protein, 377 aa, Homo sapiens
MEEPEEPADSGQSLVPVYIYSPEYVSMCDSLAKIPKRASMVHSLIEAYALHKQMRIVKPKVASMEEMATFHTDAYLQHLQKVSQEGDDDHPDSIEYGLGYDCPATEGIFDYAAAIGGATITAAQCLIDGMCKVAINWSGGWHHAKKDEASGFCYLNDAVLGILRLRRKFERILYVDLDLHHGDGVEDAFSFTSKVMTVSLHKFSPGFFPGTGDVSDVGLGKGRYYSVNVPIQDGIQDEKYYQICESVLKEVYQAFNPKAVVLQLGADTIAGDPMCSFNMTPVGIGKCLKYILQWQLATLILGGGGYNLANTARCWTYLTGVILGKTLSSEIPDHEFFTAYGPDYVLEITPSCRPDRNEPHRIQQILNYIKGNLKHVV

SEQ ID NO: 33696 - protein, 286 aa, Homo sapiens
MEEPEEPADSGQSLVPVYIYSPEYVSMCDSLAKIPKRASMVHSLIEAYALHKQMRDEASGFCYLNDAVLGILRLRRKFERILYVDLDLHHGDGVEDAFSFTSKVMTVSLHKFSPGFFPGTGDVSDVGLGKGRYYSVNVPIQDGIQDEKYYQICESVLKEVYQAFNPKAVVLQLGADTIAGDPMCSFNMTPVGIGKCLKYILQWQLATLILGGGGYNLANTARCWTYLTGVILGKTLSSEIPDHEFFTAYGPDYVLEITPSCRPDRNEPHRIQQILNYIKGNLKHVV

SEQ ID NO: 33697 - protein, 256 aa, Homo sapiens
MEEPEEPADSGQSLVPVYIYSPEYVSMCDSLAKIPKRASMVHSLIEAYALHKQMRIVKPKVASMEEMATFHTDAYLQHLQKVSQEGDDDHPDSIEYGLGYDCPATEGIFDYAAAIGGATITAAQCLIDGMCKVAINWSGGWHHAKKDEASGFCYLNDAVLGILRLRRKFERILYVDLDLHHGDGVEDAFSFTSKVMTVSLHKFSPGFFPGTGDVSDVGLGKGRYYSVNVPIQDGIQDEKYYQICERYEPPAPNPGL

SEQ ID NO: 33698 - protein, 139 aa, Homo sapiens
MEEPEEPADSGQSLVPVYIYSPEYVSMCDSLAKIPKRASMVHSLIEAYALHKQMRDEASGFCYLNDAVLGILRLRRKFERILYVDLDLHHGDGTGDVSDVGLGKGRYYSVNVPIQDGIQDEKYYQICERYEPPAPNPGL

SEQ ID NO: 33699 - protein, 158 aa, Homo sapiens
MEEPEEPADSGQSLVPVYIYSPEYVSMCDSLAKIPKRASMVHSLIEAYALHKQMRIVKPKVASMEEMATFHTDAYLQHLQKVSQEGDDDHPDSIEYGLGYDCPATEGIFDYAAAIGGATITAAQCLIDGMCKVAINWSGGWHHAKKETCVYVALYKAF

SEQ ID NO: 33700 - protein, 146 aa, Homo sapiens
MEEPEEPADSGQSLVPVYIYSPEYVSMCDSLAKIPKRASMVHSLIEAYALHKQMRIVKPKVASMEEMATFHTDAYLQHLQKVSQEGDDDHPDSIEYGLGYDCPATEGIFDYAAAIGGATITAAQCLIDGMCKVAINWSGGWHHAKK

SEQ ID NO: 33701 - protein, 517 aa, Homo sapiens
MPPPGKVPRKENLWLQCEWGSCSFVCSTMEKFFEHVTQHLQQHLHGSGEEEEEEEEDDPLEEEFSCLWQECGFCSLDSSADLIRHVYFHCYHTKLKQWGLQALQSQADLGPCILDFQSRNVIPDIPDHFLCLWEHCENSFDNPEWFYRHVEAHSLCCEYEAVGKDNPVVLCGWKGCTCTFKDRSKLREHLRSHTQEKVVACPTCGGMFANNTKFLDHIRRQTSLDQQHFQCSHCSKRFATERLLRDHMRNHVNHYKCPLCDMTCPLPSSLRNHMRFRHSEDRPFKCDCCDYSCKNLIDLQKHLDTHSEEPAYRCDFENCTFSARSLCSIKSHYRKVHEGDSEPRYKCHVCDKCFTRGNNLTVHLRKKHQFKWPSGHPRFRYKEHEDGYMRLQLVRYESVELTQQLLRQPQEGSGLGTSLNESSLQGIILETVPGEPGRKEEEEEGKGSEGTALSASQDNPSSVIHVVNQTNAQGQQEIVYYVLSEAPGEPPPAPEPPSGGIMEKLQGIAEEPEIQMV

SEQ ID NO: 33702 - protein, 419 aa, Homo sapiens
MPPPGKVPRKENLWLQCEWGSCSFVCSTMEKFFEHVTQHLQQHLHGSGEEEEEEEEDDPLEEEFSCLWQECGFCSLDSSADLIRHVYFHCYHTKLKQWGLQALQSQADLGPCILDFQSRNVIPDIPDHFLCLWEHCENSFDNPEWFYRHVEAHSLCCEYEAVGKDNPVVLCGWKGCTCTFKDRSKLREHLRSHTQEKVVACPTCGGMFANNTKFLDHIRRQTSLDQQHFQCSHCSKRFATERLLRDHMRNHVNHYKCPLCDMTCPLPSSLRNHMRFRHSEDRPFKCDCCDYSCKNLIDLQKHLDTHSEEPAYRCDFENCTFSARSLCSIKSHYRKVHEGDSEPRYKCHVCDKCFTRGNNLTVHLRKKHQFKWPSGHPRFRLGHFCIPLPGFAALYAPTSPGTRNMKMAICGCSWFATRV

SEQ ID NO: 33703 - protein, 2610 aa, Homo sapiens
MADVDPDTLLEWLQMGQGDERDMQLIALEQLCMLLLMSDNVDRCFETCPPRTFLPALCKIFLDESAPDNVLEVTARAITYYLDVSAECTRRIVGVDGAIKALCNRLVVVELNNRTSRDLAEQCVKVLELICTRESGAVFEAGGLNCVLTFIRDSGHLVHKDTLHSAMAVVSRLCGKMEPQDSSLEICVESLSSLLKHEDHQVSDGALRCFASLADRFTRRGVDPAPLAKHGLTEELLSRMAAAGGTVSGPSSACKPGRSTTGAPSTTADSKLSNQVSTIVSLLSTLCRGSPVVTHDLLRSELPDSIESALQGDERCVLDTMRLVDLLLVLLFEGRKALPKSSAGSTGRIPGLRRLDSSGERSHRQLIDCIRSKDTDALIDAIDTGAFEVNFMDDVGQTLLNWASAFGTQEMVEFLCERGADVNRGQRSSSLHYAACFGRPQVAKTLLRHGANPDLRDEDGKTPLDKARERGHSEVVAILQSPGDWMCPVNKGDDKKKKDTNKDEEECNEPKGDPEMAPIYLKRLLPVFAQTFQQTMLPSIRKASLALIRKMIHFCSEALLKEVCDSDVGHNLPTILVEITATVLDQEDDDDGHLLALQIIRDLVDKGGDIFLDQLARLGVISKVSTLAGPSSDDENEEESKPEKEDEPQEDAKELQQGKPYHWRDWSIIRGRDCLYIWSDAAALELSNGSNGWFRFILDGKLATMYSSGSPEGGSDSSESRSEFLEKLQRARGQVKPSTSSQPILSAPGPTKLTVGNWSLTCLKEGEIAIHNSDGQQATILKEDLPGFVFESNRGTKHSFTAETSLGSEFVTGWTGKRGRKLKSKLEKTKQKVRTMARDLYDDHFKAVESMPRGVVVTLRNIATQLESSWELHTNRQCIESENTWRDLMKTALENLIVLLKDENTISPYEMCSSGLVQALLTVLNNSMDLDMKQDCSQLVERINVFKTAFSENEDDESRPAVALIRKLIAVLESIERLPLHLYDTPGSTYNLQILTRRLRFRLERAPGETALIDRTGRMLKMEPLATVESLEQYLLKMVAKQWYDFDRSSFVFVRKLREGQNFIFRHQHDFDENGIIYWIGTNAKTAYEWVNPAAYGLVVVTSSEGRNLPYGRLEDILSRDNSALNCHSNDDKNAWFAIDLGLWVIPSAYTLRHARGYGRSALRNWVFQVSKDGQNWTSLYTHVDDCSLNEPGSTATWPLDPPKDEKQGWRHVRIKQMGKNASGQTHYLSLSGFELYGTVNGVCEDQLGKAAKEAEANLRRQRRLVRSQVLKYMVPGARVIRGLDWKWRDQDGSPQGEGTVTGELHNGWIDVTWDAGGSNSYRMGAEGKFDLKLAPGYDPDTVASPKPVSSTVSGTTQSWSSLVKNNCPDKTSAAAGSSSRKGSSSSVCSVASSSDISLGSTKTERRSEIVMEHSIVSGADVHEPIVVLSSAENVPQTEVGSSSSASTSTLTAETGSENAERKLGPDSSVRTPGESSAISMGIVSVSSPDVSSVSELTNKEAASQRPLSSSASNRLSVSSLLAAGAPMSSSASVPNLSSRETSSLESFVRRVANIARTNATNNMNLSRSSSDNNTNTLGRNVMSTATSPLMGAQSFPNLTTPGTTSTVTMSTSSVTSSSNVATATTVLSVGQSLSNTLTTSLTSTSSESDTGQEAEYSLYDFLDSCRASTLLAELDDDEDLPEPDEEDDENEDDNQEDQEYEEVMILRRPSLQRRAGSRSDVTHHAVTSQLPQVPAGAGSRPIGEQEEEEYETKGGRRRTWDDDYVLKRQFSALVPAFDPRPGRTNVQQTTDLEIPPPGTPHSELLEEVECTPSPRLALTLKVTGLGTTREVELPLTNFRSTIFYYVQKLLQLSCNGNVKSDKLRRIWEPTYTIMYREMKDSDKEKENGKMGCWSIEHVEQYLGTDELPKNDLITYLQKNADAAFLRHWKLTGTNKSIRKNRNCSQLIAAYKDFCEHGTKSGLNQGAISTLQSSDILNLTKEQPQAKAGNGQNSCGVEDVLQLLRILYIVASDPYSRISQEDGDEQLQFTFPPDEFTSKKITTKILQQIEEPLALASGALPDWCEQLTSKCPFLIPFETRQLYFTCTAFGASRAIVWLQNRREATVERTRTTSSVRRDDPGEFRVGRLKHERVKVPRGESLMEWAENVMQIHADRKSVLEVEFLGEEGTGLGPTLEFYALVAAEFQRTDLGAWLCDDNFPDDESRHVDLGGGLKPPGYYVQRSCGLFTAPFPQDSDELERITKLFHFLGIFLAKCIQDNRLVDLPISKPFFKLMCMGDIKSNMSKLIYESRGDRDLHCTESQSEASTEEGHDSLSVGSFEEDSKSEFILDPPKPKPPAWFNGILTWEDFELVNPHRARFLKEIKDLAIKRRQILSNKGLSEDEKNTKLQELVLKNPSGSGPPLSIEDLGLNFQFCPSSRIYGFTAVDLKPSGEDEMITMDNAEEYVDLMFDFCMHTGIQKQMEAFRDGFNKVFPMEKLSSFSHEEVQMILCGNQSPSWAAEDIINYTEPKLGYTRDSPGFLRFVRVLCGMSSDERKAFLQFTTGCSTLPPGGLANLHPRLTVVRKVDATDASYPSVNTCVHYLKLPEYSSEEIMRERLLAATMEKGFHLN

SEQ ID NO: 33704 - protein, 73 aa, Homo sapiens
MSAETASGPTEDQVEILEYNFNKVDKHPDSTTLCLIAAEAGLSEEETQKWFKQRLAKWRRSEGLPSECRSVTD

SEQ ID NO: 33705 - protein, 94 aa, Homo sapiens
MSAETASGPTEDQVEILEYNFNKVDKHPDSTTLCLIAAEAGLSEEETQGSDLISRSKIWHPESSPQREGYPHDSLPCLAFDYFSLLPPQCKEMV

SEQ ID NO: 33706 - protein, 91 aa, Homo sapiens
MLIFLGCYRRRLEERAGTMSAETASGPTEDQVEILEYNFNKVDKHPDSTTLCLIAAEAGLSEEETQKWFKQRLAKWRRSEGLPSECRSVTD

SEQ ID NO: 33707 - protein, 112 aa, Homo sapiens
MLIFLGCYRRRLEERAGTMSAETASGPTEDQVEILEYNFNKVDKHPDSTTLCLIAAEAGLSEEETQGSDLISRSKIWHPESSPQREGYPHDSLPCLAFDYFSLLPPQCKEMV

SEQ ID NO: 33708 - protein, 242 aa, Homo sapiens
MAETEALSKLREDFRMQNKSVFILGASGETGRVLLKEILEQGLFSKVTLIGRRKLTFDEEAYKNVNQEVVDFEKLDDYASAFQGHDVGFCCLGTTRGKAGAEGFVRVDRDYVLKSAELAKAGGCKHFNLLSSKGADKSSNFLYLQVKGEVEAKVEELKFDRYSVFRPGVLLCDRQESRPGEWLVRKFFGSLPDSWASGHSVPVVTVVRAMLNNVVRPRDKQMELLENKAIHDLGKAHGSLKP

SEQ ID NO: 33709 - protein, 133 aa, Homo sapiens
MAETEALSKLREDFRMQNKSVFILGASGETGRVLLKEILEQGLFSKVTLIGRRKLTFDEEAYKNVNQEVVDFEKLDDYASAFQGHDVGFCCLGTTRGKAGAVRKAYALFPFCWPVISRILFLLTLFLCACCNA

SEQ ID NO: 33710 - protein, 276 aa, Homo sapiens
MAGPAALSAAAAAALAAALLLLRREDPGPGAGPSMAETEALSKLREDFRMQNKSVFILGASGETGRVLLKEILEQGLFSKVTLIGRRKLTFDEEAYKNVNQEVVDFEKLDDYASAFQGHDVGFCCLGTTRGKAGAEGFVRVDRDYVLKSAELAKAGGCKHFNLLSSKGADKSSNFLYLQVKGEVEAKVEELKFDRYSVFRPGVLLCDRQESRPGEWLVRKFFGSLPDSWASGHSVPVVTVVRAMLNNVVRPRDKQMELLENKAIHDLGKAHGSLKP

SEQ ID NO: 33711 - protein, 467 aa, Homo sapiens
MAAAARARVAYLLRQLQRAACQCPTHSHTYSQAPGLSPSGKTTDYAFEMAVSNIRYGAAVTKEVGMDLKNMGAKNVCLMTDKNLSKLPPVQVAMDSLVKNGIPFTVYDNVRVEPTDSSFMEAIEFAQKGAFDAYVAVGGGSTMDTCKAANLYASSPHSDFLDYVSAPIGKGKPVSVPLKPLIAVPTTSGTGSETTGVAIFDYEHLKVKIGITSRAIKPTLGLIDPLHTLHMPARVVANSGFDVLCHALESYTTLPYHLRSPCPSNPITRPAYQGSNPISDIWAIHALRIVAKYLKRAVRNPDDLEARSHMHLASAFAGIGFGNAGVHLCHGMSYPISGLVKMYKAKDYNVDHPLVPHGLSVVLTSPAVFTFTAQMFPERHLEMAEILGADTRTARIQDAGLVLADTLRKFLFDLDVDDGLAAVGYSKADIPALVKGTLPQERVTKLAPCPQSEEDLAALFEASMKLY

SEQ ID NO: 33712 - protein, 419 aa, Homo sapiens
MAVSNIRYGAAVTKEVGMDLKNMGAKNVCLMTDKNLSKLPPVQVAMDSLVKNGIPFTVYDNVRVEPTDSSFMEAIEFAQKGAFDAYVAVGGGSTMDTCKAANLYASSPHSDFLDYVSAPIGKGKPVSVPLKPLIAVPTTSGTGSETTGVAIFDYEHLKVKIGITSRAIKPTLGLIDPLHTLHMPARVVANSGFDVLCHALESYTTLPYHLRSPCPSNPITRPAYQGSNPISDIWAIHALRIVAKYLKRAVRNPDDLEARSHMHLASAFAGIGFGNAGVHLCHGMSYPISGLVKMYKAKDYNVDHPLVPHGLSVVLTSPAVFTFTAQMFPERHLEMAEILGADTRTARIQDAGLVLADTLRKFLFDLDVDDGLAAVGYSKADIPALVKGTLPQERVTKLAPCPQSEEDLAALFEASMKLY

SEQ ID NO: 33713 - protein, 303 aa, Homo sapiens
MAAAARARVAYLLRQLQRAACQCPTHSHTYSQAPGLSPSGKTTDYAFEMAVSNIRYGAAVTKEVGMDLKNMGAKNVCLMTDKNLSKLPPVQVAMDSLVKNGIPFTVYDNVRVEPTDSSFMEAIEFAQKGAFDAYVAVGGGSTMDTCKAANLYASSPHSDFLDYVSAPIGKGKPVSVPLKPLIAVPTTSGTGSETTGVAIFDYEHLKVKIGITSRAIKPTLGLIDPLHTLHMPARVVANSGFDVLCHALESYTTLPYHLRSPCPSNPITRPAYQGSNPISDIWAIHALRIVAKYLKRAVNSTDK

SEQ ID NO: 33714 - protein, 255 aa, Homo sapiens
MAVSNIRYGAAVTKEVGMDLKNMGAKNVCLMTDKNLSKLPPVQVAMDSLVKNGIPFTVYDNVRVEPTDSSFMEAIEFAQKGAFDAYVAVGGGSTMDTCKAANLYASSPHSDFLDYVSAPIGKGKPVSVPLKPLIAVPTTSGTGSETTGVAIFDYEHLKVKIGITSRAIKPTLGLIDPLHTLHMPARVVANSGFDVLCHALESYTTLPYHLRSPCPSNPITRPAYQGSNPISDIWAIHALRIVAKYLKRAVNSTDK

SEQ ID NO: 33715 - protein, 423 aa, Homo sapiens
MEDKRSLSMARCEERNSRGQDHGLERVPFPPQLQSETYLHPADPSPAWDDPGSTGSPNLRLLTEEIAFQPLAEEASFRRPHPDGDVPPQGEDNLLSLPFPQKLWRLVSSNQFSSIWWDDSGACRVINQKLFEKEILKRDVAHKVFATTSIKSFFRQLNLYGFRKRRQCTFRTFTRIFSAKRLVSILNKLEFYCHPYFQRDSPHLLVRMKRRVGVKSAPRHQEEDKPEAAGSCLAPADTEQQDHTSPNENDQVTPQHREPAGPNTQIRSGSAPPATPVMVPDSAVASDNSPVTQPAGEWSEGSQAHVTPVAAVPGPAALPFLYVPGSPTQMNSYGPVVALPTASRSTLAMDTTGLPAPGMLPFCHLWVPVTLVAAGAAQPAASMVMFPHLPALHHHCPHSHRTSQYMPASDGPQAYPDYADQST

SEQ ID NO: 33716 - protein, 359 aa, Homo sapiens
MSDEGSRGSRLPLALPPASQGCSSGGGGGGSSAGGSGNSRPPRNLQGLLQMAITAGSEEPDPPPEPMSEERRQWLQEAMSAAFRGQREEVEQMKSCLRVLSQPMPPTAGEAEQAADQQEREGALELLADLCENMDNAADFCQLSGMHLLVGRYLEAGAAGLRWRAAQLIGTCSQNVAAIQEQVLGLGALRKLLRLLDRDACDTVRVKALFAISCLVREQEAGLLQFLRLDGFSVLMRAMQQQVQKLKVKSAFLLQNLLVGHPEHKGTLCSMGMVQQLVALVRTEHSPFHEHVLGALCSLVTDFPQGVRECREPELGLEELLRHRCQLLQQHEEYQEELEFCEKLLQTCFSSPADDSMDR

SEQ ID NO: 33717 - protein, 256 aa, Homo sapiens
MSDEGSRGSRLPLALPPASQGCSSGGGGGGSSAGGSGNSRPPRNLQGLLQMAITAGSEEPDPPPEPMSEERRQWLQEAMSAAFRGQREEVEQMKSCLRVLSQPMPPTAGEAEQAADQQEREGALELLADLCENMDNAADFCQLSGMHLLVGRYLEAGAAGLRWRAAQLIGTCSQNVAAIQEQVLGLGALRKLLRLLDRDACDTVRECREPELGLEELLRHRCQLLQQHEEYQEELEFCEKLLQTCFSSPADDSMDR

SEQ ID NO: 33718 - protein, 402 aa, Homo sapiens
MGGRRAPLKRRLLSRPSRIDPSGRQSCFSGDHLLPLTHSSLLHKRPMSDEGSRGSRLPLALPPASQGCSSGGGSSAGGSGNSRPPRNLQGLLQMAITAGSEEPDPPPEPMSEERRQWLQEAMSAAFRGQREEVEQMKSCLRVLSQPMPPTAGEAEQAADQQEREGALELLADLCENMDNAADFCQLSGMHLLVGRYLEAGAAGLRWRAAQLIGTCSQNVAAIQEQVLGLGALRKLLRLLDRDACDTVRVKALFAISCLVREQEAGLLQFLRLDGFSVLMRAMQQQVQKLKVKSAFLLQNLLVGHPEHKGTLCSMGMVQQLVALVRTEHSPFHEHVLGALCSLVTDFPQGVRECREPELGLEELLRHRCQLLQQHEEYQEELEFCEKLLQTCFSSPADDSMDR

SEQ ID NO: 33719 - protein, 714 aa, Homo sapiens
MPAAAGDGLLGEPAAPGGGGGAEDAARPAAACEGSFLPAWVSGVPRERLRDFQHHKRVGNYLIGSRKLGEGSFAKVREGLHVLTGEKVAIKVIDKKRAKKDTYVTKNLRREGQIQQMIRHPNITQLLDILETENSYYLVMELCPGGNLMHKIYEKKRLEESEARRYIRQLISAVEHLHRAGVVHRDLKIENLLLDEDNNIKLIDFGLSNCAGILGYSDPFSTQCGSPAYAAPELLARKKYGPKIDVWSIGVNMYAMLTGTLPFTVEPFSLRALYQKMVDKEMNPLPTQLSTGAISFLRSLLEPDPVKRPNIQQALANRWLNENYTGKVPCNVTYPNRISLEDLSPSVVLHMTEKLGYKNSDVINTVLSNRACHILAIYFLLNKKLERYLSGKSDIQDSLCYKTRLYQIEKYRAPKESYEASLDTWTRDLEFHAVQDKKPKEQEKRGDFLHRPFSKKLDKNLPSHKQPSGSLMTQIQNTKALLKDRKASKSSFPDKDSFGCRNIFRKTSDSNCVASSSMEFIPVPPPRTPRIVKKPEPHQPGPGSTGIPHKEDPLMLDMVRSFESVDRDDHVEVLSPSHHYRILNSPVSLARRNSSERTLSPGLPSGSMSPLHTPLHPTLVSFAHEDKNSPPKEEGLCCPPPVPSNGPMQPLGSPNCVKSRGRFPMMGIGQMLRKRHQSLQPSADRPLEASLPPLQPLAPVNLAFDMADGVKTQC

SEQ ID NO: 33720 - protein, 202 aa, Homo sapiens
MKVLAAGVVPLLLVLHWKHGAGSPLPITPVNATCAIRHPCHNNLMNQIRSQLAQLNGSANALFILYYTAQGEPFPNNLDKLCGPNVTDFPPFHANGTEKAKLVELYRIVVYLGTSLGNITRDQKILNPSALSLHSKLNATADILRGLLSNVLCRLCSKYHVGHVDVTYGPDTSGKDVFQKKKLGCQLLGKYKQIIAVLAQAF

SEQ ID NO: 33721 - protein, 88 aa, Homo sapiens
MKVLAAVHSPGGAVPQQPGQAMWPQRDGLPALPRQRHGEGQAGGAVPHSRVPWHLPGQHHPGPEDPQPQCPQPPQQAQRHRRHPARPP

SEQ ID NO: 33722 - protein, 530 aa, Homo sapiens
MEGSSSYEVPSVAAADLEEGAGQTRSLPATPSKDVHKGVGGIIFSSSPILDLSESGLCRLEEVFRIPSLQQLHLQRNALCVIPQDFFQLLPNLTWLDLRYNRIKALPSGIGAHQHLKTLLLERNPIKMLPVELGSVTTLKALNLRHCPLEFPPQLVVQKGLVAIQRFLRMWAVEHSLPRNPTSQEAPPVREMTLRDLPSPGLELSGDHASNQGAVNAQDPEGAVMKEKASFLPPVEKPDLSELRKSADSSENWPSEEEIRRFWKLRQEIVEHVKADVLGDQLLTRELPPNLKAALNIEKELPKPRHVFRRKTASSRSILPDLLSPYQMAIRAKRLEESRAAALRELQEKQALMEQQRREKRALQEWRERAQRMRKRKEELSKLLPPRRSMVASKIPSATDLIDNRKVPLNPPGKMKPSKEKSPQASKEMSALQERNLEEKIKQHVLQMREQRRFHGQAPLEEMRKAAEDLEIATELQDEVLKLKLGLTLNKDRRRAALTGNLSLGLPAAQPQNTFFNTKYGESGNVRRYQ

SEQ ID NO: 33723 - protein, 468 aa, Homo sapiens
MDINTYNNQLHLQRNALCVIPQDFFQLLPNLTWLDLRYNRIKALPSGIGAHQHLKTLLLERNPIKMLPVELGSVTTLKALNLRHCPLEFPPQLVVQKGLVAIQRFLRMWAVEHSLPRNPTSQEAPPVREMTLRDLPSPGLELSGDHASNQGAVNAQDPEGAVMKEKASFLPPVEKPDLSELRKSADSSENWPSEEEIRRFWKLRQEIVEHVKADVLGDQLLTRELPPNLKAALNIEKELPKPRHVFRRKTASSRSILPDLLSPYQMAIRAKRLEESRAAALRELQEKQALMEQQRREKRALQEWRERAQRMRKRKEELSKLLPPRRSMVASKIPSATDLIDNRKVPLNPPGKMKPSKEKSPQASKEMSALQERNLEEKIKQHVLQMREQRRFHGQAPLEEMRKAAEDLEIATELQDEVLKLKLGLTLNKDRRRAALTGNLSLGLPAAQPQNTFFNTKYGESGNVRRYQ

SEQ ID NO: 33724 - protein, 383 aa, Homo sapiens
MEGSSSYEVPSVAAADLEEGAGQTRSLPATPSKDVHKGVGGIIFSSSPILDLSESGLCRLEEVFRIPSLQQLHLQRNALCVIPQDFFQLLPNLTWLDLRYNRIKALPSGIGAHQHLKTLLLERNPIKMLPVELGSVTTLKALNLRHCPLEFPPQLVVQKGLVAIQRFLRMWAVEHSLPRNPTSQEAPPVREMTLRDLPSPGLELSGDHASNQGAVNAQDPEGAVMKEKASFLPPVEKPDLSELRKSADSSENWPSEEEIRRFWKLRQEIVEHVKADVLGDQLLTRELPPNLKAALNIEKELPKPRHVFRTRVPRKQALQRLHERKTRIMGVVGRAPTHMGEGRQPPPGASYPTSCHRTKWRSEQKDWKRAERRRSESSRRSRL

SEQ ID NO: 33725 - protein, 383 aa, Homo sapiens
MEGSSSYEVPSVAAADLEEGAGQTRSLPATPSKDVHKGVGGIIFSSSPILDLSESGLCRLEEVFRIPSLQQLHLQRNALCVIPQDFFQLLPNLTWLDLRYNRIKALPSGIGAHQHLKTLLLERNPIKMLPVELGSVTTLKALNLRHCPLEFPPQLVVQKGLVAIQRFLRMWAVEHSLPRNPTSQEAPPVREMTLRDLPSPGLELSGDHASNQGAVNAQDPEGAVMKEKASFLPPVEKPDLSELRKSADSSENWPSEEEIRRFWKLRQEIVEHVKADVLGDQLLTRELPPNLKAALNIEKELPKPRHVFRRKTASSRSILPDLLSPYQMAIRAKRLEESRAAALRELQEKQALMEQQRRPFLLIFPRVFQALTRSSGRFILVLL

SEQ ID NO: 33726 - protein, 840 aa, Homo sapiens
MSVVGIDLGFQSCYVAVARAGGIETIANEYSDRCTPACISFGPKNRSIGAAAKSQVISNAKNTVQGFKRFHGRAFSDPFVEAEKSNLAYDIVQLPTGLTGIKVTYMEEERNFTTEQVTAMLLSKLKETAESVLKKPVVDCVVSVPCFYTDAERRSVMDATQIAGLNCLRLMNETTAVALAYGIYKQDLPALEEKPRNVVFVDMGHSAYQVSVCAFNRGKLKVLATAFDTTLGGRKFDEVLVNHFCEEFGKKYKLDIKSKIRALLRLSQECEKLKKLMSANASDLPLSIECFMNDVDVSGTMNRGKFLEMCNDLLARVEPPLRSVLEQTKLKKEDIYAVEIVGGATRIPAVKEKISKFFGKELSTTLNADEAVTRGCALQCAILSPAFKVREFSITDVVPYPISLRWNSPAEEGSSDCEVFSKNHAAPFSKVLTFYRKEPFTLEAYYSSPQDLPYPDPAIAQFSVQKVTPQSDGSSSKVKVKVRVNVHGIFSVSSASLVEVHKSEENEEPMETDQNAKEEEKMQVDQEEPHVEEQQQQTPAENKAESEEMETSQAGSKDKKMDQPPQAKKAKVKTSTVDLPIENQLLWQIDREMLNLYIENEGKMIMQDKLEKERNDAKNAVEEYVYEMRDKLSGEYEKFVSEDDRNSFTLKLEDTENWLYEDGEDQPKQVYVDKLAELKNLGQPIKIRFQESEERPKLFEELGKQIQQYMKIISSFKNKEDQYDHLDAADMTKVEKSTNEAMEWMNNKLNLQNKQSLTMDPVVKSKEIEAKIKELTSTCSPIISKPKPKVEPPKEEQKNAEQNGPVDGQGDNPGPQAAEQGTDTAVPSDSDKKLPEMDID

SEQ ID NO: 33727 - protein, 148 aa, Homo sapiens
MSVVGIDLGFQSCYVAVARAGGIETIANEYSDRCTPACISFGPKNRSIGAAAKSQVISNAKNTVQGFKRFHGRAFSDPFVEAEKSNLAYDIVQLPTGLTGIKVTYMEEEQNGPVDGQGDNPGPQAAEQGTDTAVPSDSDKKLPEMDID

SEQ ID NO: 33728 - protein, 169 aa, Homo sapiens
METGPSEEPSGRKESQEMCPPGLLVFAGSSEQDANLAKQFWISASMYPPSESQLVLRRDSSQRLPVARPRRSRGSENSHSSQSFHLASNKNRDIFAEALKIQESEEKVKYLQKAKTREEILQLLRKQREERISKELISLPYKPKAKEHKAKKVVSESDKEDQEEVKTLD

SEQ ID NO: 33729 - protein, 178 aa, Homo sapiens
METGPSEEPSGRKESQEMCPPGLLVFAGSSEQDANLAKQFWISASMYPPSESQLVLRRDSSQRLPVARPRRSRGSENSHSSQSFHLASNKNRDIFAEALKIQESEEKVKYLQKTRSHSVTQNEVQWHDHGSLQPQLSRIQAKTREEILQLLRKQREERISKELISLPYKPKAKEHKAE

SEQ ID NO: 33730 - protein, 196 aa, Homo sapiens
METGPSEEPSGRKESQEMCPPGLLVFAGSSEQDANLAKQFWISASMYPPSESQLVLRRDSSQRLPVARPRRSRGSENSHSSQSFHLASNKNRDIFAEALKIQESEEKVKYLQKTRSHSVTQNEVQWHDHGSLQPQLSRIQAKTREEILQLLRKQREERISKELISLPYKPKAKEHKAKKVVSESDKEDQEEVKTLD

SEQ ID NO: 33731 - protein, 643 aa, Homo sapiens
MQAPRELAVGIDLGTTYSCVGVFQQGRVEILANDQGNRTTPSYVAFTDTERLVGDAAKSQAALNPHNTVFDAKRLIGRKFADTTVQSDMKHWPFRVVSEGGKPKVRVCYRGEDKTFYPEEISSMVLSKMKETAEAYLGQPVKHAVITVPAYFNDSQRQATKDAGAIAGLNVLRIINEPTAAAIAYGLDRRGAGERNVLIFDLGGGTFDVSVLSIDAGVFEVKATAGDTHLGGEDFDNRLVNHFMEEFRRKHGKDLSGNKRALRRLRTACERAKRTLSSSTQATLEIDSLFEGVDFYTSITRARFEELCSDLFRSTLEPVEKALRDAKLDKAQIHDVVLVGGSTRIPKVQKLLQDFFNGKELNKSINPDEAVAYGAAVQAAVLMGDKCEKVQDLLLLDVAPLSLGLETAGGVMTTLIQRNATIPTKQTQTFTTYSDNQPGVFIQVYEGERAMTKDNNLLGRFELSGIPPAPRGVPQIEVTFDIDANGILSVTATDRSTGKANKITITNDKGRLSKEEVERMVHEAEQYKAEDEAQRDRVAAKNSLEAHVFHVKGSLQEESLRDKIPEEDRRKMQDKCREVLAWLEHNQLAEKEEYEHQKRELEQICRPIFSRLYGGPGVPGGSSCGTQARQGDPSTGPIIEEVD

SEQ ID NO: 33732 - protein, 138 aa, Homo sapiens
MILQQPLQRGPQGGAQRLPRAALGVTWGLDASSPLRGAVPMSTKRRLEEEQEPLRKQFLSEENMATHFSQLSLHNDHPYCSPPMTFSPALPPLRSPCSELLLWRYPGSLIPEALRLLRLGDTPSPPYPATPAGDIMEL

SEQ ID NO: 33733 - protein, 119 aa, Homo sapiens
MILQQPLQRGPQGGAQRLPRAALGVTWGLDAREPLRKQFLSEENMATHFSQLSLHNDHPYCSPPMTFSPALPPLRSPCSELLLWRYPGSLIPEALRLLRLGDTPSPPYPATPAGDIMEL

SEQ ID NO: 33734 - protein, 347 aa, Homo sapiens
MENLMTSSTLPPLFADEDGSKESNDLATTGLNHPEVPYSSGATSSTNNPEFVEDLSQGQLLQSESSNAAEGNEQRHEDEQRSKRGGWSKGRKRKKPLRDSNAPKSPLTGYVRFMNERREQLRAKRPEVPFPEITRMLGNEWSKLPPEEKQRYLDEADRDKERYMKELEQYQKTEAYKVFSRKTQDRQKGKSHRQDAARQATHDHEKETEVKERSVFDIPIFTEEFLNHSKAREAELRQLRKSNMEFEERNAALQKHVESMRTAVEKLEVDVIQERSRNTVLQQHLETLRQVLTSSFASMPLPGSGETPTVDTIDSYMNRLHSIILANPQDNENFIATVREVVNRLDR

SEQ ID NO: 33735 - protein, 81 aa, Homo sapiens
MENLMTSSTLPPLFADEDGSKESNDLATTGLNHPEVPYSSGATSSTNNPEFVEDLSQGQLLQSESSNAAEGNEQRHEDEVS

SEQ ID NO: 33736 - protein, 487 aa, Homo sapiens
MSLPNSSCLLEDKMCEGNKTTMASPQLMPLVVVLSTICLVTVGLNLLVLYAVRSERKLHTVGNLYIVSLSVADLIVGAVVMPMNILYLLMSKWSLGRPLCLFWLSMDYVASTASIFSVFILCIDRYRSVQQPLRYLKYRTKTRASATILGAWFLSFLWVIPILGWNHFMQQTSVRREDKCETDFYDVTWFKVMTAIINFYLPTLLMLWFYAKIYKAVRQHCQHRELINRSLPSFSEIKLRPENPKGDAKKPGKESPWEVLKRKPKDAGGGSVLKSPSQTPKEMKSPVVFSQEDDREVDKLYCFPLDIVHMQAAAEGSSRDYVAVNRSHGQLKTDEQGLNTHGASEISEDQMLGDSQSFSRTDSDTTTETAPGKGKLRSGSNTGLDYIKFTWKRLRSHSRQYVSGLHMNRERKAAKQLGFIMAAFILCWIPYFIFFMVIAFCKNCCNEHLHMFTIWLGYINSTLNPLIYPLCNENFKKTFKRILHIRS

SEQ ID NO: 33737 - protein, 116 aa, Homo sapiens
MGWKMASPTDGTDLEASLLSFEKLDRASPDLWPEQLPGVAEFAASFKSPITSSPPKWMAEIERDDIDMLKELGSLTTANLMEKVRGLQNLAYQLGLDESREMTRGKFLNILEKPKK

SEQ ID NO: 33738 - protein, 601 aa, Homo sapiens
MAYDDSVKKEDCFDGDHTFEDIGLAAGRSQREKKRSYKDFLREEEEIAAQVRNSSKKKLKDSELYFLGTDTHKKKRKHSSDDYYYGDISSLESSQKKKKKSSPQSTDTAMDLLKAITSPLAAGSKPSKKTGEKSSGSSSHSESKKEHHRKKVSGSSGELPLEDGGSHKSKKMKPLYVNTETLTLREPDGLKMKLILSPKEKGSSSVDEESFQYPSQQATVKKSSKKSARDEQGALLLGHELQSFLKTARKKHKSSSDAHSSPGPEGCGSDASQFAESHSANLDLSGLEPILVESDSSSGGELEAGELVIDDSYREIKKKKKSKKSKKKKDKEKHKEKRHSKSKRSLGLSAVPVGEVTVTSGPPPSIPYAGAAAPPLPLPGLHTDGHSEKKKKKEEKDKERERGEKPKKKNMSAYQVFCKEYRVTIVADHPGIDFGELSKKLAEVWKQLPEKDKLIWKQKAQYLQHKQNKAEATTVKRKASSSEGSMKVKASSVGVLSPQKKSPPTTMLLPASPAKAPETEPIDVAAHLQLLGESLSLIGHRLQETEGMVAVSGSLSVLLDSIICALGPLACLTTQLPELNGCPKQVLSNTLDNIAYIMPGL

SEQ ID NO: 33739 - protein, 469 aa, Homo sapiens
MLPPWTLGLLLLATVRGKEVCYGQLGCFSDEKPWAGTLQRPVKLLPWSPEDIDTRFLLYTNENPNNFQLITGTEPDTIEASNFQLDRKTRFIIHGFLDKAEDSWPSDMCKKMFEVEKVNCICVDWRHGSRAMYTQAVQNIRVVGAETAFLIQALSTQLGYSLEDVHVIGHSLGAHTAAEAGRRLGGRVGRITGLDPAGPCFQDEPEEVRLDPSDAVFVDVIHTDSSPIVPSLGFGMSQKVGHLDFFPNGGKEMPGCKKNVLSTITDIDGIWEGIGGFVSCNHLRSFEYYSSSVLNPDGFLGYPCASYDEFQESKCFPCPAEGCPKMGHYADQFKGKTSAVEQTFFLNTGESGNFTSWRYKISVTLSGKEKVNGYIRIALYGSNENSKQYEIFKGSLKPDASHTCAIDVDFNVGKIQKVKFLWNKRGINLSEPKLGASQITVQSGEDGTEYNFCSSDTVEENVLQSLYPC

SEQ ID NO: 33740 - protein, 24 aa, Homo sapiens
MTTRGFSCLLLLIREIDLSAKRRI

SEQ ID NO: 33741 - protein, 24 aa, Homo sapiens
MDTQGFSCLLLLISEIDLSVKRRI

SEQ ID NO: 33742 - protein, 28 aa, Homo sapiens
MAPRGFSCLLLSTSEIDLPVKRLLSSVF

SEQ ID NO: 33743 - protein, 1076 aa, Homo sapiens
MEPGSKSVSRSDWQPEPHQRPITPLEPGPEKTPIAQPESKTLQGSNTQQKPASNQRPLTQQETPAQHDAESQKEPRAQQKSASQEEFLAPQKPAPQQSPYIQRVLLTQQEAASQQGPGLGKESITQQEPALRQRHVAQPGPGPGEPPPAQQEAESTPAAQAKPGAKREPSAPTESTSQETPEQSDKQTTPVQGAKSKQGSLTELGFLTKLQELSIQRSALEWKALSEWVTDSESESDVGSSSDTDSPATMGGMVAQGVKLGFKGKSGYKVMSGYSGTSPHEKTSARNHRHYQDTASRLIHNMDLRTMTQSLVTLAEDNIAFFSSQGPGETAQRLSGVFAGVREQALGLEPALGRLLGVAHLFDLDPETPANGYRSLVHTARCCLAHLLHKSRYVASNRRSIFFRTSHNLAELEAYLAALTQLRALVYYAQRLLVTNRPGVLFFEGDEGLTADFLREYVTLHKGCFYGRCLGFQFTPAIRPFLQTISIGLVSFGEHYKRNETGLSVAASSLFTSGRFAIDPELRGAEFERITQNLDVHFWKAFWNITEMEVLSSLANMASATVRVSRLLSLPPEAFEMPLTADPTLTVTISPPLAHTGPGPVLVRLISYDLREGQDSEELSSLIKSNGQRSLELWPRPQQAPRSRSLIVHFHGGGFVAQTSRSHEPYLKSWAQELGAPIISIDYSLAPEAPFPRALEECFFAYCWAIKHCALLGSTGERICLAGDSAGGNLCFTVALRAAAYGVRVPDGIMAAYPATMLQPAASPSRLLSLMDPLLPLSVLSKCVSAYAGAKTEDHSNSDQKALGMMGLVRRDTALLLRDFRLGASSWLNSFLELSGRKSQKMSEPIAEPMRRSVSEAALAQPQGPLGTDSLKNLTLRDLSLRGNSETSSDTPEMSLSAETLSPSTPSDVNFLLPPEDAGEEAEAKNELSPMDRGLGVRAAFPEGFHPRRSSQGATQMPLYSSPIVKNPFMSPLLAPDSMLKSLPPVHIVACALDPMLDDSVMLARRLRNLGQPVTLRVVEDLPHGFLTLAALCRETRQAAELCVERIRLVLTPPAGAGPSGETGAAGVDGGCGGRH

SEQ ID NO: 33744 - protein, 775 aa, Homo sapiens
MDLRTMTQSLVTLAEDNIAFFSSQGPGETAQRLSGVFAGVREQALGLEPALGRLLGVAHLFDLDPETPANGYRSLVHTARCCLAHLLHKSRYVASNRRSIFFRTSHNLAELEAYLAALTQLRALVYYAQRLLVTNRPGVLFFEGDEGLTADFLREYVTLHKGCFYGRCLGFQFTPAIRPFLQTISIGLVSFGEHYKRNETGLSVAASSLFTSGRFAIDPELRGAEFERITQNLDVHFWKAFWNITEMEVLSSLANMASATVRVSRLLSLPPEAFEMPLTADPTLTVTISPPLAHTGPGPVLVRLISYDLREGQDSEELSSLIKSNGQRSLELWPRPQQAPRSRSLIVHFHGGGFVAQTSRSHEPYLKSWAQELGAPIISIDYSLAPEAPFPRALEECFFAYCWAIKHCALLGSTGERICLAGDSAGGNLCFTVALRAAAYGVRVPDGIMAAYPATMLQPAASPSRLLSLMDPLLPLSVLSKCVSAYAGAKTEDHSNSDQKALGMMGLVRRDTALLLRDFRLGASSWLNSFLELSGRKSQKMSEPIAEPMRRSVSEAALAQPQGPLGTDSLKNLTLRDLSLRGNSETSSDTPEMSLSAETLSPSTPSDVNFLLPPEDAGEEAEAKNELSPMDRGLGVRAAFPEGFHPRRSSQGATQMPLYSSPIVKNPFMSPLLAPDSMLKSLPPVHIVACALDPMLDDSVMLARRLRNLGQPVTLRVVEDLPHGFLTLAALCRETRQAAELCVERIRLVLTPPAGAGPSGETGAAGVDGGCGGRH

SEQ ID NO: 33745 - protein, 360 aa, Homo sapiens
MALSRVCWARSAVWGSAVTPGHFVTRRLQLGRSGLAWGAPRSSKLHLSPKADVKNLMSYVVTKTKAINGKYHRFLGRHFPRFYVLYTIFMKGLQMLWADAKKARRIKTNMWKHNIKFHQLPYREMEHLRQFRQDVTKCLFLGIISIPPFANYLVFLLMYLFPRQLLIRHFWTPKQQTDFLDIYHAFRKQSHPEIISYLEKVIPLISDAGLRWRLTDLCTKIQRGTHPAIHDILALRECFSNHPLGMNQLQALHVKALSRAMLLTSYLPPPLLRHRLKTHTTVIHQLDKALAKLGIGQLTAQEVKSACYLRGLNSTHIGEDRCRTWLGEWLQISCSLKEAELSLLLHNVVLLSTNYLGTRR

SEQ ID NO: 33746 - protein, 304 aa, Homo sapiens
MSYVVTKTKAINGKYHRFLGRHFPRFYVLYTIFMKGLQMLWADAKKARRIKTNMWKHNIKFHQLPYREMEHLRQFRQDVTKCLFLGIISIPPFANYLVFLLMYLFPRQLLIRHFWTPKQQTDFLDIYHAFRKQSHPEIISYLEKVIPLISDAGLRWRLTDLCTKIQRGTHPAIHDILALRECFSNHPLGMNQLQALHVKALSRAMLLTSYLPPPLLRHRLKTHTTVIHQLDKALAKLGIGQLTAQEVKSACYLRGLNSTHIGEDRCRTWLGEWLQISCSLKEAELSLLLHNVVLLSTNYLGTRR

SEQ ID NO: 33747 - protein, 155 aa, Homo sapiens
MALSRVCWARSAVWGSAVTPGHFVTRRLQLGRSGLAWGAPRSSKLHLSPKADVKNLMSYVVTKTKAINGKYHRFLGRHFPRFYVLYTIFMKESLEPGHASHILPASSLVETSFEDSYNCDSPTGQGFGKAGDWPADCSGSKIGLLSPWPEFYAYW

SEQ ID NO: 33748 - protein, 203 aa, Homo sapiens
MYLFPRQLLIRHFWTPKQQTDFLDIYHAFRKQSHPEIISYLEKVIPLISDAGLRWRLTDLCTKIQRGTHPAIHDILALRECFSNHPLGMNQLQALHVKALSRAMLLTSYLPPPLLRHRLKTHTTVIHQLDKALAKLGIGQLTAQEVKSACYLRGLNSTHIGEDRCRTWLGEWLQISCSLKEAELSLLLHNVVLLSTNYLGTRR

SEQ ID NO: 33749 - protein, 100 aa, Homo sapiens
MLLTSYLPPPLLRHRLKTHTTVIHQLDKALAKLGIGQLTAQEVKSACYLRGLNSTHIGEDRCRTWLGEWLQISCSLKEAELSLLLHNVVLLSTNYLGTRR

SEQ ID NO: 33750 - protein, 99 aa, Homo sapiens
MALSRVCWARSAVWGSAVTPGHFVTRRLQLGRSGLAWGAPRSSKLHLSPKADVKNLMSYVVTKTKAINGKYHRFLGRHFPRFYVLYTIFMKGTCFPGNY

SEQ ID NO: 33751 - protein, 373 aa, Homo sapiens
MALSRVCWARSAVWGSAVTPGHFVTRRLQLGRSGLAWGAPRSSKLHLSPKADVKNLMSYVVTKTKAINGKYHRFLGRHFPRFYVLYTIFMKGLQMLWADAKKARRIKTNMWKHNIKFHQLPYREMEHLRQVWARGRYPEVHGEFRQDVTKCLFLGIISIPPFANYLVFLLMYLFPRQLLIRHFWTPKQQTDFLDIYHAFRKQSHPEIISYLEKVIPLISDAGLRWRLTDLCTKIQRGTHPAIHDILALRECFSNHPLGMNQLQALHVKALSRAMLLTSYLPPPLLRHRLKTHTTVIHQLDKALAKLGIGQLTAQEVKSACYLRGLNSTHIGEDRCRTWLGEWLQISCSLKEAELSLLLHNVVLLSTNYLGTRR

SEQ ID NO: 33752 - protein, 220 aa, Homo sapiens
MRSSLTMVGTLWAFLSLVTAVTSSTSYFLPYWLFGSQMGKPVSFSTFRRCNYPVRGEGHSLIMVEECGRYASFNAIPSLAWQMCTVVTGAGCALLLLVALAAVLGCCMEELISRMMGRCMGAAQFVGGLLISSGCALYPLGWNSPEIMQTCGNVSNQFQLGTCRLGWAYYCAGGGAAAAMLICTWLSCFAGRNPKPVILVESIMRNTNSYAMELDHCLKP

SEQ ID NO: 33753 - protein, 187 aa, Homo sapiens
MRSSLTMVGTLWAFLSLVTAVTSSTSYFLPYWLFGSQMGKPVSFSTFRRCNYPVRGEGHSLIMVEECGRYASFNAIPSLAWQMCTVVTGAGCALLLLVALAAVLGCCMEELISRMMGRCMGAAQFVGGTCRLGWAYYCAGGGAAAAMLICTWLSCFAGRNPKPVILVESIMRNTNSYAMELDHCLKP

SEQ ID NO: 33754 - protein, 41 aa, Homo sapiens
MLICTWLSCFAGRNPKPVILVESIMRNTNSYAMELDHCLKP

SEQ ID NO: 33755 - protein, 1065 aa, Homo sapiens
MAPAPLGVPEEQLLGCRSRVLSRLLFIAQTALLLLPAAGAGLCPAPCSCRIPLLDCSRRKLPAPSWRALSGLLPPDTAILDFSHNRLSNWNISLESQTLQEVKMNYNELTEIPYFGEPTSNITLLSLVHNIIPEINAQALQFYPALESLDLSSNIISEIKTSSFPRMQLKYLNLSNNRITTLEAGCFDNLSSSLLVVKLNRNRMSMIPPKIFKLPHLQFLELKRNRIKIVEGLTFQGLDSLRSLKMQRNGISKLKDGAFFGLNNMEELELEHNNLTRVNKGWLYGLRMLQQLYVSQNAIERISPDAWEFCQRLSELDLSYNQLTRLDESAFVGLSLLERLNLGDNRVTHIADGVFRFLSNLQTLDLRNNEISWAIEDASEAFAGLTSLTKLILQGNQIKSITKKAFIGLESLEHLDLNNNAIMSIQENAFSQTHLKELILNTSSLLCDCHLKWLLQWLVDNNFQHSVNVSCAHPEWLAGQSILNVDLKDFVCDDFLKPQIRTHPETIIALRGMNVTLTCTAVSSSDSPMSTVWRKDSEILYDVDTENFVRYWQQAGEALEYTSILHLFNVNFTDEGKYQCIVTNHFGSNYSQKAKLTVNEMPSFLKTPMDLTIRTGAMARLECAAEGHPAPQISWQKDGGTDFPAARERRMHVMPEDDVFFIANVKIEDMGIYSCMAQNTAGGLSANASLTVLETPSFIRPLEDKTVTRGETAVLQCIAGGSPAPRLNWTKDDGPLLVTERHFFAAANQLLIIVDAGLEDAGKYTCIMSNTLGTERGHIYLNVISSPNCDSSQSSIGHEDDGWTTVGIVIIVVVCCVVGTSLIWVIVIYHMRRKNEDYSITNTEELNLPADIPSYLSSQGTLSEPQEGYSNSEAGSHQQLMPPANGYIHKGTDGGTGTRVICSDCYDNANIYSRTREYCPYTYIAEEDVLDQTLSSLMVQMPKETYLVHPPQDTTALESLIPSANREPSAFPTNHERISEKKLPSTQMSGETLQRPVWNINRELGLPHPPFSQQPVHESPQLHQNEGLAGREPDCSASSMSCHRLQDHAFDFSRTRNIQDGSEGT

SEQ ID NO: 33756 - protein, 219 aa, Homo sapiens
MVKLLPAQEAAKIYHTNYVRNSRAVGVMWGTLTICFSVLVMALFIQPYWIGDSVNTPQAGYFGLFSYCVGNVLSSELICKGGPLDFSSIPSRAFKTAMFFVALGMFLIIGSIICFSLFFICNTATVYKICAWMQLAAATGLMIGCLVYPDGWDSSEVRRMCGEQTGKYTLGHCTIRWAFMLAILSIGDALILSFLAFVLGYRQDKLLPDDYKADGTEEV

SEQ ID NO: 33757 - protein, 560 aa, Homo sapiens
MSKDIKSVEHSPKIHQRNDPQHVNDRTFFIDASNQSLTAIPLEIFTFTELEEVHLENNQIEEIPQEIQRLKNIRVLYLDKNNLRSLCPALGLLSSLESLDLSYNPIFSSSLVVVSFLHALRELRLYQTDLKEIPVVIFKNLHHLELLGLTGNHLKCLPKEIVNQTKLREIYLKRNQFEVFPQELCVLYTLEIIDLDENKIGAIPEEIGHLTGLQKFYMASNNLPVLPASLCQCSQLSVLDLSHNLLHSIPKSFAELRKMTEIGLSGNRLEKVPRLICRWTSLHLLYLGNTGLHRLRGSFRCLVNLRFLDLSQNHLHHCPLQICALKNLEVLGLDDNKIGQLPSELGSLSKLKILGLTGNEFLSFPEEVLSLASLEKLYIGQDQGFKLTYVPEHIRKLQSLKELYIENNHLEYLPVSLGSMPNLEVLDCRHNLLKQLPDAICQAQALKELRLEDNLLTHLPENLDSLVNLKVLTLMDNPMEEPPKEVCAEGNEAIWKYLKENRNRNIMATKIQAWWRGTMVQRGFGKFGELLKPQKKGKTSPKDKKGKKDVKGKPGKGKKK

SEQ ID NO: 33758 - protein, 623 aa, Homo sapiens
MRVALGMLWLLALAWPPQARGFCPSQCSCSLHIMGDGSKARTVVCNDPDMTLPPASIPPDTSRLRLERTAIRRVPGEAFRPLGRLEQLWLPYNALSELNALMLRGLRRLRELRLPGNRLAAFPWAALRDAPKLRLLDLQANRLSAVPAEAARFLENLTFLDLSSNQLMRLPQELIVSWAHLETGIFPPGHHPRRVLGLQDNPWACDCRLYDLVHLLDGWAPNLAFIETELRCASPRSLAGVAFSQLELRKCQGPELHPGVASIRSLLGGTALLRCGATGVPGPEMSWRRANGRPLNGTVHQEVSSDGTSWTLLGLPAVSHLDSGDYICQAKNFLGASETVISLIVTEPPTSTEHSGSPGALWARTGGGGEAAAYNNKLVARHVPQIPKPAVLATGPSVPSTKEELTLEHFQMDALGELSDGRAGPSEARMVRSVKVVGDTYHSVSLVWKAPQAKNTTAFSVLYAVFGQHSMRRVIVQPGKTRVTITGLLPKTKYVACVCVQGLVPRKEQCVIFSTNEVVDAENTQQLINVVVISVAIVIALPLTLLVCCSALQKRCRKCFNKDSTEATVTYVNLERLGYSEDGLEELSRHSVSEADRLLSARSSVDFQAFGVKGGRRINEYFC

SEQ ID NO: 33759 - protein, 200 aa, Homo sapiens
MASSLTCTGVIWALLSFLCAATSCVGFFMPYWLWGSQLGKPVSFGTFRRCSYPVHDESRQMMVMVEECGRYASFQGIPSAEWRICTIVTGLGCGLLLLVALTALMGCCVSDLISRTVGRVAGGIQFLGGLLIGAGCALYPLGWDSEEVRQTCGYTSGQFDLGKCEIGWAYYCTGAGATAAMLLCTWLACFSGKKQKHYPY

SEQ ID NO: 33760 - protein, 53 aa, Homo sapiens
MEIFIEVFSHFLLQLTELTLNMCLELPTGSLEKSLMISSQVLQIPVANSTKQR

SEQ ID NO: 33761 - protein, 346 aa, Homo sapiens
MAPRSLLLLLSGALALTDTWAGSHSLRYFSTAVSRPGRGEPRYIAVEYVDDTQFLRFDSDAAIPRMEPREPWVEQEGPQYWEWTTGYAKANAQTDRVALRNLLRRYNQSEAGSHTLQGMNGCDMGPDGRLLRGYHQHAYDGKDYISLNEDLRSWTAADTVAQITQRFYEAEEYAEEFRTYLEGECLELLRRYLENGKETLQRADPPKAHVAHHPISDHEATLRCWALGFYPAEITLTWQRDGEEQTQDTELVETRPAGDGTFQKWAAVVVPPGEEQRYTCHVQHEGLPQPLILRWEQSPQPTIPIVGIVAGLVVLGAVVTGAVVAAVMWRKKSSDRNRGSYSQAAV

SEQ ID NO: 33762 - protein, 254 aa, Homo sapiens
MAPRSLLLLLSGALALTDTWAGSHSLRYFSTAVSRPGRGEPRYIAVEYVDDTQFLRFDSDAAIPRMEPREPWVEQEGPQYWEWTTGYAKANAQTDRVALRNLLRRYNQSEAGSHTLQGMNGCDMGPDGRLLRGYHQHAYDGKDYISLNEDLRSWTAADTVAQITQRFYEAEEYAEEFRTYLEGECLELLRRYLENGKETLQRAEQSPQPTIPIVGIVAGLVVLGAVVTGAVVAAVMWRKKSSDRNRGSYSQAAV

SEQ ID NO: 33763 - protein, 442 aa, Homo sapiens
MAPRSLLLLLSGALALTDTWAGSHSLRYFSTAVSRPGRGEPRYIAVEYVDDTQFLRFDSDAAIPRMEPREPWVEQEGPQYWEWTTGYAKANAQTDRVALRNLLRRYNQSEAGSHTLQGMNGCDMGPDGRLLRGYHQHAYDGKDYISLNEDLRSWTAADTVAQITQRFYEAEEYAEEFRTYLEGECLELLRRYLENGKETLQRADPPKAHVAHHPISDHEATLRCWALGFYPAEITLTWQRDGEEQTQDTELVETRPAGDGTFQKWAAVVVPPGEEQRYTCHVQHEGLPQPLILRWEQSPQPTIPIVGIVAGLVVLGAVVTGAVVAAVMWRKKSSDRNRGSYSQAAAYSVVSGNLMITWWSSLFLLGVLFQGYLGCLRSHSVLGRRKVGDMWILFFLWLWTSFNTAFLALQSLRFGFGFRRGRSFLLRSWHHLMKRVQIKIFD

SEQ ID NO: 33764 - protein, 362 aa, Homo sapiens
MVLMAPRTLLLLLSGALALTQTWARSHSMRYFYTTMSRPGAGEPRFISVGYVDDTQFVRFDSDDASPREEPRAPWMEREGPKYWDRNTQICKAQAQTERENLRIALRYYNQSEGGSHTMQVMYGCDVGPDGPFLRGYEQHAYDGKDYIALNEDLRSWTAADMAAQITKRKWEAARRAEQRRVYLEGEFVEWLRRYLENGKETLQRADPPKTHMTHHPISDHEATLRCWALGFYPAEITLTWQRDGEDQTQDTELVETRPAGDGTFQKWAAVVVPSGEEQRYTCHVQHEGLPEPLTLRWEPSSQPTVPIVGIVAGLVLLVAVVTGAVVAAVMWRKKSSDRKGGSYSQAASSNSAQGSDVSLTA

SEQ ID NO: 33765 - protein, 215 aa, Homo sapiens
MGKGDPKKPRGKMSSYAFFVQTCREEHKKKHPDASVNFSEFSKKCSERWKTMSAKEKGKFEDMAKADKARYEREMKTYIPPKGETKKKFKDPNAPKRPPSAFFLFCSEYRPKIKGEHPGLSIGDVAKKLGEMWNNTAADDKQPYEKKAAKLKEKYEKDIAAYRAKGKPDAAKKGVVKAEKSKKKKEEEEDEEDEEDEEEEEDEEDEDEEEDDDDE

SEQ ID NO: 33766 - protein, 370 aa, Homo sapiens
MGNVPSAVKHCLSYQQLLREHLWIGDSVAGALDPAQTSLLTNLHCFQPDVSGFSVSLAGTVACIHWETSQLSGLPEFVKIVEVGPRDGLQNEKVIVPTDIKIEFINRLSQTGLSVIEVTSFVSSRWVPQMADHTEVMKGIHQYPGVRYPVLTPNLQGFHHAVAAGATEISVFGAASESFSKKNINCSIEESMGKFEEVVKSARHMNIPARGYVSCALGCPYEGSITPQKVTEVSKRLYGMGCYEISLGDTIGVGTPGSMKRMLESVMKEIPPGALAVHCHDTYGQALANILTALQMGINVVDSAVSGLGGCPYAKGASGNVATEDLIYMLNGLGLNTGVNLYKVMEAGDFICKAVNKTTNSKVAQASFNA

SEQ ID NO: 33767 - protein, 340 aa, Homo sapiens
MGNVPSAVKHCLSYQQLLREHLWIGDSVAGALDPAQETSQLSGLPEFVKIVEVGPRDGLQNEKVIVPTDIKIEFINRLSQTGLSVIEVTSFVSSRWVPQMADHTEVMKGIHQYPGVRYPVLTPNLQGFHHAVAAGATEISVFGAASESFSKKNINCSIEESMGKFEEVVKSARHMNIPARGYVSCALGCPYEGSITPQKVTEVSKRLYGMGCYEISLGDTIGVGTPGSMKRMLESVMKEIPPGALAVHCHDTYGQALANILTALQMGINVVDSAVSGLGGCPYAKGASGNVATEDLIYMLNGLGLNTGVNLYKVMEAGDFICKAVNKTTNSKVAQASFNA

SEQ ID NO: 33768 - protein, 53 aa, Homo sapiens
MGNVPSAVKHCLSYQQLLREHLWIGDSVAGALDPAQELQSVMLMLHHGPLRKP

SEQ ID NO: 33769 - protein, 308 aa, Homo sapiens
MGNVPSAVKHCLSYQQLLREHLWIGDSVAGALDPAQETSQLSGLPEFVKIVEVGPRDGLQNEKVIVPTDIKIEFINRLSQTGLSVIEVTSFVSSRWVPQVAAGATEISVFGAASESFSKKNINCSIEESMGKFEEVVKSARHMNIPARGYVSCALGCPYEGSITPQKVTEVSKRLYGMGCYEISLGDTIGVGTPGSMKRMLESVMKEIPPGALAVHCHDTYGQALANILTALQMGINVVDSAVSGLGGCPYAKGASGNVATEDLIYMLNGLGLNTGVNLYKVMEAGDFICKAVNKTTNSKVAQASFNA

SEQ ID NO: 33770 - protein, 200 aa, Homo sapiens
MAKGDPKKPKGKMSAYAFFVQTCREEHKKKNPEVPVNFAEFSKKCSERWKTMSGKEKSKFDEMAKADKVRYDREMKDYGPAKGGKKKKDPNAPKRPPSGFFLFCSEFRPKIKSTNPGISIGDVAKKLGEMWNNLNDSEKQPYITKAAKLKEKYEKDVADYKSKGKFDGAKGPAKVARKKVEEEDEEEEEEEEEEEEEEDE

SEQ ID NO: 33771 - protein, 99 aa, Homo sapiens
MPKRKSPENTEGKDGSKVTKQEPTRRSARLSAKPAPPKPEPKPRKTSAKKEPGAKISRGAKGKKEEKQEAGKEGTAPSENGETKAEEAQKTESVDNEGE

SEQ ID NO: 33772 - protein, 77 aa, Homo sapiens
MPKRKSPENTEGKDGSKVTKQEPTRRSARLSAKPAPPKPEPKPRKTSAKKEPGAKISRGAKGKKEEKQEAGKEGTEN

SEQ ID NO: 33773 - protein, 650 aa, Homo sapiens
MTPILTVLICLGLSLGPRTHVQAGHLPKPTLWAEPGSVITQGSPVTLRCQGGQETQEYRLYREKKTALWITRIPQELVKKGQFPIPSITWEHAGRYRCYYGSDTAGRSESSDPLELVVTGAYIKPTLSAQPSPVVNSGGNVILQCDSQVAFDGFSLCKEGEDEHPQCLNSQPHARGSSRAIFSVGPVSPSRRWWYRCYAYDSNSPYEWSLPSDLLELLVLGVSKKPSLSVQPGPIVAPEETLTLQCGSDAGYNRFVLYKDGERDFLQLAGAQPQAGLSQANFTLGPVSRSYGGQYRCYGAHNLSSEWSAPSDPLDILIAGQFYDRVSLSVQPGPTVASGENVTLLCQSQGWMQTFLLTKEGAADDPWRLRSTYQSQKYQAEFPMGPVTSAHAGTYRCYGSQSSKPYLLTHPSDPLELVVSGPSGGPSSPTTGPTSTSGPEDQPLTPTGSDPQSGLGRHLGVVIGILVAVILLLLLLLLLFLILRHRRQGKHWTSTQRKADFQHPAGAVGPEPTDRGLQWRSSPAADAQEENLYAAVKHTQPEDGVEMDTRSPHDEDPQAVTYAEVKHSRPRREMASPPSPLSGEFLDTKDRQAEEDRQMDTEAAASEAPQDVTYAQLHSLTLRREATEPPPSQEGPSPAVPSIYATLAIH

SEQ ID NO: 33774 - protein, 651 aa, Homo sapiens
MTPILTVLICLGLSLGPRTHVQAGHLPKPTLWAEPGSVITQGSPVTLRCQGGQETQEYRLYREKKTALWITRIPQELVKKGQFPIPSITWEHAGRYRCYYGSDTAGRSESSDPLELVVTGAYIKPTLSAQPSPVVNSGGNVILQCDSQVAFDGFSLCKEGEDEHPQCLNSQPHARGSSRAIFSVGPVSPSRRWWYRCYAYDSNSPYEWSLPSDLLELLVLGVSKKPSLSVQPGPIVAPEETLTLQCGSDAGYNRFVLYKDGERDFLQLAGAQPQAGLSQANFTLGPVSRSYGGQYRCYGAHNLSSEWSAPSDPLDILIAGQFYDRVSLSVQPGPTVASGENVTLLCQSQGWMQTFLLTKEGAADDPWRLRSTYQSQKYQAEFPMGPVTSAHAGTYRCYGSQSSKPYLLTHPSDPLELVVSGPSGGPSSPTTGPTSTSAGPEDQPLTPTGSDPQSGLGRHLGVVIGILVAVILLLLLLLLLFLILRHRRQGKHWTSTQRKADFQHPAGAVGPEPTDRGLQWRSSPAADAQEENLYAAVKHTQPEDGVEMDTRSPHDEDPQAVTYAEVKHSRPRREMASPPSPLSGEFLDTKDRQAEEDRQMDTEAAASEAPQDVTYAQLHSLTLRREATEPPPSQEGPSPAVPSIYATLAIH

SEQ ID NO: 33775 - protein, 652 aa, Homo sapiens
MTPILTVLICLGLSLGPRTHVQAGHLPKPTLWAEPGSVITQGSPVTLRCQGGQETQEYRLYREKKTALWITRIPQELVKKGQFPIPSITWEHAGRYRCYYGSDTAGRSESSDPLELVVTGAYIKPTLSAQPSPVVNSGGNVILQCDSQVAFDGFSLCKEGEDEHPQCLNSQPHARGSSRAIFSVGPVSPSRRWWYRCYAYDSNSPYEWSLPSDLLELLVLGVSKKPSLSVQPGPIVAPEETLTLQCGSDAGYNRFVLYKDGERDFLQLAGAQPQAGLSQANFTLGPVSRSYGGQYRCYGAHNLSSEWSAPSDPLDILIAGQFYDRVSLSVQPGPTVASGENVTLLCQSQGWMQTFLLTKEGAADDPWRLRSTYQSQKYQAEFPMGPVTSAHAGTYRCYGSQSSKPYLLTHPSDPLELVVSGPSGGPSSPTTGPTSTSAGPEDQPLTPTGSDPQSGLGRHLGVVIGILVAVILLLLLLLLLFLILRHRRQGKHWTSTQRKADFQHPAGAVGPEPTDRGLQWRSSPAADAQEENLYAAVKHTQPEDGVEMDTRQSPHDEDPQAVTYAEVKHSRPRREMASPPSPLSGEFLDTKDRQAEEDRQMDTEAAASEAPQDVTYAQLHSLTLRREATEPPPSQEGPSPAVPSIYATLAIH

SEQ ID NO: 33776 - protein, 651 aa, Homo sapiens
MTPILTVLICLGLSLGPRTHVQAGHLPKPTLWAEPGSVITQGSPVTLRCQGGQETQEYRLYREKKTALWITRIPQELVKKGQFPIPSITWEHAGRYRCYYGSDTAGRSESSDPLELVVTGAYIKPTLSAQPSPVVNSGGNVILQCDSQVAFDGFSLCKEGEDEHPQCLNSQPHARGSSRAIFSVGPVSPSRRWWYRCYAYDSNSPYEWSLPSDLLELLVLGVSKKPSLSVQPGPIVAPEETLTLQCGSDAGYNRFVLYKDGERDFLQLAGAQPQAGLSQANFTLGPVSRSYGGQYRCYGAHNLSSEWSAPSDPLDILIAGQFYDRVSLSVQPGPTVASGENVTLLCQSQGWMQTFLLTKEGAADDPWRLRSTYQSQKYQAEFPMGPVTSAHAGTYRCYGSQSSKPYLLTHPSDPLELVVSGPSGGPSSPTTGPTSTSGPEDQPLTPTGSDPQSGLGRHLGVVIGILVAVILLLLLLLLLFLILRHRRQGKHWTSTQRKADFQHPAGAVGPEPTDRGLQWRSSPAADAQEENLYAAVKHTQPEDGVEMDTRQSPHDEDPQAVTYAEVKHSRPRREMASPPSPLSGEFLDTKDRQAEEDRQMDTEAAASEAPQDVTYAQLHSLTLRREATEPPPSQEGPSPAVPSIYATLAIH

SEQ ID NO: 33777 - protein, 456 aa, Homo sapiens
MTPILTVLICLGLSLGPRTHVQAGHLPKPTLWAEPGSVITQGSPVTLRCQGGQETQEYRLYREKKTALWITRIPQELVKKGQFPIPSITWEHAGRYRCYYGSDTAGRSESSDPLELVVTGAYIKPTLSAQPSPVVNSGGNVILQCDSQVAFDGFSLCKEGEDEHPQCLNSQPHARGSSRAIFSVGPVSPSRRWWYRCYAYDSNSPYEWSLPSDLLELLVLGVSKKPSLSVQPGPIVAPEETLTLQCGSDAGYNRFVLYKDGERDFLQLAGAQPQAGLSQANFTLGPVSRSYGGQYRCYGAHNLSSEWSAPSDPLDILIAGQFYDRVSLSVQPGPTVASGENVTLLCQSQGWMQTFLLTKEGAADDPWRLRSTYQSQKYQAEFPMGPVTSAHAGTYRCYGSQSSKPYLLTHPSDPLELVVSGPSGGPSSPTTGPTSTSAGPEDQPLTPTGSDPQSGE

SEQ ID NO: 33778 - protein, 1251 aa, Homo sapiens
MAGKLRKSHIPGVSIWQLVEEIPEGCSTPDFEQKPVTSALPEGKNAVFRAVVCGEPRPEVRWQNSKGDLSDSSKYKISSSPGSKEHVLQINKLTGEDTDLYRCTAVNAYGEAACSVRLTVIEVGFRKNRKRHREPQEDLRKELMDFRKLLKKRAPPAPKKKMDLEQIWQLLMTADRKDYEKICLKYGIVDYRGMLRRLQEMKKEQEDKMAQYINTISSLRHIRVTKDGNAKFDLELDLKDSQSKIYLYKDGEMIPYGFNNQTKHCLRRLGKRYEFQIQDLRPEDSGIYQVKVEDAVVFSTELEASAIPPRVVVPLAETHCEEQGDAVFECTLSSPCPSAAWHFRHRLLHPSDKYEVYVSPDGLTHRLVVRGARFSDMGPYSLGTGLYTSSAWLVVEAGKDKDLQSTSADHKLQSRRSGKDGRLDIYGERRDATRSSTSRYKPGTGSFSKDAQGPMGHFSQGLADMEVQPGEAATLSCTLTSDLGPGTWFKDGVKLTTQDGVIFKQDGLVHSLFITHVQGTQAGRYTFVAGDQQSEATLTVQDSPTIAPDVTEKLREPLVVKAGKPVIVKIPFQSHLPIQAAWRKDGAEVVGSSDREAQVDLGDGYTRLCLPSAGRKDCGQYSVTLRSEGGSVQAELTLQVIDKPDPPQGPMEVQDCHRAGVCLRWRPPRDNGGRTVECYVVERRQAGRSTWLKVGEAPADSTTFTDAHVEPGRKYTFRVRAVTSEGAGEALESEEILVAPEALPKAPSAPAILSASSQGITLTWTAPRGPGSAHILGYLIERRKKGSNTWTAVNDQPVPERRWTVADVRQGCQYEFRVTAVAPSGPGEPGPPSDAVFARDPMRPPGLVRNLQVTDRSNTSITLSWAGPDTQEGDEAQGYVVELCSSDSLQWLPCHVGTVPVTTYTAKGLRPGEGYFVRVTAVNEGGQSQPSALDTLVQAMPVTVCPKFLVDSSTKDLLTVKVGDTVRVPVSFEAMPMPEVTWLKDGLPLPKRSVTVTKDGLTQLLIPVAGLSDSGLYTVVLRTLQGKEVAHSFRIRVAACPQAPGPIHLQENVPGTVTAEWEPSPDEAQDVPLHYAVFTRSSAHGPWHEAADRIHTNRFTLLGILPGHEYHFRVVAKNELGASKPSDTSQPWCIPRQRDRFTVKAPCYREPDLSQKPRFLVGLRSHLLPQGCECCMSCAVQGSPRPHVTWFKNDRSLEGNPAVYSTDLLGVCSLTIPSVSPKDSGEYKAVAENTLGQAVSTATLIVIEPST

SEQ ID NO: 33779 - protein, 868 aa, Homo sapiens
MGWQPMGENWGCLEEMLNEDQSREPPGHLGSRRSGKDGRLDIYGERRDATRSSTSRYKPGTGSFSKDAQGPMGHFSQGLADMEVQPGEAATLSCTLTSDLGPGTWFKDGVKLTTQDGVIFKQDGLVHSLFITHVQGTQAGRYTFVAGDQQSEATLTVQDSPTIAPDVTEKLREPLVVKAGKPVIVKIPFQSHLPIQAAWRKDGAEVVGSSDREAQVDLGDGYTRLCLPSAGRKDCGQYSVTLRSEGGSVQAELTLQVIDKPDPPQGPMEVQDCHRAGVCLRWRPPRDNGGRTVECYVVERRQAGRSTWLKVGEAPADSTTFTDAHVEPGRKYTFRVRAVTSEGAGEALESEEILVAPEALPKAPSAPAILSASSQGITLTWTAPRGPGSAHILGYLIERRKKGSNTWTAVNDQPVPERRWTVADVRQGCQYEFRVTAVAPSGPGEPGPPSDAVFARDPMRPPGLVRNLQVTDRSNTSITLSWAGPDTQEGDEAQGYVVELCSSDSLQWLPCHVGTVPVTTYTAKGLRPGEGYFVRVTAVNEGGQSQPSALDTLVQAMPVTVCPKFLVDSSTKDLLTVKVGDTVRVPVSFEAMPMPEVTWLKDGLPLPKRSVTVTKDGLTQLLIPVAGLSDSGLYTVVLRTLQGKEVAHSFRIRVAACPQAPGPIHLQENVPGTVTAEWEPSPDEAQDVPLHYAVFTRSSAHGPWHEAADRIHTNRFTLLGILPGHEYHFRVVAKNELGASKPSDTSQPWCIPRQRDRFTVKAPCYREPDLSQKPRFLVGLRSHLLPQGCECCMSCAVQGSPRPHVTWFKNDRSLEGNPAVYSTDLLGVCSLTIPSVSPKDSGEYKAVAENTLGQAVSTATLIVIEPST

SEQ ID NO: 33780 - protein, 605 aa, Homo sapiens
MGWQPMGENWGCLEEMLNEDQSREPPGHLGSRRSGKDGRLDIYGERRDATRSSTSRYKPGTGSFSKDAQGPMGHFSQGLADMEVQPGEAATLSCTLTSDLGPGTWFKDGVKLTTQDGVIFKQDGLVHSLFITHVQGTQAGRYTFVAGDQQSEATLTVQDSPTIAPDVTEKLREPLVVKAGKPVIVKIPFQSHLPIQAAWRKDGAEVVGSSDREAQVDLGDGYTRLCLPSAGRKDCGQYSVTLRSEGGSVQAELTLQVIDKPDPPQGPMEVQDCHRAGVCLRWRPPRDNGGRTVECYVVERRQAGRSTWLKVGEAPADSTTFTDAHVEPGRKYTFRVRAVTSEGAGEALESEEILVAPEALPKAPSAPAILSASSQGITLTWTAPRGPGSAHILGYLIERRKKGSNTWTAVNDQPVPERRWTVADVRQGCQYEFRVTAVAPSGPGEPGPPSDAVFARDPMRPPGLVRNLQVTDRSNTSITLSWAGPDTQEGDEAQGYVVELCSSDSLQWLPCHVGTVPVTTYTAKGLRPGEGYFVRVTAVNEGGQSQPSALDTLVQAMPVTVCPKFLVDSSTKDLLTVKVGDTVRVPVSFEHARRPLGPSTCRRTC

SEQ ID NO: 33781 - protein, 570 aa, Homo sapiens
MAGKLRKSHIPGVSIWQLVEEIPEGCSTPDFEQKPVTSALPEGKNAVFRAVVCGEPRPEVRWQNSKGDLSDSSKYKISSSPGSKEHVLQINKLTGEDTDLYRCTAVNAYGEAACSVRLTVIEVGFRKNRKRHREPQEDLRKELMDFRKLLKKRAPPAPKKKMDLEQIWQLLMTADRKDYEKICLKYGIVDYRGMLRRLQEMKKEQEDKMAQYINTISSLRHIRVTKDGNAKFDLELDLKDSQSKIYLYKDGEMIPYGFNNQTKHCLRRLGKRYEFQIQDLRPEDSGIYQVKVEDAVVFSTELEASAIPPRVVVPLAETHCEEQGDAVFECTLSSPCPSAAWHFRHRLLHPSDKYEVYVSPDGLTHRLVVRGARFSDMGPYSLGTGLYTSSAWLVVEAGKDKDLQSTSADHKLQSRRSGKDGRLDIYGERRDATRSSTSRYKPGTGSFSKDAQGPMGHFSQGLADMEVQPGEAATLSCTLTSDLGPGTWFKDGVKLTTQDGVIFKQDGLVHSLFITHVQGTQAGRYTFVAGDQQSEATLTVQDSPTIAPDVTEKLREPLVVKAGKPIQTYH

SEQ ID NO: 33782 - protein, 3708 aa, Homo sapiens
MAGKLRKSHIPGVSIWQLVEEIPEGCSTPDFEQKPVTSALPEGKNAVFRAVVCGEPRPEVRWQNSKGDLSDSSKYKISSSPGSKEHVLQINKLTGEDTDLYRCTAVNAYGEAACSVRLTVIEVGFRKNRKRHREPQEDLRKELMDFRKLLKKRAPPAPKKKMDLEQIWQLLMTADRKDYEKICLKYGIVDYRGMLRRLQEMKKEQEDKMAQYINTISSLRHIRVTKDGNAKFDLELDLKDSQSKIYLYKDGEMIPYGFNNQTKHCLRRLGKRYEFQIQDLRPEDSGIYQVKVEDAVVFSTELEASAIPPRVVVPLAETHCEEQGDAVFECTLSSPCPSAAWHFRHRLLHPSDKYEVYVSPDGLTHRLVVRGARFSDMGPYSLGTGLYTSSAWLVVEAGKDKDLQSTSADHKLQRQGAQASGAEESGSIESQGEKSREQGPRGGSLEGAGPASGLQHIASPDRDGLGRHGYSLMGDKGTADSAWGPGQEGEGFPVAEGSRATLPRENQSHREGGWARSLAERPHLQGESSESGLGLPEKQQQDRGRDSNSDECWRKAGGWEAGSSRLQAGGLGSSREGKEHRGDSGRQLDRHAPEQLWDARLGPGRGKSDLQGCQSDPVGSWPRGKQIEISQDDSLAEMDRGDAPSRERGRGIVVWGGGTGLGEAGDSNGAGGPGTLELTGGRGSGSKVGMAPESWGSQGGRDADYGEARGYWGSGELLEQIPGGKDFQEPSISGGRKFLLGDGSPEIKAEDSLQEADGICRGESVVTGSAYKTGPGGPGDPRGCEGVLQELRGRDGQETAWASGEVEYDPRSFQSSQGWTAGHRAAGGIGRIESKGTSPWDDTPSSLRKTGAHHGPGVLGPSGGQEGMGGIWVAGLTESGQGVDARSHWLSRAPGLGAQGSGGTLGDKKGLRGPGSIGSEPDFWNGSGSSRVKGPRGETGYKDGLEGPGRMESRYEGGLGYSREISSKSGAGYSYGSGVPGEMGSGHGAGCRVSPRAPAGVESEEGGGYRHGSGAPGGVWSGNEDSGPAGGGSGRVASLKNGSGGPDGAPMNDTRNWASACQAGMDPRGGHHSDGGLGSPGVTGSAGRGGLKAPGVVETVGMGCVEAEPESSGRIRPWGQTGNYGGFRASEALGAFGEGGYEDGSGGPGAMGPGSLRAGSKVGEGDGTRCPGAKASGAGAGYRDDTRHPESLAPHNGAASGSQWAYGAGNVLGYEDGSELPGPQGTGVRTAYGERSRGLGPRSTGPGGEAGFRDGSGGLQGMGSADGPGCRKGIGSSGEMGSVDKEGYKKDLGAPENMGSGSKADYRDGVGGSGAMGSMDEAGYRKDLGAPEGISSGSKADYRGGLQDSREAGSGSKADYSGGLKGSREIGSMDETDNRKDLGVPEGMGAGYRAGLRGPGEMGSLDESGHRNGIGGYGEMGSGYREDLGAPEGMGTGSKAGYRDGLRGSGEMRSMDEAGYRKNLGAPERMDSGSKAGYRGGLRGSGEMGLIEAGYRKDLGVSEGGGSGSKAGYRGGLGSGEMGSVDKAGYRKDLGASEAIGSGSKAGFTDGLGGSEEMGSVNKAGYRKDLGAPKGMGSGSKASFRDGLGGSGEMGSVNEAGYRKDLGVPEGIGSGSKAGFRDGLGGSEEMGSVNKAGYRKDLGAPKGIGSGSKAGFRDGLGSSGEMGSMDEAGYRKNLGAPEGIGSGSKAGFRDGLGSSVEMGSVNEAGYRKDLGAPEGMGSGSKAGFRDGLGGSGEMGSVNEAGYRKDLGAPKGIGSGSKADFRDALGSSGEMGSMDEAGYRKDLWAPEGIGSGSKAGFRDGLGSSVEMGSVNEAGYRKDLGAPEGMGSGSKAGFRDGLGGSGEMGSVNEAGYRKDLGAPKGIGSGSKADFRDALGSSGEMGSMDEAGYRKDLWAPEGIGSGSKAGFRDGLGSSVEMGSVNEAGYRKDLGAPEGMGSGSKEGFRDGLGGSEEMGSVNKAGYRKDLGAPKGMGSGSKEGFRDGLGGSEEMGSMDEAGYRKDLGAPEGIGSGSKAGFRDGLGGSEEMRSMDEAGYRKDLGAPERIGSGSKAGFRDGLGSSVEMGSVNEAGYRKDLGAPKGMGSGSKTGFRDGLGGSEEMESMDEAGYRKDLGAPEGIGSGSKAGFRDGLGSSTEMGSVNEAGYRKDLGAPKGMGSESKAGFRDGLGSSGEMGSMDEAGYRKDLGAPEGMGSGSKAGFRDGLGGSEEMGSVNKAGYRKDLGAPKGMGSGSKAGFRDGLGSSGEMGSMDEADYRKDLGAPEEMGSGSYTDYRNGLGSSGKISSGDEAGYKNVLGGSGRNPLGSEAGSRGSLEDSGYILSWNEAGSRQGFGGTSGMGSGSEVSYRGGSGGSGETGPEGKMGYGDGSGRLGVPGSLAGIGHEAGPRGHKAMGHRSGYWVASEGDTNSKDGPERARETRLVDGAGPGVEPGMAGMPGTAGGMAHRDSLRGTGVLGSQGGRQTLSDERGSTKDLGGYGTSGIPEASEAAGAKGKPDVKEWQDSSGTPGSSRDRGAPRVKDRSPDQAGIMGASGFLDGKGAVEGETWAGMAALGSGYERDIWKAGPGMTDRGRVAGQGGLASQGGGDSLLGGRRVGSGSSVGTGQDLDSGSMPGGRGKSTSGPADRQGTSNAWAPDWENQGFSQGSIDAGKQPAGSRASGSLQEKDAAFGGTHEGPGGFKGGEGAPGQEAAGGCRSPWSLDSKGSSPGRGSSVDAEDSGILGKGNSTEWGNALTPKPGESGPQGAWNGLDGPFGRKASRDRSGGTQDLSSQRGKGQRGGKRSLGEQGSLEAENGEVQGPGALKEDEGQGVEEAGRSGRRPGSLRSRSQAQSGAEVGGGKRRGADEAGSMGWQPMGENWGCLEEMLNEDQSREPPGHLGSRRSGKDGRLDIYGERRDATRSSTSRYKPGTGSFSKDAQGPMGHFSQGLADMEVQPGEAATLSCTLTSDLGPGTWFKDGVKLTTQDGVIFKQDGLVHSLFITHVQGTQAGRYTFVAGDQQSEATLTVQDSPTIAPDVTEKLREPLVVKAGKPVIVKIPFQSHLPIQAAWRKDGAEVVGSSDREAQVDLGDGYTRLCLPSAGRKDCGQYSVTLRSEGGSVQAELTLQVIDKPDPPQGPMEVQDCHRAGVCLRWRPPRDNGGRTVECYVVERRQAGRSTWLKVGEAPADSTTFTDAHVEPGRKYTFRVRAVTSEGAGEALESEEILVAPEALPKAPSAPAILSASSQGITLTWTAPRGPGSAHILGYLIERRKKGSNTWTAVNDQPVPERRWTVADVRQGCQYEFRVTAVAPSGPGEPGPPSDAVFARDPMRPPGLVRNLQVTDRSNTSITLSWAGPDTQEGDEAQGYVVELCSSDSLQWLPCHVGTVPVTTYTAKGLRPGEGYFVRVTAVNEGGQSQPSALDTLVQAMPVTVCPKFLVDSSTKDLLTVKVGDTVRVPVSFEAMPMPEVTWLKDGLPLPKRSVTVTKDGLTQLLIPVAGLSDSGLYTVVLRTLQGKEVAHSFRIRVAACPQAPGPIHLQENVPGTVTAEWEPSPDEAQDVPLHYAVFTRSSAHGPWHEAADRIHTNRFTLLGILPGHEYHFRVVAKNELGASKPSDTSQPWCIPRQRDRFTVKAPCYREPDLSQKPRFLVGLRSHLLPQGCECCMSCAVQGSPRPHVTWFKNDRSLEGNPAVYSTDLLGVCSLTIPSVSPKDSGEYKAVAENTLGQAVSTATLIVIEPST

SEQ ID NO: 33783 - protein, 269 aa, Homo sapiens
MSSYFVNSFSGRYPNGPDYQLLNYGSGSSLSGSYRDPAAMHTGSYGYNYNGMDLSVNRSSASSSHFGAVGESSRAFPAPAQEPRFRQAASSCSLSSPESLPCTNGDSHGAKPSASSPSDQATSASSSANFTEIDEASASSEPEEAASQLSSPSLARAQPEPMATSTAAPEGQTPQIFPWMRKLHISHDMTGPDGKRARTAYTRYQTLELEKEFHFNRYLTRRRRIEIAHALCLSERQIKIWFQNRRMKWKKDNKLKSMSLATAGSAFQP

SEQ ID NO: 33784 - protein, 189 aa, Homo sapiens
MLGSRAVMLLLLLPWTAQGRAVPGGSSPAWTQCQQLSQKLCTLAWSAHPLVGHMDLREEGDEETTNDVPHIQCGDGCDPQGLRDNSQFCLQRIHQGLIFYEKLLGSDIFTGEPSLLPDSPVGQLHASLLGLSQLLQPEGHHWETQQIPSLSPSQPWQRLLLRFKILRSLQAFVAVAARVFAHGAATLSP

SEQ ID NO: 33785 - protein, 242 aa, Homo sapiens
MSSYFVNPLFSKYKAGESLEPAYYDCRFPQSVGRSHALVYGPGGSAPGFQHASHHVQDFFHHGTSGISNSGYQQNPCSLSCHGDASKFYGYEALPRQSLYGAQQEASVVQYPDCKSSANTNSSEGQGHLNQNSSPSLMFPWMRPHAPGRRSGRQTYSRYQTLELEKEFLFNPYLTRKRRIEVSHALGLTERQVKIWFQNRRMKWKKENNKDKLPGARDEEKVEEEGNEEEEKEEEEKEENKD

SEQ ID NO: 33786 - protein, 164 aa, Homo sapiens
MASHSGPSTSVLFLFCCLGGWLASHTLPVRLLRPSDDVQKIVEELQSLSKMLLKDVEEEKGVLVSQNYTLPCLSPDAQPPNNIHSPAIRAYLKTIRQLDNKSVIDEIIEHLDKLIFQDAPETNISVPTDTHECKRFILTISQQFSECMDLALKSLTSGAQQATT

SEQ ID NO: 33787 - protein, 584 aa, Homo sapiens
MASVQASRRQWCYLCDLPKMPWAMVWDFSEAVCRGCVNFEGADRIELLIDAARQLKRSHVLPEGRSPGPPALKHPATKDLAAAAAQGPQLPPPQAQPQPSGTGGGVSGQDRYDRATSSGRLPLPSPALEYTLGSRLANGLGREEAVAEGARRALLGSMPGLMPPGLLAAAVSGLGSRGLTLAPGLSPARPLFGSDFEKEKQQRNADCLAELNEAMRGRAEEWHGRPKAVREQLLALSACAPFNVRFKKDHGLVGRVFAFDATARPPGYEFELKLFTEYPCGSGNVYAGVLAVARQMFHDALREPGKALASSGFKYLEYERRHGSGEWRQLGELLTDGVRSFREPAPAEALPQQYPEPAPAALCGPPPRAPSRNLAPTPRRRKASPEPEGEAAGKMTTEEQQQRHWVAPGGPYSAETPGVPSPIAALKNVAEALGHSPKDPGGGGGPVRAGGASPAASSTAQPPTQHRLVARNGEAEVSPTAGAEAVSGGGSGTGATPGAPLCCTLCRERLEDTHFVQCPSVPGHKFCFPCSREFIKAQGPAGEVYCPSGDKCPLVGSSVPWAFMQGEIATILAGDIKVKKERDP

SEQ ID NO: 33788 - protein, 420 aa, Homo sapiens
MIIVAHVLLILLGATEILQADLLPDEKISLLPPVNFTIKVTGLAQVLLQWKPNPDQEQRNVNLEYQVKINAPKEDDYETRITESKCVTILHKGFSASVRTILQNDHSLLASSWASAELHAPPGSPGTSIVNLTCTTNTTEDNYSRLRSYQVSLHCTWLVGTDAPEDTQYFLYYRYGSWTEECQEYSKDTLGRNIACWFPRTFILSKGRDWLAVLVNGSSKHSAIRPFDQLFALHAIDQINPPLNVTAEIEGTRLSIQWEKPVSAFPIHCFDYEVKIHNTRNGYLQIEKLMTNAFISIIDDLSKYDVQVRAAVSSMCREAGLWSEWSQPIYVGNDEHKPLREWFVIVIMATICFILLILSLICKICHLWIKLFPPIPAPKSNIKDLFVTTNYEKAGSSETEIEVICYIEKPGVETLEDSVF

SEQ ID NO: 33789 - protein, 335 aa, Homo sapiens
MIIVAHVLLILLGATEILQADLLPDEKISLLPPVNFTIKVTGLAQVLLQWKPNPDQEQRNVNLEYQVKINAPKEDDYETRITESKCVTILHKGFSASVRTILQNDHSLLASSWASAELHAPPGSPGTSIVNLTCTTNTTEDNYSRLRSYQVSLHCTWLVGTDAPEDTQYFLYYRYGSWTEECQEYSKDTLGRNIACWFPRTFILSKGRDWLAVLVNGSSKHSAIRPFDQLFALHAIDQINPPLNVTAEIEGTRLSIQWEKPVSAFPIHCFDYEVKIHNTRNGYLQIEKLMTNAFISIIDDLSKYDVQVRAAVSSMCREAGLWSEWSQPIYVGFSR

SEQ ID NO: 33790 - protein, 333 aa, Homo sapiens
MIIVAHVLLILLGATEILQADLLPDEKISLLPPVNFTIKVTGLAQVLLQWKPNPDQEQRNVNLEYQVKINAPKEDDYETRITESKCVTILHKGFSASVRTILQNDHSLLASSWASAELHAPPGSPGTSIVNLTCTTNTTEDNYSRLRSYQVSLHCTWLVGTDAPEDTQYFLYYRYGSWTEECQEYSKDTLGRNIACWFPRTFILSKGRDWLAVLVNGSSKHSAIRPFDQLFALHAIDQINPPLNVTAEIEGTRLSIQWEKPVSAFPIHCFDYEVKIHNTRNGYLQIEKLMTNAFISIIDDLSKYDVQVRAAVSSMCREAGLWSEWSQPIYVGK

SEQ ID NO: 33791 - protein, 378 aa, Homo sapiens
MIIVAHVLLILLGATEILQADLLPDEKISLLPPVNFTIKVTGLAQVLLQWKPNPDQEQRNVNLEYQVKINAPKEDDYETRITESKCVTILHKGFSASVRTILQNDHSLLASSWASAELHAPPGSPGTSIVNLTCTTNTTEDNYSRLRSYQVSLHCTWLVGTDAPEDTQYFLYYRYGSWTEECQEYSKDTLGRNIACWFPRTFILSKGRDWLAVLVNGSSKHSAIRPFDQLFALHAIDQINPPLNVTAEIEGTRLSIQWEKPVSAFPIHCFDYEVKIHNTRNGYLQIEKLMTNAFISIIDDLSKYDVQVRAAVSSMCREAGLWSEWSQPIYVGNDEHKPLREWFVIVIMATICFILLILSLICKIKLGPVRRKLKSSVI

SEQ ID NO: 33792 - protein, 211 aa, Homo sapiens
MIIVAHVLLILLGATEILQADLLPDEKISLLPPVNFTIKVTGLAQVLLQWKPNPDQEQRNVNLEYQVKINAPKEDDYETRITESKCVTILHKGFSASVRTILQNDHSLLASSWASAELHAPPGNDEHKPLREWFVIVIMATICFILLILSLICKICHLWIKLFPPIPAPKSNIKDLFVTTNYEKAGSSETEIEVICYIEKPGVETLEDSVF

SEQ ID NO: 33793 - protein, 492 aa, Homo sapiens
MPSFLVPSLVSSPVLLKLLFSPGPKTIWSLWQQPMLFQEATAFENMTKDWNYLEGSQKDCYRDTMLDSYENTVPQGSFLQLSMMPQRAGNDPPGVSNASEMEMEISNMREKFLMSVTKLVESKSYNSKVFSKEKYFQTIKEVKEAKEKGKKSSRDYRRAAKYDVISVQGTEKLIEATHGERDRIRYYVHKEELFDILHDTHLSIGHGGRTRMLKELQGKYGNVTKEVIVLYLTLCKQCHQKNPVPKRGLAPKPMTFKDIDSTCQVEILDMQSSADGEFKFILYYQDHSTKFIILRPLRTKQAHEVVSVLLDIFTILGTPSVLDSDSGVEFTNQVVHELNELWPDLKIVSGKYHPGQSQGSLEGASRDVKNMISTWMQSNHSCHWAKGLRFMQMVRNQAFDVSLQQSPFEAMFGYKAKFGLYSSNLPRETVATLQTEEELEIAEEQLENSLWIRQEERAEIGADRSDMDDDMDPTPEASEPSTSQGTSGLLCW

SEQ ID NO: 33794 - protein, 244 aa, Homo sapiens
MSAAAYMDFVAAQCLVSISNRAAVPEHGVAPDAERLRLPEREVTKEHGDPGDTWKDYCTLVTIAKSLLDLNKYRPIQTPSVCSDSLESPDEDMGSDSDVTTESGSSPSHSPEERQDPGSAPSPLSLLHPGVAAKGKHASEKRHKCPYSGCGKVYGKSSHLKAHYRVHTGERPFPCTWPDCLKKFSRSDELTRHYRTHTGEKQFRCPLCEKRFMRSDHLTKHARRHTEFHPSMIKRSKKALANAL

SEQ ID NO: 33795 - protein, 568 aa, Homo sapiens
MGGIMAPKDIMTNTHAKSILNSMNSLRKSNTLCDVTLRVEQKDFPAHRIVLAACSDYFCAMFTSELSEKGKPYVDIQGLTASTMEILLDFVYTETVHVTVENVQELLPAACLLQLKGVKQACCEFLESQLDPSNCLGIRDFAETHNCVDLMQAAEVFSQKHFPEVVQHEEFILLSQGEVEKLIKCDEIQVDSEEPVFEAVINWVKHAKKEREESLPNLLQYVRMPLLTPRYITDVIDAEPFIRCSLQCRDLVDEAKKFHLRPELRSQMQGPRTRARLGANEVLLVVGGFGSQQSPIDVVEKYDPKTQEWSFLPSITRKRRYVASVSLHDRIYVIGGYDGRSRLSSVECLDYTADEDGVWYSVAPMNVRRGLAGATTLGDMIYVSGGFDGSRRHTSMERYDPNIDQWSMLGDMQTAREGAGLVVASGVIYCLGGYDGLNILNSVEKYDPHTGHWTNVTPMATKRSGAGVALLNDHIYVVGGFDGTAHLSSVEAYNIRTDSWTTVTSMTTPRCYVGATVLRGRLYAIAGYDGNSLLSSIECYDPIIDSWEVVTSMGTQRCDAGVCVLREK

SEQ ID NO: 33796 - protein, 606 aa, Homo sapiens
MDVNKFEASVGFLDVKKFLSTWKLQNPRTHFVLSPHCFMGGIMAPKDIMTNTHAKSILNSMNSLRKSNTLCDVTLRVEQKDFPAHRIVLAACSDYFCAMFTSELSEKGKPYVDIQGLTASTMEILLDFVYTETVHVTVENVQELLPAACLLQLKGVKQACCEFLESQLDPSNCLGIRDFAETHNCVDLMQAAEVFSQKHFPEVVQHEEFILLSQGEVEKLIKCDEIQVDSEEPVFEAVINWVKHAKKEREESLPNLLQYVRMPLLTPRYITDVIDAEPFIRCSLQCRDLVDEAKKFHLRPELRSQMQGPRTRARLGANEVLLVVGGFGSQQSPIDVVEKYDPKTQEWSFLPSITRKRRYVASVSLHDRIYVIGGYDGRSRLSSVECLDYTADEDGVWYSVAPMNVRRGLAGATTLGDMIYVSGGFDGSRRHTSMERYDPNIDQWSMLGDMQTAREGAGLVVASGVIYCLGGYDGLNILNSVEKYDPHTGHWTNVTPMATKRSGAGVALLNDHIYVVGGFDGTAHLSSVEAYNIRTDSWTTVTSMTTPRCYVGATVLRGRLYAIAGYDGNSLLSSIECYDPIIDSWEVVTSMGTQRCDAGVCVLREK

SEQ ID NO: 33797 - protein, 217 aa, Homo sapiens
MDAPRRFPTLVQLMQPKAMPVEVLGHLPKRFSWFHSEFLKNPKVVRLEVWLVEKIFGRGGERIPHVQGMSQILIHVNRLDPNGEAEILVFGRPSYQEDTIKMIMNLADYHRQLQAKGSGKALAQDVATQKAETQRSSIEVREAGTQRSVEVREAGTQRSVEVQEVGTQGSPVEVQEAGTQQSLQAANKSGTQRSPEAASKAVTQRFREDARDPVTRL

SEQ ID NO: 33798 - protein, 385 aa, Homo sapiens
MGCGASRKVVPGPPALAWAKHEGQNQAGVGGAGPGPEAAAQAAQRIQVARFRAKFDPRVLARYDIKALIGTGSFSRVVRVEQKTTKKPFAIKVMETREREGREACVSELSVLRRVSHRYIVQLMEIFETEDQVYMVMELATGGELFDRLIAQGSFTERDAVRILQMVADGIRYLHALQITHRNLKPENLLYYHPGEESKILITDFGLAYSGKKSGDWTMKTLCGTPEYIAPEVLLRKPYTSAVDMWALGVITYALLSGFLPFDDESQTRLYRKILKGKYNYTGEPWPSISHLAKDFIDKLLILEAGHRMSAGQALDHPWVITMAAGSSMKNLQRAISRNLMQRASPHSQSPGSAQSSKSHYSHKSRHMWSKRNLRIVESPLSALL

SEQ ID NO: 33799 - protein, 655 aa, Homo sapiens
MAAGVAAWLPFARAAAIGWMPVANCPMPLAPADKNKRQDELIVLNVSGRRFQTWRTTLERYPDTLLGSTEKEFFFNEDTKEYFFDRDPEVFRCVLNFYRTGKLHYPRYECISAYDDELAFYGILPEIIGDCCYEEYKDRKRENAERLMDDNDSENNQESMPSLSFRQTMWRAFENPHTSTLALVFYYVTGFFIAVSVITNVVETVPCGTVPGSKELPCGERYSVAFFCLDTACVMIFTVEYLLRLFAAPSRYRFIRSVMSIIDVVAIMPYYIGLVMTNNEDVSGAFVTLRVFRVFRIFKFSRHSQGLRILGYTLKSCASELGFLLFSLTMAIIIFATVMFYAEKGSSASKFTSIPASFWYTIVTMTTLGYGDMVPKTIAGKIFGSICSLSGVLVIALPVPVIVSNFSRIYHQNQRADKRRAQKKARLARIRVAKTGSSNAYLHSKRNGLLNEALELTGTPEEEHMGKTTSLIESQHHHLLHCLEKTTGLSYLVDDPLLSVRTSTIKNHEFIDEQMFEQNCMESSMQNYPSTRSPSLSSHPGLTTTCCSRRSKKTTHLPNSNLPATRLRSMQELSTIHIQGSEQPSLTTSRSSLNLKADDGLRPNCKTSQITTAIISIPTPPALTPEGESRPPPASPGPNTNIPSIASNVVKVSAL

SEQ ID NO: 33800 - protein, 636 aa, Homo sapiens
MAAGVAAWLPFARAAAIGWMPVANCPMPLAPADKNKRQDELIVLNVSGRRFQTWRTTLERYPDTLLGSTEKEFFFNEDTKEYFFDRDPEVFRCVLNFYRTGKLHYPRYECISAYDDELAFYGILPEIIGDCCYEEYKDRKRENAERLMDDNDSENNQESMPSLSFRQTMWRAFENPHTSTLALVFYYVTGFFIAVSVITNVVETVPCGTVPGSKELPCGERYSVAFFCLDTACVMIFTVEYLLRLFAAPSRYRFIRSVMSIIDVVAIMPYYIGLVMTNNEDVSGAFVTLRVFRVFRIFKFSRHSQGLRILGYTLKSCASELGFLLFSLTMAIIIFATVMFYAEKGSSASKFTSIPASFWYTIVTMTTLGYGDMVPKTIAGKIFGSICSLSGVLVIALPVPVIVSNFSRIYHQNQRADKRRAQKKARLARIRVAKTGSSNAYLHSKRNGLLNEALELTGTPEEEHMGKTTSLIESQHHHLLHCLEKTTNHEFIDEQMFEQNCMESSMQNYPSTRSPSLSSHPGLTTTCCSRRSKKTTHLPNSNLPATRLRSMQELSTIHIQGSEQPSLTTSRSSLNLKADDGLRPNCKTSQITTAIISIPTPPALTPEGESRPPPASPGPNTNIPSIASNVVKVSAL

SEQ ID NO: 33801 - protein, 513 aa, Homo sapiens
MAEVGEIIEGCRLPVLRRNQDNEDEWPLAEILSVKDISGRKLFYVHYIDFNKRLDEWVTHERLDLKKIQFPKKEAKTPTKNGLPGSRPGSPEREVPASAQASGKTLPIPVQITLRFNLPKEREAIPGGEPDQPLSSSSCLQPNHRSTKRKVEVVSPATPVPSETAPASVFPQNGAARRAVAAQPGRKRKSNCLGTDEDSQDSSDGIPSAPRMTGSLVSDRSHDDIVTRMKNIECIELGRHRLKPWYFSPYPQELTTLPVLYLCEFCLKYGRSLKCLQRHLTKCDLRHPPGNEIYRKGTISFFEIDGRKNKSYSQNLCLLAKCFLDHKTLYYDTDPFLFYVMTEYDCKGFHIVGYFSKEKESTEDYNVACILTLPPYQRRGYGKLLIEFSYELSKVEGKTGTPEKPLSDLGLLSYRSYWSQTILEILMGLKSESGERPQITINEISEITSIKKEDVISTLQYLNLINYYKGQYILTLSEDIVDGHERAMLKRLLRIDSKCLHFTPKDWSKRGKW

SEQ ID NO: 33802 - protein, 461 aa, Homo sapiens
MAEVGEIIEGCRLPVLRRNQDNEDEWPLAEILSVKDISGRKLFYVHYIDFNKRLDEWVTHERLDLKKIQFPKKEAKTPTKNGLPGSRPGSPEREVKRKVEVVSPATPVPSETAPASVFPQNGAARRAVAAQPGRKRKSNCLGTDEDSQDSSDGIPSAPRMTGSLVSDRSHDDIVTRMKNIECIELGRHRLKPWYFSPYPQELTTLPVLYLCEFCLKYGRSLKCLQRHLTKCDLRHPPGNEIYRKGTISFFEIDGRKNKSYSQNLCLLAKCFLDHKTLYYDTDPFLFYVMTEYDCKGFHIVGYFSKEKESTEDYNVACILTLPPYQRRGYGKLLIEFSYELSKVEGKTGTPEKPLSDLGLLSYRSYWSQTILEILMGLKSESGERPQITINEISEITSIKKEDVISTLQYLNLINYYKGQYILTLSEDIVDGHERAMLKRLLRIDSKCLHFTPKDWSKRGKW

SEQ ID NO: 33803 - protein, 546 aa, Homo sapiens
MAEVVSPVPGAGRREPGEVGRARGPPVADPGVALSPQGEIIEGCRLPVLRRNQDNEDEWPLAEILSVKDISGRKLFYVHYIDFNKRLDEWVTHERLDLKKIQFPKKEAKTPTKNGLPGSRPGSPEREVPASAQASGKTLPIPVQITLRFNLPKEREAIPGGEPDQPLSSSSCLQPNHRSTKRKVEVVSPATPVPSETAPASVFPQNGAARRAVAAQPGRKRKSNCLGTDEDSQDSSDGIPSAPRMTGSLVSDRSHDDIVTRMKNIECIELGRHRLKPWYFSPYPQELTTLPVLYLCEFCLKYGRSLKCLQRHLTKCDLRHPPGNEIYRKGTISFFEIDGRKNKSYSQNLCLLAKCFLDHKTLYYDTDPFLFYVMTEYDCKGFHIVGYFSKEKESTEDYNVACILTLPPYQRRGYGKLLIEFSYELSKVEGKTGTPEKPLSDLGLLSYRSYWSQTILEILMGLKSESGERPQITINEISEITSIKKEDVISTLQYLNLINYYKGQYILTLSEDIVDGHERAMLKRLLRIDSKCLHFTPKDWSKRGKW

SEQ ID NO: 33804 - protein, 494 aa, Homo sapiens
MAEVVSPVPGAGRREPGEVGRARGPPVADPGVALSPQGEIIEGCRLPVLRRNQDNEDEWPLAEILSVKDISGRKLFYVHYIDFNKRLDEWVTHERLDLKKIQFPKKEAKTPTKNGLPGSRPGSPEREVKRKVEVVSPATPVPSETAPASVFPQNGAARRAVAAQPGRKRKSNCLGTDEDSQDSSDGIPSAPRMTGSLVSDRSHDDIVTRMKNIECIELGRHRLKPWYFSPYPQELTTLPVLYLCEFCLKYGRSLKCLQRHLTKCDLRHPPGNEIYRKGTISFFEIDGRKNKSYSQNLCLLAKCFLDHKTLYYDTDPFLFYVMTEYDCKGFHIVGYFSKEKESTEDYNVACILTLPPYQRRGYGKLLIEFSYELSKVEGKTGTPEKPLSDLGLLSYRSYWSQTILEILMGLKSESGERPQITINEISEITSIKKEDVISTLQYLNLINYYKGQYILTLSEDIVDGHERAMLKRLLRIDSKCLHFTPKDWSKRGKW

SEQ ID NO: 33805 - protein, 454 aa, Homo sapiens
MFLAQRSLCSLSGRAKFLKTISSSKILGFSTSAKMSLKFTNAKRIEGLDSNVWIEFTKLAADPSVVNLGQGFPDISPPTYVKEELSKIAAIDSLNQYTRGFGHPSLVKALSYLYEKLYQKQIDSNKEILVTVGAYGSLFNTIQALIDEGDEVILIVPFYDCYEPMVRMAGATPVFIPLRSKPVYGKRWSSSDWTLDPQELESKFNSKTKAIILNTPHNPLGKVYNREELQVIADLCIKYDTLCISDEVYEWLVYSGNKHLKIATFPGMWERTITIGSAGKTFSVTGWKLGWSIGPNHLIKHLQTVQQNTIYTCATPLQEALAQAFWIDIKRMDDPECYFNSLPKELEVKRDRMVRLLESVGLKPIVPDGGYFIIADVSLLDPDLSDMKNNEPYDYKFVKWMTKHKKLSAIPVSAFCNSETKSQFEKFVRFCFIKKDSTLDAAEEIIKAWSVQKS

SEQ ID NO: 33806 - protein, 167 aa, Homo sapiens
MFLAQRSLCSLSGRAKFLKTISSSKILGFSTSAKMSLKFTNAKRIEGLDSNVWIEFTKLAADPSVVNLGQGFPDISPPTYVKEELSKIAAIDSLNQYTRGFGHPSLVKALSYLYEKLYQKQIDSNKEILVTVGAYGSLFNTIQALIDEGDEYNACTVKFTNLKCTAG

SEQ ID NO: 33807 - protein, 420 aa, Homo sapiens
MSLKFTNAKRIEGLDSNVWIEFTKLAADPSVVNLGQGFPDISPPTYVKEELSKIAAIDSLNQYTRGFGHPSLVKALSYLYEKLYQKQIDSNKEILVTVGAYGSLFNTIQALIDEGDEVILIVPFYDCYEPMVRMAGATPVFIPLRSKPVYGKRWSSSDWTLDPQELESKFNSKTKAIILNTPHNPLGKVYNREELQVIADLCIKYDTLCISDEVYEWLVYSGNKHLKIATFPGMWERTITIGSAGKTFSVTGWKLGWSIGPNHLIKHLQTVQQNTIYTCATPLQEALAQAFWIDIKRMDDPECYFNSLPKELEVKRDRMVRLLESVGLKPIVPDGGYFIIADVSLLDPDLSDMKNNEPYDYKFVKWMTKHKKLSAIPVSAFCNSETKSQFEKFVRFCFIKKDSTLDAAEEIIKAWSVQKS

SEQ ID NO: 33808 - protein, 415 aa, Homo sapiens
MDFDKKGGKGETEEGRRMSKAGGGRSSHGIRSSGTSSGVLMVGPNFRVGKKIGCGNFGELRLGKNLYTNEYVAIKLEPIKSRAPQLHLEYRFYKQLSATEGVPQVYYFGPCGKYNAMVLELLGPSLEDLFDLCDRTFTLKTVLMIAIQLITRMEYVHTKSLIYRDVKPENFLVGRPGTKRQHAIHIIDFGLAKEYIDPETKKHIPYREHKSLTGTARYMSINTHLGKEQSRRDDLEALGHMFMYFLRGSLPWQGLKADTLKERYQKIGDTKRATPIEVLCENFPEEMATYLRYVRRLDFFEKPDYDYLRKLFTDLFDRSGFVFDYEYDWAGKPLPTPIGTVHTDLPSQPQLRDKTQPHSKNQALNSTNGELNADDPTAGHSNAPITAPAEVEVADETKCCCFFKRRKRKSLQRHK

SEQ ID NO: 33809 - protein, 276 aa, Homo sapiens
MRAPHLHLSAASGARALAKLLPLLMAQLWAAEAALLPQNDTRLDPEAYGSPCARGSQPWQVSLFNGLSFHCAGVLVDQSWVLTAAHCGNKPLWARVGDDHLLLLQGEQLRRTTRSVVHPKYHQGSGPILPRRTDEHDLMLLKLARPVVLGPRVRALQLPYRCAQPGDQCQVAGWGTTAARRVKYNKGLTCSSITILSPKECEVFYPGVVTNNMICAGLDRGQDPCQSDSGGPLVCDETLQGILSWGVYPCGSAQHPAVYTQICKYMSWINKVIRSN

SEQ ID NO: 33810 - protein, 898 aa, Homo sapiens
MSVTEEDLCHHMKVVVRVRPENTKEKAAGFHKVVHVVDKHILVFDPKQEEVSFFHGKKTTNQNVIKKQNKDLKFVFDAVFDETSTQSEVFEHTTKPILRSFLNGYNCTVLAYGATGAGKTHTMLGSADEPGVMYLTMLHLYKCMDEIKEEKICSTAVSYLEVYNEQIRDLLVNSGPLAVREDTQKGVVVHGLTLHQPKSSEEILHLLDNGNKNRTQHPTDMNATSSRSHAVFQIYLRQQDKTASINQNVRIAKMSLIDLAGSERASTSGAKGTRFVEGTNINRSLLALGNVINALADSKRKNQHIPYRNSKLTRLLKDSLGGNCQTIMIAAVSPSSVFYDDTYNTLKYANRAKDIKSSLKSNVLNVNNHITQYVKICNEQKAEILLLKEKLKAYEEQKAFTNENDQAKLMISNPQEKEIERFQEILNCLFQNREEIRQEYLKLEMLLKENELKSFYQQQCHKQIEMMCSEDKVEKATGKRDHRLAMLKTRRSYLEKRREEELKQFDENTNWLHRVEKEMGLLSQNGHIPKELKKDLHCHHLHLQNKDLKAQIRHMMDLACLQEQQHRQTEAVLNALLPTLRKQYCTLKEAGLSNAAFESDFKEIEHLVERKKVVVWADQTAEQPKQNDLPGISVLMTFPQLGPVQPIPCCSSSGGTNLVKIPTEKRTRRKLMPSPLKGQHTLKSPPSQSVQLNDSLSKELQPIVYTPEDCRKAFQNPSTVTLMKPSSFTTSFQAISSNINSDNCLKMLCEVAIPHNRRKECGQEDLDSTFTICEDIKSSKCKLPEQESLPNDNKDILQRLDPSSFSTKHSMPVPSMVPSYMAMTTAAKRKRKLTSSTSNSSLTADVNSGFAKRVRQDNSSEKHLQENKPTMEHKRNICKINPSMVRKFGRNISKGNLR

SEQ ID NO: 33811 - protein, 501 aa, Homo sapiens
MSALRRKFGDDYQVVTTSSSGSGLQPQGPGQDPQQQLVPKKKRQRFVDKNGRCNVQHGNLGSETSRYLSDLFTTLVDLKWRWNLFIFILTYTVAWLFMASMWWVIAYTRGDLNKAHVGNYTPCVANVYNFPSAFLFFIETEATIGYGYRYITDKCPEGIILFLFQSILGSIVDAFLIGCMFIKMSQPKKRAETLMFSEHAVISMRDGKLTLMFRVGNLRNSHMVSAQIRCKLLKSRQTPEGEFLPLDQLELDVGFSTGADQLFLVSPLTICHVIDAKSPFYDLSQRSMQTEQFEIVVILEGIVETTGMTCQARTSYTEDEVLWGHRFFPVISLEEGFFKVDYSQFHATFEVPTPPYSVKEQEEMLLMSSPLIAPAITNSKERHNSVECLDGLDDITTKLPSKLQKITGREDFPKKLLRMSSTTSEKAYSLGDLPMKLQRISSVPGNSEEKLVSKTTKMLSDPMSQSVADLPPKLQKMAGGAARMEGNLPAKLRKMNSDRFT

SEQ ID NO: 33812 - protein, 235 aa, Homo sapiens
MSALRRKFGDDYQVVTTSSSGSGLQPQGPGQDPQQQLVPKKKRQRFVDKNGRCNVQHGNLGSETSRYLSDLFTTLVDLKWRWNLFIFILTYTVAWLFMASMWWVIAYTRGDLNKAHVGNYTPCVANVYNFPSAFLFFIETEATIGYGYRYITDKCPEGIILFLFQSILGSIVDAFLIGCMFIKMSQPKKRAETLMFSEHAVISMRDGKLTLMFRVGNLRNSHMVSAQIRCKLLKG

SEQ ID NO: 33813 - protein, 391 aa, Homo sapiens
MNASSRNVFDTLIRVLTESMFKHLRKWVVTRFFGHSRQRARLVSKDGRCNIEFGNVEAQSRFIFFVDIWTTVLDLKWRYKMTIFITAFLGSWFFFGLLWYAVAYIHKDLPEFHPSANHTPCVENINGLTSAFLFSLETQVTIGYGFRCVTEQCATAIFLLIFQSILGVIINSFMCGAILAKISRPKKRAKTITFSKNAVISKRGGKLCLLIRVANLRKSLLIGSHIYGKLLKTTVTPEGETIILDQININFVVDAGNENLFFISPLTIYHVIDHNSPFFHMAAETLLQQDFELVVFLDGTVESTSATCQVRTSYVPEEVLWGYRFAPIVSKTKEGKYRVDFHNFSKTVEVETPHCAMCLYNEKDVRARMKRGYDNPNFILSEVNETDDTKM

SEQ ID NO: 33814 - protein, 372 aa, Homo sapiens
MFKHLRKWVVTRFFGHSRQRARLVSKDGRCNIEFGNVEAQSRFIFFVDIWTTVLDLKWRYKMTIFITAFLGSWFFFGLLWYAVAYIHKDLPEFHPSANHTPCVENINGLTSAFLFSLETQVTIGYGFRCVTEQCATAIFLLIFQSILGVIINSFMCGAILAKISRPKKRAKTITFSKNAVISKRGGKLCLLIRVANLRKSLLIGSHIYGKLLKTTVTPEGETIILDQININFVVDAGNENLFFISPLTIYHVIDHNSPFFHMAAETLLQQDFELVVFLDGTVESTSATCQVRTSYVPEEVLWGYRFAPIVSKTKEGKYRVDFHNFSKTVEVETPHCAMCLYNEKDVRARMKRGYDNPNFILSEVNETDDTKM

SEQ ID NO: 33815 - protein, 389 aa, Homo sapiens
MPTVYLCSEQIRVLTESMFKHLRKWVVTRFFGHSRQRARLVSKDGRCNIEFGNVEAQSRFIFFVDIWTTVLDLKWRYKMTIFITAFLGSWFFFGLLWYAVAYIHKDLPEFHPSANHTPCVENINGLTSAFLFSLETQVTIGYGFRCVTEQCATAIFLLIFQSILGVIINSFMCGAILAKISRPKKRAKTITFSKNAVISKRGGKLCLLIRVANLRKSLLIGSHIYGKLLKTTVTPEGETIILDQININFVVDAGNENLFFISPLTIYHVIDHNSPFFHMAAETLLQQDFELVVFLDGTVESTSATCQVRTSYVPEEVLWGYRFAPIVSKTKEGKYRVDFHNFSKTVEVETPHCAMCLYNEKDVRARMKRGYDNPNFILSEVNETDDTKM

SEQ ID NO: 33816 - protein, 2108 aa, Homo sapiens
MNSVAGNKERLAVSTRGKKYGVNEVCSPTKPAAPFSPESWYRKAYEESRAGSRPTPEGAGSALGSSGTPSPGSGTSSPSSFTGSPGPASPGIGTSSPGSLGGSPGFGTGSPGSGSGGGSSPGSDRGVWCENCNARLVELKRQALRLLLPGPFPGKDPAFSAVIHDKLQVPNTIRKAWNDRDNRCDICATHLNQLKQEAIQMVLTLEQAAGSEHYDASPCSPPPLSNIPTLVGSRHVGGLQQPRDWAFVPAPCATSNYTGFANKHGSKPSSLGVSNGAEKKSGSPTHQAKVSLQMATSPSNGNILNSVAIQAHQYLDGTWSLSRTNGVTLYPYQISQLMTESSREGLTEAVLNRYNADKPSACSVPASQGSCVASETSTGTSVAASFFARAAQKLNLSSKKKKHRPSTSSAAEPPLFATSFSGILQTSPPPAPPCLLRAVNKVKDTPGLGKVKVMLRICSTLARDTSESSSFLKVDPRKKQITLYDPLTCGGQNAFQKRGNQVPPKMFAFDAVFPQDASQAEVCAGTVAEVIQSVVNGADGCVFCFGHAKLGKSYTMIGKDDSMQNLGIIPCAISWLFKLINERKEKTGARFSVRVSAVEVWGKEENLRDLLSEVATGSLQDGQSPGVYLCEDPICGTQLQNQSELRAPTAEKAAFFLDAAIASRRSHQQDCDEDDHRNSHVFFTLHIYQYRMEKSGKGGMSGGRSRLHLIDLGSCVKALSKNREGGSGLCLSLSALGNVILALVNGSKHIPYKESKLAMLLRESLGNMNCRTTMIAHISAAVGSYAETLSTIQIASRVLRMKKKKTKYTSSSSGGESSCEEGRMRRPTQLRPFHTRATVDPDFPIAHLSSDPDYSSSSEQSCDTVIYIGPNGTALSDKELTDNEGPPDFVPIVPALQKTRGDSRPAEAGEAAAGKSERDCLKCNTFAELQERLDCIDGSEEPSSFPFEELPAQFGPEQASRGPRLSQAAGASPLSESDKEDNGSEGQLTNREGPELPASKMQRSHSPVPAAAPAHSPSPASPRSVPGSSSQHSASPLVQSPSLQSSRESLNSCGFVEGKPRPMGSPRLGIASLSKTSEYKPPSSPSQRCKVYTQKGVLPSPAPLPPSSKDSGVASRESLLQPEVRTPPVGMSPQVLKKSMSAGSEGFPETPVDDEQQAATPSESKKEILSTTMVTVQQPLELNGEDELVFTLVEELTISGVLDSGRPTSIISFNSDCSARALASGSRPVSIISSISEDLECYSSTAPVSEVSITQFLPLPKMSLDEKAQDAGSRRSSISSWLSEMSAGSEGEQSCHSFIAQTCFGHGEAMAEPVASEFVSSLQNTAVVCREKPKASPDNLLILSEMGDDSFNKAAPIKGCKISTVSKAMVTISNTANLSSCEGYIPMKTNITVYPCIAMSPRNIQEPEAPTATPKAGPTLAQSRESKENSAKKEMKFEDPWLKREEEVKKETAHPNEEGMMRCETATGPSNAETRAEQEQDGKPSPGDRLSSSSGEVSASPVTDNFRRVVDGCEMALPGLATQSPVHPNKSVKSSSLPRAFQKASRQEEPDSLSYYCAAETNGVGAASGTPPSKATLEGKVASPKHCVLARPKGTPPLPPVRKSSLDQKNRASPQHSASGSGTSSPLNQPAAFPAGLPDEPSGKTKDASSSSKLFSAKLEQLASRSNSLGRATVSHYECLSLERAESLSSVSSRLHAGKDGTMPRAGRSLGRSAGTSPPSSGASPKAGQSKISAVSRLLLASPRARGPSASTTKTLSFSTKSLPQAVGQGSSSPPGGKHTPWSTQSLSRNRSSGLASKLPLRAVSGRISELLQGGAGARGLQLRAGPEAEARGGALAEDEPAAAHLLPSPYSKITPPRRPHRCSSGHGSDNSSVLSGELPPAMGKTALFYHSGGSSGYESVMRDSEATGSASSAQDSTSENSSSVGGRCRSLKTPKKRSNPGSQRRRLIPALSLDTSSPVRKPPNSTGVRWVDGPLRSSPRGLGEPFEIKVYEIDDVERLQRRRGGASKEAMCFNAKLKILEHRQQRIAEVRAKYEWLMKELEATKQYLMLDPNKWLSEFDLEQVWELDSLEYLEALECVTERLESRVNFCKAHLMMITCFDITSRRR

SEQ ID NO: 33817 - protein, 1725 aa, Homo sapiens
MDWKAVAAQKLNLSSKKKKHRPSTSSAAEPPLFATSFSGILQTSPPPAPPCLLRAVNKVKDTPGLGKVKVMLRICSTLARDTSESSSFLKVDPRKKQITLYDPLTCGGQNAFQKRGNQVPPKMFAFDAVFPQDASQAEVCAGTVAEVIQSVVNGADGCVFCFGHAKLGKSYTMIGKDDSMQNLGIIPCAISWLFKLINERKEKTGARFSVRVSAVEVWGKEENLRDLLSEVATGSLQDGQSPGVYLCEDPICGTQLQNQSELRAPTAEKAAFFLDAAIASRRSHQQDCDEDDHRNSHVFFTLHIYQYRMEKSGKGGMSGGRSRLHLIDLGSCVKALSKNREGGSGLCLSLSALGNVILALVNGSKHIPYKESKLAMLLRESLGNMNCRTTMIAHISAAVGSYAETLSTIQIASRVLRMKKKKTKYTSSSSGGESSCEEGRMRRPTQLRPFHTRATVDPDFPIAHLSSDPDYSSSSEQSCDTVIYIGPNGTALSDKELTDNEGPPDFVPIVPALQKTRGDSRPAEAGEAAAGKSERDCLKCNTFAELQERLDCIDGSEEPSSFPFEELPAQFGPEQASRGPRLSQAAGASPLSESDKEDNGSEGQLTNREGPELPASKMQRSHSPVPAAAPAHSPSPASPRSVPGSSSQHSASPLVQSPSLQSSRESLNSCGFVEGKPRPMGSPRLGIASLSKTSEYKPPSSPSQRCKVYTQKGVLPSPAPLPPSSKDSGVASRESLLQPEVRTPPVGMSPQVLKKSMSAGSEGFPETPVDDEQQAATPSESKKEILSTTMVTVQQPLELNGEDELVFTLVEELTISGVLDSGRPTSIISFNSDCSARALASGSRPVSIISSISEDLECYSSTAPVSEVSITQFLPLPKMSLDEKAQDAGSRRSSISSWLSEMSAGSEGEQSCHSFIAQTCFGHGEAMAEPVASEFVSSLQNTAVVCREKPKASPDNLLILSEMGDDSFNKAAPIKGCKISTVSKAMVTISNTANLSSCEGYIPMKTNITVYPCIAMSPRNIQEPEAPTATPKAGPTLAQSRESKENSAKKEMKFEDPWLKREEEVKKETAHPNEEGMMRCETATGPSNAETRAEQEQDGKPSPGDRLSSSSGEVSASPVTDNFRRVVDGCEMALPGLATQSPVHPNKSVKSSSLPRAFQKASRQEEPDSLSYYCAAETNGVGAASGTPPSKATLEGKVASPKHCVLARPKGTPPLPPVRKSSLDQKNRASPQHSASGSGTSSPLNQPAAFPAGLPDEPSGKTKDASSSSKLFSAKLEQLASRSNSLGRATVSHYECLSLERAESLSSVSSRLHAGKDGTMPRAGRSLGRSAGTSPPSSGASPKAGQSKISAVSRLLLASPRARGPSASTTKTLSFSTKSLPQAVGQGSSSPPGGKHTPWSTQSLSRNRSSGLASKLPLRAVSGRISELLQGGAGARGLQLRAGPEAEARGGALAEDEPAAAHLLPSPYSKITPPRRPHRCSSGHGSDNSSVLSGELPPAMGKTALFYHSGGSSGYESVMRDSEATGSASSAQDSTSENSSSVGGRCRSLKTPKKRSNPGSQRRRLIPALSLDTSSPVRKPPNSTGVRWVDGPLRSSPRGLGEPFEIKVYEIDDVERLQRRRGGASKEAMCFNAKLKILEHRQQRIAEVRAKYEWLMKELEATKQYLMLDPNKWLSEFDLEQVWELDSLEYLEALECVTERLESRVNFCKAHLMMITCFDITSRRR

SEQ ID NO: 33818 - protein, 1882 aa, Homo sapiens
MVGRGVPLCAAQPAVAEGGPAREPPPLLEVSPRKRLPAGPDQDPCGSRPAPEGAGAGPEQGHSAGGGGWCRHCHTKLVELKRQAWKLVSGPGTTLRDPCLSALLLDKLPAPGALPACRPEAERRCDVCATHLQQLTREAMHLLQAPASHEDLDAPHGGPSLAPPSTTTSSRDTPGPAGPAGRQPGRAGPDRTKGLAWSPGPSVQVSVAPAGLGGALSTVTIQAQQCLEGMWSVSRVNSFLPPACLAEAAVAAVAVADTVRECPPVAGPDGLSKAWGRGGVCTSALVTPTPGSVGGSTGPSAAASFFIRAMQKLSLASKRKKPHPPPPPATRGTSTYPTDFSGVLQLWPPPAPPCLLRAASKTKDNPGSIGKVKVMLRIWPAQGAQRSAEAMSFLKVDPRKKQVILYDPAAGPPGSAGPRRAATAAVPKMFAFDAVFPQDSEQAEVCSGTVADVLQSVVSGADGCIFSFGHMSLGKSYTMIGKDSSPQSLGIVPCAISWLFRLIEERRERTGTRFSVRVSAVEVCGRDQSLRDLLAEVAPGSLQDTQSPGVYLREDPVCGAQLQNQSELRAPTAEKAAFYLDAALAARSTSRAGCGEDARRSSHMLFTLHVYQYRMEKCGRGGMSGGRSRLHLIDLGSCEAAAGRAGEAAGGPLCLSLSALGSVILALVNGAKHVPYRDHRLTMLLRESLATAGCRTTMIAHVSDAPAQHAETLSTVQLAARIHRLRRKKAKYASSSSGGESSCEEGRARRPPHLRPFHPRTVALDPDRTPPCLPGDPDYSSSSEQSCDTVIYVGPGGAALSDRELTDNEGPPDFVPIIPALSRHRPSKGPRDADHFRCSTFAELQERLECMDGNEGPSGGPGGTDGAQASPARGGRKPSPPEAASPRKAVGTPMAASTPRGSSGPDTHQGTPEPCKAIVWGDQREDSSAWPELLVPEKAAVSGGRRPLPSPAPPPPQLLEACRAPEEPGGGGTDGVARTPPVGMSGQVAGSPMLPGATCPRLAAGSRCPERGLLTTTVTLQRPVELNGEDELVFTVVEELSLGALAGAGRPTSLASFDSDCSLRALASGSRPVSIISSINDEFDAYTSQAPEGGPLEGAAWAGSSHGSSISSWLSEVSVCTADSRDPTPQPRFSPDSLAGLDPGGPPALDGSLGDGSSGFLGPDRPDSPGPTWGPCPGEVAAVAPSRPGREPQAGPSRWASAAQTIHSSLPRKPRTASATTRVGCARLGQSPPGRGGLFEDPWLLRVGECDTQAASAGRAPSPTLGSPRLPEAQVMLACAQRVVDGCEVAARAARRPEAVARIPPLRRGATTLGVTTPAVSWGDAPTEVVACSGSLKASPTSKKGLAPKAGFLPRPSGAAPPAPPTRKSSLEQRSSPASAPPHAVNPARVGAAAVLRGEEEPRPSSRADHSVPRATSSLKARASKVEAAHRLAGHASLERYEGLAHSSSKGREAPGRPPRAVPKLGVPPSSPTHGPAPACRSGAAKAVGAPKPPVGGGKGRGLVAGGSRALGPSVKLSTASVTGRSPGGPVAGPRAAPRAGPSVGAKAGRGTVMGTKQALRAAHSRVHELSASGAPGRGGSSWGSADSDSGHDSGVNVGEERPPTGPALPSPYSKVTAPRRPQRYSSGHGSDNSSVLSGELPPAMGRTALFHHSGGSSGYESLRRDSEATGSASSAPDSMSESGAASPGARTRSLKSPKKRATGLQRRRLIPAPLPDTTALGRKPSLPGQWVDLPPPLAGSLKEPFEIKVYEIDDVERLQRPRPTPREAPTQGLACVSTRLRLAERRQQRLREVQAKHKHLCEELAETQGRLMLEPGRWLEQFEVDPELEPESAEYLAALERATAALEQCVNLCKAHVMMVTCFDISVAASAAIPGPQEVDV

SEQ ID NO: 33819 - protein, 636 aa, Homo sapiens
MAARPLSRMLRRLLRSSARSCSSGAPVTQPCPGESARAASEEVSRRRQFLREHAAPFSAFLTDSFGRQHSYLRISLTEKCNLRCQYCMPEEGVPLTPKANLLTTEEILTLARLFVKEGIDKIRLTGGEPLIRPDVVDIVAQLQRLEGLRTIGVTTNGINLARLLPQLQKAGLSAINISLDTLVPAKFEFIVRRKGFHKVMEGIHKAIELGYNPVKVNCVVMRGLNEDELLDFAALTEGLPLDVRFIEYMPFDGNKWNFKKMVSYKEMLDTVRQQWPELEKVPEEESSTAKAFKIPGFQGQISFITSMSEHFCGTCNRLRITADGNLKVCLFGNSEVSLRDHLRAGASEQELLRIIGAAVGRKKRQHAGMFSISQMKNRPMILIELFLMFPNSPPANPSIFSWDPLHVQGLRPRMSFSSQVATLWKGCRVPQTPPLAQQRLGSGSFQRHYTSRADSDANSKCLSPGSWASAAPSGPQLTSEQLTHVDSEGRAAMVDVGRKPDTERVAVASAVVLLGPVAFKLVQQNQLKKGDALVVAQLAGVQAAKVTSQLIPLCHHVALSHIQVQLELDSTRHAVKIQASCRARGPTGVEMEALTSAAVAALTLYDMCKAVSRDIVLEEIKLISKTGGQRGDFHRA

SEQ ID NO: 33820 - protein, 385 aa, Homo sapiens
MAARPLSRMLRRLLRSSARSCSSGAPVTQPCPGESARAASEEVSRRRQFLREHAAPFSAFLTDSFGRQHSYLRISLTEKCNLRCQYCMPEEGVPLTPKANLLTTEEILTLARLFVKEGIDKIRLTGGEPLIRPDVVDIVAQLQRLEGLRTIGVTTNGINLARLLPQLQKAGLSAINISLDTLVPAKFEFIVRRKGFHKVMEGIHKAIELGYNPVKVNCVVMRGLNEDELLDFAALTEGLPLDVRFIEYMPFDGNKWNFKKMVSYKEMLDTVRQQWPELEKVPEEESSTAKAFKIPGFQGQISFITSMSEHFCGTCNRLRITADGNLKVCLFGNSEVSLRDHLRAGASEQELLRIIGAAVGRKKRQHAGMFSISQMKNRPMILIGG

SEQ ID NO: 33821 - protein, 385 aa, Homo sapiens
MWKSWKLRTDVRVREGAGGSPCASSQPGSRGPCFLPGLSSQEVSRRRQFLREHAAPFSAFLTDSFGRQHSYLRISLTEKCNLRCQYCMPEEGVPLTPKANLLTTEEILTLARLFVKEGIDKIRLTGGEPLIRPDVVDIVAQLQRLEGLRTIGVTTNGINLARLLPQLQKAGLSAINISLDTLVPAKFEFIVRRKGFHKVMEGIHKAIELGYNPVKVNCVVMRGLNEDELLDFAALTEGLPLDVRFIEYMPFDGNKWNFKKMVSYKEMLDTVRQQWPELEKVPEEESSTAKAFKIPGFQGQISFITSMSEHFCGTCNRLRITADGNLKVCLFGNSEVSLRDHLRAGASEQELLRIIGAAVGRKKRQHAGMFSISQMKNRPMILIGG

SEQ ID NO: 33822 - protein, 356 aa, Homo sapiens
MWKSWKLRTDVREVSRRRQFLREHAAPFSAFLTDSFGRQHSYLRISLTEKCNLRCQYCMPEEGVPLTPKANLLTTEEILTLARLFVKEGIDKIRLTGGEPLIRPDVVDIVAQLQRLEGLRTIGVTTNGINLARLLPQLQKAGLSAINISLDTLVPAKFEFIVRRKGFHKVMEGIHKAIELGYNPVKVNCVVMRGLNEDELLDFAALTEGLPLDVRFIEYMPFDGNKWNFKKMVSYKEMLDTVRQQWPELEKVPEEESSTAKAFKIPGFQGQISFITSMSEHFCGTCNRLRITADGNLKVCLFGNSEVSLRDHLRAGASEQELLRIIGAAVGRKKRQHAGMFSISQMKNRPMILIGG

SEQ ID NO: 33823 - protein, 281 aa, Homo sapiens
MPEEGVPLTPKANLLTTEEILTLARLFVKEGIDKIRLTGGEPLIRPDVVDIVAQLQRLEGLRTIGVTTNGINLARLLPQLQKAGLSAINISLDTLVPAKFEFIVRRKGFHKVMEGIHKAIELGYNPVKVNCVVMRGLNEDELLDFAALTEGLPLDVRFIEYMPFDGNKWNFKKMVSYKEMLDTVRQQWPELEKVPEEESSTAKAFKIPGFQGQISFITSMSEHFCGTCNRLRITADGNLKVCLFGNSEVSLRDHLRAGASEQELLRIIGAAVGRKKRQHAE

SEQ ID NO: 33824 - protein, 620 aa, Homo sapiens
MAARPLSRMLRRLLRSSARSCSSGAPVTQPCPGESARAASEEVSRRRQFLREHAAPFSAFLTDSFGRQHSYLRISLTEKCNLRCQYCMPEEGVPLTPKANLLTTEEILTLARLFVKEGIDKIRLTGGEPLIRPDVVDIVAQLQRLEGLRTIGVTTNGINLARLLPQLQKAGLSAINISLDTLVPAKFEFIVRRKGFHKVMEGIHKAIELGYNPVKVNCVVMRGLNEDELLDFAALTEGLPLDVRFIEYMPFDGNKWNFKKMVSYKEMLDTVRQQWPELEKVPEEESSTAKAFKIPGFQGQISFITSMSEHFCGTCNRLRITADGNLKVCLFGNSEVSLRDHLRAGASEQELLRIIGAAVGRKKRQHAELFLMFPNSPPANPSIFSWDPLHVQGLRPRMSFSSQVATLWKGCRVPQTPPLAQQRLGSGSFQRHYTSRADSDANSKCLSPGSWASAAPSGPQLTSEQLTHVDSEGRAAMVDVGRKPDTERVAVASAVVLLGPVAFKLVQQNQLKKGDALVVAQLAGVQAAKVTSQLIPLCHHVALSHIQVQLELDSTRHAVKIQASCRARGPTGVEMEALTSAAVAALTLYDMCKAVSRDIVLEEIKLISKTGGQRGDFHRA

SEQ ID NO: 33825 - protein, 533 aa, Homo sapiens
MPEEGVPLTPKANLLTTEEILTLARLFVKEGIDKIRLTGGEPLIRPDVVDIVAQLQRLEGLRTIGVTTNGINLARLLPQLQKAGLSAINISLDTLVPAKFEFIVRRKGFHKVMEGIHKAIELGYNPVKVNCVVMRGLNEDELLDFAALTEGLPLDVRFIEYMPFDGNKWNFKKMVSYKEMLDTVRQQWPELEKVPEEESSTAKAFKIPGFQGQISFITSMSEHFCGTCNRLRITADGNLKVCLFGNSEVSLRDHLRAGASEQELLRIIGAAVGRKKRQHAELFLMFPNSPPANPSIFSWDPLHVQGLRPRMSFSSQVATLWKGCRVPQTPPLAQQRLGSGSFQRHYTSRADSDANSKCLSPGSWASAAPSGPQLTSEQLTHVDSEGRAAMVDVGRKPDTERVAVASAVVLLGPVAFKLVQQNQLKKGDALVVAQLAGVQAAKVTSQLIPLCHHVALSHIQVQLELDSTRHAVKIQASCRARGPTGVEMEALTSAAVAALTLYDMCKAVSRDIVLEEIKLISKTGGQRGDFHRA

SEQ ID NO: 33826 - protein, 636 aa, Homo sapiens
MWKSWKLRTDVRVREGAGGSPCASSQPGSRGPCFLPGLSSQEVSRRRQFLREHAAPFSAFLTDSFGRQHSYLRISLTEKCNLRCQYCMPEEGVPLTPKANLLTTEEILTLARLFVKEGIDKIRLTGGEPLIRPDVVDIVAQLQRLEGLRTIGVTTNGINLARLLPQLQKAGLSAINISLDTLVPAKFEFIVRRKGFHKVMEGIHKAIELGYNPVKVNCVVMRGLNEDELLDFAALTEGLPLDVRFIEYMPFDGNKWNFKKMVSYKEMLDTVRQQWPELEKVPEEESSTAKAFKIPGFQGQISFITSMSEHFCGTCNRLRITADGNLKVCLFGNSEVSLRDHLRAGASEQELLRIIGAAVGRKKRQHAGMFSISQMKNRPMILIELFLMFPNSPPANPSIFSWDPLHVQGLRPRMSFSSQVATLWKGCRVPQTPPLAQQRLGSGSFQRHYTSRADSDANSKCLSPGSWASAAPSGPQLTSEQLTHVDSEGRAAMVDVGRKPDTERVAVASAVVLLGPVAFKLVQQNQLKKGDALVVAQLAGVQAAKVTSQLIPLCHHVALSHIQVQLELDSTRHAVKIQASCRARGPTGVEMEALTSAAVAALTLYDMCKAVSRDIVLEEIKLISKTGGQRGDFHRA

SEQ ID NO: 33827 - protein, 1012 aa, Homo sapiens
MPASAPPRRPRPPPPSLSLLLVLLGLGGRRLRAEPGDGAQTWARFSRPPAPEAAGLFQGTFPDGFLWAVGSAAYQTEGGWQQHGKGASIWDTFTHHPLAPPGDSRNASLPLGAPSPLQPATGDVASDSYNNVFRDTEALRELGVTHYRFSISWARVLPNGSAGVPNREGLRYYRRLLERLRELGVQPVVTLYHWDLPQRLQDAYGGWANRALADHFRDYAELCFRHFGGQVKYWITIDNPYVVAWHGYATGRLAPGIRGSPRLGYLVAHNLLLAHAKVWHLYNTSFRPTQGGQVSIALSSHWINPRRMTDHSIKECQKSLDFVLGWFAKPVFIDGDYPESMKNNLSSILPDFTESEKKFIKGTADFFALCFGPTLSFQLLDPHMKFRQLESPNLRQLLSWIDLEFNHPQIFIVENGWFVSGTTKRDDAKYMYYLKKFIMETLKAIKLDGVDVIGYTAWSLMDGFEWHRGYSIRRGLFYVDFLSQDKMLLPKSSALFYQKLIEKNGFPPLPENQPLEGTFPCDFAWGVVDNYIQVDTTLSQFTDLNVYLWDVHHSKRLIKVDGVVTKKRKSYCVDFAAIQPQIALLQEMHVTHFRFSLDWALILPLGNQSQVNHTILQYYRCMASELVRVNITPVVALWQPMAPNQGLPRLLARQGAWENPYTALAFAEYARLCFQELGHHVKLWITMNEPYTRNMTYSAGHNLLKAHALAWHVYNEKFRHAQNGKISIALQADWIEPACPFSQKDKEVAERVLEFDIGWLAEPIFGSGDYPWVMRDWLNQRNNFLLPYFTEDEKKLIQGTFDFLALSHYTTILVDSEKEDPIKYNDYLEVQEMTDITWLNSPSQVAVVPWGLRKVLNWLKFKYGDLPMYIISNGIDDGLHAEDDQLRVYYMQNYINEALKAHILDGINLCGYFAYSFNDRTAPRFGLYRYAADQFEPKASMKHYRKIIDSNGFPGPETLERFCPEEFTVCTECSFFHTRKSLLAFIAFLFFASIISLSLIFYYSKKGRRSYK

SEQ ID NO: 33828 - protein, 549 aa, Homo sapiens
MPASAPPRRPRPPPPSLSLLLVLLGLGGRRLRAEPGDGAQTWARFSRPPAPEAAGLFQGTFPDGFLWAVGSAAYQTEGGWQQHGKGASIWDTFTHHPLAPPGDSRNASLPLGAPSPLQPATGDVASDSYNNVFRDTEALRELGVTHYRFSISWARVLPNGSAGVPNREGLRYYRRLLERLRELGVQPVVTLYHWDLPQRLQDAYGGWANRALADHFRDYAELCFRHFGGQVKYWITIDNPYVVAWHGYATGRLAPGIRGSPRLGYLVAHNLLLAHAKVWHLYNTSFRPTQGGQVSIALSSHWINPRRMTDHSIKECQKSLDFVLGWFAKPVFIDGDYPESMKNNLSSILPDFTESEKKFIKGTADFFALCFGPTLSFQLLDPHMKFRQLESPNLRQLLSWIDLEFNHPQIFIVENGWFVSGTTKRDDAKYMYYLKKFIMETLKAIKLDGVDVIGYTAWSLMDGFEWHRGYSIRRGLFYVDFLSQDKMLLPKSSALFYQKLIEKNGFPPLPENQPLEGTFPCDFAWGVVDNYIQVSQLTKPISSLTKPYH

SEQ ID NO: 33829 - protein, 423 aa, Homo sapiens
MAKLTESMTNVLEGDSMDQDVESPVAIHQPKLPKQARDDLPRHISRDRTKRKIQRYVRKDGKCNVHHGNVRETYRYLTDIFTTLVDLKWRFNLLIFVMVYTVTWLFFGMIWWLIAYIRGDMDHIEDPSWTPCVTNLNGFVSAFLFSIETETTIGYGYRVITDKCPEGIILLLIQSVLGSIVNAFMVGCMFVKISQPKKRAETLVFSTHAVISMRDGKLCLMFRVGDLRNSHIVEASIRAKLIKSKQTSEGEFIPLNQTDINVGYYTGDDRLFLVSPLIISHEINQQSPFWEISKAQLPKEELEIVVILEGMVEATGMTCQARSSYITSEILWGYRFTPVLTLEDGFYEVDYNSFHETYETSTPSLSAKELAELASRAELPLSWSVSSKLNQHAELETEEEEKNLEEQTERNGDVANLENESKV

SEQ ID NO: 33830 - protein, 436 aa, Homo sapiens
MGLARALRRLSGALDSGDSRAGDEEEAGPGLCRNGWAPAPVQSPVGRRRGRFVKKDGHCNVRFVNLGGQGARYLSDLFTTCVDVRWRWMCLLFSCSFLASWLLFGLAFWLIASLHGDLAAPPPPAPCFSHVASFLAAFLFALETQTSIGYGVRSVTEECPAAVAAVVLQCIAGCVLDAFVVGAVMAKMAKPKKRNETLVFSENAVVALRDHRLCLMWRVGNLRRSHLVEAHVRAQLLQPRVTPEGEYIPLDHQDVDVGFDGGTDRIFLVSPITIVHEIDSASPLYELGRAELARADFELVVILEGMVEATAMTTQCRSSYLPGELLWGHRFEPVLFQRGSQYEVDYRHFHRTYEVPGTPVCSAKELDERAEQASHSLKSSFPGSLTAFCYENELALSCCQEEDEDDETEEGNGVETEDGAASPRVLTPTLALTLPP

SEQ ID NO: 33831 - protein, 433 aa, Homo sapiens
MTAASRANPYSIVSLEEDGLHLVTMSGANGFGNGKVHTRRRCRNRFVKKNGQCNIAFANMDEKSQRYLADMFTTCVDIRWRYMLLIFSLAFLASWLLFGVIFWVIAVAHGDLEPAEGHGRTPCVMQVHGFMAAFLFSIETQTTIGYGLRCVTEECLVAVFMVVAQSIVGCIIDSFMIGAIMAKMARPKKRAQTLLFSHNAVVALRDGKLCLMWRVGNLRKSHIVEAHVRAQLIKPRVTEEGEYIPLDQIDIDVGFDKGLDRIFLVSPITILHEIDEASPLFGISRQDLETDDFEIVVILEGMVEATAMTTQARSSYLANEILWGHRFEPVLFEEKNQYKIDYSHFHKTYEVPSTPRCSAKDLVENKFLLPSANSFCYENELAFLSRDEEDEADGDQDGRSRDGLSPQARHDFDRLQAGGGVLEQRPYRRGSEI

SEQ ID NO: 33832 - protein, 1149 aa, Homo sapiens
MFQTKLRNETWEDLPKMSCTTEIQAAFILSSFVTFFSGLIILLIFRLIWRSVKKWQIIKGTGIILELFTSGTIARSHVRSLHFQGQFRDHIEMLLSAQTFVGQVLVILVFVLSIGSLIIYFINSADPVGSCSSYEDKTIPIDLVFNAFFSFYFGLRFMAADDKIKFWLEMNSIVDIFTIPPTFISYYLKSNWLGLRFLRALRLLELPQILQILRAIKTSNSVKFSKLLSIILSTWFTAAGFIHLVENSGDPWLKGRNSQNISYFESIYLVMATTSTVGFGDVVAKTSLGRTFIMFFTLGSLILFANYIPEMVELFANKRKYTSSYEALKGKKFIVVCGNITVDSVTAFLRNFLRDKSGEINTEIVFLGETPPSLELETIFKCYLAYTTFISGSAMKWEDLRRVAVESAEACLIIANPLCSDSHAEDISNIMRVLSIKNYDSTTRIIIQILQSHNKVYLPKIPSWNWDTGDNIICFAELKLGFIAQGCLVPGLCTFLTSLFVEQNKKVMPKQTWKKHFLNSMKNKILTQRLSDDFAGMSFPEVARLCFLKMHLLLIAIEYKSLFTDGFCGLILNPPPQVRIRKNTLGFFIAETPKDVRRALFYCSVCHDDVFIPELITNCGCKSRSRQHITVPSVKRMKKCLKGISSRISGQDSPPRVSASTSSISNFTTRTLQHDVEQDSDQLDSSGMFHWCKPTSLDKVTLKRTGKSKYKFRNHIVACVFGDAHSAPMGLRNFVMPLRASNYTRKELKDIVFIGSLDYLQREWRFLWNFPQIYILPGCALYSGDLHAANIEQCSMCAVLSPPPQPSSNQTLVDTEAIMATLTIGSLQIDSSSDPSPSVSEETPGYTNGHNEKSNCRKVPILTELKNPSNIHFIEQLGGLEGSLQETNLHLSTAFSTGTVFSGSFLDSLLATAFYNYHVLELLQMLVTGGVSSQLEQHLDKDKVYGVADSCTSLLSGRNRCKLGLLSLHETILSDVNPRNTFGQLFCGSLDLFGILCVGLYRIIDEEELNPENKRFVITRPANEFKLLPSDLVFCAIPFSTACYKRNEEFSLQKSYEIVNKASQTTETHSDTNCPPTIDSVTETLYSPVYSYQPRTNSLSFPKQIAWNQSRTNSIISSQIPLGDNAKENERKTSDEVYDEDPFAYSEPL

SEQ ID NO: 33833 - protein, 1105 aa, Homo sapiens
MAAMAPALTDAAAEAHHIRFKLAPPSSTLSPGSAENNGNANILIAANGTKRKAIAAEDPSLDFRNNPTKEDLGKLQPLVASYLCSDVTSVPSKESLKLQGVFSKQTVLKSHPLLSQSYELRAELLGRQPVLEFSLENLRTMNTSGQTALPQAPVNGLAKKLTKSSTHSDHDNSTSLNGGKRALTSSALHGGEMGGSESGDLKGGMTNCTLPHRSLDVEHTTLYSNNSTANKSSVNSMEQPALQGSSRLSPGTDSSSNLGGVKLEGKKSPLSSILFSALDSDTRITALLRRQADIESRARRLQKRLQVVQAKQVERHIQHQLGGFLEKTLSKLPNLESLRPRSQLMLTRKAEAALRKAASETTTSEGLSNFLKSNSISEELERFTASGIANLRCSEQAFDSDVTDSSSGGESDIEEEELTRADPEQRHVPLRRRSEWKWAADRAAIVSRWNWLQAHVSDLEYRIRQQTDIYKQIRANKGLIVLGEVPPPEHTTDLFLPLSSEVKTDHGTDKLIESVSQPLENHGARIIGHISESLSTKSCGALRPVNGVINTLQPVLADHIPGDSSDAEEQLHKKQRLNLVSSSSDGTCVAARTRPVLSCKKRRLVRPNSIVPLSKKVHRNSTIRPGCDVNPSCALCGSGSINTMPPEIHYEAPLLERLSQLDSCVHPVLAFPDDVPTSLHFQSMLKSQWQNKPFDKIKPPKKLSLKHRAPMPGSLPDSARKDRHKLVSSFLTTAKLSHHQTRPDRTHRQHLDDVGAVPMVERVTAPKAERLLNPPPPVHDPNHSKMRLRDHSSERSEVLKHHTDMSSSSYLAATHHPPHSPLVRQLSTSSDSPAPASSSSQVTASTSQQPVRRRRGESSFDINNIVIPMSVAATTRVEKLQYKEILTPSWREVDLQSLKGSPDEENEEIEDLSDAAFAALHAKCEEMERARWLWTTSVPPQRRGSRSYRSSDGRTTPQLGSANPSTPQPASPDVSSSHSLSEYSHGQSPRSPISPELHSAPLTPVARDTPRHLASEDTRCSTPELGLDEQSVQPWERRTFPLAHSPQAECEDQLDAQERAARCTRRTSGSKTGRETEAAPTSPPIVPLKSRHLVAAATAQRPTHR

SEQ ID NO: 33834 - protein, 436 aa, Homo sapiens
MFLADVPTSLHFQSMLKSQWQNKPFDKIKPPKKLSLKHRAPMPGSLPDSARKDRHKLVSSFLTTAKLSHHQTRPDRTHRQHLDDVGAVPMVERVTAPKAERLLNPPPPVHDPNHSKMRLRDHSSERSEVLKHHTDMSSSSYLAATHHPPHSPLVRQLSTSSDSPAPASSSSQVTASTSQQPVRRRRGESSFDINNIVIPMSVAATTRVEKLQYKEILTPSWREVDLQSLKGSPDEENEEIEDLSDAAFAALHAKCEEMERARWLWTTSVPPQRRGSRSYRSSDGRTTPQLGSANPSTPQPASPDVSSSHSLSEYSHGQSPRSPISPELHSAPLTPVARDTPRHLASEDTRCSTPELGLDEQSVQPWERRTFPLAHSPQAECEDQLDAQERAARCTRRTSGSKTGRETEAAPTSPPIVPLKSRHLVAAATAQRPTHR

SEQ ID NO: 33835 - protein, 373 aa, Homo sapiens
MFLADVPTSLHFQSMLKSQWQNKPFDKIKPPKKLSLKHRAPMPGSLPDSARKDRHKLVSSFLTTAMLKHHTDMSSSSYLAATHHPPHSPLVRQLSTSSDSPAPASSSSQVTASTSQQPVRRRRGESSFDINNIVIPMSVAATTRVEKLQYKEILTPSWREVDLQSLKGSPDEENEEIEDLSDAAFAALHAKCEEMERARWLWTTSVPPQRRGSRSYRSSDGRTTPQLGSANPSTPQPASPDVSSSHSLSEYSHGQSPRSPISPELHSAPLTPVARDTPRHLASEDTRCSTPELGLDEQSVQPWERRTFPLAHSPQAECEDQLDAQERAARCTRRTSGSKTGRETEAAPTSPPIVPLKSRHLVAAATAQRPTHR

SEQ ID NO: 33836 - protein, 427 aa, Homo sapiens
MHLIDYLLLLLVGLLALSHGQLHVEHDGESCSNSSHQQILETGEGSPSLKIAPANADFAFRFYYLIASETPGKNIFFSPLSISAAYAMLSLGACSHSRSQILEGLGFNLTELSESDVHRGFQHLLHTLNLPGHGLETRVGSALFLSHNLKFLAKFLNDTMAVYEAKLFHTNFYDTVGTIQLINDHVKKETRGKIVDLVSELKKDVLMVLVNYIYFKALWEKPFISSRTTPKDFYVDENTTVRVPMMLQDQEHHWYLHDRYLPCSVLRMDYKGDATVFFILPNQGKMREIEEVLTPEMLMRWNNLLRKRNFYKKLELHLPKFSISGSYVLDQILPRLGFTDLFSKWADLSGITKQQKLEASKSFHKATLDVDEAGTEAAAATSFAIKFFSAQTNRHILRFNRPFLVVIFSTSTQSVLFLGKVVDPTKP

SEQ ID NO: 33837 - protein, 433 aa, Homo sapiens
MTAASRANPYSIVSSEEDGLHLVTMSGANGFGNGKVHTRRRCRNRFVKKNGQCNIEFANMDEKSQRYLADMFTTCVDIRWRYMLLIFSLAFLASWLLFGIIFWVIAVAHGDLEPAEGRGRTPCVMQVHGFMAAFLFSIETQTTIGYGLRCVTEECPVAVFMVVAQSIVGCIIDSFMIGAIMAKMARPKKRAQTLLFSHNAVVALRDGKLCLMWRVGNLRKSHIVEAHVRAQLIKPRVTEEGEYIPLDQIDIDVGFDKGLDRIFLVSPITILHEIDEASPLFGISRQDLETDDFEIVVILEGMVEATAMTTQARSSYLANEILWGHRFEPVLFEEKNQYKIDYSHFHKTYEVPSTPRCSAKDLVENKFLLPSANSFCYENELAFLSRDEEDEADGDQDGRSRDGLSPQARHDFDRLQAGGGVLEQRPYRRESEI

SEQ ID NO: 33838 - protein, 477 aa, Homo sapiens
MTGQSLWDVSEANVEDGEIRINVGGFKRRLRSHTLLRFPETRLGRLLLCHSREAILELCDDYDDVQREFYFDRNPELFPYVLHFYHTGKLHVMAELCVFSFSQEIEYWGINEFFIDSCCSYSYHGRKVEPEQEKWDEQSDQESTTSSFDEILAFYNDASKFDGQPLGNFRRQLWLALDNPGYSVLSRVFSILSILVVMGSIITMCLNSLPDFQIPDSQGNPGEDPRFEIVEHFGIAWFTFELVARFAVAPDFLKFFKNALNLIDLMSIVPFYITLVVNLVVESTPTLANLGRVAQVLRLMRIFRILKLARHSTGLRSLGATLKYSYKEVGLLLLYLSVGISIFSVVAYTIEKEENEGLATIPACWWWATVSMTTVGYGDVVPGTTAGKLTASACILAGILVVVLPITLIFNKFSHFYRRQKQLESAMRSCDFGDGMKEVPSVNLRDYYAHKVKSLMASLTNMSRSSPSELSLNDSLR

SEQ ID NO: 33839 - protein, 998 aa, Homo sapiens
MKDSGDSKDQQLMVALRVRPISVAELEEGATLIAHKVDEQMVVLMDPMEDPDDILRAHRSREKSYLFDVAFDFTATQEMVYQATTKSLIEGVISGYNATVFAYGPTGCGKTYTMLGTDQEPGIYVQTLNDLFRAIEETSNDMEYEVSMSYLEIYNEMIRDLLNPSLGYLELREDSKGVIQVAGITEVSTINAKEIMQLLMKGNRQRTQEPTAANQTSSRSHAVLQVTVRQRSRVKNILQEVRQGRLFMIDLAGSERASQTQNRGQRMKEGAHINRSLLALGNCINALSDKGSNKYINYRDSKLTRLLKDSLGGNSRTVMIAHISPASSAFEESRNTLTYAGRAKNIKTRVKQNLLNVSYHIAQYTSIIADLRGEIQRLKRKIDEQTGRGQARGRQDRGDIRHIQAEVQLHSGQGEKAGMGQLREQLASAFQEQMDVRRRLLELENRAMEVQIDTSRHLLTIAGWKHEKSRRALKWREEQRKECYAKDDSEKDSDTGDDQPDILEPPEVAAARESIAALVDEQKQLRKQKLALEQRCRELRARGRRLEETLPRRIGSEEQREVLSLLCRVHELEVENTEMQSHALLRDGALRHRHEAVRRLEQHRSLCDEIIQGQRQIIDDYNLAVPQRLEELYEVYLRELEEGSLEQATIMDQVASRALQDSSLPKITPAGTSLTPDSDLESVKTLSSDAQHLQNSALPPLSTESEGHHVFKAGTGAWQAKSSSVPTPPPIQLGSLVTQEAPAQDSLGSWINSSPDSSENLSEIPLSHKERKEILTGTKCIWVKAARRRSRALGTEGRHLLAPATERSSLSLHSLSEGDDARPPGPLACKRPPSPTLQHAASEDNLSSSTGEAPSRAVGHHGDGPRPWLRGQKKSLGKKREESLEAKRRKRRSRSFEVTGQGLSHPKTHLLGPHQAERISDHRMPVCRHPAPGIRHLGKVTLPLAKVKLPPSQNTGPGDSSPLAVPPNPGGGSRRATRGPRLPHGTSTHGKDGCSRHN

SEQ ID NO: 33840 - protein, 548 aa, Homo sapiens
MKDSGDSKDQQLMVALRVRPISVAELEEGATLIAHKVDEQMVVLMDPMEDPDDILRAHRSREKSYLFDVAFDFTATQEMVYQATTKSLIEGVISGYNATVFAYGPTGCGKTYTMLGTDQEPGIYVQTLNDLFRAIEETSNDMEYEVSMSYLEIYNEMIRDLLNPSLGYLELREDSKGVIQVAGITEVSTINAKEIMQLLMKGNRQRTQEPTAANQTSSRSHAVLQVTVRQRSRVKNILQEVRQGRLFMIDLAGSERASQTQNRGQRMKEGAHINRSLLALGNCINALSDKGSNKYINYRDSKLTRLLKDSLGGNSRTVMIAHISPASSAFEESRNTLTYAGRAKNIKTRVKQNLLNVSYHIAQYTSIIADLRGEIQRLKRKIDEQTGRGQARGRQDRGDIRHIQAEVQLHSGQGEKAGMGQLREQLASAFQEQMDVRRRLLELENRAMEVQIDTSRHLLTIAGWKHEKSRRALKWREEQRKECYAKDDSEKDSDTGDDQPDILEPPEVAAARESIAALVDEQKQLRKQKVSRVWGDKESGFRGQGEQV

SEQ ID NO: 33841 - protein, 506 aa, Homo sapiens
MKDSGDSKDQQLMVALRVRPISVAELEEGATLIAHKVDEQMVVLMDPMEDPDDILRAHRSREKSYLFDVAFDFTATQEMVYQATTKSLIEGVISGYNATVFAYGPTGCGKTYTMLGTDQEPGIYVQTLNDLFRAIEETSNDMEYEVSMSYLEIMQLLMKGNRQRTQEPTAANQTSSRSHAVLQVTVRQRSRVKNILQEVRQGRLFMIDLAGSERASQTQNRGQRMKEGAHINRSLLALGNCINALSDKGSNKYINYRDSKLTRLLKDSLGGNSRTVMIAHISPASSAFEESRNTLTYAGRAKNIKTRVKQNLLNVSYHIAQYTSIIADLRGEIQRLKRKIDEQTGRGQARGRQDRGDIRHIQAEVQLHSGQGEKAGMGQLREQLASAFQEQMDVRRRLLELENRAMEVQIDTSRHLLTIAGWKHEKSRRALKWREEQRKECYAKDDSEKDSDTGDDQPDILEPPEVAAARESIAALVDEQKQLRKQKVSRVWGDKESGFRGQGEQV

SEQ ID NO: 33842 - protein, 375 aa, Homo sapiens
MDAIHIGMSSTPLVKHTAGAGLKANRPRVMSKSGHSNVRIDKVDGIYLLYLQDLWTTVIDMKWRYKLTLFAATFVMTWFLFGVIYYAIAFIHGDLEPGEPISNHTPCIMKVDSLTGAFLFSLESQTTIGYGVRSITEECPHAIFLLVAQLVITTLIEIFITGTFLAKIARPKKRAETIKFSHCAVITKQNGKLCLVIQVANMRKSLLIQCQLSGKLLQTHVTKEGERILLNQATVKFHVDSSSESPFLILPMTFYHVLDETSPLRDLTPQNLKEKEFELVVLLNATVESTSAVCQSRTSYIPEEIYWGFEFVPVVSLSKNGKYVADFSQFEQIRKSPDCTFYCADSEKQQLEEKYRQEDQRERELRTLLLQQSNV

SEQ ID NO: 33843 - protein, 851 aa, Homo sapiens
MAQVLHVPAPFPGTPGPASPPAFPAKDPDPPYSVETPYGYRLDLDFLKYVDDIEKGHTLRRVAVQRRPRLSSLPRGPGSWWTSTESLCSNASGDSRHSAYSYCGRGFYPQYGALETRGGFNPRVERTLLDARRRLEDQAATPTGLGSLTPSAAGSTASLVGVGLPPPTPRSSGLSTPVPPSAGHLAHVREQMAGALRKLRQLEEQVKLIPVLQVKLSVLQEEKRQLTVQLKSQKFLGHPTAGRGRSELCLDLPDPPEDPVALETRSVGTWVRERDLGMPDGEAALAAKVAVLETQLKKALQELQAAQARQADPQPQAWPPPDSPVRVDTVRVVEGPREVEVVASTAAGAPAQRAQSLEPYGTGLRALAMPGRPESPPVFRSQEVVETMCPVPAAATSNVHMVKKISITERSCDGAAGLPEVPAESSSSPPGSEVASLTQPEKSTGRVPTQEPTHREPTRQAASQESEEAGGTGGPPAGVRSIMKRKEEVADPTAHRRSLQFVGVNGGYESSSEDSSTAENISDNDSTENEAPEPRERVPSVAEAPQLRPAGTAAAKTSRQECQLSRESQHIPTAEGASGSNTEEEIRMELSPDLISACLALEKYLDNPNALTERELKVAYTTVLQEWLRLACRSDAHPELVRRHLVTFRAMSARLLDYVVNIADSNGNTALHYSVSHANFPVVQQLLDSGVCKVDKQNRAGYSPIMLTALATLKTQDDIETVLQLFRLGNINAKASQAGQTALMLAVSHGRVDVVKALLACEADVNVQDDDGSTALMCACEHGHKEIAGLLLAVPSCDISLTDRDGSTALMVALDAGQSEIASMLYSRMNIKCSFAPMSDDESPTSSSAEE

SEQ ID NO: 33844 - protein, 859 aa, Homo sapiens
MAQVLHVPAPFPGTPGPASPPAFPAKDPDPPYSVETPYGYRLDLDFLKYVDDIEKGHTLRRVAVQRRPRLSSLPRGPGSWWTSTESLCSNASGDSRHSAYSYCGRGFYPQYGALETRGGFNPRVERTLLDARRRLEDQAATPTGLGSLTPSAAGSTASLVGVGLPPPTPRSSGLSTPVPPSAGHLAHVREQMAGALRKLRQLEEQVKLIPVLQVKLSVLQEEKRQLTVQLKSQKFLGHPTAGRGRSELCLDLPDPPEDPVALETRSVGTWVRERDLGMPDGEAALAAKVAVLETQLKKALQELQAAQARQADPQPQAWPPPDSPVRVDTVRVVEGPREVEVVASTAAGAPAQRAQSLEPYGTGLRALAMPGRPESPPVFRSQEVVETMCPVPAAATSNVHMVKKISITERSCDGAAGLPEVPAESSSSPPGSEVASLTQPEKSTGRVPTQEPTHREPTRQAASQESEEAGGTAPPLSSPPGGPPAGVRSIMKRKEEVADPTAHRRSLQFVGVNGGYESSSEDSSTAENISDNDSTENEAPEPRERVPSVAEAPQLRPAGTAAAKTSRQECQLSRESQHIPTAEGASGSNTEEEIRMELSPDLISACLALEKYLDNPNALTERELKVAYTTVLQEWLRLACRSDAHPELVRRHLVTFRAMSARLLDYVVNIADSNGNTALHYSVSHANFPVVQQLLDSGVCKVDKQNRAGYSPIMLTALATLKTQDDIETVLQLFRLGNINAKASQAGQTALMLAVSHGRVDVVKALLACEADVNVQDDDGSTALMCACEHGHKEIAGLLLAVPSCDISLTDRDGSTALMVALDAGQSEIASMLYSRMNIKCSFAPMSDDESPTSSSAEE

SEQ ID NO: 33845 - protein, 841 aa, Homo sapiens
MAQVLHVPAPFPGTPGPASPPAFPAKDPDPPYSVETPYGYRLDLDFLKYVDDIEKGHTLRRVAVQRRPRLSSLPRGPGSWWTSTESLCSNASGDSRHSAYSYCGRGFYPQYGALETRGGFNPRVERTLLDARRRLEDQAATPTGLGSLTPSAAGSTASLVGVGLPPPTPRSSGLSTPVPPSAGHLAHVREQMAGALRKLRQLEEQVKLIPVLQVKLSVLQEEKRQLTVQLKSQKFLGHPTAGRGRSELCLDLPDPPEDPVALETRSVGTWVRERDLGMPDGEAALAAKVAVLETQLKKALQELQAAQARQADPQPQAWPPPDSPVRVDTVRVVEGPREVEVVASTAAGAPAQRAQSLEPYGTGLRALAMPGRPESPPVFRSQEVVETMCPVPAAATSNVHMVKKISITERSCDGAAGLPEVPAESSSSPPGSEVASLTQPEKSTGRVPTQEPTHREPTRQAASQESEEAGGTGGPPAGVRSIMKRKEEVADPTAHRRSLQFVGVNGGYESSSEDSSTAENISDNDSTENEAPEPRERVPSVAEAPQLRPAGTAAAKTSRQECQLSRESQHIPTAEGASGSNTEEEIRMELSPDLISACLALEKYLDNPNALTERELKVAYTTVLQEWLRLACRSDAHPELVRRHLVTFRAMSARLLDYVVNIADSNGNTALHYSVSHANFPVVQQLLDSGVCKVDKQNRAGYSPIMLTALATLKTQDDIETVLQLFRLGNINAKASQAGQTALMLAVSHGRVDVVKALLACEADVNVQDDDGSTALMCACEHGHKEIAGLLLAVPSCDISLTDRDGSTALMVALDAGQSEIASMLYSRMNIKCSVSLNPAG

SEQ ID NO: 33846 - protein, 1771 aa, Homo sapiens
MSVLISQSVINYVEEENIPALKALLEKCKDVDERNECGQTPLMIAAEQGNLEIVKELIKNGANCNLEDLDNWTALISASKEGHVHIVEELLKCGVNLEHRDMGGWTALMWACYKGRTDVVELLLSHGANPSVTGLYSVYPIIWAAGRGHADIVHLLLQNGAKVNCSDKYGTTPLVWAARKGHLECVKHLLAMGADVDQEGANSMTALIVAVKGGYTQSVKEILKRNPNVNLTDKDGNTALMIASKEGHTEIVQDLLDAGTYVNIPDRSGDTVLIGAVRGGHVEIVRALLQKYADIDIRGQDNKTALYWAVEKGNATMVRDILQCNPDTEICTKDGETPLIKATKMRNIEVVELLLDKGAKVSAVDKKGDTPLHIAIRGRSRKLAELLLRNPKDGRLLYRPNKAGETPYNIDCSHQKSILTQIFGARHLSPTETDGDMLGYDLYSSALADILSEPTMQPPICVGLYAQWGSGKSFLLKKLEDEMKTFAGQQIEPLFQFSWLIVFLTLLLCGGLGLLFAFTVHPNLGIAVSLSFLALLYIFFIVIYFGGRREGESWNWAWVLSTRLARHIGYLELLLKLMFVNPPELPEQTTKALPVRFLFTDYNRLSSVGGETSLAEMIATLSDACEREFGFLATRLFRVFKTEDTQGKKKWKKTCCLPSFVIFLFIIGCIISGITLLAIFRVDPKHLTVNAVLISIASVVGLAFVLNCRTWWQVLDSLLNSQRKRLHNAASKLHKLKSEGFMKVLKCEVELMARMAKTIDSFTQNQTRLVVIIDGLDACEQDKVLQMLDTVRVLFSKGPFIAIFASDPHIIIKAINQNLNSVLRDSNINGHDYMRNIVHLPVFLNSRGLSNARKFLVTSATNGDVPCSDTTGIQEDADRRVSQNSLGEMTKLGSKTALNRRDTYRRRQMQRTITRQMSFDLTKLLVTEDWFSDISPQTMRRLLNIVSVTGRLLRANQISFNWDRLASWINLTEQWPYRTSWLILYLEETEGIPDQMTLKTIYERISKNIPTTKDVEPLLEIDGDIRNFEVFLSSRTPVLVARDVKVFLPCTVNLDPKLREIIADVRAAREQISIGGLAYPPLPLHEGPPRAPSGYSQPPSVCSSTSFNGPFAGGVVSPQPHSSYYSGMTGPQHPFYNRPFFAPYLYTPRYYPGGSQHLISRPSVKTSLPRDQNNGLEVIKEDAAEGLSSPTDSSRGSGPAPGPVVLLNSLNVDAVCEKLKQIEGLDQSMLPQYCTTIKKANINGRVLAQCNIDELKKEMNMNFGDWHLFRSTVLEMRNAESHVVPEDPRFLSESSSGPAPHGEPARRASHNELPHTELSSQTPYTLNFSFEELNTLGLDEGAPRHSNLSWQSQTRRTPSLSSLNSQDSSIEISKLTDKVQAEYRDAYREYIAQMSQLEGGPGSTTISGRSSPHSTYYMGQSSSGGSIHSNLEQEKGKDSEPKPDDGRKSFLMKRGDVIDYSSSGVSTNDASPLDPITEEDEKSDQSGSKLLPGKKSSERSSLFQTDLKLKGSGLRYQKLPSDEDESGTEESDNTPLLKDDKDRKAEGKVERVPKSPEHSAEPIRTFIKAKEYLSDALLDKKDSSDSGVRSSESSPNHSLHNEVADDSQLEKANLIELEDDSHSGKRGIPHSLSGLQDPIIARMSICSEDKKSPSECSLIASSPEENWPACQKAYNLNRTPSTVTLNNNSAPANRANQNFDEMEGIRETSQVILRPSSSPNPTTIQNENLKSMTHKRSQRSSYTRLSKDPPELHAAASSESTGFGEERESIL

SEQ ID NO: 33847 - protein, 1672 aa, Homo sapiens
MIAAEQGNLEIVKELIKNGANCNLEDLDNWTALISASKEGHVHIVEELLKCGVNLEHRDMGGWTALMWACYKGRTDVVELLLSHGANPSVTGLYSVYPIIWAAGRGHADIVHLLLQNGAKVNCSDKYGTTPLVWAARKGHLECVKHLLAMGADVDQEGANSMTALIVAVKGGYTQSVKEILKRNPNVNLTDKDGNTALMIASKEGHTEIVQDLLDAGTYVNIPDRSGDTVLIGAVRGGHVEIVRALLQKYADIDIRGQDNKTALYWAVEKGNATMVRDILQCNPDTEICTKDGETPLIKATKMRNIEVVELLLDKGAKVSAVDKKGDTPLHIAIRGRSRKLAELLLRNPKDGRLLYRPNKAGETPYNIDCSHQKSILTQIFGARHLSPTETDGDMLGYDLYSSALADILSEPTMQPPICVGLYAQWGSGKSFLLKKLEDEMKTFAGQQIEPLFQFSWLIVFLTLLLCGGLGLLFAFTVHPNLGIAVSLSFLALLYIFFIVIYFGGRREGESWNWAWVLSTRLARHIGYLELLLKLMFVNPPELPEQTTKALPVRFLFTDYNRLSSVGGETSLAEMIATLSDACEREFGFLATRLFRVFKTEDTQGKKKWKKTCCLPSFVIFLFIIGCIISGITLLAIFRVDPKHLTVNAVLISIASVVGLAFVLNCRTWWQVLDSLLNSQRKRLHNAASKLHKLKSEGFMKVLKCEVELMARMAKTIDSFTQNQTRLVVIIDGLDACEQDKVLQMLDTVRVLFSKGPFIAIFASDPHIIIKAINQNLNSVLRDSNINGHDYMRNIVHLPVFLNSRGLSNARKFLVTSATNGDVPCSDTTGIQEDADRRVSQNSLGEMTKLGSKTALNRRDTYRRRQMQRTITRQMSFDLTKLLVTEDWFSDISPQTMRRLLNIVSVTGRLLRANQISFNWDRLASWINLTEQWPYRTSWLILYLEETEGIPDQMTLKTIYERISKNIPTTKDVEPLLEIDGDIRNFEVFLSSRTPVLVARDVKVFLPCTVNLDPKLREIIADVRAAREQISIGGLAYPPLPLHEGPPRAPSGYSQPPSVCSSTSFNGPFAGGVVSPQPHSSYYSGMTGPQHPFYNRGSGPAPGPVVLLNSLNVDAVCEKLKQIEGLDQSMLPQYCTTIKKANINGRVLAQCNIDELKKEMNMNFGDWHLFRSTVLEMRNAESHVVPEDPRFLSESSSGPAPHGEPARRASHNELPHTELSSQTPYTLNFSFEELNTLGLDEGAPRHSNLSWQSQTRRTPSLSSLNSQDSSIEISKLTDKVQAEYRDAYREYIAQMSQLEGGPGSTTISGRSSPHSTYYMGQSSSGGSIHSNLEQEKGKDSEPKPDDGRKSFLMKRGDVIDYSSSGVSTNDASPLDPITEEDEKSDQSGSKLLPGKKSSERSSLFQTDLKLKGSGLRYQKLPSDEDESGTEESDNTPLLKDDKDRKAEGKVERVPKSPEHSAEPIRTFIKAKEYLSDALLDKKDSSDSGVRSSESSPNHSLHNEVADDSQLEKANLIELEDDSHSGKRGIPHSLSGLQDPIIARMSICSEDKKSPSECSLIASSPEENWPACQKAYNLNRTPSTVTLNNNSAPANRANQNFDEMEGIRETSQVILRPSSSPNPTTIQNENLKSMTHKRSQRSSYTRLSKDPPELHAAASSESTGFGEERESIL

SEQ ID NO: 33848 - protein, 1031 aa, Homo sapiens
MSVLISQSVINYVEEENIPALKALLEKCKDVDERNECGQTPLMIAAEQGNLEIVKELIKNGANCNLEDLDNWTALISASKEGHVHIVEELLKCGVNLEHRDMGGWTALMWACYKGRTDVVELLLSHGANPSVTGLQYSVYPIIWAAGRGHADIVHLLLQNGAKVNCSDKYGTTPLVWAARKGHLECVKHLLAMGADVDQEGANSMTALIVAVKGGYTQSVKEILKRNPNVNLTDKDGNTALMIASKEGHTEIVQDLLDAGTYVNIPDRSGDTVLIGAVRGGHVEIVRALLQKYADIDIRGQDNKTALYWAVEKGNATMVRDILQCNPDTEICTKDGETPLIKATKMRNIEVVELLLDKGAKVSAVDKKGDTPLHIAIRGRSRKLAELLLRNPKDGRLLYRPNKAGETPYNIDCSHQKSILTQIFGARHLSPTETDGDMLGYDLYSSALADILSEPTMQPPICVGLYAQWGSGKSFLLKKLEDEMKTFAGQQIEPLFQFSWLIVFLTLLLCGGLGLLFAFTVHPNLGIAVSLSFLALLYIFFIVIYFGGRREGESWNWAWVLSTRLARHIGYLELLLKLMFVNPPELPEQTTKALPVRFLFTDYNRLSSVGGETSLAEMIATLSDACEREFGFLATRLFRVFKTEDTQGKKKWKKTCCLPSFVIFLFIIGCIISGITLLAIFRVDPKHLTVNAVLISIASVVGLAFVLNCRTWWQVLDSLLNSQRKRLHNAASKLHKLKSEGFMKVLKCEVELMARMAKTIDSFTQNQTRLVVIIDGLDACEQDKVLQMLDTVRVLFSKGPFIAIFASDPHIIIKAINQNLNSVLRDSNINGHDYMRNIVHLPVFLNSRGLSNARKFLVTSATNGDVPCSDTTGIQEDADRRVSQNSLGEMTKLGSKTALNRRDTYRRRQMQRTITRQMSFDLTKLLVTEDWFSDISPQTMRRLLNIVSVTGRLLRANQISFNWDRLASWINLTEQWPYRTSWLILYLEETEGIPDQMTLKTIYERCCGADSCDRDRIGISKSVLVAMLMES

SEQ ID NO: 33849 - protein, 1752 aa, Homo sapiens
MSVLISQSVINYVEEENIPALKALLEKCKDVDERNECGQTPLMIAAEQGNLEIVKELIKNGANCNLEDLDNWTALISASKEGHVHIVEELLKCGVNLEHRDMGGWTALMWACYKGRTDVVELLLSHGANPSVTGLYSVYPIIWAAGRGHADIVHLLLQNGAKVNCSDKYGTTPLVWAARKGHLECVKHLLAMGADVDQEGANSMTALIVAVKGGYTQSVKEILKRNPNVNLTDKDGNTALMIASKEGHTEIVQDLLDAGTYVNIPDRSGDTVLIGAVRGGHVEIVRALLQKYADIDIRGQDNKTALYWAVEKGNATMVRDILQCNPDTEICTKDGETPLIKATKMRNIEVVELLLDKGAKVSAVDKKGDTPLHIAIRGRSRKLAELLLRNPKDGRLLYRPNKAGETPYNIDCSHQKSILTQIFGARHLSPTETDGDMLGYDLYSSALADILSEPTMQPPICVGLYAQWGSGKSFLLKKLEDEMKTFAGQQIEPLFQFSWLIVFLTLLLCGGLGLLFAFTVHPNLGIAVSLSFLALLYIFFIVIYFGGRREGESWNWAWVLSTRLARHIGYLELLLKLMFVNPPELPEQTTKALPVRFLFTDYNRLSSVGGETSLAEMIATLSDACEREFGFLATRLFRVFKTEDTQGKKKWKKTCCLPSFVIFLFIIGCIISGITLLAIFRVDPKHLTVNAVLISIASVVGLAFVLNCRTWWQVLDSLLNSQRKRLHNAASKLHKLKSEGFMKVLKCEVELMARMAKTIDSFTQNQTRLVVIIDGLDACEQDKVLQMLDTVRVLFSKGPFIAIFASDPHIIIKAINQNLNSVLRDSNINGHDYMRNIVHLPVFLNSRGLSNARKFLVTSATNGDVPCSDTTGIQEDADRRVSQNSLGEMTKLGSKTALNRRDTYRRRQMQRTITRQMSFDLTKLLVTEDWFSDISPQTMRRLLNIVSVTGRLLRANQISFNWDRLASWINLTEQWPYRTSWLILYLEETEGIPDQMTLKTIYERISKNIPTTKDVEPLLEIDGDIRNFEVFLSSRTPVLVARDVKVFLPCTVNLDPKLREIIADVRAAREQISIGGLAYPPLPLHEGPPRAPSGYSQPPSVCSSTSFNGPFAGGVVSPQPHSSYYSGMTGPQHPFYNRPFFAPYLYTPRYYPGGSQHLISRPSVKTSLPRDQNNGLGSGPAPGPVVLLNSLNVDAVCEKLKQIEGLDQSMLPQYCTTIKKANINGRVLAQCNIDELKKEMNMNFGDWHLFRSTVLEMRNAESHVVPEDPRFLSESSSGPAPHGEPARRASHNELPHTELSSQTPYTLNFSFEELNTLGLDEGAPRHSNLSWQSQTRRTPSLSSLNSQDSSIEISKLTDKVQAEYRDAYREYIAQMSQLEGGPGSTTISGRSSPHSTYYMGQSSSGGSIHSNLEQEKGKDSEPKPDDGRKSFLMKRGDVIDYSSSGVSTNDASPLDPITEEDEKSDQSGSKLLPGKKSSERSSLFQTDLKLKGSGLRYQKLPSDEDESGTEESDNTPLLKDDKDRKAEGKVERVPKSPEHSAEPIRTFIKAKEYLSDALLDKKDSSDSGVRSSESSPNHSLHNEVADDSQLEKANLIELEDDSHSGKRGIPHSLSGLQDPIIARMSICSEDKKSPSECSLIASSPEENWPACQKAYNLNRTPSTVTLNNNSAPANRANQNFDEMEGIRETSQVILRPSSSPNPTTIQNENLKSMTHKRSQRSSYTRLSKDPPELHAAASSESTGFGEERESIL

SEQ ID NO: 33850 - protein, 543 aa, Homo sapiens
MLPQYCTTIKKANINGRVLAQCNIDELKKEMNMNFGDWHLFRSTVLEMRNAESHVVPEDPRFLSESSSGPAPHGEPARRASHNELPHTELSSQTPYTLNFSFEELNTLGLDEGAPRHSNLSWQSQTRRTPSLSSLNSQDSSIEISKLTDKVQAEYRDAYREYIAQMSQLEGGPGSTTISGRSSPHSTYYMGQSSSGGSIHSNLEQEKGKDSEPKPDDGRKSFLMKRGDVIDYSSSGVSTNDASPLDPITEEDEKSDQSGSKLLPGKKSSERSSLFQTDLKLKGSGLRYQKLPSDEDESGTEESDNTPLLKDDKDRKAEGKVERVPKSPEHSAEPIRTFIKAKEYLSDALLDKKDSSDSGVRSSESSPNHSLHNEVADDSQLEKANLIELEDDSHSGKRGIPHSLSGLQDPIIARMSICSEDKKSPSECSLIASSPEENWPACQKAYNLNRTPSTVTLNNNSAPANRANQNFDEMEGIRETSQVILRPSSSPNPTTIQNENLKSMTHKRSQRSSYTRLSKDPPELHAAASSESTGFGEERESIL

SEQ ID NO: 33851 - protein, 366 aa, Homo sapiens
MWPLWLCWALWVLPLAGPGAALTEEQLLGSLLRQLQLSEVPVLDRADMEKLVIPAHVRAQYVVLLRRSHGDRSRGKRFSQSFREVAGRFLASEASTHLLVFGMEQRLPPNSELVQAVLRLFQEPVPKAALHRHGRLSPRSAQARVTVEWLRVRDDGSNRTSLIDSRLVSVHESGWKAFDVTEAVNFWQQLSRPRQPLLLQVSVQREHLGPLASGAHKLVRFASQGAPAGLGEPQLELHTLDLRDYGAQGDCDPEAPMTEGTRCCRQEMYIDLQGMKWAKNWVLEPPGFLAYECVGTCQQPPEALAFNWPFLGPRQCIASETASLPMIVSIKEGGRTRPQVVSLPNMRVQKCSCASDGALVPRRLQP

SEQ ID NO: 33852 - protein, 332 aa, Homo sapiens
MWPLWLCWALWVLPLAGPGAALTEEQLLGSLLRQLQLSEVPVLDRADMEKLVIPAHVRAQYVVLLRRSHGDRSRGKRFSQSFREVAGRFLASEAALHRHGRLSPRSAQARVTVEWLRVRDDGSNRTSLIDSRLVSVHESGWKAFDVTEAVNFWQQLSRPRQPLLLQVSVQREHLGPLASGAHKLVRFASQGAPAGLGEPQLELHTLDLRDYGAQGDCDPEAPMTEGTRCCRQEMYIDLQGMKWAKNWVLEPPGFLAYECVGTCQQPPEALAFNWPFLGPRQCIASETASLPMIVSIKEGGRTRPQVVSLPNMRVQKCSCASDGALVPRRLQP

SEQ ID NO: 33853 - protein, 418 aa, Homo sapiens
MRESQDAAGAHGWNRVGSTATKWFTGAPFGVQSHRFDISAVYPNWKKFSTFTEAPYSTRYSTQVSHIGPGTYSSKETCFSKKKLMKEVDTGWAKAQEATRLTQLPHFQYQAIMKEKRLKEQKLGPGSYNLKDFLEQLREKPCSTRGLLSSGEVRFRGLTGNYYPGPGNYGEKGNPYTKLEENAWNRSHSEGLMCRMSNKPHPRPHQGSGLGPGTYFFKSDLETYVARSVGTRGPYDTFSGDRSKPLPYGHYSMQKKKPRELMNFKSFVEELNSHHNKKHGVFSKLPRNPKTPTERIYWANLSQCPRTLATSGPSFWLPQEKKCKPVNQPPFLLTSKGSGAKACQMIMGSWNPVGVGRYLNTWLMETKDRRQRYRSLFLSGSKRYLSDLARDMLMQERITPFTKGKCPPTVDYNSDPTP

SEQ ID NO: 33854 - protein, 414 aa, Homo sapiens
MRESQDAAGAHGWNRVGSTATKWFTGAPFGVQSHRFDISAVYPNWKKFSTFTEAPYSTRYSTQVSHIGPGTYSSKETCFSKKKLMKEVDTGWAKAQEATRLTQLPHFQYQAIMKEKRLKEQKLGPGSYNLKDFLEQLREKPCSTRGLLSSGEVRFRGLTGNYYPGPGNYGEKGNPYTKLEENAWNRSHSEGLMCRMSNKPHPRPHQGSGLGPGTYFFKSDLETYVARSVGTRGPYDTFSGDRSKPLPYGHYSMQKKKPRELMNFKSFVEELNSHHNKKHGVFSKLPRNPKTPTERIYWANLSQCPRTLATSGPSFWLPQEKKCKPVNQPPFLLTSKGSGAKACQMIMGSWNPVGVGRYLNTWLMETKDRRQRYRSLFLSGSKRYLSDLARDMLMQIRLFCWKGLEVINFGLSPM

SEQ ID NO: 33855 - protein, 407 aa, Homo sapiens
MVNEYKKILLLKGFELMDDYHFTSIKSLLAYDLGLTTKMQEEYNRIKITDLMEKKFQGVACLDKLIELAKDMPSLKNLVNNLRKEKSKVAKKIKTQEKAPVKKINQEEVGLAAPAPTARNKLTSEARGRIPVAQKRKTPNKEKTEAKRNKVSQEQSKPPGPSGASTSAAVDHPPLPQTSSSTPSNTSFTPNQETQAQRQVDARRNVPQNDPVTVVVLKATAPFKYESPENGKSTMFHATVASKTQYFHVKVFDINLKEKFVRKKVITISDYSECKGVMEIKEASSVSDFNQNFEVPNRIIEIANKTPKISQLYKQASGTMVYGLFMLQKKSVHKKNTIYEIQDNTGSMDVVGSGKWHNIKCEKGDKLRLFCLQLRTVDRKLKLVCGSHSFIKVIKAKKNKEGPMNVN

SEQ ID NO: 33856 - protein, 907 aa, Homo sapiens
MDTSRLGVLLSLPVLLQLATGGSSPRSGVLLRGCPTHCHCEPDGRMLLRVDCSDLGLSELPSNLSVFTSYLDLSMNNISQLLPNPLPSLRFLEELRLAGNALTYIPKGAFTGLYSLKVLMLQNNQLRHVPTEALQNLRSLQSLRLDANHISYVPPSCFSGLHSLRHLWLDDNALTEIPVQAFRSLSALQAMTLALNKIHHIPDYAFGNLSSLVVLHLHNNRIHSLGKKCFDGLHSLETLDLNYNNLDEFPTAIRTLSNLKELGFHSNNIRSIPEKAFVGNPSLITIHFYDNPIQFVGRSAFQHLPELRTLTLNGASQITEFPDLTGTANLESLTLTGAQISSLPQTVCNQLPNLQVLDLSYNLLEDLPSFSVCQKLQKIDLRHNEIYEIKVDTFQQLLSLRSLNLAWNKIAIIHPNAFSTLPSLIKLDLSSNLLSSFPITGLHGLTHLKLTGNHALQSLISSENFPELKVIEMPYAYQCCAFGVCENAYKISNQWNKGDNSSMDDLHKKDAGMFQAQDERDLEDFLLDFEEDLKALHSVQCSPSPGPFKPCEHLLDGWLIRIGVWTIAVLALTCNALVTSTVFRSPLYISPIKLLIGVIAAVNMLTGVSSAVLAGVDAFTFGSFARHGAWWENGVGCHVIGFLSIFASESSVFLLTLAALERGFSVKYSAKFETKAPFSSLKVIILLCALLALTMAAVPLLGGSKYGASPLCLPLPFGEPSTMGYMVALILLNSLCFLMMTIAYTKLYCNLDKGDLENIWDCSMVKHIALLLFTNCILNCPVAFLSFSSLINLTFISPEVIKFILLVVVPLPACLNPLLYILFNPHFKEDLVSLRKQTYVWTRSKHPSLMSINSDDVEKQSCDSTQALVTFTSSSITYDLPPSSVPSPAYPVTESCHLSSVAFVPCL
